United States Patent Application Publication US 2008/0276334 A1 - sequence listing, part 5

SEQ ID NO: 27644 - DNA, 472 bp, Glycine max
  unsure (1)..(472): unsure at all n locations
  Clone ID: LIB3051-075-Q1-K1-E7
ctacctctcaagtttttgaagtatagagatggcagagacattcctatttacctcagagtcagtgaacgagggacaccctgacaagctctgtgaccaaatctctgatgctgtcctcgacgcttgcctcgaacaggacccagacagcaaggttgcctgcgaaacatgcaccaaaaccaacttggtcatggtcttcggagaaatcacgaccaaggccaatgttgactacgagaagatagtgcgtgacacctgcaggaacatcggctttgtctcaaacgatgtgggactggatgccgacaactgcaaggtcctcgtcaacattgagcagcagagccctgatattgctcaaggtgtacacggncacctnaccaaaaaacctgaagaaattggtgctggtgaccagggtcacatgtttggctatgccactgatgaaacccctgaattgatgccatngagccatgttcttgaacaaaac

SEQ ID NO: 27645 - DNA, 156 bp, Glycine max
  Clone ID: LIB3051-075-Q1-K1-F10
cccacgcgttcgcccacgcgtgcgggaagatcagcttgagtaccttgaggagcgtcgcttgacggatctgatcaagaagcattctgagttcattagctacccaatttgtctttgcattgagaaaactactgagaacgagatctctgacgatgagga

SEQ ID NO: 27646 - DNA, 474 bp, Glycine max
  Clone ID: LIB3051-075-Q1-K1-F11
cccacgcgtccggttttccatggctcgtaccaagcaaaccgctcgcaaatccaccggtggaaaggctcctaggaagcaactcgccaccaaggctgcaaggaaatctgcaccgacaaccggtggagtcaagaagcctcatcgctatcgccctggaactgttgctcttcgtgagatccgaaaataccaaaagagcacagagcttctgatccgcaagctccccttccagcgtcttgttcgtgaaattgcgcaagacttcaagaccgatttgaggttccagagtcacgctgttcttgcgcttcaggaagctgcggaggcttacttggtgggtttgtttgaggacaccaacttgtgtgcgattcacgccaagagggtgaccatcatgccaaaggacattcaactcgcacgccgcattcgtggagaacgtgcttaggctaataataagagtaataacgtaattgctgctgctttttttcg

SEQ ID NO: 27647 - DNA, 342 bp, Glycine max
  Clone ID: LIB3051-075-Q1-K1-G3
attctctctgtgtatttccctacctctcccttcaagatgcagatcttcgtcaagaccctcaccggcaagaccatcacccttgagggggaaagctctgacaccatcgacaacgtcaaggccaagatccaggacaaggaaggaatcctcccggaccagcaacgtctcattttcgccggaaagcaacttgaggacggccgtacccttgctgactacaacattcagaaggagagtactcttcacctcgtcctccgtctacgtggtggcatgcagatcttcgttaagacactcaccggcaagaccataaccctagaggttgaaagctccgacaccatcgataacgtc

SEQ ID NO: 27648 - DNA, 359 bp, Glycine max
  Clone ID: LIB3051-075-Q1-K1-G9
gccacgcgttcggttttccatggctcgtaccattcaaacctttcgcaaatccaccgttgcaaagtctccttggaagcaactcgccggcaaagctgcaaggaaatctgcaccgacaaccggcggagtcaagaagcctcatcgctatcgccctggaactgttgctcttcgtgagatccgaaaataccaaaagagcacagagcttctgatccgcaagcttcccttccagcgtcttgttcgtgaaattgctcaagacttcaagaccgacttgaggttccagagtcacgctgttcttgcgcttcatgaagctgctgaggcttactcggtgggtttgtttgaggacaccaacttgtgtgcgattt

SEQ ID NO: 27649 - DNA, 390 bp, Glycine max
  Clone ID: LIB3051-075-Q1-K1-G10
aacctcgtttccttaatccattctttgctccctcgaactgctgtttggtctcttgactcttagtgcatggcatcaacgtttctcaccctaccaactcccttcctacacaaaactaatgccatcactttctctgacaagagaccctcatttttgcagaggagctctctgaagatcaatgcaattaccaaaaaatgggaacccactaaggctgtacctcacgctgatagagttcttgatcgtttggaggagctatcagataaaacagttggtggagttttgctgcccaagtcagctgttaaatttgagcgatatcttgtgggagaaatgctaactgttggtgctgaagctggagaactaaaggctggaacaaaggtactattcactgacatg

SEQ ID NO: 27650 - DNA, 384 bp, Glycine max
  Clone ID: LIB3051-075-Q1-K1-H1
gagtaattgtaaatggttttggcttgcccggattcattaaacggtgcgtgtaactcgtggctcgtgccacctgaccttatataaccactcagatcagtcgaacatttcttcacttcttcgttttcgacgatccccttctccttctctctctctttttcgcctcattccattttcatctatcaatggctccagtagcagcagcatcttcagattcaatcaagccaagagatgtttgcatcgttggtgttgcacgtacaccaatgggtggatttcttggtactctgtcatctctatctgccaccaagctaggctctatagctattgaagctgctcttaaaagggccaaatgtgatccatcccctggggaagaagtatttttgggga

SEQ ID NO: 27651 - DNA, 426 bp, Glycine max
  unsure (1)..(426): unsure at all n locations
  Clone ID: LIB3051-075-Q1-K1-H12
aaactagaagtattattattcttccatttccattaaaaagaaaatatcataaatgggtattttcacattcgaggacgaaatcacctcccctgtggctcctgctactctttacaaagctctagttacagatgccgacaacatcatcccaaaggctcttgattccttcaagagtgttgaaaacgttgagggaaatggtggccctggaacaatcaagaagataactttcgttgaggatggagaaaccaagtttgtactgcacaagatagaagcagttgatgaggcaaacttgggatatagctacagcgtagtgngtggtgctgcgttgccagacacagcggagaagatcacattccactccaaattggctgctggtcccaatggaggctctgctggcaagctaactgtcgaataccaaaccaaaggaga

SEQ ID NO: 27652 - DNA, 457 bp, Glycine max
  Clone ID: LIB3051-077-Q1-K1-A11
ctcatctttctctcttctctctccacccaaaccctaactcccgaccctgttcccctcgggtatgcgtcatgaaaggaggaaagtccaagaccgaatctaagagagccgatcccaaacttgctgtgaataagaagggagccgccaccaaggctaggaaacccgccggcaaggggaaggcagcgaaagaccctaacaagccaaagaggcctccaagtgctttcttcgttttcatggaggagttcaggaaggtattcaacaaagaacatcctgaaaacaaagcagtgtctgctgtgggcaaagctgctggagcaaaatggaagaccatgtctgatgctgaaaaagcaccttatgtggcaaagtctgagaaaaggaaagtggagtacgagaagaacatgagagcctataacaagaaacaggcggaaggtcctactggtggggatgaagaagaatctgagaa

SEQ ID NO: 27653 - DNA, 428 bp, Glycine max
  Clone ID: LIB3051-077-Q1-K1-B8
ccattttcaagctctcaacgccatctccagctgcttccttatcagaagcgcttcgcccgagaggttctcgcttcctctccttcaatccttcttccaacgctattaattacaaaattaacctctccgcttccctccgatccattcactccctccctcttaaaacctccttgcggatcaaatgctcccaaacagatgggaatggaagtcctgcaaagaggacagtgcttcatgatctttatgagaaagataggcagagtccatggtatgataatctctgcagacctgttacagaccttcttactcttatagcaagtggtgtcagaggcgtcactagcaaccctgcgatttttcagaaagctatctcatcatcgaatgcttacaatgatcagttcaaggaacttgtgcaagcatggaaagacattgaaagt

SEQ ID NO: 27654 - DNA, 480 bp, Glycine max
  Clone ID: LIB3051-077-Q1-K1-C4
gtgagaaacaaagaaaggaaataattgatctttgaaaatgcagggaggaaagaaagctggagagtccagcaaggaaacagctgcaaacattggtgcttctgccaaggctggcatggagaaaaccaaggccactgtccaggagaaggcagaaagaatgacggcacgtgatccgatgcaaaaggagttggcaacccagaagaaagaggcaaagatgagccaggcagagctggacaagcaggcggcgcgtcagcataacacggcggcgaatcatgctgccacggcagggcacatgggacaacccatggggacccatcagacgtcagctatgcccggtcatggaaccggacagcccacgggccatgtcaccgaaggagtggtgggctcacaccctattggaaccaacagaggcccgggtgggactgctacggcccataatacccgtgcggggggaaacccaaatgattatgggtatggaactgg

SEQ ID NO: 27655 - DNA, 414 bp, Glycine max
  Clone ID: LIB3051-077-Q1-K1-C9
caagagacgaggaatctggtctcaacaaggcagggaagttccctacacttgtgactcaccaaggatctctcgagtcaaaggttaatgagaccaaggccatggtcaagttccagcttaagaaggttctctgcatgggagtagctgtggggaatgttagcatggaggaaaagcaaatcttccaaaatgtacaactgagtgttaacttccttgtctctttgctgaaaaagaattggcagaacgttcgctgcctatatctgaagagtaccatggggaaatcgtaccgtgtcttttgagtagtggttcttaaaattcagtgaatttctgattgcacttaatatattgtcatgataggttggacagaatttttcatcgttctacagttttgttggatgagtattttttggctagtatttc

SEQ ID NO: 27656 - DNA, 452 bp, Glycine max
  Clone ID: LIB3051-077-Q1-K1-D9
aagaaaatggcggtgcctttactctcgaagaatatcgtgaagaagagggtcaagaaggtgaaggggccttagagtgacaggaaaatttctgtcaagacaaactggcgcagaccaaagggtatcgattcccgtgttacgagaaagtttaagggatgcactctgatgccaatcattggttatggctcagacaataagacccgacactatctccctaatggctttaagaaatttggtgttcacaatgtgaaggacttggaactgctcatgatgcacaacatgacttactgcgctgagattgcccacaatatatccacagaaaagaggaatgatataggcgagagagccgcgcatatagatgttgtagcgacaaacagaacagccatattactcaaacaggaggatgaatagtctaaatgactaaagaagtcacttatctacaatgactcaatagt

SEQ ID NO: 27657 - DNA, 468 bp, Glycine max
  Clone ID: LIB3051-077-Q1-K1-E2
gaagaagaacgcagaagccacgatgagtggcagagccatgatctcctgtttctctcctccttgagcagctccatgctctgggcccattccactctggcgccgaaaccacctcctccatgcaactcctccaccttcgctacaccttctctcgcggcggagccacctcgttgccggcggaaggagggtgtgggtgaatgtgaagtccgagaagaacttatccgaatcccccaagtacgaggatgatgtcgtggttcagaagaagaagaagcgtggtttggataacgtggaagaggaagcgaggtggtggcaagtgtttcccaaaagatgggtcattgtggttctctgcttctcagcttttcttctatgtaacatgaataatattctgtcaaaatgggttcctgtgtcagagagaagtagatcactagcgctggtctacagtggcatgtatctgggatcagtcactggact

SEQ ID NO: 27658 - DNA, 413 bp, Glycine max
  Clone ID: LIB3051-077-Q1-K1-F2
tcccacgcgtccgcccactcgtccgctaagattcaagacatggaagggatcccaccttaccatggtaggcttatctttgcgggtaaacaacttgaggatggtcgcacccttgccgattacaacatccaaaaggaatcaaccctccatctcgtgcttcgcctcatgggtggcatgcaaatctttgtcaagactttgaccgggaagaccatcacccttgaggtggaatcctcggacaccattgataatgttaaggccaagatccaagacaaagatggcatccccccatatcatcacaggctgatttttgccggtaaacaacttgaggatggaagaacccttgctgattacaacattcagaacgattccacccttcacttggtgcttcgtttgagaggtggtatacagattttcgt

SEQ ID NO: 27659 - DNA, 443 bp, Glycine max
  Clone ID: LIB3051-077-Q1-K1-F9
aagaaaatggcggtgcctctactctcgaagaagatcgtgaagaagagggtgaagaagttgaagaggcctcagagtgactggaaaatttctgtcaagacaaactggcgcagaccaaagggtatcgattcccgtgttaggagaaagttcaagggatgcactttgatgccaaacattggttatggttcagacaagacgacccgccactatctccctaatggttttaagaaatctgttgttcacaatgtgaaggacttggaactgctcatgatgcacaacaggacttactgtgctgagattgcccacaatatatccacaagaaagatgaaagatatagttgagagagccgcgcagcttgatgttgttgtgacttacataacagtcagattacgcaaccaagaagatgaatagtctaaatgactaaaaaagtcacttatctgtagtga

SEQ ID NO: 27660 - DNA, 395 bp, Glycine max
  Clone ID: LIB3051-078-Q1-K1-A10
tatgcgcttaatgaaggaatgggttgtgtctgtggccatgatccatttgatataggttggtgtttctttggcggtgggagggcctctggatcatgtgtaagtagtctaggtaggtaggcattaagcactcgataagacgtggttcaccctctcaaggtctctttggaggacctttatcttggaactttcaagaagctctccctctccagaaatgttatatgctccaagtgcagtggcaaaggttctaagtctgactcttctatgaactgtgctgattgtcaacgaactgatatgaaagtttctataagacatcttgtcccattcatgattcagctaatgcagcatgcctgcattgaatgtaaaggtacttggataaactattaatgacagatatc

SEQ ID NO: 27661 - DNA, 437 bp, Glycine max
  Clone ID: LIB3051-078-Q1-K1-B6
gcgagcgagcgagcagtttcaaagagaggatttgggattgggaaggcgagggattgcgctgcgtctcttcctctgctctttcgattcatccctcattcataatcttccaatccaacaacctcagcctcacactcacacatacacacatctgaacgcgtatcgtccctcccatggcttcaaagcgcatcctcaaggagctcaaggacttgcagaaagacccaccaacttcttgcagcgctggtccagtagctgaggacatgttccattggcaagcaacgattatgggtcctgctgatagtccttatgctggaggtgtattcctagtcactattcactttcctccggatgatcctttcaaacctcccaaggttgcctttaggactaaggtgtttcatccgaacatcaacagcaatggtagcatttgtcttgatatccta

SEQ ID NO: 27662 - DNA, 359 bp, Glycine max
  Clone ID: LIB3051-078-Q1-K1-B7
gcgagcgagcgagcagtttcaaagagaggatttgggattgtgaacgcgaggcagtgcgcggcgtctcttcctcttctctgtcgattcatccctcattcataatcttccaatccaacatccttagcctcacactcacacatacacacatctgaacgcgtatcgtccctcccatggcttgaaagcgcatcctcaaggagctcaaggacttgcagaaagacctaccaacttcttgcagagctggtccagtagctgaagacatgttccatcggcaagcaacgattatgggtcctgctgatagtacttatgctggaggtgtattgctagttactattcactttcctccggattatcctctcaaa

SEQ ID NO: 27663 - DNA, 357 bp, Glycine max
  Clone ID: LIB3051-078-Q1-K1-C4
atattcagaaggagtctaccttacacttggttcttcgtttaagaggtggcatgcagatgttcgtcaagactttgacgggaaagaccatcaccttggaggtggagagttcagataccatagacaatgtgaaagccaagattcaagataaggagggtatccccccagaccagcagaggcttatctttgctggtaaacagcttgaagatggacgaacccttgcagattataacatccagaaggaatctaccctgcacttggttttgaggcttcgtggtggcatgcaaatctttgttaagactttgaccggaaaaacaataactttagaagttgaaagttctgataccatcgattacgtga

SEQ ID NO: 27664 - DNA, 380 bp, Glycine max
  Clone ID: LIB3051-078-Q1-K1-C12
caagttgtttgatcatacgtgttttctttatgttaagggatactgtcgcgaagagaggggccactaagggcttgtaatgggtggttctatcgtctaccaaaaatttgccaagacttgtgactgtggttcacctatatcaactctgaagtgctggatagaggaagatgaataatagtagttttcttaagtgtctttattatgtccttgctaaaataagtccagttttacagacagcgattgtttatctttggtgttttttaccttttatgttagaccattgttagggcagttggaccttttattgttctactattaccatttgaacatcgaatggattttaattaattatacacaatattatggaaatttatttcttatta

SEQ ID NO: 27665 - DNA, 427 bp, Glycine max
  Clone ID: LIB3051-078-Q1-K1-D1
cgtgatcttagatgttctatgtatcatttgcgcaggtaagttggaaaaaaatggaccatgacaagactgggtgccaagctcctcctgaaggtcctatattgtgcatcaacaactgtggattttttggaagtgcagctaccatgaatatgtgttctaaatgccacaaagacatgttgctgaaacaggagcaggccaagcttgcagcatcatccattgggaatattatgaatgggtcttcaagcagcactgaaaaggaacctgttgttgccgctgctgctgctaatgttgatatcccagttattccagtagagcctaaaactgtctctgtgcaacctttatttggttcaagtccagaagggagtggtgaggcaaagctgaaggatggaccaaaacgctgcagcagctgcaacaagcgagttggtttgac

SEQ ID NO: 27666 - DNA, 383 bp, Glycine max
  Clone ID: LIB3051-078-Q1-K1-H11
atgcgcttaaggaaggaatgggtggtggcggtggccatgatccatttgatatctgttcgtctttctttggcggtgggagtgcctttggatcatgtggaagtagtcgaggtaggaggcataggcgcggagaagacgtggttcaccctctcaaggtctctttggaggacctttatcttggaacttccaagaagctctccctctccagaaatgttatatgctccaagtgcagtggcaagggttctaagtctggtgcttcgatgaagcgtgctggttgtcaaggaactggtatgaagggttctataagaacatctggcccatccatgattcagcagatgcagcatgcctgcaatgaatgtaagggtactggaaaaactatcaatgac

SEQ ID NO: 27667 - DNA, 387 bp, Glycine max
  Clone ID: LIB3051-079-Q1-K1-A10
gttttgatgcaacgctgtcactgagaaaggatctctatctacgaaggagcggaataaagcccttctctctgtgattaagagaatggcttcagatcggaaacttcacacttttgaggaggtggcaaagcacaaccagaccaaggattgctggctcatcatttctggcaaggtgtatgatgtcacccctttcatggaggatcatcccggaggtgatgaggttttgttatctgcaacagggaaagatgcaaccaatgactttgaagatgtggggcacagtgattctgctagagatatgatggaaaaatactacattggtgagattgatgcatcaaccgttccactaaaacggacctacattccacctcagcaagctcaatacaatcctga

SEQ ID NO: 27668 - DNA, 328 bp, Glycine max
  Clone ID: LIB3051-079-Q1-K1-B6
tcgcccacgcgtccgcggacgcgtgggttcaatcaacggttatacccttttctatttgagcgtcatgatgtccaccgcagcgcagcccaaggccaagaaaacggcgtcgtccaagaagcccctctcccatcctaccttcgccgcgatgatagcggaggcgatagcgagtctgaaggagagaaccggttcgagccaatacgcgataaccaaattcatcgaaggcaagcacaaggagttgcctccaacctacaagaagcttgttctcgttcatctcaagaagtctgttgctgctggcaagctcgttaaggtcaaaaactctttcaagctc

SEQ ID NO: 27669 - DNA, 386 bp, Glycine max
  Clone ID: LIB3051-079-Q1-K1-C3
cggacgcgtgggcggacgcgtgggcggacgcgtgggcggacgcgtgggcaccttcgaaaatcaattttctgtcttctctgcgtcttcttcctctatcaatcgttttccatggctcgtaccaagcaaaccgctcgcaaatccaccggtggaaaggctcctaggaagcaactcgccaccaaggctgcaaggaaatctgcaccgacaaccggtggagtcaagaagcctcatcgctatcgccctggaactgttgctcttcgtgagatccgaaaataccaaaagagcacagagcttctgatccgcaagctccccttccagcgtcttgttcgtgaaattgcgcaagacttcaagaccgatttgaagttccagagtcacgctgttcttgcgct

SEQ ID NO: 27670 - DNA, 382 bp, Glycine max
  Clone ID: LIB3051-079-Q1-K1-E3
gcgtcgctccgcaccagtttcaccgcacgaatatcttgttgtttggagcgatccgagagaaactctgtaaacatgttggtttaccaggacctccttacaggtgatgagcttctctctgactccttccgttacaaggaaattgagaatggaatgctgtgggaagttgaggggaagtgggttgttaaaggagcagttgatgtagacattggtgcaaacccttctgctgagggtggaggagaagatgagggagttgatgatgcagctgttaaggttgttgacattgttgacacattcagacttcaggagcaacccgcattcgataagaagcagtttgttaccttcatgaagaggtttatcaagaatttgactcccaagctcgatg

SEQ ID NO: 27671 - DNA, 481 bp, Glycine max
  unsure (1)..(481): unsure at all n locations
  Clone ID: LIB3051-079-Q1-K1-F1
tactcggtctcggaattctccgggtgcgactccacgtcgtctcgtcccacgtcgtctcgtcagtaaagtaaaagtaccattcaaagtgttcactttcagctcttatctcgtgtttgagggnntttcggttttgtgactccaacgtctttgatctgtatcgaaatctcttaanngtttcggatcccaggtctgagcnnaatctgnngttggtagaatctctttggnntcttagagtagtcaagttttactgtctgaattagtacgatcanaattcctatctgccttcgatcctttttgcntgatgcataatgtctgatgacttcgggtgtctgggtcaaaaggaagtatgtgcatattcgcgtaccagcagcgaaatggaaaggaaatagcctgacatactcgttcagggattgaaaaaagtaattcagctataacatagatacttaaaagatgttaagaaagagttctgttgcaatggaac

SEQ ID NO: 27672 - DNA, 294 bp, Glycine max
  Clone ID: LIB3051-079-Q1-K1-G4
ttcacgcgttcgaaagcactcagtagggtttgcggtttcagagtttgtgactcacgcagccatgttcaacaacatcaacgccgtctgagcctcttcgtgccagctctgacagaaagaagccgacatccagatgatgttagccgtcgacgtgcacctcggcaccaaaaactgcgacttccaaatggaacgttacatcttcaagcgccgcaactacgggatttacattattaaccttgggaagacatgggagaagcttcagttagcatctagggttattgttgcaattgagaaccc

SEQ ID NO: 27673 - DNA, 380 bp, Glycine max
  Clone ID: LIB3051-079-Q1-K1-G6
cccacgcgttcggtggcagaagtcctaggagtgtaaaacagagacgcataatgaagacgatcttgtcgtctgagaccatgaatattcccgacggcgtgagcatcaaggttcacgctaaggttatcgaggttgagggccctcgtggaaaactcgtgcgagacttccaccatctgaacttggacttccaacttattaccgacgatggcggtaaaaggaagctcaagattgattcttggtttggttctcgtaaaaccttcgacgtcatccgcaccgacctcagccacgtagagaatttgatcaccggcgtcaccaagggataccgatacaaaatgagattcgtgtacgcacattttccgatcaacgctagcattggcaacaac

SEQ ID NO: 27674 - DNA, 395 bp, Glycine max
  unsure (1)..(395): unsure at all n locations
  Clone ID: LIB3051-079-Q1-K1-G8
gaaatgctccttgtacatctctcttttggttttgcgggttcagagcttgtgactcgcgcagccatgtccaccaacatgtacgccgtctcagccccttcgtgccagctcttccagaaagaagccgacatccagatgatgttagccgtcgacgtccacctcggcaccaaaaactgcgacttccaaatggaacgttacatcttcaagcgccgcaactactggatttacattattaaccttgggaagacatgggagaagcttcagttagcagctagggttattgttgcaattgagaaccctcangatatcattgttcaatccgcaaggccttatggtcaaagagcggttctgaagtttgctcagtacactggtgctcatgctattgctggaaagcacac

SEQ ID NO: 27675 - DNA, 404 bp, Glycine max
  Clone ID: LIB3051-079-Q1-K1-G9
cccactcgtccggtggcagaagtcctactagtgtaaaacagagacgcataacgaagacgagctggtcgtatgagaccatgaatattcccgacggcgtgagcatcaaggttcacgctaaggttatcgaggttgagggccctcgtggaaaactcgtgcgagacttccaccatctgaacttggacttccaacttattaccgacgatggctgtaaaaggaagctcaagattgattcttggttaggttctcgtaaaacctccgacgtcatccgcaccgacctcagccacgttgagaatttgatcaccggcgtcaccaagggataccgatacaaaatgagattcgtgtacgcacatttttcgatcaacgctagcattggccacaacaacaaggtcatccagatcagaaat

SEQ ID NO: 27676 - DNA, 355 bp, Glycine max
  Clone ID: LIB3051-079-Q1-K1-H1
gttcatttctacacatccctagctctgtcgttccgtcgttgacgatggcgtttcgggtgcgaagccctgacctccggtctctctttcttctctctctcttgtccatcgcttccgccaatgtcttcttcgaagagcgtttcgatgacgggtgggaaaatcgatgggttaaatcagattggaaaaaagatgagaacgtggctggggagtggaaccacacctctggtcaatggaatggagacgctaatgacaaaggtattcaaaccagtgaggattacagattctatgctatttcagctgagtaccctgaattcagcaacaagggtaagacactagtctttcaattttctgttaagca

SEQ ID NO: 27677 - DNA, 304 bp, Glycine max
  Clone ID: LIB3051-079-Q1-K1-H8
atgcacttaaggaaggaatgggtggtgtccgtggccatgatccatttgatataggtgggtctttctttggcggtgggagtccctttggatcatgtgtaaatattaccggtaggaagcataagcgctgagaatacgtggttcaccctctcaaagtctctttggaagacctttatctttggactttcaagaagctctccctctccagaaatgtcatatgctccaagtgcaatggcaaaggttctaagtctggagcttcaatgaaacgtgctggttgtcaaggcactgatatgaacgcttctataag

SEQ ID NO: 27678 - DNA, 370 bp, Glycine max
  Clone ID: LIB3051-080-Q1-K1-A4
cttgttggtaaagaaagaaagagaagagaagaatcgaagactaagatggaggacgcatcagcgtcaaagttcattccacaccaaatcggaggggtccaaaacgacgcgcttcgattcggtctccatggagtcaagagcgacatcgttggttctcaccctcttgaatcttcactccaatctacaaggagaatggatgaagcgagtaagaggcaatgcaaagttaacctgtacggtactgcttttcccatgaaggacgagcttgacaggcaaatcctgtccaggttccagctgcctacttgaccaattccttcttcaatgctggttttggagactgttacaggaagtgttgatcactttggtatttaggatt

SEQ ID NO: 27679 - DNA, 410 bp, Glycine max
  Clone ID: LIB3051-080-Q1-K1-A7
gagagtgagagaaaagagaagagaagatgacaacacgcttcaagaagaacaggaggaagaggggccacgtcagcgctggccacggtcgaatcgtaaagcacaggaagcaccctggaggacgcggtaacgccggaggcatgcaccaccacaggatccttttcgacaaataccaccctgggttcttcggcaaggtaggaatgcgctattttcacaagcttcgcaacaaattctactctccgatcctcaacatctacaagctgtggtccctggtcccgcaagaagtgaaggacaaggcctccaaggagaacaaggcgccgctcatcgacgtcacgcagttcgggtactttaaagttctcggaaagggcgttttgtcgcataaccagcccgttgtggtcaaggccaagcttatt

SEQ ID NO: 27680 - DNA, 372 bp, Glycine max
  Clone ID: LIB3051-080-Q1-K1-A9
tcgctcacgcgtccgtccactcgtccgctgctcgtgcctctagggttatcatatctccatttccagggcctctctctcagtttccaagaatcttaatctatggtaaagtcttacccaaccgtgagcgctgattaccatgttgccgttgagaatgcgaataataagctcataggcttcatcgctgataagagattcgctcctctaatgctccgcttggcatgtcactctgctggaacttactacgtgagctctaagaccggtggtcccttctgaaccataaagcactcctcctaactcgctcacggctctaacaactgccttgacattcctgttaggcttttgtagccacttaaagctgattttactattttg

SEQ ID NO: 27681 - DNA, 455 bp, Glycine max
  unsure (1)..(455): unsure at all n locations
  Clone ID: LIB3051-080-Q1-K1-E10
agagaaacaaatggcagcactgggtggctttaccgacatcaccggagcacagaacagcatcgagtatcgaaaatctcgctcgctttgctgttgatgaacacaacaaaaaagagaatgcagttctggagtttgtgagggtgattagtgcaaagaaacaagtggtttctggcaccttgtactatatcactttggaggcaaatgatggtgtgacgaaaaaggtttatgaaactaaggtgttggagaaaccatggttgaacatcaaggaggttcaggaattcaagcccatcactgttgctgttaatcctctntcggtgacggtctagcacatagctaggttatggaagtgactagcttggccgcaagagtaataatatgtatgaactgaataaatgtacctattaactctacaaacggtgtgggggtgtgcatgtttgccatcctatatatttcagttt

SEQ ID NO: 27682 - DNA, 428 bp, Glycine max
  Clone ID: LIB3051-080-Q1-K1-E12
gccacgcgtccgtccacgcgttcgcaagtactttcttacaatcaaaaccaacaacaactatggcgagttgggaaaagcactacgatgagcagggtcgcaaggttgacgagtatggcaacgttgagaagcaaaccgacgaatacggtaaccctgttcatgctgctagtgtcacctatgtagccaccagaactgctgctggtggttacagtgatgacattaataagcaacatgataccaccaatgcctacggcgtagacactggtagacagcattctagtggtggctacgatggtgacactaataaacatcatggaactactggtggctataatgatgacaccaatagacattatggaactaccggtgtctatggtatagacaccgataggcaacaacatgggactactggtggctatgccggtgacact

SEQ ID NO: 27683 - DNA, 431 bp, Glycine max
  Clone ID: LIB3051-080-Q1-K1-F10
agcagagtctcttgtgattgttgaatacattgatgagacatggaagaacaaccccatcttagcttctgatccttaccaaagagccttggctcgtttctggtccaaattcattgatgataagattgtgggtgctgtatcgaaatctgttttcacggttgatgagaaagagcgtgagaagaatgttgaagaaacatatgaggctcttcagtttcttgagaatgagctgaaggacaagaagttttttggaggagaggaatttgggttggtagatattgctgctgtcttcatagcattttggatcccaatttttcaggaaatagcagggttgcagttattcaccagtgagaaatttcctatactctacaaatggagccaaaaattccttaaccacccttttgtgcacaaagtccttcctactagagacccacttt

SEQ ID NO: 27684 - DNA, 438 bp, Glycine max
  Clone ID: LIB3051-080-Q1-K1-F11
atcatgcaccagaagatgtgccaaaagcattggataaaacattacaggaattgcaacttgacggtcttgacctctatctgatccactggccagtccgcatgaaaagtggaacatttggactcaataaagaatatcttgagcaaccagacattcccaatacatggagagcaatggaggcactctatgactcagacaaggctagagccataggagtgagcaatttctcttcaaagaagcttcaagatttgttagatatagcaagagtggttcctgctgttaaccaagtggaattgcacccaggatggcagcagccaaagttgcgcgcattttgtgaatctaaagaaattcatctatctggatattctccactaggttcaccagcagctctcaaaagtgatattcttaagaatcctgttgtcacagagattgcagagagat

SEQ ID NO: 27685 - DNA, 209 bp, Glycine max
  Clone ID: LIB3051-080-Q1-K1-F12
cacgcgtccgtccacgcgtccgacatattcgtgatataccatttaccacaccaaaaccgggctgatcgggtgctctgcggagtcaggaatccgtggatccctacaagaagcggccatcaagcgccgtcaatgctcccttctggactactaattccggtgctgccatctggaacaacaacttatcgctgactgttggagctataggttca

SEQ ID NO: 27686 - DNA, 471 bp, Glycine max
  Clone ID: LIB3051-080-Q1-K1-H7
cttcaaatcacacactctcttcaatttctagggttttgctattgctttgcctccgttcccccgttctcacaaaaacaacgccttttctcttctccttcgtatctattctttgcgtttggtttttggttgattgaaggcattcacagcgtaattcgttgctgcattttaatcgatttatctaaccaggactgaatgacctaatggagtctaaaggtgggaaaaagaagtctagtagtagtagtagtaaatcaattttttacgaagctcccctcggatacagcattgaagacgttagaccaaacggtggaatcaagaaattcagatctgctgcttactctaactgttctcgcaaaccatcctgatacacatccggattgatagttcgttgcatgcaaccatagttttattaggattttttcttctttggtttcaattaggtttttttgttgctctccttcaaactccatcttt

SEQ ID NO: 27687 - DNA, 428 bp, Glycine max
  Clone ID: LIB3051-080-Q1-K1-H8
gagaaaaggaaagtggagtacgagaagaacatgagagcttataacaagaaacaggcggaagggcctactggtggggatgaagaagaatctgagaagtctgtatctgaggtgaatgatgaggatgatgactaggaatgcagtggcgaggaggaggatgacgattagagaatggactgatgataattgcagttatgtaggatctgatgattttgatcatccgtagtaggatgtctggtcatttgcttataaacatatttctctttccaaaaaatattgccctgctccttcttacgtaaatggctcgtatttccaagtcgtgtatagtttaaagaagggagttctctttatttgtatttctaaatccaactgattagttaaaggatgggtatctcttgtagagcttttaagttgatttatagtttttttgt

SEQ ID NO: 27688 - DNA, 459 bp, Glycine max
  Clone ID: LIB3051-081-Q1-K1-A2
ttcttgcgcaccttgcagaatcaattttctctctcaatcgtctttcatggctcgtaccaagcgaaccgctcgcatatccaccggtgggaaggctcctaggaagcaactcgccaccaaggctgcaagaaaatctgcacctaccaccggtggagtcaagaagcctcatcgctatcgtcctggaactgttgctcttcgtgagatccgaaaataccaaaagagcacagagcttctgatccgcaagctcccctttcagcgtcttgttcgtgaaatcgcgcaagacttcaagactgatttgaggttccagagtcacgcggttcttgcgcttcaggaagctgcggaggcttacttggtgggtttgtttgaagacaccaacctttgtgcgatccacgccaagagagtgaccatcatgcccaaggacattcaactcgcacgccgcatccgtggagaacgtgcttaggc

SEQ ID NO: 27689 - DNA, 312 bp, Glycine max
  Clone ID: LIB3051-081-Q1-K1-B4
gctttctgagcttgggtttgctgaaccctaactaccgttttggggttggttggaaagccacgtggcccttagtattcctctcataaatcctatggtcatggtttctaatgcgccactgtgggttcctcaaatttttagatagcttttgaatgtattttgctggacgtggtgatgatgattggagttgggttgtttttatttgtggtcgatccttttgttaaataacattgttcagcgattgcgatattattaccctttgtagtatgtgaccatttaccgtaataactagtaatttgtctattattactggac

SEQ ID NO: 27690 - DNA, 448 bp, Glycine max
  unsure (1)..(448): unsure at all n locations
  Clone ID: LIB3051-081-Q1-K1-C6
ggggaagaggcagatttggagtttactcctcccagagaccactgaagtgtgtggtaggtggggctgaaaccgacttcaactatgactcagagaccgggttgacaaccttctccattccagtttctccagaggagatgtacagatggtcaatagagatccaagtttgagtcctttttaagacttggtgtttgatgcattgttgtatcaggagaagggttttgttgtaattaagcattgagggaattgttggagtcaggcagagagagaggggggaggtttgttgtaagacacctagtattagtatcatgtagtggagaaaaagggttgttgatcctaatagctagacaaggcatgttgtagtagtcatggngtggggaagtccttttgttgtaacatgtaatttggtttagacttgtagtatgtcatcaattagatggataaagagaga

SEQ ID NO: 27691 - DNA, 464 bp, Glycine max
  unsure (1)..(464): unsure at all n locations
  Clone ID: LIB3051-081-Q1-K1-D4
gccgacaacgtcatcccaaaggctcttgattccttcaagagtgtgaaaaacgttgagggaaagggtggccgaggaaccatcaagaagatcactttccttgaggatggagaaaccaagtttgtgctgcacanaatagaaagcattgatgaggcgaacttgggatacagctacagcgtggttgggggtgctgcattgccagacacggcggagaagatcacattcgactccaaattggttgctggtcccaatggagggtctgctgggaagctcactgtcaaatacgaaacataaggagatgctgagcccaaccaagacgaactcaaaactggaaaagccaaggctgatgctctcttcaaggccattgaggcttaccttttggcccatcccgattacaactaatcctcttcaacttacttgttatcactttcttgctttttcttgcttggagacttatccaatcactc

SEQ ID NO: 27692 - DNA, 381 bp, Glycine max
  Clone ID: LIB3051-081-Q1-K1-D8
cttttatttgagaatatatataaagactatactttcgccataaaaacagttaagaaaaacattgtataagtaataatagcatggtattgtgaattccatatgcaaatttttgttttttaaatcattcgattatatatagaaagagtagtatgaaaaagagggtatttacaattttatctgatctatcaagaacctagtataattttagtgtcacagactttatgttattttcttcatactactaaacttttaacattttatatgttaattagaagtaaacataacatatgaaataaaaagaaactttcggatcgttgaatagcacaatgatataaaaaacaacggaaccatcatactatttataattaaagcgattcaaaa

SEQ ID NO: 27693 - DNA, 466 bp, Glycine max
  unsure (1)..(466): unsure at all n locations
  Clone ID: LIB3051-081-Q1-K1-E4
gggaaagtcttacccaactgtgagtgctgattaccagaaggccgttgaaaaggcaaaaaaaaggctcanaggcttcatcgctgagaaaagatgcgctcctctaatgctccgtttggcatggcactctgctggaacctttgacaagggcacgaagaccggtggacccttcggaaccatcaagcaccctgccgaactggctcacagcgctaacaacggtcttgacatcgctgttaggcttttggagccactcaaggcggagttccctattttgagctacgccgatttctaccagttggctggcgttgttgccgttgaggtcacgggtggacctgaagttccattccaccctggaagagaggacaagcctgagccaccaccagagggtcgcttgcccgatgccactaanggttctgaccatttgagagatgtgtttggcaaagctatggggcttactgaccaagatatc

SEQ ID NO: 27694 - DNA, 393 bp, Glycine max
  Clone ID: LIB3051-081-Q1-K1-F7
cccacgcgtccgggccgctcgcgatctagaactagcattcagtgaaacactagctagggtatgtgggagctctcgttgtttcggagttagggaccttacgcagccatggccactgctacgaatgccgccgccgccccaccacgccagctctcccagaaggaagctgacatccagatgatgttggccgccgacgtccacctcggcaccaagaactgcgacttccaaatggaacgttacatcttcaagcgccgcaacgacgggatttacattattaaccttgggaagacgtgggagaagcttcagctagcagctaggggtatagttgcaatggaaaacccccaggatatcattgttcaatctgcaaggcctaatggccaaagagcggttctgaag

SEQ ID NO: 27695 - DNA, 463 bp, Glycine max
  Clone ID: LIB3051-081-Q1-K1-F8
cacaaactagtaatattattcttcgaatccattttattattcataatgggtagtttcacatgggaggatgaaaccacctcccctgtggctcctgctaccctttacaaagctctagttacagatgccgacaacgtcatcccaaaggctgtcgaagccttcaggagtgttgaaaaccttgaggggaacggtggccctggaaccatcaagaagatcactttcgttgaggatggagaaagcaagtttgtgttgcacaaaatagaatcagttgatgaggcaaacttgggatacagctatagcgtagttggtggagttgggttgccagacacagtggagaagatcacattcgaatgcaaattggctgctggcgccaacggagggtctgctgggaagctaactgtcaaataccaaaccaaaggagatgctcagcccaacccagacgacctcaaaattggcaaagtcaagt

SEQ ID NO: 27696 - DNA, 359 bp, Glycine max
  unsure (1)..(359): unsure at all n locations
  Clone ID: LIB3051-081-Q1-K1-H4
tcggataaaacacttccagaaagaaccttcctattaaccaaaaccaccaccaccggtgccaggtgatcaaaaccactacgatgatcagggtcccaaggccgacgagtatggcaatgttgagaggcaaactgacgaatatggcaacccggttcatgccactagtgtcacttatgtagccaccaaaagtgttggtggctacaatgatgacgctaataagcaacatgatattactggtgtctatcccgagaaagacaccggtagacatcattttggtcgtggttacgacngtgacactaacaagcaacatgatgctactggtgtttatcccggaatagacattggtagagatcatgggacta

SEQ ID NO: 27697 - DNA, 447 bp, Glycine max
  Clone ID: LIB3051-081-Q1-K1-H7
ctctaatcactctagctgttgcatatttctactattattcaatggcttctgcagatgtttagggccgttgctttgttggtgggcttgcttgggtcaccggcatcgatgccctcgagaaagccttttcaatctacggcgacatcgttgaatcgaaggtccgtttgatgcacgcaccgtaactgatctcacacgattcggattcggattttttctcgatcctcttctgatctgagatctctgatctatttgcgttacttgatctatgatctgatacttgtgctactatatgattcttttattactcacgccaatatgtacgttcatcttcttcctttcaccaaaggcgatgatcgatcggtttctattcggttctgtcattagttctcgtgtctctacttctgctttggatctgatgcatcgtgtctttgtgtgcaggttatcaacgac

SEQ ID NO: 27698 - DNA, 450 bp, Glycine max
  Clone ID: LIB3051-082-Q1-K1-A7
aaactagtaatattattcttcgaatccattttattattcataatgggtattttcacatgggaggatgaaaccacctcccctgtggctcctgctaccctttacaaagctctagttacagatgccgacaacgtcatcccaaaggctgtcgaagccttcaggagtgttgaaaaccttgaggggaacggtggccctggaaccatcaagaagatcactttcgttgaggatggagaaagcaagtttgtgttgcacaaaatagaatcagttgatgaggcaaacttgggatacagctatagcgtagttggtggagttgggttgccagacacagtggagaagatcacattcgaatgcaaattggctgctggcgccaacggagggtctgctgggaagctaactgtcaaataccaaaccaaaggagatgctcagcccaacccagacgacctcaaaattggc

SEQ ID NO: 27699 - DNA, 456 bp, Glycine max
  Clone ID: LIB3051-082-Q1-K1-B6
caacttcgaagatgaccagctcgccaatatgaccaccgacgacgtcgtcagagcttctggtcttctcgacaacgagattcgcatcctcaaagaagagttgcagaggaccaatttggagttggaatcgtacaaggacaagatcaaggagaatcaggagaagattaagctcaataagcagttgccctacctcgttgggaacatcgttgagatattggaaatgaacccagaagacgaagctgaagaagatggtgccaatattgatcttgactcacaaaggaagggaaagtgtgttgtgctaaagacttctactcgacagacaatctttctacctgttgttgggcttgttgaccctgacaagttaaaacctggtgatctggttggtgttaacaaggatagttacttaatcttggataccttgccttctgagtatgattctagagttaaggccatggaagt

SEQ ID NO: 27700 - DNA, 448 bp, Glycine max
  unsure (1)..(448): unsure at all n locations
  Clone ID: LIB3051-082-Q1-K1-D11
agaaccccccaacaaactgaagtttaacttccttggtaaagattctatcaagtatgagagatacagttgaggttgagcttcctgtttataatgcaattttgaagttccaaaaagataaaaagcctggtgatgatcttttcgatcagctggatacaagtaaattaaatgctcatctgaaggaactcatgcccggtctaacagcaaaagtcttccgtacattcaatgcatcgatcacattggatgttatgttgaataaggaaactaaagatggagaagttggggaaaagattgttgtttatcagcatgcaaataaacaggttgctatcatttgtaatcatcaacgcagtgtttcaaaatctcatactgcacaaatgtcaaagttaacttgaaaaaattgatgaacttcangctgttctgaaagaactgaaaacggacttatacagggcaa

SEQ ID NO: 27701 - DNA, 419 bp, Glycine max
  unsure (1)..(419): unsure at all n locations
  Clone ID: LIB3051-082-Q1-K1-D12
cccacgcgtccgaaactagtagtattattcttccattccgttctacatataatcattcataatgggtgttttcacattcgaggatgaaatcaactcccctgtggctcctgctactctttacaaggccctagttacagatgccgacaacgtcatcccaaaggctcttgattccttcaagagtgttgaaaacgttgagggaaatggtggcccaggaaccatcaagaagatcactttccttgaggatggagaaaccaagtttgtgctgcacaaaatagaaagcattgatgaggcgaacttgggatacagctacagcgtggttgggggtgctgcattgccagacacggcggagaagatcacattcgactccaaattggttgctggtcccaatgganggtctgctgggaagctcactgtcaaat

SEQ ID NO: 27702 - DNA, 451 bp, Glycine max
  Clone ID: LIB3051-082-Q1-K1-E7
cccacgcgtccggatttttaccctcgtgatcctgcttcccataccatccatatgtcttgtgttgcatacaactcactattccttggagaattcatgcaacctgactgggacatgtttcatagtttacacccagcagcagattatcatgctgcagctcgtgcaattggtggatgtcctatttatgttagtgacaagccaggcaatcacaattttgatcttcttaagaagctggttctcccggatggttcggttctccgtgctcagttacctggcaggccaactcgtgattctctatttgtggatccagccagagataggactagcttgctcaaaatatggaacctgaacaaatgctctggagttgttggtgtatttaactgccaaggtgctggatggtgcaagatagagaagaaaacccgcatccatgatacatctcctggtacactcaccg

SEQ ID NO: 27703 - DNA, 349 bp, Glycine max
  unsure (1)..(349): unsure at all n locations
  Clone ID: LIB3051-082-Q1-K1-F9
cccacgcgttcgnccacgcgtacggcataataatctaccgtttcatgattaaggtttcgacggggcagtgaaacatgggagaaccaaaacgaatctatctgcgtatctttgcgctgctcctcttcatttacgcctattcatttcagcttctccgcgctttcgatgacgcgatcttttacgagtcgttcgacgaggatttcgaagaccgttggattgtgtctcacatagatgagtacaatggtgtctggaaacatgccaagagtgagggacatgatgattatgggcttcctgtcagtgaaaaagttaagaaatatgctataggtaaagaacttgatgaagccgtgggtct

SEQ ID NO: 27704 - DNA, 448 bp, Glycine max
  Clone ID: LIB3051-082-Q1-K1-F10
atcctgcttcccataccatccatatttcttctgttgcatacaactcactattccttggagaattcatgcaacctgactgggacatgtttcatgtaagtggaagtgtgaatttctctcctccatttataatttattaaagtgcctgatcttttctcaagagttataaatttgcttcatgttaacaaaagatctttgtaatttcagagtttacacccagcagcagattatcatgctgcagctcgtgcaattggtggatgtcctatttatgttaagtacagtgatgttttatgtcacatctttttcttagatgaaattggcacaaattgtaatgtgtgattctgtatttatgatggtttttaacagttgacagccaagcaatcacaattttgatcttcttaagaagcttgttctcccggatggttccggtcttcgtgctcagttacctggc

SEQ ID NO: 27705 - DNA, 477 bp, Glycine max
  Clone ID: LIB3051-083-Q1-K1-B5
gttagttcacacactaagttctgaaaaatgagttccaaagtttttcttattctacttatgtgcatggccactatacttttgatctcctctgaggttgcacccgatgatgcataccagaattttgacaaaacagatgggaagcgtagtgcaaatggggtagatgaaagcaaatattggcgtggtggctatggcgactatggtggttggcgtggtggtggttggcgtggtggctatggaggctggcgtggtggctatggtggtgggcgtggtggctatggtggctggcgtggtggctatggtggtgggcgtggtggctacggaggttggggtggtggctttggccctaacgaacataatgaggctgggattgatgctagccctcacaactaagaaggaaacttgctaaagcttatataggatttaagttatcgtaataaataaaacttcattggaagggtagttataatagatgtggag

SEQ ID NO: 27706 - DNA, 411 bp, Glycine max
  Clone ID: LIB3051-083-Q1-K1-D4
tcgcccacgcgttcgggatgacgaggacgaagacgatgaagaggaggatgacactaagactaaagggaagaagagtggtaaggcacaggctggtgatggtgatggtgagcgacctccagagtgcaagcagcagtaattgtttgtttcttcggagtatcatgtggctgatgggtgtttttgaggtcctatggtgcctgacgggaaagtgggtttcaatttcatgcaatttttcatagtccttgattcattttcctccctagatccgatagtctgaatttattgagtcaatttctcctttttcccatattttgggagaatgtggttatatatttgtagtcagggatgctgtgaaaaaaaaatatcactggaaagcaataagagtaggactaaagggatacagatgatgctatg

SEQ ID NO: 27707 - DNA, 312 bp, Glycine max
  Clone ID: LIB3051-083-Q1-K1-D6
cccacgcgtccgggttgatgctaaccctcacaactaagaaggcaactttctaaagcttatatatgggtttaagttatcgcaataaataaaacttcatgagaaggttagttgtaatagaagtggaaaactttgtaaaggaataatacctttcatgaatttccttaaaaaaaaaaaaaaaaaaaaaaaaaaaaaaaaaaaaaaaaaaaaaaaaaaaaaaaaaaaaaaaaaaaaaaaaaaaaaaaaaaaaaaaaaaataaaaaaaaaaaaaaaaaaaaaaaaaaaaaaaaaaatacaaaaaaaaaaaacaaatac

SEQ ID NO: 27708 - DNA, 470 bp, Glycine max
  Clone ID: LIB3051-083-Q1-K1-D8
cccacgcgtccgcccacgcgtccgcccacgcgtccgcttagtcccaattttctagggttttattcattttccgatggcttctgcagatgttgagtaccgttgctttgtcggtgggctcgcttgggccactgacgaccatgccctcgagagagccttctctcagtacggcgaaatcgttgaaacgaaggtctgtttgttgcaggcatcacatctgatctcacacgattcggattcggaattttctcgatcccgttctgatctgtgatctctgatctgtttgcgttacttgatcttatgatacttgtgttactatatgattcttttattactcacgccaatagattatcaacgatcgtgagactggcagatccaggggttttggatttgtgaccttcgcctcggagcagtccatgaaagatgcgatcggagcgatgaatggacagaacttggacggccgtaacatcactgtc

SEQ ID NO: 27709 - DNA, 475 bp, Glycine max
  Clone ID: LIB3051-083-Q1-K1-F4
cgtctttgaagtttctaagatgacttctccctacattaaatgtacagtctctttcttcatagcatttggaaatttggctgatgacaccatcaattttgaggcttttccccacaagctggtgcaatttggagagattcaggaaaaagttgtattgaagttttcacaagaggaatttcttacagcttggtcaactcaggtgcgtcctgcaacaactctgttggctgatgggtgtccatatttgtatgctatggtgcatgatagttcagtgtctacaataccaggtgattttgtcattggtgttaagttgacaaccataaacaatatgtgtgcatatgggctcaatcctggtatttcaggttctcgtcttttgggcaccattcctcagtccatttcacagcaaactgtttggaatcaaatggcaacagtgagaacaccattgaattttgattctagcaagcagagcttttgtcaattc

SEQ ID NO: 27710 - DNA, 474 bp, Glycine max
  unsure (1)..(474): unsure at all n locations
  Clone ID: LIB3051-083-Q1-K1-G2
aaaaaagaaaaaagaaaaaaggagttagggtataaaaaagagaagaaagatggtacaccagtggtattgcgtgttggtgtgaatcaagaaccgctctgctatggctgctctgcaatacttggaatcgctgcgtaattcgcaccctgagctctccgattggtacaattcgctggcggatctgtaccagaagaagctctggcaccagctcactctcaagctcgagcagtttgtggctctcgccgtcttccaggctggtgatgctttaatacaattatatcacaatttcatcacagactttgagacgaaaatcaaccttctcaagcttgcacattttgctgttatagtttctcggcagtattctgaaaaagaagctgctgttggttatcttggaggggtcattcagaaacttcaagacactagggagcagcgcatagaagaacctattctntacattaagatgcatatagcaatatt

SEQ ID NO: 27711 - DNA, 424 bp, Glycine max
  Clone ID: LIB3051-083-Q1-K1-H2
cgtccgatgcgttcgattcggatctagagtcttcagtttctcctcgttgttcttcgctttcctgttttgaatttcgattctttcgttaatgtaataagatgtttgggagggcaccgaagaagagcgataatacgaggtactacgaaatcctcggcgtctccaagaacgcttcgcaggatgatctgaagaaggcttacaagaaagccgccattaagaatcaccccgacaagggcggtgatcccgagaagtttaaagagctggcgcaagcttatgaggttctgagtgaccctgagaagcgtgagatatatgatcagtatggtgaagatgcgcttaaggaaggaatgggtggtggcggtggccatgatccatttgatatcttttcatctttctttggcggtgggagtccctttggatcaggtggaag

SEQ ID NO: 27712 - DNA, 457 bp, Glycine max
  Clone ID: LIB3051-083-Q1-K1-H4
ccggaacgaccgactcgtcccacgcattctacaaaaaagccttcacatgttcaccttttaattggatgattggggtgttccacaggattacaggcatatggatggttttggagttaacacatatacgctgatcaacaaggctgggaaagcagtgtatgtgaaatttcactggaagaccactagtggtataaagtgtctattggaggaagaggccattaaggtgggaggagccaaccacagccatgccactcaagacctccatgattcaattgctgctggtaactatcctgagtggaaactggttgttcagacaatagatcctgagcacgaagacaaatttgactttgaccctcttgatgttactaagacttggcctgaggacattatacccttgcagcctgttggtcgcttggtcctgaataagaacatagataatttctttgctgagaatgaacaa

SEQ ID NO: 27713 - DNA, 430 bp, Glycine max
  Clone ID: LIB3051-084-Q1-K1-A4
ctaattcagtttttttctcccatcataaaaaaccgaccctctcctttccctcttcaccggccaatggctcccccaaaggccgagaagaagcccgcggagaaaaagcccgcagagaaggctccggcggagaagaagcccaaggccgagaagaagatatcgaaggaaggaggaagcgagaagaagaagaagagaacaaagaagagcgtggagacctacaagatttacatcttcaaggtgctgaagcaggttcaccccgacatcggaatctcaagcaaggccatggggatcatgaacagtttcataaacgacatcttcgagaagctcgcccaagagtcgtcgcgattggctaagtataacaagaagcctaccattactttcaggggatccatacggcggtgcgtttggtcctccctgggaggtggccaaacac

SEQ ID NO: 27714 - DNA, 414 bp, Glycine max
  Clone ID: LIB3051-084-Q1-K1-A6
cgaggactcgtgataacaatttgcttggcaaatttgagttatctggaattcctcctgctccgagaggtgttcctcagatcaccgtttgctttgacattgacgccaacggtatattgaacgtgtctgcggaggacaaaaccactggacagaagaacaagattacaattaccaacgacaaaggaaggctttctaaggaggagattgagaagatggtgcaggaagctgagaagtacaaggctgaggatgaggagcataagaagaaagtggaggccaaaaatacattggagaattacgcctataacatgaggaacacaattaaagatgataagattgcttccaagctgtctgctgatgataagaagaaaattgatgatgcaattgagcaggctatccaatggctcgatggaaaccaac

SEQ ID NO: 27715 - DNA, 395 bp, Glycine max
  Clone ID: LIB3051-084-Q1-K1-A7
aagtcttccatagccccccaaaaatgaagagcaccatcttctttgctctctttctcttttgtgccttcaccacctcatacctaccttcagccatcgctgatttcgtgctcgataatgaaggtaaccctcttgaaaatggtggcacatattatatcttgtcagacataacagcatttggtggaataagagcagccccaacgggaaatgaaagatgccctctcactgtggtgcaatctcgcaatgagctcgacaaagggattggaacaatcatctcgtccccatatcgaatccgttttatcgccgaaggccatcctttgagccttaagttcgattcatttgcagttataatgctgtgtgttggaattcctaccgagtggtctggtgtggaggatcta

SEQ ID NO: 27716 - DNA, 361 bp, Glycine max
  Clone ID: LIB3051-084-Q1-K1-A9
tctgctcgtgcctctagggttatcatatctccatttccatttcctctctctggggttcgaagaatcttaagctatgggaaagtcttacccaaccgtgagcgctgattaccagaaggccgttgagaaggcgaagaagaagctcagaggcttcatcgctgagaagagatgcgctcctctaatgctccgtttggcatggcactctgctggaacttacgacgtgagctcgaagaccggtggtcccttcggaaccataaagcaccccttcgaactcgctcacggcgctaacaacggtcttgacatcgctgttaagcttttggagccactcaaagcggagtttcctattttgagcttcgccgatttc

SEQ ID NO: 27717 - DNA, 335 bp, Glycine max
  Clone ID: LIB3051-084-Q1-K1-B2
tcgcccacgcgttcggtgatttcagtgagtgatcggtgttcacttgatctcatcataatcgtcagcgggaattgaagaagatgccgatcagaaacatcgcctgcggaaggcctgaagaggcgactcaccccgacacgttgaaggcggctttggctgagttcatctcaaccttcatcttcgtgttcgccggctcaggctccggcatcgcctacaacaagctcaccgacaacggcgctgccacccctgccggccttatctacgacttcatcgcccatgcattcgccctcttcgtcgccgtcttcgtcggcgccaacatcttcggcggccacgttaac

SEQ ID NO: 27718 - DNA, 452 bp, Glycine max
  Clone ID: LIB3051-084-Q1-K1-B6
gggaaggctcctaggaagcaactcgccaccaaggctgcaagaaaatctgcacctaccagcggtggagtcaagaagcctcatcgctatcgtcctggaactgttgctcttcgtgagatccgaaaataccaaaagagcacagagcttctgatccgcaagctcccctttcagcgtcttgttcgtgaaatcgcgcaagacttcaagactgatttgaggttccagagtcacgcggttcttgcgcttcaggaagctgcggaggcttacttggtgggtttgtttgaagacaccaacctttgtgcgatccacgccaagagagtgaccatcatgcccaaggacattcaactcgcacgccgcattcgtggagaacgtgcttaggcttaatataatggatatagcatagttgtcgccttttcgttttcaatacatttcttgttcctagggtttaagtgttattt

SEQ ID NO: 27719 - DNA, 405 bp, Glycine max
  Clone ID: LIB3051-084-Q1-K1-C5
gtgagatttgcgaatctgagaaatggcggattcttctcgggaggagaacgtgtacatggcgaaattggcggagcaggccgagcgttacgaggagatggttgagttcatggagaaggttgcaaagactgtggaggttgaggagttgacggtggaggagaggaatctcctctctgtggcttacaagaacgtgattggtgcgaggagggcttcgtggaggatcatatcctccattgagcagaaggaggagagcaggggcaatgaggaccacgtggccattataaaggagtacaggggcaaaattgaggctgaactcagcaagatctgtgatgggattttgaaccttcttgagtccaacctcatttctttcgctggattttccgatagcaaagtcttttaccttaaaat

SEQ ID NO: 27720 - DNA, 402 bp, Glycine max
  Clone ID: LIB3051-084-Q1-K1-C7
gaaaatcctcacccattttcttcgtagccaaacactctgaaattctcagttatgtcgtggcaagcgtatgtggatgatcacctactgtgtgaaatcgaaggtaaccacctcactcacgccgctatcatcggccaagacggaagcgtttgggctcagagcaccaacttccctcagttcaaacctgaggaaataactgccatcaataatgactttaatgagcctggatcacttgctccaactggattgtatatcggtggcaccaaatacatggtcatccagggtgagcctggtgctgtcattcgagggaagaagggtcctggtggtgttactgtgaagaagaccggtgcggccttgatcattggcatttatgatgaaccaatgactccaggtcaatgcaacatg

SEQ ID NO: 27721 - DNA, 349 bp, Glycine max
  Clone ID: LIB3051-084-Q1-K1-E2
gttatttcctggaacgacgacgggtcaacgtttatcgtctggaaccctaccgttttcggcagaggcttgcttcctaaatttttcaaacacaataatttctctagcttcgttcgccaactcaacacttacggattcaggaaagttgtgcctgatcggtgggagttctcgaacgattatttccgccgaggcgagaagcggcttctttgcgaaattcagcggcggaagatctcatcgccggcgccgtcttcgactgctccgacgacggttacggtgccgatgccgttgaccgcgataccgatcatatcgccgtcgaactctggcgaggagcatgtgatattcgtcaactcgt

SEQ ID NO: 27722 - DNA, 330 bp, Glycine max
  Clone ID: LIB3051-084-Q1-K1-G2
cccacgcgtccgttcacgcgtccgaacatcttcacaaactagtaaatagtaatattatgcttcgaatccattttatgattcataatgggtgttttcacatttgatgatgaaaccacctcccctgtggctcctgctaccctttacaaagctctagttacagatgccgacaacgtcatcccaaaggctgttgatgccttcaggagttgtgaaaaccttgaggggaacggtggccctggaaccatcaagaagatcactttctgtgatgatggagaaagcaagtttgtgttgcacaaaatataatcagttgatgaggcaaacttgggatacagc

SEQ ID NO: 27723 - DNA, 446 bp, Glycine max
  unsure (1)..(446): unsure at all n locations
  Clone ID: LIB3051-084-Q1-K1-G11
gttgtcaaggaactggtatgaaggattctataagacatcttggcccatccatggttcagcagatgcagcatgcctgcaatgaatgtaagggtactggagaaactatcaatgacagagatcgctgcccacagtgcaagggagagaaggttgtgcaggagaagaaagtccttgaagttattgtagaaaaggggatgcataatgggcagaagataacattccctggcgaagctgatgaagcgccggacacaattactggggatatcgtctttgtccttcagcagaaggaacatcccaaattcaaaagaaaggctgaagatctttttgtagagcacactntgtcccttaccgaggccttgtgtggcttccaatttgtgctgactcacttggatagccgtcagcttcttattaaatcaaatccccggggagttgtgaagcctgattcatac

SEQ ID NO: 27724 - DNA, 440 bp, Glycine max
  Clone ID: LIB3051-084-Q1-K1-H9
acgccggaaaagcccccaaaggagtgaaaaccaattggatcatgcaggaatgtcgcctcgccaatgttgaccgatctgcctccaagaaaaacaacaacaacttgaggcttgatgattgggtgttgtgtcgaatctacaacaagaaagggaagattgagaaatacaacacgaccgcaccgaagatgaatcttgaaatgattcatagttttgagcacgagaacgagacgaagcctgagattcataagcttggaaatgagcaattgttgtacacggagacttcagattcggtgccaaggttgcacacggactcgagcagctcggagcacgtggtttcgcccgatgtgaggtgcgagagggaagtgcagagcgaccccaagtggaataacgatgattatgatctgggcctacagctagaaaacgcgtttgattttcagtttaat

SEQ ID NO: 27725 - DNA, 401 bp, Glycine max
  Clone ID: LIB3051-084-Q1-K1-H10
cttcgttaagaccctcaccggcaagactattaccctagaagtcgaaagctccgacacgatcgacaacgtcaaggctaagattcaggacaaggagggaatccccccagaccagcagaggctgatcttcgccgggaagcagctcgaggacggacgcacccttgctgactacaacatccagaaggagtcaactctccacttggtgttgcgtcttcgtggtggtatgcagattttcgtgaagactcttacgggtaagactattaccctcgaggtggagagctctgacaccattgacaatgtgaaggccaagattcaggacaaggaaggcatcccaccggaccagcagaggctgatttttgctggcaagcagctcgaggatggaaggaccctcgctgactacaaca

SEQ ID NO: 27726 - DNA, 403 bp, Glycine max
  Clone ID: LIB3051-085-Q1-K1-B12
aaagtatccatccatgaatcttgcctatgctgctggccgtgctggaggcacaatgacaggagttcttagtgcagcaaatgagaaagctgtagagatgtttattgatgaaaagattagctatttggatatattcaaagttgtggagctaacatgtgagaagcatcaaaatgaattgttatcctctccttcccttgaggaaatcattcactatgacctgtgggcgcgagaatttgctgctagtttgcaagactcttccagcttcactcctattcttgcatgaggatatgattaaactagggatgtggctgctggtgcttcccaattgcctgctttcaccataatttcttcaggcaattgaacaatttagaatgatgcattccctcagatgttgaaaaataaatag

SEQ ID NO: 27727 - DNA, 473 bp, Glycine max
  Clone ID: LIB3051-085-Q1-K1-C5
aatcaatcaaattctttgagttgaacacaggggccaagattccttctcttgggttagggacttggcaagctgaacctggtgttgtagctgaagctctcaccacagccattcaggttggatacaggcatattgactgtgctagtgcgtataagaatcaagcagagattggttctgctcttaagaagctttttgatgatggtgtggtgaagcgtgaggacttatggatcacttccaaactctggtgttcagatcatgcaccagaagatgtgccaaaagcattggataaaacattacaggaattgcaacttgactatcttgacctctatctgatccactggccagtccgcatgaaaagtggaacatttggactcaataaagaatatcttgagcaaccagacattcccaatacatggagagcaatggaggcactctatgactcagacaaggctagagccataggagtgagcaatttc

SEQ ID NO: 27728 - DNA, 340 bp, Glycine max
  Clone ID: LIB3051-085-Q1-K1-D7
cccacgcgtccgggaagctccccttccagaggctggttcgtgaaattgctcaggacttcaagactgatctgcgtttccagaaccacgccgtgcttgcattgcaagaaactgctgaagcataccttgttgggctctttgaacgacactaacctgtgtgccattcacgctaagcgggtaaccattatgcccaaggatatccagctggcaagaaggattcgcggtgaacgtgcttgaggtggtggttgtgaagatgaagatgaagatgggttgctgcgggtggtgtttttgttgttcagattccttttttttttttcaatggataggggttgttagggagtgt

SEQ ID NO: 27729 - DNA, 431 bp, Glycine max
  Clone ID: LIB3051-085-Q1-K1-G7
gtgctgcaatggcttcaagtcaggaggaggtgacccttttgggagctactggaagcccatttgtgtgcagggttcatattgccctcaagttgaagggagttcaatacaaatatgtcgaagaaaatttgaggaacaagagtgaactgcttctcaaatccaacccagttcacaagaaggttccagtgtttattcacaatgagaagcccatagcagagtctcttgtgattgttgaatacattgatgagacatggaagaacaaccccatcttgccttctgatccttaccaaagagccttggctcgtttctggtccaaattcattgatgataaggtttttggtgctgcatggaaatccgttttcacagctgatgagaaagagcgtgagaagaatgttgaggaagcaattgaggctctgcagtttcttgagaatgag

SEQ ID NO: 27730 - DNA, 410 bp, Glycine max
  Clone ID: LIB3051-085-Q1-K1-G10
ctctctgcgcttcttggcggcgacgcggcggcggcggcgtcttcgccggagagttctacttgtagagggtcctccttccactcgtcgccgcgctggcagctctacttcaacgagatcaaagataccgataagctcgttgtgatagatttctcggcgtcgtggtgcggtccttgcaaattcatagagccagcgattcacgccatggccgacaagttcaacgacgttgacttcgtcaagatcgacgtcgacgaattacctgatgtggcgcaagagtttcaggtgcaggcgatgccgactttcgtgttgtggaagaaagggaaggaagtcgacatggttgtgggcgcaaagaaggacgagctcgagaagaagattgagaaacatcgatcgtgatcttagctctgaaatcctat

SEQ ID NO: 27731 - DNA, 313 bp, Glycine max
  Clone ID: LIB3051-085-Q1-K1-H4
tcgacccacgcgtgcgcccaccttccagttgatcatgcatacccacttgcaatagagtttgactatcctacgcgcgatgcacggtcgcgggccactttcatgggcgtagagcaatgcacatagtctcatgcccacgagctttcgattaactcatgacgtgaacatttccaactgcatgaccattctggaagaacttatgcctatctcaatcgagatggctaagcgaaacttgaggtgcatctggaacttcacgaatgctgcggcccagagccacaatgagattcttgagatgtacacggattacatcgatcca

SEQ ID NO: 27732 - DNA, 424 bp, Glycine max
  Clone ID: LIB3051-085-Q1-K1-H6
cgtgagaggggcagtagccgagattccgtgagttgcaaaaatgaagacgattctttccaccgggaccatgaacatcccggacggcgtgagcatcaaagttcatgccaaggtcatcgaagttgagggcccccgcggaaaattggtgcgagacttcaagcatttgaatctcgattttcagctcattactgacgaaaacggtaaaagaaagctgaaaatcgacgcgtggtttggttctcggaaaacatccgccgccattcgcaccgccttgagccacgtggagaatcttatcaccggcgtcaccaagggctaccgctacaaaatgaggttcgtttatgcccattttcccatcaacgcaagcaatggcaacagcaacaagtctattgagatccgaaatttccttggcgagaagaaggtgaggaaagtc

SEQ ID NO: 27733 - DNA, 452 bp, Glycine max
  Clone ID: LIB3051-085-Q1-K1-H8
atttttatcaggttgaggagctcttaaaagaatatgacaatgtgtgcaccctcagggttcgcgtgccaatttcatctgacttgagcaatccacgcaatttcatcaccaagatttctcgttataacaaagtggtcaacattccaaacagcatgaccattttggatgaacttctgcctatttcaattgagatggcaaagcgaaacttgaggggcatctggaacttcacaaatcctggggccgtgagccacaatgagattcttgagatgtacagggattacatcgatccaagcttcaagtgggctaacttcaatcttgaagagcaagccaaggtgataattgctgcacggagcaacaacgagatggatgcatccaaactgaagaacgagttccctgagcttcttttcatcaaggaatcactgatcaagtatgtctttgagccaaacaagaaaact

SEQ ID NO: 27734 - DNA, 401 bp, Glycine max
  Clone ID: LIB3051-085-Q1-K1-H9
aacgccaaaggcagaatattccgtccggaaattagggttaaggttgcagcgtactccatcagcacccgggttaaataccctatgaccaccgacttgttctaccggaatccttacgctctctcactcacaaacgcacactgaattcaaagacatcgaaagagagaggcatggccgagcaaaccaccatcatgatcaagccagatggcgttcaaagaggccttattggcgagattattaacagatttgagacgaagggtatgtacttgaaagggttgaaactcgatactgtggaccgaacttttgctgagaagcactatgctcatacgtctgcaaagcctttactaaactgggttgatggattacattgtctctagccctgttgctgccatgatctgggacgg

SEQ ID NO: 27735 - DNA, 442 bp, Glycine max
  unsure (1)..(442): unsure at all n locations
  Clone ID: LIB3051-086-Q1-K1-A10
tagaaaacaccctctaccgcctctaagtcctacaagaacccatcccctccccagccgctccggaaatctcactcttgttactcttcttcctccaagagaagtaaacaaccctcacattcaccacagcagcacacacagacaaagacaaccttgtttgtctccaatcaaaacctttcaagctggcgttcgaaaaccaagacaaccctgtccgagaaatcaagcccaagaataggagaatcatgggcgctggaggccctgatgatgaggacaacaacaggtggccaccgtggctgaagcctctgctaaaagaaagtttctttgttcaatgcaagcttcacgctgattcgcacaagagcgagtgcaacatgtactgcttggattgtatgaacggtgctctctgctctctctgcctcgcttaccatanagatcatcgtgctattca

SEQ ID NO: 27736 - DNA, 393 bp, Glycine max
  Clone ID: LIB3051-086-Q1-K1-B10
gaatcgacggacccaccgacgcgtacgcacgcacgaacaccgcccaagcagctggcctttctggaagctcaatgacaggagggcttagggcaacagatgagagaagctgggatatgcatattgatgaaaagattagctatttggatatattcaaagatgtggagctaacatgtgagaagcatcaaaatgaattgttatcctctacttaccttgatgaaatcattcactatgacctgtgggcgcgagaattagctgctagtttgcaagactctttcagcttcactcctattcttgcatgaagatatgattaaactcgggatgtggctgctggcgcttcccaattgcctgctttcaccataatgtcttcaggcaattgaacaatttagaatgatg

SEQ ID NO: 27737 - DNA, 446 bp, Glycine max
  Clone ID: LIB3051-086-Q1-K1-C6
cttcttttgttgtttgtgtgtttgttttttctctcacctgaaaatgtcttgctgcggtggtgagtgtggttgcggaagcgcctgcaagtgcggcaacggctgcggaggctgcaagatgtacccagacttgagctacaccgagtcaaccaccaccgagaccttggtcatgggagtggcaccagttaaggctcaattcgagagtgctgaaatgggtgttcccgctgagaacgatggctgcaaatgtggagctaactgcacctgcaacccctgcacttgcaagtgaggtgttggagagctaaagcttcaagcagaaatggcccttagaaataatgataaaaactatatgtagtttcaaaacttcaaaattatgtagtatgtattatgttgcactctggtgttttgtgtctaaacaaacacccttagaataaagtggtcatttcttgccc

SEQ ID NO: 27738 - DNA, 403 bp, Glycine max
  Clone ID: LIB3051-086-Q1-K1-C9
gcatgacgattatggacttattgttagtgaacaagcccggaaatatgctatagtgaaaaaacgtgacgagcctgtcagtcttaaggatggaacagttgttcttcagcttgagactcgacttcagaatggcctcgaatgtggaggcgcatatattacatatcttcggccccaggagagcggatggaaaccaaaggaatttgataacgaatctccatattctatcatgtttgggcctgataagcgtggagctacaaacatggtgcactatattctcaagcataagaatccaaaaagtgtggagtatgctgaacaccatatcaagtatcctccatatgtcccatctggcaaactaactcatgtatacactgcaattctgaagcccgattatgaattgcaaagtttg

SEQ ID NO: 27739 - DNA, 452 bp, Glycine max
  Clone ID: LIB3051-086-Q1-K1-D7
gattcaggtactgcgtttcggaagcagacacatatggctcgtacgaagcaaaccgctcgtaggtccacaggaggaaaggctcctaggaagcagcttgcaaccaaggctgcacgtaagtctgcaccaactactggtggtgtgaagaagccccaccgttatcgtcctggtaccgttgctcttcgtgaaattaggaaataccagaagagtaccgagcttttgatccggaagctccccttccagaggctggttcgtgaaattgctcaggacttcaagactgatctgcgtttccagagccacgccgtgcttgcattgcaagaagctgctgaggcataccttgatgggctctttgaggacactaacctgtgtgccattcacgccaagcgtgtaaccattatgcccaaagatattcagctggcaagaaggattcgtggtgagcgtgcttgagttggtgg

SEQ ID NO: 27740 - DNA, 455 bp, Glycine max
  Clone ID: LIB3051-086-Q1-K1-E1
cccacgcgtccgcccacgcgtccgaaactagtaatattattcttcgaatccattttattattcggaatgggggttttcacatttgaggatgaaaccacctcccctgtggctcctgctaccctttacaaagctctagttacagatgccgacaacgtcatcccaaaggctgtcgaagccttcaggagtgttgaaaaccttgaggggaacggtggccctggaaccatcaagaagatcactttcgttgaagatggagaaagcaagtttgtgttgcacaaaatagaatcagctgatgaggcaaacttgggatacagctatagcgtaattggcggagttgggttgccagacacagcggagaagatcacattccaatgcaaattggctgctggcgccaacggacggtctgctgggaagctaactgtcaaataccaaaccaaaggagatgctcagcccaaccc

SEQ ID NO: 27741 - DNA, 448 bp, Glycine max
  Clone ID: LIB3051-086-Q1-K1-E3
cccacgcgtccgcatactcttctcatactccttctgatcttgattccttcaaaacctttcacagccatccgggcatttgcatacctgaaacactcaataatattactttcattgtagaaggacataccaaatttaacatcacaatactgaatcaatatctgaagcaaacttcttatatatctacaacttactagatattgcttcgtttccagacacatctgaaaacatcacatttcacttctaatcggctgctgatcccaatggaagctctgctgacaagctcactgtctaataccataccaaaagatatgctcaccccaacctagaccaacttaaatctgtaaaagccaaagctgatgctctctttaaagccattcaagcttaccttttggccaatcccgattacaactaatccaattcgatcaacttcatgattatcatcactatc

SEQ ID NO: 27742 - DNA, 442 bp, Glycine max
  Clone ID: LIB3051-086-Q1-K1-E7
agatgccgacacatcatcccaaaggctcttgattccttcaagagtgttgaaagcgttgagggaaatggtggccctggaacaatcaagaagataactttcgttgaggatggagaaaccaagtttgtactgcacaagatagaagcagttgatgaggcaaacttgggatatagctacagcgtagtgggtggtgctgcgttgccagacacagcggagaagatcacattccactccaaattggctgctggtcccaatggaggctctgctggcaagctcactgtcgaataccaaaccaaaggagatgctcagcccaaccaagaccaactcaaaactggaaaagccaaggctgatgctctcttcaaggccattgaggcttaccttttggccaatcccgattacaactaatccaattcgatcaacttcatgattatcatcactatctctc

SEQ ID NO: 27743 - DNA, 449 bp, Glycine max
  Clone ID: LIB3051-086-Q1-K1-F8
gcgaaatgcgatacttggtgtgaattgcagaatcccgtgatccatcgagtctgggaacgcagggtgcgctcgaagccattaggccgagggcacgcctgcctgggtgtcacacatcgtttccccaacgcaaacatgtaacaatgttgctgcgcggagtgtatgctgacctctcgcgagcacccgcctcgtggttggttgaaatctgggttcatggccgacttcgccgtgataaaatggcggatgagccacgctcgagaccaatcacgtgcgagccggtcagttctggacccatcgacgaccctatgcgtgcacgcacgctaccaacgagacctcaggtcatgcggtgctacccgctgagattaagcatatcaataagcggaagaatagaatctaacatggatttccttagtaacggctagcgaaccgtgaatgcctaccatgaaaatcgt

SEQ ID NO: 27744 - DNA, 423 bp, Glycine max
  Clone ID: LIB3051-086-Q1-K1-G10
caaagggaaaaagggtggcaagaagaaggcagctgatccctttgccaagaaggattggtatgacattaaggccccttctctttttcaagtgaaaaatgttggcaaaaccctcgtctctcgtacgcagggtaccaagattgcttctgaaggacttaaacatagagtgtttgaggtctccttggctgatcttcaaggggatgaggatcatgcattcaagaagattaggttgagagctgaagatgtgcaagggaagaatgtcctgacaaatttctggggaatggatttcacaactgacaagctgaggtcattggtgcgaaaatggcaaactctaattgaagcccatgtggatgtgaagacaactgataactacacattgaggatgttttgcattggatttaccaagagaagagctaaccaagtgaa

SEQ ID NO: 27745 - DNA, 433 bp, Glycine max
  unsure (1)..(433): unsure at all n locations
  Clone ID: LIB3051-086-Q1-K1-H8
tcgactactacaagtgctttcttacagtcaaaaccaacatcatctatggcatgttatcaatagcactacgatgatcatggtcgtaaggttgacgagtatggcaacgttgagaagcaaaccgacgaatacggcaaccctgttcatgctgctagtgtcacctatgtagccaccagaactgctgctggtggttacagtgatgacattaataagcaacatgataccaccaatgcctacggcgtagacactggtagacagcattctagtggtggctacgatggtgacactaataaacatcatggaactactggtggctataatgatgacaccaatagacatcatggaactaccggggtctatgggatagacaccgttaggcatcancatgggactactggtggctatgccggagacactggtatgcaacatgggaaca

SEQ ID NO: 27746 - DNA, 393 bp, Glycine max
  Clone ID: LIB3051-087-Q1-K1-A5
gttcatactaagttctgaaaatgagttccaaggttttgcttgttctacttatgggcttgggcactatacttctgatctcctctgaggttgcacccgatgatgcatacgagaattttgacaaaatagatgggaagcctagtgcagatggggtagatgaaagcaagtattggcgtggcggctatggtggcggctatggtggtggttatggaggtgggcgtggaggctatggaggtgggcgtggaggctatggagggggacgtggtggatatggcggcggacgatgtggctatggtggcgggcgtggtggttattgcggcccgtcgtggaggcggccgtggtggctattggcctaatgaacataacgaggcttgggttgatgctaacccttacaac

SEQ ID NO: 27747 - DNA, 454 bp, Glycine max
  Clone ID: LIB3051-087-Q1-K1-A8
ccattttcaagctctcaacgccatctccagctgcttccttatcagaagcgcttcggcccagagattctcgcttcctctccttcaatccttcttccaacgctattaattacaaaattaacctctccgcttccctccgatccattcactccctccctcttaaaacctccttgcggatcaaatgctcccaaacagatgggaatggaagtcctgcaaagaggacagtgcttcatgatctttatgagaaagaagggcagagtccatggtatgataatctctgcagacctgttacagaccttcttcctcttatagcaagtggtgtcagaggcgtcactagcaaccctgcgatttttcagaaagctatctcatcatcgaatgcttacaatgatcagttcacggaacttgtgcaagcgggaaagacatttgaagtgcatattgggaacttgtaatgaaagat

SEQ ID NO: 27748 - DNA, 461 bp, Glycine max
  unsure (1)..(461): unsure at all n locations
  Clone ID: LIB3051-087-Q1-K1-B7
cggacgcgtgggggcgccactcgatgtttccatttgcctgcatgcctttggtattgtggggtgtggttcgtttagtggtgtcaagtcttgcgaacgtgagggtgcatgagtggtaatcgggatgtttttgttgcacggctccatgcttgcgcatgcaacgtgtgacatgcatccttttcattgtcaccttagccttcgtggcttaggtgctgacgattggttcctgtgttgcctacctaccaaacggtattcgtgtggctagtcagacccattccatccaggcctctttgttggggacgctggaggatttcaaagtcccacacgtgaaccacgttagtcgtccatcataacggcttcctgtggcacacgtgtggtgattgttctctcggatgcggtgcatgcagtgaacgtgggtggtctagtgcccncacattgntccttaaaatcggntgtctcggatg

SEQ ID NO: 27749 - DNA, 441 bp, Glycine max
  Clone ID: LIB3051-087-Q1-K1-B10
tttgccctcactttctcgctccccaaacgctcctctctctcctccaatggccgaccagctgaccgacgaccagatcgccgagttcaaggaggccttcagcctcttcgacaaggacggcgatggttgcattactaccaaggaacttgggactgttatgaggtcacttggtcaaaacccaactgaggcagaactgcaggatatgataaacgaggttgatgctgatggcaacggaaccatcgatttcccagagttcctcaacctgatggctcgcaagatgaaagacaccgactcagaggaggagcttaaggaggctttccgtgtgtttgacaaggatcagaatggtttcatctctgcagctgagctccgccatgtcatgacaaatcttggggagaagctgacggacgaggaggtggatgagatgatccgtgaggccgatgttga

SEQ ID NO: 27750 - DNA, 464 bp, Glycine max
  Clone ID: LIB3051-087-Q1-K1-C6
aaaattctcttccgtttcaggattagggtttcaccgttacagtgaaacatggcaaaaccggagcgaatctctctgcgtctctttgcgctgctcctcttgatttccacctcttcgtttcagcttctccgcgcttccgatgacgccgatgatgatgcgatcttctatgattcgttcgacgaggattttgaagaccgttgggttgtgtctcagaaagatgagtacagtggtgtctggaaacatgccaagagtgagggacatgatgattatgggcttcttgtcagtgagaaagcaaggaaatatgctatagtaaaagaacttgatgaagccgtgagtctcaaggatgaaacagttgttcttcagtttgaaactcggcttcagaatggccttgaatgtggtggtgcatatctaaaatatctccgaccacaggaggcttgatggaaatccaaagaatttgataatgaatc

SEQ ID NO: 27751 - DNA, 441 bp, Glycine max
  Clone ID: LIB3051-087-Q1-K1-C12
gcgtcgtggtgcggtgctcggagcttccagattccggcgatggaagacagcgcactgcgcgaccgtgcttcattggccgccggagtagggtgtttgtcggtggccggcacctccttctggcgctcctcttcgtcaccgaagcgctctttgccattcacatgcttgagcatttcttccgatactcgtattaaggaaagtgttcaaactgaaggtgcacctgcggctttgggaccatattctcaagcaatcaaatccaacaaccttatttttgtgtctggtgttcttggccttgttcccgagacagggaagttcgtatctgatgatgttgaagaccaaactgaacagcttcttaaaaacatgggggaaattcttaaagccggtggtgctagctactcgtccgttgttaagacaacaattatgttggctgacttgaaggacttt

SEQ ID NO: 27752 - DNA, 463 bp, Glycine max
  Clone ID: LIB3051-087-Q1-K1-D8
attagttcatactaagttctgaaaatgagttccaaggttttgcttgttctacttatgttgttggccactatacttctgatctcctctgaggttgcacccgatgatgcatacgagaattttgacaaaatagatgggaagcctagtgcagatggggtagatgaaagcaagtattggcgtggcggctatggtggcggctatggtggtggttatggaggtgggcgtggaggctatggaagtgggcgtggaggctatggagggggacgtggtggatatggcggcggacgaggtggctatggtggcgggcgtggtggctatggcggcgggcgtggtggcgggcgtggtggctatggtcctaatgaacataacgaggctggggttgatgctaaccctcacaactaagaaggcaactttctaaagcttatatatgggtttaagttatcgcaataaataaaacttcatgaga

SEQ ID NO: 27753 - DNA, 244 bp, Glycine max
  Clone ID: LIB3051-087-Q1-K1-F7
attcgatcttcagtattcagtgatctgcaaagaccttgttttatattatatacaagagtggtcttgccttgtgtggagtgttattcaatcactttgagtgtgtggtgtggcttccaattgatgtaacgagtgtttcctttcttatttcctttttccacagaattgtgagagccagttgatgtctttgtatgtcacttcatcaataaatcaatatgttataataataaaagaaagcatcatttat

SEQ ID NO: 27754 - DNA, 448 bp, Glycine max
  unsure (1)..(448): unsure at all n locations
  Clone ID: LIB3051-087-Q1-K1-F11
ggcttgcttaagctccttagtgctgctccttgcagctctaattctatcccctcaagttcgtgcaaactatgagaatcccccagtgtacaagcctnccactgagaaaccaccagtttataagcccccagttgagaagcctcctgtttacaaacctccagttgaaaaccccccaatttataagcctccagtagagaagccaccagtgtacaagcccccagttgagaaacccccagtgtacaagcccccagttgaaaaaccaccagtgtacaagcccccagttgagaaaccaccagtgtacaagcccccagttgaaaaacccccagtttacaagcccccagttgaaaaacccccagtgtacaagcccccagttgaaaaaccaccagtgtacaagcccccagttgagaagcccccagtttacaagccctcagttgagaagccaccagtttac

SEQ ID NO: 27755 - DNA, 433 bp, Glycine max
  unsure (1)..(433): unsure at all n locations
  Clone ID: LIB3051-087-Q1-K1-G2
tctgtctctctctctctctctctcgctcttcttctcatcaagcacagagttacagactcggcgatcttccgattctctttcgtcttggtttatgagctcgaaggagagacccactcttggtggcacgcggattaagacccgcaaacgaaatattgctgcgccgctggaccctgcagcattctcggatgcagtggtccagatttatttggataatgctggtgatctggaacttattgctaagagtattgaatcttcagaccttaacttttcaagatacggtgacaccttttttgaaggtgctttcactgggggtcgtacacaacctggaactaccaagcctgatgaaggggaccgncacccatactctataatagagtgggagcctaagcgtgaagtcattttaccatctgtaatctacatacaaaagattttg

SEQ ID NO: 27756 - DNA, 437 bp, Glycine max
  Clone ID: LIB3051-087-Q1-K1-G9
ttctcatctttctctcttctctctccacccaaaccctaactcccgaccctgttcccctcgggtatccgtcatgaaaggaggaaagtccaagaccgaatctaagagagccgatcccaaacttgctgtgaataagaagggagccgccaccaaggctaggaaacccgccggcaaggggaaggcagcgaaagaccctaacaagccaaagaggcctccaagtgctttctttgttttcatggaggagttcaggaaggtattcaacaaagaacatcctgaaaacaaagcagtgtctgctgtgggcaaagctgctggagcaaaatggaagaccatgtctgatgctgaaaaagcaccttatgtggcaaagtctgagaaaaggaaagtggagtacgagaagaacatgagagcctataacaagaaacaggcggaaggtcctactggtg

SEQ ID NO: 27757 - DNA, 366 bp, Glycine max
  unsure (1)..(366): unsure at all n locations
  Clone ID: LIB3051-087-Q1-K1-H2
gttctctcacacactcattcggtgctccgaatctcagattctagggttagggttcccaatgtctcgaccgatcagaaaatgagttcaactggtggttctaccaagggcggaaggggcaagcccaaagcctccaaatccgtttcaagatcgcagaaagctggtctccaattccccgttggaagaatcgctcgattccttaaggctgggaaatacgccgagcgtgttggtgctggtgctcctgtgtacctctctgcagtgctcgaatatctcgctgctgatgttntggaattggctgngaatgctgctagggataacaagaagaatcgtatnggtcctaagcacattcagcttgctgtgaagaacgat

SEQ ID NO: 27758 - DNA, 428 bp, Glycine max
  Clone ID: LIB3051-087-Q1-K1-H11
ctagttctagatcgcgatctagaagaaacttaatcgatcatcacttcacttcactaatacgtcatggcagacgagacccagaacaagtatgagagctctgaggttgaggtccaggatcgtggtgtttttgactttctcggtaagaaaaaggatgaagaagacaagcctcatcctcaggaggaggtcatcgccaccgagtttcaaaaagtcactgtctcagaccaaggagagaacaagcacagcctcttagaaaagcttcaccgatctgacagcagctctagctcttcaagtgaggaggaaggagaagatggagagaaaaggaagaagaagaagaaggaaaagaaagggctgaaagagaagatcgaggagaaaatagagggtgatcatcatcatcacaaggatgaggacacaagtgtccctgttgagaa

SEQ ID NO: 27759 - DNA, 369 bp, Glycine max
  Clone ID: LIB3051-088-Q1-K1-D5
atttcaatcaacggttatacccttttctatttgagcatcatcatgtccaccggggcgcagcccaaggccaagaaaacggcgtcgtccaagaagcccctctcccatcctaccttcgccgcgatgatagcggaggcgatagcgagtctgaaggagagaaccggttcgagccaatacgcgataaccaaattcatcgaaggcaagcacaaggagtggcctccaacctacaagaagcttgttctcgttcatctcaagaagtctgctgctgctggcaagctcgttaaggtcaaaaactctttcaagctcgcaccgactaagtctgctcctgttaaagccgctgctgctcccaagaagcccaccatagctgcggct

SEQ ID NO: 27760 - DNA, 446 bp, Glycine max
  Clone ID: LIB3051-088-Q1-K1-D11
ctttctctcttctctctccacccaaaccctaactcccgaccctgttcccctctcgtatccgtcatgaaaggaggaaagtccaagaccgaatctaagagagccgatcccaaacttgctgtgaataagaagggagccgccaccaaggctaggaaacccgccggcaaggggaaggcagcgaaagaccctaacaagccaaagaggcctccaagtgctttcttcgttttcatggaggagttcaggaaggtattcaacaaagaacatcctgaaaacaaagcagtgtctgctgtgggcaaagctgctggagcaaaatggaagaccatgtctgatgctgaaaaagcaccttatgtggcaaagtctgagaaaaggaaagtggagtacgagaagaacatgagagcctataacaagaaacaggcggaaggtcctactggtggggatgaagaagaatc

SEQ ID NO: 27761 - DNA, 446 bp, Glycine max
  Clone ID: LIB3051-088-Q1-K1-E9
cccacgcgtccgcccacgcgtccgattaaaaccctatagcatcagcccatcaactagcagaaaggagtttgtgtaagggaagaagatggtgtcaggttctggaatctgcgcaaagcgagtggtggtggacgctcgccaccacatgttgggtcggctagcgtccatcgtggcgaaagagcttctgaatgggcagaaggttgcggtggtgcgctgcgaagagatttgcatctccggcggtctggtgaggcagaagatgaaatacttgagattcctccgcaaacgcatgaacaccaaaccctcccatggccctatccacttccgcgccccagccaagatcttctggcgcaccgttcgtggaatgataccacacaagacaaagcgtggggaagctgctcttgctcgtttgaaggtttatgaaggaatccctcctccatatgacaagacca

SEQ ID NO: 27762 - DNA, 440 bp, Glycine max
  Clone ID: LIB3051-088-Q1-K1-E12
gttacctccaagcacaatgatgatgagcagtacgtttgggagtcccaagctggaggttcattcactgtcaccagggatacctctggtgaggttcttggcaggggtactaagatcactctcttcctcaaggaggatcagctagagtaccttgaggagcgccggttgaaggatttgattaagaagcattctgagttcattagctacccaatttctctttgggttgagaagactaccgagaaggagatttctgacgatgaggatgaggaagagaagaaggatgaggagggtaaggtggaggatgttgatgaggagaaggagaaggaagaaaaaaagaaaaagaagatcaaggaagtgtcacatgaatggtccttggtgaacaagcagaagcctatttggatgaggaagcctgaagagatcacaaaagaggagtattctgcttt

SEQ ID NO: 27763 - DNA, 432 bp, Glycine max
  Clone ID: LIB3051-088-Q1-K1-F8
ttccttttgaaggttagaagtgctacaatacaaacaatggcagctactcaggaagatgtgaagcttttgggtattgtgggaagcccatttgtgtgcagggtccagattgcccttaagttgaagggagttgaatacaaatttttggaagaaaatttgggcaacaagagtgatttgcttctcaaatacaaccctgttcacaagaaggttccagtgtttgttcacaatgagcagcccatagcagagtctcttgtgattgttgaatacattgatgagacatggaagaacaaccccatcttaccttctgatccttaccaaagagccttggctcgtttctggtccaaattcattgatgataagattgtgggtgctgtatcgaaatctgttttcacggttgatgagaaagagcgtgagaagaatgttgaagaaacatat

SEQ ID NO: 27764 - DNA, 443 bp, Glycine max
  Clone ID: LIB3051-088-Q1-K1-F11
cccacgcgtccgcacaaactagtaaatagtaatattattcttcgaatccattttgttattcataatgggtgttttcacatttgaggatgaaaccacctcccctgtggctcctgctaccctttacaaagctctagttacagatgccgacaacgtcatcccaaaggctgttgatgccttcaggagtgttgaaaaccttgaggggaacggtggccctggaaccatcaagaagatcactttcgttgaggatggagaaagcaagtttgtgttgcacaaaatagaatcagttgatgaggcaaacttgggatacagctatagcgtagttggtggagttgggttgccagacacagtggagaagatcacattcgaatgcaaattggctgctggtgccaacggagggtctgctgggaagctaactgtcaaataccaaaccaaaggagatgctc

SEQ ID NO: 27765 - DNA, 379 bp, Glycine max
  Clone ID: LIB3051-088-Q1-K1-G5
ctcctcttctgccctccacacaacttctctctcctctctctctctctacagatccttctttcttctcttcgctgctcactgtagcgtagccatggctttcagagttggaggagcgggaggaggaaatgcctcttctggcatgggtgttgctgagcatagcgtaagcacgttcctggaattgcagaggaagaaagttcatcgctatgtgatttttaaaattgacgagaaaaagaaagaggttgttgttgaaaaaactggaggccctgctgagagctatgatgatttcactgcatccttgcctgaaaatgaatggcgatatgctatctttgactttgattttgggacatctgagaacttgccaaagaaccaaatccttttt

SEQ ID NO: 27766 - DNA, 465 bp, Glycine max
  Clone ID: LIB3051-090-Q1-K1-A2
cccacgcgtccggccacgcgttcgtccacgcgtccgcacaaaagtgttgcacttgagtgaaaagtagtgtgttaagaactaaacaatttttcaatggcgtccaagaaacaagatgagcgagctgaggcatctgcgaaagttgctgccaaagaactcgaacaagtcaacagagaaagaagagaccgtgatttccgtgttgctgctgaacaacaacaacatcatcatcaggaagatcaacaaaaacgtggtgtaatcgggttcatgtttaaagcggtgcatgacacctactagaacgccaaggaagctgtcgatggcaagaaagaagctactaataacgcgtacagtaatacagaagttattcacgatgttaacatttagaccgatgacgtgtcagctacgggggaagtacgggacatatcagccacatagactcatgatatctacgattctgtcacggacaacaac

SEQ ID NO: 27767 - DNA, 457 bp, Glycine max
  Clone ID: LIB3051-090-Q1-K1-B2
gaggaagctccggcaggtgattatgccatcacagatttcaatgcaggtgctattgctgctgatggccagtggcctggtacaattgatcaatcatggagtgatgcagttccacaacctattccagcagcacctggtgtcaactggggggcacctgcagaagcacctgctgctgttgcagaaggagattggggtgaagctgttccaccaccacaacaaatccctgttcctccctctggaattgactctgtccaaccaactggctgggaataaactagtgttttttgatgctatgattttgccctgtccttcaatttagttgtctttcttagaagtaaaatatggatcagtttttttgtagcaaagcaacttggtttttttttttttctagtttgttatgagtggcaaaatattatttttaacatggtaaaaaacaaagactgaatgagctagttcggca

SEQ ID NO: 27768 - DNA, 423 bp, Glycine max
  unsure (1)..(423): unsure at all n locations
  Clone ID: LIB3051-090-Q1-K1-B11
acgctatgagtgccggaaatcgctgcccacagtgcaagggagagaaggttgtgcaggagaagagagtccttgaagttattgtagaaaaggggatgcagaatgggcagaagataacattccctggcgaagctgatgaagcgccggacacaattactggggatatcgtctttgtccttcagcagaaggaacatcccaaattcaaaagaaaggctgaagatctttttgtagagcacactttgtcccttaccgaggccttgtgtggcttccaatttgtgctgactcacttggatagccgtcagcttcttattaaatcanatccccggngaagttgtgaagcctgattcatacaaggctataaatgatganggaatgcccatgtatcagaggccattcatgaaaagggaaacttacattcacttcact

SEQ ID NO: 27769 - DNA, 457 bp, Glycine max
  Clone ID: LIB3051-090-Q1-K1-C3
cccacgcgtccgcccacgcgtccgcccacgcgtccgggaagactaacagacagtaagggcagagcggtggatttcaagaacacacttcttataatgacatcaaatgttggaagcagtgtgattgagaaaggaggccgtaaaattggatttgatctggattatgatgagaaggatagcagttataacagaatcaagagcctggtaaccgaggagctaaaacaatacttcaggccagaatttttgaataggttggatgaaatgatcgtcttcaggcagctcacaaaactggaggtgaaggagattgctgacataatgctcaaagaggtgtttgaaagactgaaggtgaaagatattgaacttcaagtgacagaaagatttagggacagagtggtggaggaaggttataaccctagttatggagctagacctctaagaagagccataatgcgacttttgg

SEQ ID NO: 27770 - DNA, 467 bp, Glycine max
  unsure (1)..(467): unsure at all n locations
  Clone ID: LIB3051-090-Q1-K1-E3
cccacgcgtccgcccacgcgtccgggtgattcctggggagtatggtttcattgctcagctgagggagggtcgccaggtcaagaagagaccaactgagtttcgtgttgataaggtcctccagccctttgatgaaaacaagtttaacttcactaaagttgggcaagaagaggtcctgtttcagcttgaggctagcaatgatggggaggctcaattctttccaaatgcacctattgatgttgagaattctcctagttttgttgccatcaatgtgagtcctattgaatatgggcatgttctgctgattccacggatttttaagtgtttacctcaaaggattgaccatgcaagcttcttgcttgcacttcaaatggcagttgaagcaaggaatccatattttaggttgggttacaacagcttgggtgcatttgcaaccattaaccatctncactttcaggcatattacttgg

SEQ ID NO: 27771 - DNA, 441 bp, Glycine max
  Clone ID: LIB3051-090-Q1-K1-E4
ggatttggaaggattggccgtttggtggccagtgttgcccttcaaaggaatgatgttgaactggttgctgtcaacgatcctttcatcaccactgattacatgacatacatgttcaagtacgacaccgttcatggccagtggaagcattttgatgtgaaggtgaaggactctaatacccttctctttggtgagaagcccgtcaccgtttttggaatcaggaaccctgaggaaattccatggggtgaggctggtgctgattatgttgttgagtcaactggtgtattcactgacaaggacaaggctgctgctcacttgaagggtggtgccaagaaggttgtcatctctgccccaagcaaagatgcacccatgtttgttgttggtgttaacgagaaggagtacaagccagagcttgacattgcttccaatgctagctgcactacc

SEQ ID NO: 27772 - DNA, 392 bp, Glycine max
  Clone ID: LIB3051-090-Q1-K1-H4
cccacgcgtccgaagttctgaaaatgagttccaaggttgtgcttgttctacttatgttcttggccactatacttgtgatctcctctgaggttgcacccgatgatgcatacgagaattttgacaaaatagatgggaagcctagtgcagatggggtagatgaaagcaagtattggcgtggcggctatggtggcggctatggtggtggttatggaggtgggcgtggaggctatggaagtgggcgtggaggctatggagggggacgtggtggatatggcggctgacgatgtggctatggtggcaggcgtggtggctatggcggcagtcgtggtggccgacgttgtggctatggtcctaatgaacataacgaggctggtgttgatgcttaccctcac

SEQ ID NO: 27773 - DNA, 342 bp, Glycine max
  Clone ID: LIB3051-090-Q1-K1-H6
cggacgcgtgggccgcagctgcttgtattcgcaccgcaaacagtgagccatggtcgtctgaaggaacaagcgcatcttcaaggggaagaagggtggcaagaagaaggcagctgatccctttgccaagaaggattgatatgacattaaggctccttctgtgtctcaagtgaataatgttggcaaaaccctcgtctctcgtactcagggtaccaagattgcttatgaaggactcaagcatagagtgtttgacgtctacttggctgatcttcacggggatgaggatcatgcattcgagatgattaggctgagagctgaagatgtgcaagggaagaatgttctgac

SEQ ID NO: 27774 - DNA, 323 bp, Glycine max
  Clone ID: LIB3051-090-Q1-K1-H7
cgcccacgcgtccgcccacgcatccgcacaaaaggggtccactagagagaaaagggggcgcaaggggaaacaatcacacaatggcgtacaacaaacacgaggagcgagctgaggcagctgcgaaagttgctgccaaagaactcgaacaagtcaacagagaaagaagagaccgcgatttcggtgtcgctgctgaacaacaacaacaacatcaccaggacgatcaacaagaacctggcgtaaacgggaccatgtctaaggcggggcatgacaactccgagaacgccaccgaagctgaccttggcaagaaacaagctacaaataac

SEQ ID NO: 27775 - DNA, 432 bp, Glycine max
  Clone ID: LIB3051-091-Q1-K1-A2
tcgagatcgacgacgatctgaaactgcgagcattttgggacaagaggatctcacaggaggtcatcggagatgcactcggtgaggaatttaagggctatgtcttcaaaattaccggaggttgtgacaaacaaggatttccaatgaagcagggagtgctgactcctggtcgtgttagacttttgcttcacaggggaactccttgcttccgtggatatggaaggcgtaatggagagcgtaggagaaagtctgttcgtgggtgcattgtcagcccagacctctctgttttgaacttggtaattgtgaagaaaggtgagaatgatttaccaggattgactgatgttgagaagccaaggatgagaggcccaaagaggagctaatccaaaattcgtaaactgttcaacctgtctaatgaggatgatgttaggaagtatg

SEQ ID NO: 27776 - DNA, 418 bp, Glycine max
  Clone ID: LIB3051-091-Q1-K1-A5
gcaaagtgttgctttcagcacaaaagcacttgtttcatccatgcttaattacattcgctgcatgttttcaagcaagcgttttcattggaggcctttcatatggagttgatgatcagtctcttaaggatgtattttctgactttggagatatggttgatagtaaatttggctcactttcattgctgttacatggtgtcctatttcaaccacccgccagcctcactttaccatatgttcttcagtttcctttgttgtcattataatttttccatggcattataatcacagcaagcgtagcattttatgtcattcctaaataactataattgtttttgtgctgatgtattcaatggaaaatttcttgggttttcttaaaaaacaatatattttatattttttatgttattttttttatttt

SEQ ID NO: 27777 - DNA, 414 bp, Glycine max
  Clone ID: LIB3051-091-Q1-K1-C7
cccacgcgtccggttgccattctcatcctcttctttctctctctaccattgccatggatgcctacaagcaccggccatccagcgccttcaattctcccttctggactacaaattctggtgctcctatttggaacaacaactcctctttaaccgttggagctagaggtccaattctgctggaggattatcatcttgtggagaagcttgcaaattttgatagggaacgtatcccagaacgtgttgtccatgccaggggcgctagtgcaaagggtttctttgaggtcacccatgacatttctcacctgacatgtgcagatttccttcgagcccctggagttcagacgcctgtaattgttcgtttctcaactgtttcattcatgagcgtggtagccctgaaaccttgagggaccctcg

SEQ ID NO: 27778 - DNA, 425 bp, Glycine max
  Clone ID: LIB3051-091-Q1-K1-C8
cccacgcgtccgcttaaaccctagccgctcttctcttcattcttcactttggaaacaatcataatggcgttctgtaataaggttggaaatgtcttgaggcagggtgctgctcgcagcacacatgcccctgttgcgtccatgcttaattacatccgctgcatgtcttcaagcaagcttttcattggaggcctttcatatggagttgatgaccagtctcttaaggatgcattttctggctttggagatgtggttgatgcaaaagttataactgatagagacagtggaagatcaaggggatttggatttgtcaacttctccaatgatgagtctgcaagttcggcactctctgcaatggacgggaagggatccctaaatgggcgaagcattcgggtatcctatgcaaatgataaaccatctgcacctcg

SEQ ID NO: 27779 - DNA, 431 bp, Glycine max
  unsure (1)..(431): unsure at all n locations
  Clone ID: LIB3051-091-Q1-K1-C11
tgcatttctatttctaactaattattgtgcttattattattgttgagaaagaaaagaatggcggattaataaaattgtttgagttgaacacaggggccaagattccttctgttgggttagtcacttgtcaagctgaacctggtgttgtagccaaagctgtcaccacatccattctggttggatacaggcatattgattgtgctcaagcgtataacaatcaagcagagattggatctgctcttaagaagctttntcatgatggtgtggtgaagcgtgaggacttaatgatcaccttcaaactctggtgtacagatcatgcttcaatagatttgcccaaagcattggattaaacattgcaggattttccacttgattaccttgacctctatctgatccaatggtcaatgcgcattaaaagcctatcagtttga

SEQ ID NO: 27780 - DNA, 366 bp, Glycine max
  Clone ID: LIB3051-091-Q1-K1-D11
atacgaaatgaagagtactatcttctttgctctctttctagtttgtgccttcaccatctgggacgggccttcagccaccggtcagttcgtgctcgacactgatgatgatcctcttcaaaacggtggcacatactatatgttgccagttatgagaggaaagggcggtggaatagaagtagattcaactggaaaagaaatatgccctatcactgttgtgcaatcacccaatgagctcgataaggcgattggactagtctttacatctccattacatgccctttttatcgccgaaggctatcctttgagcattaagtctggttcattagctagtatgacgctgtgtgccggcatgcctactgggtgggc

SEQ ID NO: 27781 - DNA, 384 bp, Glycine max
  Clone ID: LIB3051-091-Q1-K1-D12
tccacgcgtccgtccacgcgtccgatcagttgatgaggcaaacttgggatacagctatagggtaggtggtggagttgggttgccagacacagtggagaagatcacattcgaatgcaaattggctgctggcgccaacggagggtctgctgggaagctaactgtcaaataccaaaccaaaggagatgctcagcccaacccagacgacctcaaaattggcaaagtcaagtctgatgctcttttcaaggccgttgaggcctaccttttggccaatcctcattacaactgatccaattcgatcttcagtattcagtgatctgcaaagaccttgttttatattatatacaagagttttcttgccttgggtggagtgttattcaatcactt

SEQ ID NO: 27782 - DNA, 410 bp, Glycine max
  Clone ID: LIB3051-091-Q1-K1-E11
cccacgcgttcgcacacacaactactacaagtacttccttacaatcaaaaccaacaacagcgatggcaagttatcaaaagcactacgatgatcagggtcgcaaggttgacgagtatggcaacgttgagaagcaaaccgacgaatacggcaaccctgttcatgctgctagtgtcacctatgtagccaccagaactgctgctggtggttacagtgatgacattaataagcaacatgataccaccaatgcctacggcgtagacactggtagacagcattctagtggtggctacgatggtgacactaataaacatcatggaactactggtggctataatgatgacaccaatagacatcatggaactaccggggtctatggtataaacaccgatagggaacaacaatggactact

SEQ ID NO: 27783 - DNA, 387 bp, Glycine max
  Clone ID: LIB3051-091-Q1-K1-F10
ctcttgctacttgaagaaagtaggatacaaccctgacaagattccttttgttcctatgctgggctttgagggagacaacatgattgataggtccacaaaccttgactggtacaagggtccaactctgcttgatgcacttgaccagattagtgagcccaagaggccctctgacaagcccctcatgcttacccttcacgatgtgttcatgattggaggtattggaactgcgccagtggtacgtgttcgataccggtgtcttgaagcctgaaatggttgtgacttttgcaccaactggactgacatctgaagtcaagtctgtggagatgcaccatgaatctcttacagatgcacatgcttgtgacaatgtcagattcaatgttaagaatg

SEQ ID NO: 27784 - DNA, 364 bp, Glycine max
  Clone ID: LIB3051-091-Q1-K1-G12
cccacgcgtccgtgcatgcactttcactcgaagaaccttgaagcgagtctgggccagagcggccagcgacaacaactgaatcagctagggttgctttgcttgctatcttgttggaggattttctgttcaagagaagatggtaactagaattgtggatcttcgttcagacacagttacaaagccaactgaagcaatgagagctgctatggcaagtgctgaagttgatgacgatgttctaggctatgatccaactgcttttcgcttagaaacagagatggcaaagacaatgggcaaagaagctgctctttttgttccatctggcactatggggaaacctgtatctgtacttgttcattgtgatgtc

SEQ ID NO: 27785 - DNA, 410 bp, Glycine max
  Clone ID: LIB3051-092-Q1-K1-A2
ccaagatccaggacaaagagggcatccccccagatcagcagaggctgatttgtgccggtaggacaacttgaggatggaagaacccttgctgattacaacattcagaaggaatccacccttcacttggtgcttcgtttgagaggtggtatgcagattttcgttaaaactttgaccggaaagaccataaccttggaggtggagagttcagataccatagacaatgtgaaagctaagattcaggacaaggaaggtatcccaccagaccaacagaggcttatctttgccgggaaacagcttgaagatggaagaacccttgctgactataacatccagaaggaatctaccctgcacttggtgttgcggcttcgtggtggcatgcaaatctttgttaagactttgactggaaaaac

SEQ ID NO: 27786 - DNA, 229 bp, Glycine max
  Clone ID: LIB3051-092-Q1-K1-A6
acgggcgaacttgggatacagctacagcgtggttgggggtgctgcattgccagacacggcggggaagatcgcattcgactgcaaattggttgctggtcccaatggagggtctgctgggaagctcactgtcaaatacgaaacaaaaggagatgctgagcccaaccaagacgaactcaaaactggaaaagccaaggctgatgctctcttcaggccattgaggcttaccttt

SEQ ID NO: 27787 - DNA, 386 bp, Glycine max
  Clone ID: LIB3051-092-Q1-K1-B5
gcgcccacgcgttcgcccacgcgtacgctccgccacttctgaatctattgaatcaacaatcatgtcggacggagagcaccatttcgagtccaaggccgacgccggagcctccaaaacctaccctcagcaagccggtaccatccgcaagaacggctacatcgtcatcaaaggccgtccctgcaaggttgctgaagtttcgacttacaaaactggaaagcacggtcacgctaagtgtcactttgatggaattgatattttcactgccaagatacttgaggatattgtgccctcttctcacaactgcgatgttcctcatgtgaatctgactgattaccagctcattgatattgctgacgatggatttttgagtctgcttactgaaaatg

SEQ ID NO: 27788 - DNA, 444 bp, Glycine max
  Clone ID: LIB3051-092-Q1-K1-C3
ccgctcaacaactataataacatctttctctctccgaacagatcaaactagggccacctgaagcgccaaatcagtccatgatttcaccgttaaagatgccaagggaaatgatattaatcttggtgactacaaaggaaaggtccttatcattgtcaatgttgcctcacaatgtggcttgactaattcaaattacactgagctcagtcagttgtatgagaaatacaaacagaaaggtctggaaattctggcatttccatgcaatcagtttggggcacaggagcctggatctaatgaacagatacaagagtttgtttgtactcgcttcaaggctgagtttcccgtttttgacaaggttgatgtgaatggtgacaaagctgctccactgtacaagtatctaaaatcaagcaaaagtggactctttggggatggtatcaaatggaactt

SEQ ID NO: 27789 - DNA, 450 bp, Glycine max
  Clone ID: LIB3051-092-Q1-K1-C5
cggacgcgtgggttccaccactggtggttttgaagctggtatttccaaggatggacagagtcgtgagcgtgctctccttgcattcactcttggtgtgaggcagatgatttgctgctgcaacaagatggatgccactacacctaagtactccaaggcaaggtacgatgaaattgtcaaggaagtttcttcctacatgaagaaggtcggatacaaccctgacaaaattccttttgttcccatctctggttttgagggagataacatgattgagaggtctacaaaccttgactggtacaagggtccaacccttcttgaggcccttgatcagatcaatgagcccaagaggccatcggacaagcctctccgattgccccttcaggatgtctacaagaatggtgggataggaactgtgcctgttggacgggttggaaccggtgtcttgaaacctgg

SEQ ID NO: 27790 - DNA, 434 bp, Glycine max
  Clone ID: LIB3051-092-Q1-K1-C7
cactttccaatacaataatcactaactgaatattcgatcggagatgtctgccgccgccggggaagctagcgctcccgccgtcgaaaagccggttgaggaggtgaaggcgccgaaccccgcgaaggagaagaaacctaaggctccgaaggaaaagaagccaaaacaggccaaaacagcttcacatcctccatattttcagatgattaaggaggctttgatcgctttgaacgagaaaggaggatcgagtccttatgcgatagcgaagtacatggaggagaagcacaaggcggtgctccctgcgaatttcaagaagattctaggtctgcaactaaagaaccaagctgcgagagggaaactcgtgaagatcaaggcttcgtacaagttaaccgaagccgcgaagaatgagaacaccgtcaaagtgacgaatgccaacg

SEQ ID NO: 27791 - DNA, 405 bp, Glycine max
  Clone ID: LIB3051-092-Q1-K1-E2
gagaaacatggcttccttaagctccttagtgctgctccttgcagctctaattctatcccctcaagttcttgcaaactatgagaatcccccagtgtacaagcctcccactgagaaaccaccagtttataagcccccagttgagaagcctcctgtttacaaacctccagttgaaaaccccccaatttataagcctccagtagagaagccaccagtgtacaagcccccagttgagaaacccccagtgtacaagcccccagttgaaaaaccaccagtgtacaagcccccagttgagaaaccaccagtgtacaagcccccagttgaaaaacccccagtttacaagcccccagttgaaaaacccccagtgtacaagcccccaggtgaaaaaccaccagtgtacaagccccc

SEQ ID NO: 27792 - DNA, 456 bp, Glycine max
  Clone ID: LIB3051-092-Q1-K1-F2
gggaattcacttaggagaagaagaaatgtccatggagtcctgaatgcactgagctgggggattttgatgcccgttggtgccataatagcaaggtatttgaaggtgttcaaatctgcagaccctgcttggttttaccttcatgttacatgccaaacctctgcctacatagttggtgttgctgggtggggaactggtctcaaactcggaagtgactcggttggtattaagtataacacccatagagcactcgggatcaccctcttctgccttggaacccttcaggtttttgctctgctcttgaggcccaacaaagaccacaaaatcagaatctactggaacatttaccactacgccgttggatactccaccataatcatcagcatcatcaacgtctttaaagggttttgatgcattggagacttcttgtagggatcgctacaatgactgggaacatgc

SEQ ID NO: 27793 - DNA, 463 bp, Glycine max
  Clone ID: LIB3051-093-Q1-K1-A5
gcatttttctctcgctctctgccttccatcaccctcgccatttcccttcccaagatagtagaagatggcagacgctgaggatattcaacctcttgtttgtgacaatggaacaggaatggttaaggctggttttgctggagatgatgccccacgtgctgtgtttcccagcattgtaggtcgtcctcgtcacactggtgtgatggttggcatgggccaaaaagatgcatatgttggtgatgaggcacagtctaagaggggtattttgactctcaagtaccccattgaacacggaattgtgagcaattgggatgatatggaaaagatttggcatcataccttctataatgagcttcgtgttgccccagaagagcatccagttctcttaactgaggcccctcttaaccctaaggctaatcgtgagaagatgaccccaatcatgttggagacctttaacaaccctggt

SEQ ID NO: 27794 - DNA, 437 bp, Glycine max
  Clone ID: LIB3051-093-Q1-K1-A10
cttgttccttttgaaggttagaagtgctacaatacaaacaatggcagctactcaggaaggtgtgaagcttttgggtattgtgggaagcccatttgtgtgcagggtccagattgcccttaagttgaagggagttgaatacaaatttttggaagaaaatttgggcaacaagagtgatttgcttctcaaatacaaccctgttcacaagaaggttccagtgtttgttcacaatgagcagcccatagcagagtctcttgtgattgttgaatacattgatgagacatggaagaacaaccccatcttaccttctgatccttaccaaagagccttggctcgtttctggtccaaattcattgatgataagattgtgggtgctgtatcgaaatctgttttcacggttgatgagaaagagcgtgagaagaatgttgaagaaacatatg

SEQ ID NO: 27795 - DNA, 422 bp, Glycine max
  Clone ID: LIB3051-093-Q1-K1-A11
atttctacacatccctagctctgtcgttccgtcgttgacgatggcgtttggtgtgcgaggccctgacctccgctctctctttcttctctctctcttgtccatcgcttccgccaatgtcttcttcgaagagcgtttcgatgacgggtgggaaaatcgatgggttaaatcagattggaaaaaagatgagaacgtggctggggagtggaaccacacctctggtcaatggaatggagacgctaatgacaaaggtattcaaaccagtgaggattacagattctatgctatttcagctgagtaccctgaattcagcaacaagggtaagacactagtctttcaattttctgttaagcacgaacagaagcttgactgtggtggtggctacatgaagttgctcagtggggatgttgatcataagaaatttg

SEQ ID NO: 27796 - DNA, 417 bp, Glycine max
  Clone ID: LIB3051-093-Q1-K1-B11
gattatcctaagtctttgggaatagtgctgcaatggcttcaagtcaggaggaggtgacgcttttgggagctactggaagcccatttgtgtgcagggttcatattgccctcaagttgaagggagttcaatacaaatatgtcgaagaaaatttgaggaacaagagtgaactgcttctcaaatccaacccagttcacaagaaggttccagtgtttattcacaatgagaagcccatagcagagtctcttgtgattgttgaatacattgatgagacatggaagaacaaccccatcttgccttctgatccttaccaaagagccttggctcgtttctggtccaaattcattgatgataaggtttttggtgctgcatggaaatccgttttcacagctgatgagaaagagcgtgagaagaatgttg

SEQ ID NO: 27797 - DNA, 364 bp, Glycine max
  Clone ID: LIB3051-093-Q1-K1-C2
ctgatgtacaaagtacagatgcaatgctatgaggatgctaaactgatgaagctgttccctgagattgttagatctctgtatgaccaggatgtgctggctgaagataccattcttcattggttccgaaaaggaacaaactccaagggcaggcaaacctttgtgaaggcgctcgaaccctttgttaattggctggatgaggctgaagaggaggagtaagtctggtggaggttcatggctagggctgaagaaattatcttgtcttgcagcccttgtaccattagctaagatattggctttgaagtctataagttcagttctgcctagtactaattatctatttaatttgagtttgtgtttgacttct

SEQ ID NO: 27798 - DNA, 419 bp, Glycine max
  Clone ID: LIB3051-093-Q1-K1-D3
cgaattagggttttccaattcgcagagcaactcaacacaacgaaccaaaccaacaatgtggcagccgcagcctcagtcgcagccgcaacacgggcaagcggcgctggagcaggtgcagtgcttcggtcgcaagaagacggcggtggccgtgacctactgcaagcgcgggcgcggtctcatcaagatcaacggctgccccatcgagctcgtcgagccggagatcctccgctttaaggccttcgagcccatcctcctgttgggaaagagccgcttcgccggcgtcgacatgcgcattcgcgtcaagggcggcggccacaccttccagatctacgccattcgccagagcatcgccaaggcgctcgtcgcgttctaccagaagtacgttgatgaacagagtaagaaggagatcaaggacattc

SEQ ID NO: 27799 - DNA, 467 bp, Glycine max
  Clone ID: LIB3051-093-Q1-K1-F4
cttgtactgttctattagttcatactaagttctgaaaatgagttccaaggttttgcttggtctacttatgttcttggccactatacttctgatctcctctgaggttgcacccgatgatgcatacgagaattttgacaaaatagatgggaagcctagtgcagatggggtagatgaaagcaagtattggcgtggcggctatggtggcggctatggtggtggttatggaggtgggcgtggaggctatggaagtgggcgtggaggctatggagggggacgtggtggatatggcggcggacgaggtggctatggtggctggcgtggtggctatggcggcgggcgtggtggcgggcgtggtggctatggtcctaatgaacataacgaggctggcgttgatgctaaccctgacaacttagaatgcaactttctaaaggctatatatggggttaagttattgcattaaataaaac

SEQ ID NO: 27800 - DNA, 397 bp, Glycine max
  Clone ID: LIB3051-093-Q1-K1-F12
attagttcattctctttgcgcagatccctacctctcctttcaagatgcagatcttcgtgaagaccctcaccggaaggaccatcacccttgaggtggaaagctctgacaccatcgacaacgtcaaggccaagatccaggacaaggaaggaattcccccggatcagcaacgtctcatcttcgccggaaagcagctcgaggacggccgtaccctcaccgactacaacatccataaggagtcaacccttcaccttgtccttcgtctccgtggtggcatgcagatcttcgtcaagactctcactggcaaaaccataaccctagaggtttaaagctctgacaccattgacaacgtcaaggtcaagatccacgacaaggagggaatcctcccagaccagcaacg

SEQ ID NO: 27801 - DNA, 472 bp, Glycine max
  Clone ID: LIB3051-093-Q1-K1-G3
gcagaactctgcttcttcggattccgatcgcacgcgccgtcaccatggtgaacgttccgagaaacaaagaagacatactgcaagagtaaggagtgcaggaagcacacgctgcacaaggttacccaatacaagaagggtaaggatagcattgctgcccaaggaaaacgccgttatgatcgcaaacaatccggttatggtggacaaactaagcccgtctttcacaagaaggctaaaaccaccaagaagattgttctgaggttgcaatgccagggttgcaagcatgtctcccaacacgctattaagaggtgcaagcactttgagattggtggtgacaagaaaggcaagggaacatcactcttctaggttgagaattaggatttagagctctatgtttcagcaatgttgggaatgtttgtatctctctggattttatctgctaagtatattttattattttgcaacaccttgttat

SEQ ID NO: 27802 - DNA, 405 bp, Glycine max
  Clone ID: LIB3051-094-Q1-K1-A12
gattattattcttccatttccattaaaaagaaagtatcataaatgggtatttacacatgcgaggacgaaagcacctccccagaggctactgctactctatacaaagctctagttacagatgccgacaacatcatcccaaaggctcttgattccttcaagagtgttgaaaacgttgagggaaatggtggccctggaacaatcaagaagataactttcgttgaggatggagaaactaagattgtactgcacaagatagaagcagttgatgaggcaaacttgcgatatagctacagcgtattgggtagtgctgcgttgccagacacaacggagaagatcacattccactccaaattggctgctggtcccaatggaggctctgctggcaagctcactgtcgaataccaa

SEQ ID NO: 27803 - DNA, 417 bp, Glycine max
  Clone ID: LIB3051-094-Q1-K1-B8
tgcttgcaaattatttgaaccaatctatgatcaaacagatggtggtgatggctatgtgtctgttgaagtatctcccaggctcgctgatgacactgagggaaccatagaagctgcaaaatggcttcataaagtggttgatcgccccaatgtgtatattaagattcctgctacagaggcatgtgtgccttcaattaaggaagttattgctaatgggataagtgtgaatgtgacgctgatattctctcttgcaagatatgaagctgtaatagatgcttacttggatggtcttgaggcatctgggttaaatgacctctctagagttacaaggggttgcttcttctttgtcagtagagtggacactctcattgacaaagcccttgagaaaattggcaccccagaggctcttaatctacgtgg

SEQ ID NO: 27804 - DNA, 419 bp, Glycine max
  Clone ID: LIB3051-094-Q1-K1-D9
aatcaatcaaattctttgagttgaacacaggggccaagattccttctcttgggttagggactaggcaagctgaacctggtgtagtagctgaagctctcaccacagccattcaggttggatacaggcatattgactgtgctagtgcgtataagaatcaagcagagattgattctgctcttaagaagctttttgatgatggtgtggtgaagcagtgaggacttatggatcacttccaaactctggtgttcagatcatgcaccataagatgcgccaaaagcattggataaaacattacacgaattgcaacttgactatctagacctctatctgatccacaggccagtccgcatgaaaagtggaacatttggactcaataaaaaatatcttgagcaaccagacattaccaatacattgaaagc

SEQ ID NO: 27805 - DNA, 301 bp, Glycine max
  Clone ID: LIB3051-094-Q1-K1-H4
caattatattgattccttgtatgagggtattgacttctacacaaccatcacccgtgcccgtttcgaagagcttaacatggacctattcaggaagtgcatggagcccgtggagaagtgtttgcgggatgctaagatggacaagagcaccgtccatgatgttgttcttgtcggtggttctactaggattcccaaggttcaacagttgttgcatgacttcttcaacggaaaagagctttgcaagagcattaacccaaatgaaactgttgcctatggtgcagcagtgcaagctgccattctcaat

SEQ ID NO: 27806 - DNA, 305 bp, Glycine max
  Clone ID: LIB3051-094-Q1-K1-H8
atttatacctacctctccctcaagaatccaatcttcgacagaccctcactgctagactatcaaccttgacgtgggaagctatgacaccatcgacaacgtcaaggccatgattcacgacaaggaaggaatccaccctgaccagcaacgtctcatattcaccagaaagcaactcgaggacggtcgtacccttgctgactacaacattcataaagagagtactcttcaccttgtactccgtctccgtagtggcatgcagatcttctttaagacactcaccggcaagaccataaccctagatgttgaaa

SEQ ID NO: 27807 - DNA, 275 bp, Glycine max
  Clone ID: LIB3051-095-Q1-K1-C1
ctcgacgtctacaactacaagatcaaacacctactcaaaccctccgattccccctgggccaaccgcatcatcttacacctcctcaacatcaaacacgactctctactacaaggcctcatcaagatggcagatctcactattaatctggctgccatttgcactcccactgattacaacacccttcctctctacaccatttacaacaatttcatctacgcgctccccgtggtgaaatacttttccgaaaacaacaagcgccttatacatttctctac

SEQ ID NO: 27808 - DNA, 414 bp, Glycine max
  Clone ID: LIB3051-095-Q1-K1-D6
gtagtgttggtgggttgcaaagatgcttgggggtcttctccataggggtcataagataaaggggacagtggtgttgatgcgcaagaatgtgttggacgtgaatagcgtaaccagcgttgggggaattattggtcaaggtctcgacttagttggctcaacactcgatactcttactgccttcttgggccgatccgtgtctctccagcttattagtgctaccaaagctgatgccaacggaaaagggaaacttggaaaggctacctttttggaaggtatcattacttcattgccaactttgggagcaggccaatctgcattcaaaattaattttgaatgggatgatgggagtggaattcctggagcattttatatcaagaattttatgcaaactgagtttttccttgtgagtttgac

SEQ ID NO: 27809 - DNA, 337 bp, Glycine max
  Clone ID: LIB3051-095-Q1-K1-D10
ggggaattggaactggagaaattcatcactcacacagttccattctcagagattaacgaggcttttgattacatgctgaaaggggagtccatcagatgcatcattcgaatgggggagtaaatctatatcagaccaatgatgacatgacatggtccctgttgggggactgagttctctttctggttgtgaaaagaagaaaataaatttcatatatgatatatatccctttaggattattgaatttgtgaaaacttgtgagtttgagtgtagagaatgatagggcctttgctgctgttattgtctaatgcatgataaataaaatgtcggttttttgtcg

SEQ ID NO: 27810 - DNA, 305 bp, Glycine max
  Clone ID: LIB3051-095-Q1-K1-E12
ctgggaagctcactgtcaaatacgaaacaaaaggagatgctaagcccaaccaagacgaacgcaaaactggaaaagccaaggctgatgctctcttcaaggccattgaggcttaccttttggcccatcccgattacaactaatcctcttcaacttacttgtcatcactttcttgcttggagacttatccaatcactctgttctcaacttaagttgccttccaatgtatccagtctttcctttcttctttccttttcccatataattgtgagacttatgatatatctgtatctcacttcatcaataat

SEQ ID NO: 27811 - DNA, 174 bp, Glycine max
  Clone ID: LIB3051-095-Q1-K1-F1
ccatcaaaaaagatcactttccttgaggatggagaaaccaagtttgtgctgcacaaaatagaaagcattgatgaggcgaacttgggatacagctacagcgtggttgggggtgctgcattgccagacacggcggagaagatcacattcgactccaaattggttgctggtcccaat

SEQ ID NO: 27812 - DNA, 473 bp, Glycine max
  unsure (1)..(473): unsure at all n locations
  Clone ID: LIB3051-095-Q1-K1-F2
aagcccgtttgtgtgcagggtccagattgccctcaaattgaagggaattgaatgcanattggtggaagataatttggcaaacaagagtgatctacttctcanatccaaccccgtttacaagaaggttccagtgtttattcataatgagaagcccatagcagagtctcttgtgattgttgagtacattgatgagacatggaagaacaaccccatcttgccttctgatccttaccaaagatcctttgctcggttttggtccaagttcatagatgacaagattgtgggtgcttcatggaaatctgttttcacggttgatgagaaagagcgtgagaagaatgttgaagaatcgttggaggctctgcagtttcttgagaatgaactacaggacaaaaggttctttggaagagatgaatttggatttgtagatattgctggtgtcttcattgcattttcatcccaatttttcaagaagt

SEQ ID NO: 27813 - DNA, 358 bp, Glycine max
  Clone ID: LIB3051-095-Q1-K1-F6
cccacgcgtccgccttaagctccttagtgcttctccttgcagctctaattctatcccctgaggtgcttgcaaacgatgagagtcccccaatgtacaaacctaccactgagaaaccaccagtttataagcccccagttgagaagcctcctgtttacaaacctccaattgaaaaccccccaatttataagcctccagtatagaagccaccagtgtacaagcccccagttgagaaacccccactgtacaagcccccagttgaaaaaccaccaatgtacaagcccccagttgagaaaccaccagtgtacaagcccccagttgaaaaacccccaatttacaagcccccagttgaaaaaccccc

SEQ ID NO: 27814 - DNA, 458 bp, Glycine max
  Clone ID: LIB3051-095-Q1-K1-G7
ccggcctgaaacccgggtcggcgacgcgtccgcccacgcgtccgctgatggcaagacccaagtcactgttgagtactacaatgacaagggtgcgatggttccaatccgcgtccacactgtgctcatctccacacagcatgatgagactgtcacaaatgatgagattgcagctgatcttaaagaacacgtgattaagcctgtgattcctgagaagtaccttgatgagaagaccattttccatttgaacccttctggcaggtttgtcattggagggcctcatggctatgctggtctcaccggccgcaagatcatcatctacacctatggaagatggggtgcacattgtggtggtgccttctttgggaaggatcctaccaaggttgataggattggtgcctacattgtaaggcaagctgcaaaaagcattgtttcaaatggacttgcttggaaggcaattt

SEQ ID NO: 27815 - DNA, 416 bp, Glycine max
  unsure (1)..(416): unsure at all n locations
  Clone ID: LIB3051-095-Q1-K1-H1
acgcccacgcgtncgaaacatggctttcttaaagctcccttagtgctgctcccttgcagctctaatgggtgtcctctcaaagtgcttggcaaactatcgagaatccccccagtgtacaaagccttccacttgagaaaaccaccagtnttataaagcccctcagttgagaaagccttcctgtgtacaaacccttcagtttgaaaacccctccaatttataatgcctccagtagagaagccaccagtgtacaagcccccagttgagaaacccccagtgtacaagcccccagttgaaaaaccaccagtgtacaagcccccagttgagaaaccaccagtgtacaagcccccagttgaaaaacctccaggttacaagcccccagttgataaacccccagtgtacaagcccccagttgaaaa

SEQ ID NO: 27816 - DNA, 409 bp, Glycine max
  unsure (1)..(409): unsure at all n locations
  Clone ID: LIB3051-095-Q1-K1-H2
acgcccacgcgtncgcccacgcgtncgggtgttttcacattcgaggatgaaatcaactcccctggggctcctgctactctgtacaaggccctagttacagatgccgacaacgtcatcccaaaggctcttgattccttcaagagtgttgaaaacgttgagggaaatggtggcccaggaaccatcaagaagatcactttccttgaggatggagaaaccaagtttgtgctgcacaaaatagaaagcattgatgaggcgaacttgggatacagctacagcgtggttgggggtgctgcattgccagacacggcggagaagatcacattcgactccaaaatggttgctggtcccaatggagggtctgctgggaagctcactgtcaaatacgaaacaaaaggagatgctgagccca

SEQ ID NO: 27817 - DNA, 442 bp, Glycine max
  Clone ID: LIB3051-096-Q1-K1-A10
ggagagcagggaatcattgaggttgctcgtcacccagatgcagtcagtgtagtcacaggagtggtaggctgtgcaggactgaagccaacagttgctgcgatagaagcagggaaatacatagctttagccaacaaagagacattgattgctggaggtccttttgttcttcctcttgctcagaagcataatgtaaaaatacttccagctgattcagaacattctgccatctttcagtgtatccaggggttgccagagggtgcacttaggagagttattttaactgcatctggaggtgctttcagggattggccagttgataaactgaaagatgttaaagttgctgatgcattaaaacatcctaactggaatatggggaaaaagataactgtggactctgctacccttttaataagggtctagaagtaattgaagcacattactt

SEQ ID NO: 27818 - DNA, 437 bp, Glycine max
  Clone ID: LIB3051-096-Q1-K1-B8
cgcacactgtcacaggtgtagcggcgaaactgaggtcgtagaaagaatggcgaaaacgacgtcgttgttgctctttacactgctcctcttcggaaccttagctctcatccaggcgaagaaatcgaaggaggatttgaaggaagtgacccacaaggtttactttgatgttgagattaatggaaaagaagcaggtcgtattgtgatgggtctttttggaaaggctgttccaaaaactgcagaaaactttcgagctctttgcactggggaaaagggaactggtaaaagtggcaagcctctccattacaaaggtagctcattccatagaattattcctagctttatgctccaaggaggtgattttacacatggcaatggtatgggtggagaatcaatttatggagagaagtttgctgatgagaacttcaagttaaagcata

SEQ ID NO: 27819 - DNA, 439 bp, Glycine max
  Clone ID: LIB3051-096-Q1-K1-C4
catcagcgcacgggtggtgtttttgaacgtgaggcctcaaccaaggcctggaaaaggtgtgacaaacacttgtgaagtctgcgagcgtagccttcttgactctttccgcttctggtctcttggttgcaagattgttggaacatctaagaacttccagaagaggaagaagcagtcaatggcaatgtcatcagattctgaggactcgtacagtagcatacagcgtacatggtcttaagaaaaactgcaaagttcagagcttcacaacatccactccactctcaacttccgttgattacaaaacggcctatagaagaaagggaatacctcaccgtgccccaatggtgggactaatcatagaatattagtgatagtgggtatttataggctatttgctataatgctcttacggagtctcaaaatactactatactaatgcgag

SEQ ID NO: 27820 - DNA, 435 bp, Glycine max
  Clone ID: LIB3051-096-Q1-K1-D6
gagaaacaagcccttggagaagtgagtcctgagcttctggagacccaagtgaatcctgctgtgtgggaaattagtgggcacatggtgctgaagaggaagaaggactatgaggaggcatctgaagccaatgcttggaggcttcttgctgaggtttccctctctgaagagaggcttctagaagtcactgctcttgtttttcaagccattacatcatcggttgagatgaatgtcaagcctcaacgtcttgaggaagttgatgccgttagcccaaacgcacagcatgccatggtggctggttcacatgaatgccttgttctccagtaacaaggctatgaacaaattcgtagtgattatgaactaaatattgcttgccatgttacgtttcagttctaataagtgtagtaccttatattatggtccagttactggagtctg

SEQ ID NO: 27821 - DNA, 429 bp, Glycine max
  Clone ID: LIB3051-096-Q1-K1-D10
tcgtctttgcgcagttccctacctctcctttcaagatgcagatcttcgtcaagaccctcaccggaaagaccatcacccttgaggtggaaagctctgacaccatcgacaacgtcaaggccaagatccaggacaaggaaggaattcccccggatcagcaacgtctcatattctccggaaagcagctcgaggacggccgtaccctcgccgactacaacatccagaaagagtcaacccttcaccttgtccttcgtctccgtggcggcatgcatatcttcgtcaagactctcactggcaaaaccataaccctagaggtcgaaagctctgacaccattgacaacgtcaaggccaagatccaggacaaggagggaatccccccagaccagcaacgtctcatcttcgccggaaagcaacttgaggacgggcgcaccc

SEQ ID NO: 27822 - DNA, 226 bp, Glycine max
  Clone ID: LIB3051-096-Q1-K1-E9
ggtttctgtagcctccaaccataaagagaggtttatggctcccaaacatactattacacgtttgtgtgttttatagaacaagggtcacattgtcaccaataaggagattccttcactcccttcagatcgcaaggggaaaacacgcactcgagtgcactctgtgaggaacctcattcgagaggttgcctgctttgcaccttattaaaaacgaataactgagttgctc

SEQ ID NO: 27823 - DNA, 439 bp, Glycine max
  unsure (1)..(439): unsure at all n locations
  Clone ID: LIB3051-096-Q1-K1-E10
gatacaattgtttatgcttacagatcaggtgaggtgattcggctaccaaaaggggtttcaattccagtgacactaaaagttctggagtttgagcttttccacttctgtccaatccaagaaatagctccaagtatatcatttgcagcaatagggctactggatatgttcaacactggaggagcagtggagcaggttgagattcataaccgagcagcaacgaaaacaatagctcttagtgtaaggggaagaggcagatttggagtttactcctcccagagaccactgaagtgtgtggtaggtggcgctgaaaccgacttcaactatgactcagagaccgggttgacaaccttctccattccagtttctccagaggagatgtacagatggtcaatagagatccaagtttgagtcctttntaagacttggggtttgatgcatt

SEQ ID NO: 27824 - DNA, 434 bp, Glycine max
  unsure (1)..(434): unsure at all n locations
  Clone ID: LIB3051-096-Q1-K1-F8
gcctctttttggaattttccagataccctcatttatggacataatcactgacctcgccgtgttcattactccgctatggattgcggttatcgtcggcgtcgtcgtgggctgggcgtggaagcccaaatgggcctttcaccccaaagacgctcttctcaagtttcgctctcctcgccctaccaatccccaaaacgacaccgcttttacctactgcgccaccagatcctccgcgcgtgagaaagacgcgagtgggagtcctgtggtgacggaagacgatttgctgcatctgtggaagttggttgaggaaaaagacggagggcgggcatggattcagatgatggaccgttctaccccgaccatgacctatcaagcgtggcgtaaggatcctgagagtggaccgncgcagtaccggagcagaacggtgttcgaagacg

SEQ ID NO: 27825 - DNA, 423 bp, Glycine max
  Clone ID: LIB3051-096-Q1-K1-G2
aagaggttcaagtttcccgagaacagtgttgaactttatgctgaaaaggccaacaatagggtgctttgcactatagcacaggctgagtctatccgctacaagctccttggtggcctagctgagcgcaaggcttgctatggtgtcttgagagtttgttatggagagtggcgctaagggatgcgaggtcattgagagtggaaaattgatagcccatacagccaaatctatgaagttcaaggatggttacatgatttcttctgggcaacctgtcaaagattacattgactctgcagtgagacatgtgctccagagacagggtgttcttggcattaacgtgaaaatcatgcttgattggcatcctaaagggatacaaggtcctaaaactacccttccagatcttgtcacaatccattcttcaaaaga

SEQ ID NO: 27826 - DNA, 281 bp, Glycine max
  Clone ID: LIB3051-097-Q1-K1-B4
acgcacgcctcaacatccggtctgtgctccattcattatgtctccgtcgttggatcttccccccaagggtggcttcagatttgatctatgccgaagaaacgcaatgctacaaaacaagggcctcaaagccccaacctttctcaaaactggcaccactattgtcagtttagttatccaggatggtgtcattcttggggctgatactaggtcaactgatagacctatagaggcagataaaaactgtgagaaaattcattatatggcacccaacaatatattgc

SEQ ID NO: 27827 - DNA, 284 bp, Glycine max
  unsure (1)..(284): unsure at all n locations
  Clone ID: LIB3051-097-Q1-K1-B6
acccacgcgcccccttcgncctttaaatagagaaacaaatttcagcactgggtggctttaccgacgtcaggggagcacagaacagcatcgatatcgaaaatctcgctcgctttgctgttgatgaacacaacaaaaaagagaatgcagttctggagttagtgagggtgattagtgcaaagaaacaagtggtttctggcaccttgtactatatcactatggaggcaaatgatggtgtgactaaaaaggtttatgaaactaatgtgttggagaaaccatggttgaac

SEQ ID NO: 27828 - DNA, 452 bp, Glycine max
  Clone ID: LIB3051-097-Q1-K1-B12
gcgtccgccctttcgtccgaatattttccattctctttgtgtatttccctacctctcccttcaaggtgagtcgatttcttctgtttttcttcttcgttctttccatgaattgtgtatgttctttgatcaatacgatgttgatttgattgtgttttgtttggtttcatcgatcttcaattttcataatcagattcagcttttattatctttacaacaacgtccttaatttgatgattctttaatcgtagatttgctctaattagagctttttcatgtcaaatccctttacaacaagccttaaatgttgattcattaatcgtaaattagggcttttttcattgattacttcaaatccgttaaacgttaccatagatcaaggctttttcatgaattacttcagattcgttaaacaacagccttattttttatacttctgtggtttttcaagaaat

SEQ ID NO: 27829 - DNA, 441 bp, Glycine max
  Clone ID: LIB3051-097-Q1-K1-D7
cgtccgaccagcgtccggcttttcttccttcaaattgaggtctctaagtttcactttctgggcagagggcaacctcctttctctgagactctgagtatcgtatcgatttattattatttctaattctctcttatcaggtccattgaatatgtctccgtcgatggatcttcctcccaagggtggcttcagttatgatctatgccgaagaaacgcaatgcttcaaaacaagggcctcaaagccccaacctttctcaaaactggcaccactattgtcggattagttatccaggatggtgtcattcttggtgctgatactagggcaactgaaggacctatagtggctgataaaaactgggagaaaattcattatatggcacccaacatatattgctgaggaacaagcacaacatctgatacagatgctgtaacaaacaaggttaa

SEQ ID NO: 27830 - DNA, 251 bp, Glycine max
  Clone ID: LIB3051-097-Q1-K1-E5
acccacgcgtccgcccttgcgtcctcaaatttatcgtttatctttgcttgcatcgcgtccgcaagctggcctgcgactgcaccggcctacaaggcttcctcgtcttcaacgccttcagcagtggcaccagttccggtctcggatctctcttactcgagcgtatcttcgtcgattactgcaaaaaatccaaattagggttcaccatttaccttttctcacaagtttcaaccgcaatcttagaaccctacaac

SEQ ID NO: 27831 - DNA, 302 bp, Glycine max
  Clone ID: LIB3051-097-Q1-K1-E10
acattaacattagcttttctgtttgggattttggtggccaggacaagattcgggccttgtggaagcactacttgcagaacacccagggtcttatttttgttgtagacagcaatgatagggacagagttgttgatgccagagatgagttgcataggatgttgaatgaggatgaactgatagatgcagtattgcttgtgtttgccaacaaacaagatcttcctaatgcaatgaatgctgctgagattaccgacaagttgggtctacactctttcaaacagtgccactggttcatttaaagcatc

SEQ ID NO: 27832 - DNA, 432 bp, Glycine max
  Clone ID: LIB3051-098-Q1-K1-A8
ccacgcgtccgaatcattcataatgggtgttttcacattcgttgatgaaatcaactcccctgtggctcctgctactctttacaaggccctagttacagatgccgacaacgtcatcccaaaggctcttgattccttcaagagtgttgaaaacgttgagggaaatggtggcccaggaaccatcaagaagatcactttccttgaggatggagaaaccaagtttgtgctgcacaaaatagaaagcattgatgaagcgaacttgggatacagctacagcgtggttgggggtgctgcattgccagacacggcggagaagatcacattcgactccaaattggttgctggtcccaatggaaggtctgctgggaagctcactgtcaaatacgaaacaaaaagagatgctgaacccaaccaagacgaactcaaaactgggaa

SEQ ID NO: 27833 - DNA, 217 bp, Glycine max
  Clone ID: LIB3051-098-Q1-K1-B3
aggacctgttggacccggttgaggaccttaaaaacgaggcctacaagtggatcctacaccactgcaagcgatacaaagaagccgaggggataatcgggaacagcttctaggagctcgaaccgtgagcctgtaacgagctgcataaggaagaacaaggtatgcctccggattacgcggtgggaccgcttgtaagaatggaagctagtcatgcctactt

SEQ ID NO: 27834 - DNA, 287 bp, Glycine max
  unsure (1)..(287): unsure at all n locations
  Clone ID: LIB3051-098-Q1-K1-B8
acccacgcgaccgcgntgccagaataaagattgaactttaaggtcacttgccatagagtagagttagcgccaggctcacgtagatcaatctggtgcctttagtcaagtttacctgcctgcagatgaacgtgttgaaagttctattaggctgctagcaaaggcttatgtagtagtgaatgactcgagctatcatcaactagtcagccattggttaaacactcatgcaaatgatgagccattcatcatagcaacaaacatgcatctaatagttgttcaccctaatttat

SEQ ID NO: 27835 - DNA, 303 bp, Glycine max
  unsure (1)..(303): unsure at all n locations
  Clone ID: LIB3051-098-Q1-K1-C2
gacaaaataaaataatctgtggccaagttaccatctactgtactacttgttctatataaattctacccatcccttgctctcatgtcacattgtatttgcactacgaccatttcaggaagaaagaagtgcaatggacatcggaacctatggctatcctacaccagcagtgaaaaagattgagtcttactatgatgtgccagagggagtggatattcggggaagatatgatgcagagtttgcaaaaatcctcacataagatgctttgaaattcgttgctgactngcaacgtgagttcatgaacca

SEQ ID NO: 27836 - DNA, 365 bp, Glycine max
  Clone ID: LIB3051-098-Q1-K1-F10
tttgctgttagggttttagctcagcttcttctagatttaaggaggatgggtaaggaaaaggttcacatcagtattgtggtcattggccatgtcgactctgggaaatccactaccactggtcacctgatttacaagcttggaggcattgacaagcgtgttattgagaggtttgagaaggaagctgctgagatgaacaagaggtctttcaagtatgcctgggtgctggacaaacttaaggctgagcgtgaaagaggaatcaccattgatattgctttgtggaagtttgaaacaacaaagtattattgcacagttattgatgcgcctggacataaggatttcattaagaatatgattactgggacatc

SEQ ID NO: 27837 - DNA, 451 bp, Glycine max
  unsure (1)..(451): unsure at all n locations
  Clone ID: LIB3051-098-Q1-K1-H8
acccacgcgttcgcactttgnggtttnncttgactctttggtttttggacagtgggaagatcgcatgcggagggggcttttccgctatgacgttacagcctgtgaaaccaaggtgattcctggggagtatggtttcattgctcagctgaatgagggtcgccacctcaagaagagaccaactgagtttcgtgttgataaggtcctccagccctttgatgaaaacaagtttaacttcactaaagttgggcaagaagaggacctgtttcagcttgaggctagcaatgatggggaggctcaattctttccaaatgcacctattgatgttgagaattcttctagttttgttgccatcaatgtgagtcctattgaatatggtcatgtcctgatgaatccactgatttttaagtgtttaccttaaaggaatgaccatgcaagcctcttgcttgcactt

SEQ ID NO: 27838 - DNA, 316 bp, Glycine max
  Clone ID: LIB3051-100-Q1-K1-A3
ctacggcgtagacactgataggcagcgttctaatggtagctacgatggtgacactaataaacatcatggaactactggtggctataatgatgacaccaatagacatcatggaactaccggtgtctattttatatacaccgataggcaacaacatgggactactggtggctattccggtgacactggtaggcaacatgggaacattggtggcccttactatggaaccaacaccgcaaacaccggtactggtcccagaagtggaaccactggctggaccggttatggaagcaactgtggcactgattattgaacaact

SEQ ID NO: 27839 - DNA, 443 bp, Glycine max
  Clone ID: LIB3051-100-Q1-K1-B11
tgagaaacaatgaaaggaaataattggtctttgaaaatgcagggaggaaagaaagctgtgtagtccatcaaggggacagctgcaaacattggtgcttctgccaaggctggcatggagaaaaccaaggccactgtccaggagaaggcagaaagaatgacggcacgtgatccgatgcaaaaggagttggcaacccagaagaaagaggcaaagatgagccaggcagagctggacaagcaggcggcgcgtcagcataacacggcggcgaagcaggctgccacggcagggcacatgggacaacccatggggacccatcagacgtcagctatgcccggtcatggaaccggacagcccacgggccatgtcaccgagggagtggtgggctcacaccctattggaaccaacagaggcccgggtgggactgctacggcccataatacccgtgc

SEQ ID NO: 27840 - DNA, 411 bp, Glycine max
  unsure (1)..(411): unsure at all n locations
  Clone ID: LIB3051-100-Q1-K1-B12
cccacgcgtccgcccacgcgtccgcccactcgtccgnccacgcgtccgctcaagtttctgagtctccggaactcggggctaccttcacttcgcacatctcgaaccctttctttccggcaactaggttaaagttcatcaatggcaggccgtggcaaacccttagaatccaccgccgccaaaaaggccacctaaaggaccaccaaacccggcctccaattccccgtcggccgaatcgcccgtttcttcaaggccggaaaataccccaaccccttcgaccccgttcttcccgttaacttcgccgttgtcctcgaatatctcgcagccgaggttttggagttggctggaaacgctgcgagagacaataagaagactcgaattgtgccgngccacattcaattggcggtgaggaac

SEQ ID NO: 27841 - DNA, 441 bp, Glycine max
  Clone ID: LIB3051-100-Q1-K1-E9
ttcttcttcgtcgttatcttcttcttttgttgtttgtgtgtttgttttttctctgacctgaaaatgtcttgctgcggtggtaactgtggttgcggaagcgcctgcaagtgcggcaacggctgcggaggctgcaagatgtacccagacttgagctacaccgagtcaaccaccaccgagaccttggtcatgggagtggcaccagttaaggctcaattcgagagtgctgaaatgggtgttcccgctgagaacgatggctgcaaatgtggagctaactgcacctgcaacccctgcacttgcaagtgaggtgttggagagctaaagcttcaagcagagatggcccttagaaataatgataaaaactatatgtagtttcaaaacttcaaaattatgtagtatgtattaatgtgcactctggtgttttgtgtctaaacaaacaccctt

SEQ ID NO: 27842 - DNA, 461 bp, Glycine max
  Clone ID: LIB3051-101-Q1-K1-B11
cggacgcgtgggcggatctctcttgttagagcgtctctccgtcgattacggcaaaaagtgcagattagggttcaccatttacccttcccctcaggtttcaaccgcagtcgtggagccctacaacagcgtcctctccacccactcccttctggaacacaccgacgtggctgttctcttggacaacgaagccatctacgacatctgtaggagatctctcgacatcgagaggcccacctacaccaacctcaacaggctcatttcccagatcatttcgtcgctaaccacttccttgaggtttgatggcgctatcaatgtggatatcactgagtttcagaccaaccttgtgccataccccaggatccacttcatgctttcttcttatgctccggttatctctgccgccaaggcctaccacgagcagttgtcggtgccagagatcacgaatgccgtgtttgagcccg

SEQ ID NO: 27843 - DNA, 392 bp, Glycine max
  Clone ID: LIB3051-101-Q1-K1-C3
ctaattctcatttcttcatcgttcgattcttctcctcctaaagatgcagatcttcgtgagaactttgaccggtaagaccatcacccttgaggtggagtcctccgacaccatcgataacgtgaaagctaagattcaagacaaggaagggatcccacctgaccagcagagacttatctttgcgggtaaacagcttgaggatggtcgaacccttgccgactacaacatccaaaaggaatccactctccacctcgtgcttcgcctcaggggtggcatgcaaatctttgtcaagactttgactggcaagaccatcaccctcgaggtcgaatcctcggacaccattgataatgtcaaggccaagatccaggacaaggagggtatccctccagatcagc

SEQ ID NO: 27844 - DNA, 392 bp, Glycine max
  Clone ID: LIB3051-101-Q1-K1-C6
ttgttgttgtaactcgttcttcttcttttgttgttctgtgtttgtgtttgtgttttctgtcacctgaaaatgtcttgctgcggtggtaactgtggttgcggaagctcctgcaagtgcggcaacggctgcggaggctgcaagatgtacccagacttgagctacactgagtcaaccaccaccgagaccttggtcatgggagtggcacctgttaaggctcaatttgatggtgctgaaatgggtgtgcccgctgagaacgatggctgcaaatgtggaccaaactgctcctgcaacccctgcacttgcaagtgaggtgttgggagagcaagcttcaagcagagatagcccttgattaggaataatgataaactattaatgggtagctgaaaacttat

SEQ ID NO: 27845 - DNA, 385 bp, Glycine max
  Clone ID: LIB3051-101-Q1-K1-C7
gcttcagctgccattatgactgttaattctggcattagaaaaattcttccaggttctgagatttgtgactttgactttgagccatgtggttattcaatgaactctgttgaaggtgctgctgtttctaccattcatgttaccccagaagatggtttcagttatgcaagctttgagactgttgggtatgacttcaaagtggtgaatctgaacgaaatggttaagagggtattggcatgttttctcccaactgagttctctgttgcagttcatgtggatggtgcaagcaagttgtttgatcagacgtgttttctggatgttaagggatactgtcgcgaagagaggagccacgaagggcttggaatggttggttctcttggctaccaaa

SEQ ID NO: 27846 - DNA, 451 bp, Glycine max
  unsure (1)..(451): unsure at all n locations
  Clone ID: LIB3051-101-Q1-K1-C9
ggcgccactcgatgtttccatttgcctgcatgcctttggtattgtggggtgtggttcgtttagtggtgtcaagtcttgcgaacgtgagggtgcatgagtggtaatcgggatgtttttgttgcacggctccatgcttgcgcatgcaacgtgtgacatgcatccttttcattgtcaccttagccttcgtggcttaggtgctgacgattggttcctgtgttgcctacctaccaaacggtattcgtgtggctagtcagacccattccatccaggcctctttgttggggacgctggaggatttcaaagtcccacacgtgaaccacgttagtcgtccatcataacggcttcctgtggcacacgtgtggtgattgttctctcggatgcggtgcatgcagtgaacgtgggtggtctagtgcccncacattgttccttaaaatcggttgtctcggatgac

SEQ ID NO: 27847 - DNA, 452 bp, Glycine max
  Clone ID: LIB3051-101-Q1-K1-D11
cccacgcgtccgcccacgcgtccgcccacgcgtccgctcttagtcccaattttctagggttttattcattttccgatggcttctgcagatgttgagtaccgttgctttgtcggtgggctcgcttgggccactgacgaccatgccctcgagagagccttctctcagtacggcgaaatcgttgaaacgaaggtctgtttgttgcaggcatcacatctgatctcacacgattcggattcggaattttctcgatcccgttctgatctgtgatctctgatctgtttgcgttacttgatcttatgatacttgtgttactatatgattcttttattactcacgccaataggtacgttcatcttcttcctttcaccaaaggcgaagatcgatcggcttctattcggttctggttttgttttttcgtgctgttttgctttagatctgataatggttttact

SEQ ID NO: 27848 - DNA, 412 bp, Glycine max
  Clone ID: LIB3051-101-Q1-K1-E7
cccacgcgtccgcttctcaaactagtagtattattcttccattcataatgggggttttgacattcgaggatgaaatcaactcccctgtggctcctgctactctttacaaggccctagttacagatgccgacaacgtcatcccaaaggctcttgattccttcaagagtgttgaaaacgttgagggaaatggtggcccaggaaccatcaagaagatcactttccttgatgatggagaaaccaagtttgtgctgcacaaaatagaaagcattgatgaggcgaacttgggatacagctacagcgtggttgggggtgctgcattgccagacacggcggagaagatcacattcgactccaaattggttgctggtcccaatggaaggtctgctgggaagctcacttgtcaatacgaaac

SEQ ID NO: 27849 - DNA, 457 bp, Glycine max
  Clone ID: LIB3051-101-Q1-K1-F7
gtgcttatccttattgagagaaaaaatggccaaatcaatcaaattctttgagtggaacacaggggccaagattccttctcttgggttagggacttggcaagctgaacctggtgttgtagctgaagctctcaccacagccattcaggttggatacaggcatattgactgtgctagtgcgtataagaatcaagcagagattggttctgctcttaagaagctttttgatgatggtgtggtgaagcgtgaggacttatggatcacttccaaactctggtgttcagatcatgcaccagaagatgtgccaaaagcattggataaaacattacaggaattgcaacttgactatcttgacctctatctgatccactggccagtccgcatgaaaagtggaacatttggactcaataaagaatatcttgagcaaccagacattcccaatacatggagagcaatggaa

SEQ ID NO: 27850 - DNA, 463 bp, Glycine max
  Clone ID: LIB3051-101-Q1-K1-G10
cccacgcgtccggttccttttgaaggttagaagtgctacaatacaaacaatggcagctactcaggaagatgtgaagcttttgggtattgtgggaagcccatttgtgtgcagggtccagattgcccttaagttgaagggagttgaatacaaatttttggaagaaaatttgggcaacaagagtgatttgcttctcaaatacaaccctgttcacaagaaggttccagtgtttgttcacaatgagcagcccatagcagagtctcttgtgattgttgaatacattgatgagacatggaagaacaaccccatcttaccttctgatccttaccaaagagccttggctcgtttctggtccaaattcattgatgataagattgtgggtgctgtatcgaaatctgttttcacggttgatgagaaagagcgtgagaagaatgttgaagatacatatgaggctcttcagtttctt

SEQ ID NO: 27851 - DNA, 229 bp, Glycine max
  Clone ID: LIB3051-102-Q1-K1-B11
cagatcagcagaggctgattttcgctggtaaacaacttgaggatggaagaacccttgctgattacaacattcagaaggaatccacccttcacttggtgcttcgtttgagaggtggcatgcagattttcgtcaagactttgacaggaaagaccatcaccttggaggtggaaagttctgatacaattgataatgtgaaagccaagattcaggataaggagggtattcccca

SEQ ID NO: 27852 - DNA, 434 bp, Glycine max
  Clone ID: LIB3051-102-Q1-K1-C6
gctagtgatcaatcatcaacacagagctgagtgtgttgctctgtgaatccaccttgttcgtccattggaggaccattgcctcctggaatagaaatactaccacacttttcttttttcacttctctaagttgctaagttaattgctccttcattttttcactcttcgttctcgcgtacccgtgtcacggtaactcgtggtgaagtgttcgaaaatgactgtcacacctaagatctcagttaacgatgggaaacttgttgtccatggtaagaccattctgactggagtgccagacaacgttgtgctgactccaggttctggaaggggtcttgtgactggtgcttttgttggtgccacagcttcacacagcaaaagtctccatgtgtttccaatgggtgttttagaggggctccggttcatgtgttgtttccggttc

SEQ ID NO: 27853 - DNA, 431 bp, Glycine max
  Clone ID: LIB3051-102-Q1-K1-D2
gtcagcaactgggacgatatggagaagatttggcatcacacattttacaatgagctacgtgttgcccctgaagaacaccccgtacttcttaccgaggcaccactcaatcccaaggccaacagagagaagatgacccaaattatgtttgagactttcaatgtgcctgccatgtatgttgcaattcaggctgtcttgtctctgtatgccagtggacgtactacaggtattgtgcttgattctggtgatggtgtgagccacacggtgcccatatatgaagggtatgctcttcctcatgcaattcttcggttggaccttgctggccgtgatttaacagagtacttggtgaaaatccttaccgagagaggatactccttcagcacctctgccgaaaaggaaattgtccgtgatgtgaaggagaaattggcatacgt

SEQ ID NO: 27854 - DNA, 435 bp, Glycine max
  Clone ID: LIB3051-102-Q1-K1-F1
cccacgcgtccgctggagtgtgggatgtatcttggttgagttatgcacgggcggagcttggtttgagactcacgaaaattgggagcatcttgccatgatggaaagggtacttggtccattaccacagcccatgttgaagagagtcgaccgacatgctgagaagtatgttagaaggggtagattggactggcctgacggtgcaacctcaagggagagtatcaaagctgtaatgaagcttcctaggcttcagaaccttgtaatgcagcatgtagatcattcagctggcgatctcatacatctcttgcaggggttacttagatatgacccctctgaaagacttacagccaaggaagctcttagacattccttctttatgagagatcaatttagaagataattcactttctaagctgctgcatcatcgttgaccttcct

SEQ ID NO: 27855 - DNA, 435 bp, Glycine max
  Clone ID: LIB3051-102-Q1-K1-F3
ctgcctcgatcatggagaggaaaacatttgggtttttgttcttgctcctccttgtcttaggttctgatgtgacggtgaagagagcagaggcgaaagattgcttgacaaggaggcacgggttccagggtagatgcttattcgacaggcaatgtgcacatgtgtgcaggagcgatggtttcatcggtggtcagtgccgaggccctcttcgcaaatgcttttgcagcaggccatgttgatcgaaattactactgccaaagaggccatgaaataaacaaacaaacaaataaataaatagctctaaccgacacatatgtacgtagtgtcggggttctagctagctaggtaggtacgtgtgtcttttgtatggccactatacttttgatctcctctgaagttgcacccgatgatgcataccagaattttgacaaaacagat

SEQ ID NO: 27856 - DNA, 259 bp, Glycine max
  Clone ID: LIB3051-102-Q1-K1-F9
cccacgcgtccgcttcattggaagggtagttataatagatgtggagatctttcttcgctctggtcatataaaggaataatacttttctattaatttccttatctttgtatctctctgttcctttttgctaaactcaaataaataaaactatataaatgtgtaatttgtttcatcaaaaaaaaaaaaaaaaaaaaaaaaaaaaaaaaaaaaaaaaaaaaaaaaaaaaaaaaaaaaaaaaaaaaaaaaataaaaaataaat

SEQ ID NO: 27857 - DNA, 436 bp, Glycine max
  unsure (1)..(436): unsure at all n locations
  Clone ID: LIB3051-102-Q1-K1-G2
acgctgtgctattagttcatactaagttctgaaaatgagttccaaggttttgcttgttctacgtatgttcttggccactagacgtctgatctcctctgaggttgcacccgatgatgcatacgagaattttgacaaaatagatgggaagcctagtgcagatggggtagatgaaagcaagtattggcgtggcggctatggtggcggctatggtggtggttatggaggtgggcgtggaggctatggaggtgggcgtggaggctatggagggggacgtggtggatatggcggcggacgaggtggctatggtggcgggcgtagtggctatggcggcaggcgtggtggccggcgtggtggctatggtcctaatgaacataacgaggcttgggttgatgctaaccctcacaactaagaatgcaactntctaaagcttatatat

SEQ ID NO: 27858 - DNA, 441 bp, Glycine max
  Clone ID: LIB3051-102-Q1-K1-G3
cccacgcgtccgcccacgcgtccgagaaaacctaagcttagaattagaaacaaagaaaagaggagaggaaagaattgatcgttgaaaatgcagggaggaaagaaagcgggagagtccattaaggaaacagctacaaacattggtgcttctgccaaggctggcatggagaagaccaaggccactgtccaagagaaggcagaaagaatgacagcacgtgatccggtgcaaaaggagttggcaacccaaaagaaagaggcaaagatgaaccaggcggagctggacaagcaggcggcgcgtcagcataacacggcggccaaacagtccgccaccacggctgggcacatgggacatggccaccacaccaccggaaccgggactggaaccgccacgtattccaccaccggggaatatggtcagcccatgggggcccaccagacgtcg

SEQ ID NO: 27859 - DNA, 367 bp, Glycine max
  Clone ID: LIB3051-102-Q1-K1-G11
cccacgcgtccgattgtgagcaaagaaagatagtgagtgaagtaactgaagagaagggaggatgccgtgcctcaacctgagcaccaacgtgtccctcgaaggcgtcgacacctcttccatcctcgccgaagccacctcctccgtcgccagcataatcggcaaacccgaagcctatgtgatgattgtactgaaaggatcagtacccatagcttttggtgggaatgagcagccagcagcttatggagaattggtttccattggtggtcttaaccctagtgtaaacaaggaacttagtgctgcaattgcttcaattctggaaaccaaattgtcagtgccgaaatcgcggttcttcttgaaattctatgac

SEQ ID NO: 27860 - DNA, 286 bp, Glycine max
  Clone ID: LIB3051-103-Q1-K1-A4
ctttcttctattttctgccgaggaaaataaagaaagaaaagaaaaaacagcgccctagattggctcttctttgcttcggaagaaagagaaaaacatataacaatggcgttcgcttcttacctcggcatagttctattcgcttccgtcttcatactctctgctaaccaagaatttaacgaatttggagttgatggtggacctgcagcaaagcactcagacctaattttgatgcctgtacacaatgagtgcattcttaagttggctgtcaacttcttgagattgagct

SEQ ID NO: 27861 - DNA, 510 bp, Glycine max
  unsure (1)..(510): unsure at all n locations
  Clone ID: LIB3051-103-Q1-K1-C7
tactcggttccggaattcgccgggtgcgacgccacgtcgtcacgcaccacgccgtcacgacagaaaccgtattgaatttatcgtctcgtttcccgcggtcctaagatcgtgagcgagtttgcgaaacccctaactggctctcacacaacgacatcacgcactctctctcgatcaactactctctttncgtcgctcctaagtcatggacacgaattgcaccccgagggatcacagntttgatgcatcgtcaatatgcataccacagatgacatgagctgcttactgtccgatggtcaggatttcgttcacatcactagatgatggtttatgactaggttatgatgcatatgggcttgcaagtataatcgttctgagaggctattgatgcatataggttgtcgacaagccatcagcttattcagcagaggggaatagttccattctgcaagggacttgacgttatacaacaggcccagtctggaactgggaaaacagcaactttctgctctg

SEQ ID NO: 27862 - DNA, 377 bp, Glycine max
  Clone ID: LIB3051-103-Q1-K1-C9
cccacgcgtccgttcgtttcttttcgtgaatcaaacgaaaacacaagattacgttctgggatgtcgggcatggagaggcttcacaggatgttcgcgggtgcaggtggagcgctgggccatcccccaccggattcccccaccctcgattcctccgagcaggtctacatctcctccctcgcccttctcaaaatgctcaaacacggaagagctgtggtacccatggaagtgatgggtctgatgttgggagagttcgcggatgagtacaccgttcgcgttgtggatgtgttcgcgatgcctcagagtgggaccggtgtcagcgttgaagctgttgatcatgtttttcagactaatatgctcgatatgatgtagcaaactgg

SEQ ID NO: 27863 - DNA, 147 bp, Glycine max
  Clone ID: LIB3051-103-Q1-K1-D1
cccacgcgtccggtgagaagagcagtctcaaacagcaacagaacaaggtccttcacggattggtcattcttgtctgcatcagcacgcttcctgagctcctccatgattgggttctcacggttgatctccaaggtctttttgcttgac

SEQ ID NO: 27864 - DNA, 371 bp, Glycine max
  Clone ID: LIB3051-103-Q1-K1-D7
gaaattgtggccgttcaaggtgattcctggccctgctgagaaacctatgattgtggggaactacaagggggaggagaaacagttttccgcggaagagatatcctccatggttcttatgaagatgaaggagattgcggaggcgtatctaggttccaccataaagaatgcggttgtcactgtgcctgcttacttcaacgactcacaacgtcaagccaccaaggacgctggtgtcatttctgggctcaacgtgatgcgaattatcaacgagcctacccgggctgccattgcttatgggctcgacaaaaagccactagctctgggaagaagatgttctcatttttgatctcggggtgggaactttgatgtctctc

SEQ ID NO: 27865 - DNA, 308 bp, Glycine max
  Clone ID: LIB3051-103-Q1-K1-D9
ggagttggagagcatttgtaaccccatcatagcaaagatgtaccaaggagctggtggtggtgcgggtggagccatggatgaggatggtcctgctgctggcagtggaagcggtgctggacccaaaattgaggaagtcgattaagcagaccaattgtcatgggttgttcttgattttgcgaagacccttttgaagtttagataataacctgtcttgtcattatgttttggatttggattttacttttctcgtttttttaatgtacttttccccgtttcaacttaacaatgatataagttgcatatggtct

SEQ ID NO: 27866 - DNA, 408 bp, Glycine max
  Clone ID: LIB3051-103-Q1-K1-D11
gaattttgacaaaatagatgggaagcctagtgcagatggggtagatgaaagcaagtatgggcgtggcggctatggtggcggctatggtggtggttatggaggtgggcgtggaggctatggaggtgggcgtggaggctatggagggggacgtggtggatatggcggcggacgaggtggctatggtggcgggcgtggtggctatggcggcgggcgtggtggcggtcgtggtggctatggtcctaatgaacataacgaggctggggttgatgctaaccctcacaactaagaaggcaactttctaaagcttatatatgggtttaagttatcgcaataaataaaacttcatgagaaggttagttgtaatagaagtggaaaactttgtaaaggaataatacctttcatgaattt

SEQ ID NO: 27867 - DNA, 427 bp, Glycine max
  Clone ID: LIB3051-103-Q1-K1-E2
tctcaatcgttttctacataatacaaacctctctaatttttgaagcttattataccgaatctcgatatgcagatcttcgtgaaaaccctaactggcaagacgatcaccttggaggtggagtcctctgacaccatcgacaacgtgaaggccaaaatccaagacaaggagggcattcctccggatcaacagcgtttaatcttcgccggaaaacagctcgaagacggcagaaccctcgccgactacaacatccaaaaggagtccacgctccacctcgtcctccgcctccgcggcggcatgcaaatcttcgtcaaaacccttactggcaaaacaatcacgctagaggtggagtcctccgacacaatcgataacgtgaaagccaagattcaagataaggaagggattcctccggatcaacaacgtttgatct

SEQ ID NO: 27868 - DNA, 428 bp, Glycine max
  Clone ID: LIB3051-103-Q1-K1-E5
ctcgcccttctcaaaatgctcaaacacggaagagctggggtacccatggaagtgatgggtctgatgttgggggagttcgtggatgagtacaccgttcgcgttgtggatgtgtttgcgatgcctcagagtgggaccggtgttagcgttgaagctgttgatcatgtttttcagactaatatgcttgatatgttgaagcaaactggaaggccggagatggttgtggggtggtatcactcgcatcctggatttgggtgttggctttctggagtggacattaatacgcaacagagttttgaggctttaaatcaacgggcagtggctgtggtggtggaccccattcagagtgtgaaaggcaaagtggtaattgatgctttccggctgattaatccacaaactatgatgctaggtcaggaaccacgacagacaac

SEQ ID NO: 27869 - DNA, 434 bp, Glycine max
  Clone ID: LIB3051-103-Q1-K1-F1
atttcttgcagttgaagccttattatacagatgcctgcaatcgacttccaccatctgctcaggagtacccaattctgggtcttaacctgttgagattacttgtgcagaataggattgctgaattccatactgagttggaattgctttcatctgctgctcttgagaatccttgcattaagcatgctgtggagttggaacaatcttttatggaaggggcttacaatcgtgtctagagtgcacgacagacagtgccacatgatacatacgtttattttatggatcttttggcacagactgtcagagatgaaatatctggttgcagcgagaaggcctatgactatgtttcaattaaggatgctaagcaaatgttgctgatctcctctgaccaggaactacttgaatgtattaaagaggagcatgctgagtgggagatt

SEQ ID NO: 27870 - DNA, 437 bp, Glycine max
  Clone ID: LIB3051-103-Q1-K1-F3
tcgcccacgccgtccgggggagatgtagtttgaagaacctggaggatgatgagggacgaagtagggagatgaggacgaagatgaggacgaagaggatgacgaggacgaagacgatgaagaggaggatgacactaagactaaaaagaagaagagtggtaaggcacaggctggtgatggtgatggtgagcgacctccagagtgcaagcagcagtaattgtttgtttcttcggagtatcatgtggctgatgggtgtttttgaggtcctatggtgcctgacgggaaagtgggtttcaatttcatgcaatttttcatagtccttgattcattttcctccctagatccgatagtctgaatttattgagtcaatttctcctttttcccatattttgggagaatgtggttatatatttgtagtcagggatgctgtgatttgttac

SEQ ID NO: 27871 - DNA, 337 bp, Glycine max
  Clone ID: LIB3051-103-Q1-K1-G5
cccacgcgtccggagaaacatggcttccttaagctccttagtgctgctccttgcggcgctaattctatcccctcaagttcttgcaaactatgagaatcccccaatgtacaagcctcccactgagaaaccaccagtttataagcccccagttgagaagcctcctgtatacaaacctacagttgaaaaccccccaatttataagcctccagtagagaagccaccagtgtacaagccctcacttgagaaaccctcagtttataagcccccagtttagaaaccaccagtgtacaagccctcagttgaaaaaccaccaatgtacaagcccccaatttaaaaa

SEQ ID NO: 27872 - DNA, 425 bp, Glycine max
  Clone ID: LIB3051-103-Q1-K1-H6
gagcgagcagtttcagacacagagagaggggtttgggattggagggattgacgctgcgtctcttcctcttctctttcgatccatccctcattcctaatcctccaatccaaccacctcagcctcacactcacatatacacatatctgaacgcgtatcgtccctcctatggcttcaaagcgcatcctcaaggagctcaaggacttgcagaaagacccaccaacttcttgcagcgctggtccagtagctgaggacatgttccattggcaagcaacaataatgggtcctgctgatagtccttatgctggaggtgtattcctagtcactattcacttccctccggattatcctttcaagcctcctaaggttgcctttaggactaaagtgtttcacccgaacatcaatagcaatggtagcatttgtcttga

SEQ ID NO: 27873 - DNA, 435 bp, Glycine max
  Clone ID: LIB3051-103-Q1-K1-H7
cccacgcgtccgagaggttcgagaaggaggctgctgagatgaacaagaggtcattcaagtatgcctgggtgcttgacaagctcaaggctgagcgcgaaagaggaattaccattgatattgctttgtggaagtttgaaaccaccaagtactactgcacagtcatcgatgcccccggacatcgtgactttatcaagaacatgattactggtacctcccaggctgattgtgctgtccttatcattgactccaccactggtggttttgaagctggtatttctaaggatggacagactcgtgagcatgctcttcttgctttcacccttggtgtgaagcagatgatctgctgctgtaacaagatggatgccactaccccgaagtactctaaggctaggtatgatgaaattgtgaaggaagtctctttctacttgaagaagg

SEQ ID NO: 27874 - DNA, 398 bp, Glycine max
  Clone ID: LIB3051-104-Q1-K1-A5
accgacgcgtccgctcgtcacactggtgtgatggttggcatggtccaaaaagatgcatatgttggtggggagtgacaatctaagagggggattttgactctcaagtaccccattgaacatggaattgtgagcaattgggatgatatggaaaagatttggcatcataccttctataatgagcttcgtgttgccccagaagagcatccagttctcttaactgaggcccctcttaaccccaaggctaatcgtgagaagatgacccaaatcatgtttgagaccttcaacacccctgctatgtacgtagccatccaagctgttctttcactgtatgcaagtggtcgtacaactggtattgggttggattctggtgatggtgtcagccacactgtacctatcta

SEQ ID NO: 27875 - DNA, 447 bp, Glycine max
  Clone ID: LIB3051-104-Q1-K1-D2
ttaccgggccgaccgacgcgtgcgcttatcccttcggctgcagctggtgaatccactgtgttttactataagatgaaaggagatgattatggttatcttgccgaatttaaggcaggcaatgagaagaaggaagctgctgatcagtctatgaaagcatatgagtctgctaccactgcagcagaggctgatttacctccaacacatcccatccgattgggtctagctttaaatttctcagttttctattacgagatcttgaactctccagaaagagcctgtcatcttgcaaaacaagcttttgatgaagctatttctgagcttgacaccttgaatgaggagtcatacaaagacagcaccttaatcatgcaacttctcagggacaacctaactttgtggacttctgacatcccagaagatggagaagatgcccagaaagtgaatggcact

SEQ ID NO: 27876 - DNA, 434 bp, Glycine max
  Clone ID: LIB3051-104-Q1-K1-D8
gtctcatcaagatcaacggctgccccattgagctcgtggagccggagatcctccggttcgaggccttcgagcctatcctcctgttgggtaagagccgcttcgccggcgtcgacatgcgcatccgcgtcaagggtggcggccacacctcccagatctacgccatccgccagagcatcgccaaggcgctcgtcgcgttctaccagaagtatgtcgacgaacagagtaagaaggagatcaaggacattctcgtgaggtacgatcgcaccttgctcgttgcggatcccaggcgctgcgagcccaagaagtttggtgggcgtggcgcacgtgcgaggttccagaagtcttaccgttgaagaagaatggtggtggtgttttcgtgtttttggcttttggtttcggttcatgttttatgctgtggaaaaaatgaatactta

SEQ ID NO: 27877 - DNA, 436 bp, Glycine max
  Clone ID: LIB3051-104-Q1-K1-F7
gcgaaaagagattcgaatccaaggaagggaaaggaaagtaagagaagagaagaatggccgaagagggacaagtgattggtgtccacagcgtggaggagtgggaggaacatctcaagaagggacaagagtccaagaaattgattgtggtggattttactgcttcttggtgcggcccatgccgtttcattgccccaattcttgcggatatggctaaaaagttgccgaatgtcaccttccttaaggtggatgtggatgaattggcgactgtttccagggagtgggaagttgaggctatgccaaccttcctattcttgaaagaaagcaagctggtgaagaagcttgtgggtgccaagaaagaggagctgcaagacataatagtcaaacttgctgcaattgatgctgcctgaagtgccatatgaatatgttgagaataatt

SEQ ID NO: 27878 - DNA, 344 bp, Glycine max
  Clone ID: LIB3051-104-Q1-K1-F10
gcgtacgcctattcgtccggtaattttttgattgcttaattctctaaaattcgaaattctaatttcgttagggtaaagagagtgtttgtgtgtgagtgagtatggctggaaaaggcgagggtcctgctatcggaatcgatttgggaacgacgtactcttgcgtcggcgtgttgcaacacgatcgtgttgaaatcatagccaacgatcaaggtaacagaactaccccatcctacgtggctttcaccgacacagaacggttgatcggcgatgcggcgaaaaaccaggttgctatgaacccaccaacaccgttttttgatgctagccgtttgattggatggcgtttt

SEQ ID NO: 27879 - DNA, 453 bp, Glycine max
  Clone ID: LIB3051-104-Q1-K1-G12
ctttctctctttcttccttggcatatctcctctgaggaatcatcgaagaaaagcatcgtgtctcacatgtggatcagtctaactttcacgacactgtcaacaatcacgatttcatcatcatcgagttctacactccatgatgtcgccactgtaagaaccttgctcccgagtatgagaaagctacttctatctcgagtaatcatgatcctccggtatgacttgactagaattacatgccaatgatgagaagaccatacaccttgcatctcaatattatgttaggggatacccaacaattaacattctaacaaatgatggacagaatgttcatgaatacaaacgtccccgtgaagcatatggcatcgttgactatttgaagaaacaaagtggtcctgcttcaactgaaattaaatctgcttacgaagctactgctttcattggtgaaaataaagt

SEQ ID NO: 27880 - DNA, 448 bp, Glycine max
  Clone ID: LIB3051-105-Q1-K1-A3
gaccgacgcggccgcagacgcttaggcagaagtccttttgaaggaagctattcaagaacagatagaactctattgactggtgtatctcgtagggagaaattgattaatcatttaataactatataatttcactttcaaattcttataattagtatcttttaatatcttcatatttcatttgaatataatattaatatataaataaaatgaattctaatgaaaatagaaaataacacaaaaaactatacaataaataaaatagaacgacaaggtataaattgcatatatttgcatatatatgcaaatatatgcaaacaatttgcgtccaataggatttgaacctatacctaaggtttaaaatacctctgtcctatccattagacaatggacgcttctatttttctgtattacttttattccttaaccttattaactaaaaaaggttaaa

SEQ ID NO: 27881 - DNA, 420 bp, Glycine max
  Clone ID: LIB3051-105-Q1-K1-A8
cggacgcgtgggcggacgcgtggggtaactttttgattcctaaattctctaaaaggcgagattctaatttcgttaggggaaagagattgtttgtgtgtgagtgagtatggctggaaaaggcgagggtcctgctatcggaatcgatttgggaacgacgtactcttgcgtcggcgtgtggcaacacgatcgtgttgaaatcatagccaacgatcagggtaacagaactaccccatcctacgtggctttcaccgacacagaaacgttgattcgcgatgccgccaaaaaccaggtcgctatgaaccccaccaacaccgtttttgatgctaagcgtttgattgaaaggcgtttttccgatgcatcagtacaaggtgacatgaaattgtggccgttcaaggtgattcctggccctgctgagaaacc

SEQ ID NO: 27882 - DNA, 439 bp, Glycine max
  Clone ID: LIB3051-105-Q1-K1-A10
cacaactactacaagtacttccttacaatcaaaaccaacaacaactatggcaagttatcgaaagcactacgatgatcagggtcgcaaggttgacgagtatggcaacgttgagaagcaaaccgacgaatacggcaaccctgttcatgctgctagtgtcacctatgtagccaccagaactgctgctggtggttacagtgatgacattaataagcaacatgataccaccaatgcctacggcgtagacactggtagacagcattctagtggtggctacgatggtgacactaataaacatcatggaactactggtggctataatgatgacaccaatagacatcatggaactaccggtgtctatggtatagacaccgataggcaacaacatgggactactggtggctatgccggtgacactggtaggcaacatgggaacatcggt

SEQ ID NO: 27883 - DNA, 442 bp, Glycine max
  Clone ID: LIB3051-105-Q1-K1-B7
aaattccagaaacatcgtgtgcacagtaccccagaagatcgaacaaggatctccacgaagacaaacctctgttctcaactgtgtttctttacctctcacctactttcagaccataccagattgactaggctgagaagatgcagcagacaccgcctatgattcctatgatgccttcgttcccacctacgaacataaccaccgagcagattcaaaaataccttgatgagaacaagaagctgattctggcaatattggacaatcaaaatcttggaaaacttgcagaatgtgcccagtaccaagctcagcttcaaaagaatttgatgtatttagctgcaattgctgatgcccagcctcaaacaccagccatgcctccacagatggcaccacaccctgccatgcaaccaggattctatatgcaacatcctcaggctgcagcagcagc

SEQ ID NO: 27884 - DNA, 391 bp, Glycine max
  Clone ID: LIB3051-105-Q1-K1-C12
cccacgcgtccgcggagagagagagagaggttttgacgcaacacactttcactgagaaaggatctctatctaccaaggagcagaataaaacccttctctctggtaagtgaataagagaatggcttcagatcggaaacttcacactttcgaggaggtggcaaagcacgaccagaccaaggattgctggctcatcatttctggcaaggtgtatgatgtcacccctttcatggaggatcatcccggaggtgatgaggttttgttatctgcaacagggaaagatgcaaccaatgattttgaagatgttggacacagtgattctgctagagatatgatggaaaaatactacattggtgagattgattcatcaactgtaccactaaaacgtacctac

SEQ ID NO: 27885 - DNA, 437 bp, Glycine max
  Clone ID: LIB3051-105-Q1-K1-D9
aaaaaacaaacaagaaaaaaggagttagggtatgaaaaagagaataaagaaggtacacggggggtatcgcctgtgggagtgaatcaagaaccgatctgctatggctgctctgcaatacttggaatcgctgcgtaattcgcaccctgagctctacgattggcacaattcgctggccgatctgtaccagaagaagctctggcaccagctcactctcaagctcaatcagtttgtggctctcgccgtctttcacgctggcgatgctgcaatacaatcatatcacaatttcatcacagactttgagacgaacatcaaccttctcaagcttgcacattatgctgctctagttgctcggctgtattctgaaaaagaagctgctgatgattatcttggaggggtcattcaaaaacttctagacactatggagcagcgcatagaac

SEQ ID NO: 27886 - DNA, 423 bp, Glycine max
  unsure (1)..(423): unsure at all n locations
  Clone ID: LIB3051-105-Q1-K1-E3
cccacgcgtccgaaacaagccaagtgaaagagagaagaaaagtcaaagacaatgtcaggggtcatggacaagattgaggagacccttcatgtgggaggccacaagaaggaggaggagcacaagggtgagcagcaccatggtggagaatacaaaggggagcatcatggtgaacacagtactgaatacaaaggagagcatcatgttggtgagcacaagccggagcaccatggaggagaagagcacaaagaggggttcctagacaagatcaaggacaagatccacggcgaggagggtggcgccaccgccgagggcgagaagaagaagaagaagaaggagaagaagaagcatgaacatggccatgacagcagcagcagcagtgacagtgattagattatctnccactgctgcatcacctatatatct

SEQ ID NO: 27887 - DNA, 434 bp, Glycine max
  unsure (1)..(434): unsure at all n locations
  Clone ID: LIB3051-105-Q1-K1-E11
gcagagcaaagcaaagcagagccaacaacaagaagaacaaaaccaacatcaacaaccacaggaagaagaagcttgcaaattagaagaatcttcagttgaaagggaagaacacacaagaacaaagagaggaagaaacgcgaatgaagggagaattagagttgccaccagggttcagatttcaccccactgatgaagaattggtgaatcactacttgtgtaggaagtgcgcgggtcaaccaatcgcggttcccatcatcaaagaggtcgatttgtacaagtttgatccatggcagcttccagaaattggctactacggcgagaaagaatggtacttcttttctcctcgggatcggaaatacccgaacggttcacggccgaaccgtgccgncggaagcggctattggaaagccaccggcgccgataaggcgatcgga

SEQ ID NO: 27888 - DNA, 428 bp, Glycine max
  unsure (1)..(428): unsure at all n locations
  Clone ID: LIB3051-105-Q1-K1-G1
cctttgctcactcttcttctcttgcggctagggttttagcgcagcttcttctacatttaaggaagatgggtaaggaaaaggttcacatcagtattgtggtcattggccatgtcgactctgggaaatccactaccactggtcacctgatttacaagcttggaggcattgacaagcgtgttattgagaggtttgagaaggaagctgctgagatgaacaagaggtctttcaagtatgcctgggtgctggacaaacttaaggctgagcgtgaaagaggaatcaccattgatattgctttgtggaagtttgaaacaacaaagtattattgcacagttattgatgcgcctggacatagggatttcattaagaatatgattactgggacatcccaagctgactgtgctgntcttatcattgattcgaccactggt

SEQ ID NO: 27889 - DNA, 429 bp, Glycine max
  Clone ID: LIB3051-105-Q1-K1-G2
ggaaactatcctgagtggaaactctacatccaaacattggatcccgaaaacgaagacaggcttgactttgacccccttgatgttactaagacctggcccgaggacgttttgcccctccagcctgttggccgcatggtcttgaataagaacattgataacttctttgccgagaatgaacaacttgcattttgccctgccattattgtacctggtgtatactactccgatgataaattgcttcaaactcgcgtattctcctatgctgatacccagagacacagacttggaccaaattatctgcagcttcctgctaatgcccctaagtgtgcccatcacaacaatcaccatgatggtttcatgaatttcatgcacagggatgaagaggtcaattacttcccttaaggtatgatcctgtccgtcatgcggaaa

SEQ ID NO: 27890 - DNA, 304 bp, Glycine max
  Clone ID: LIB3051-106-Q1-K1-A3
cccacgcgtccgcgagcagcgagagagagaaaccctagcaaaaatgccggctggtcacggtttgagatcccgcaccagagattccttctctcgtcccttcaggaagaagggtaccatcgccctcaccacatacctcagaacctaccacgtcggcgattatgtcgacgtcaaggttaacggcgccgtccacaagggaatgcctcacaagttctaccatggccgcaccggtcgcgtctggaatggtcaccaaacgtgctgttggggtcgaagtcaacaagcaggtcggcaacagaatcattaggga

SEQ ID NO: 27891 - DNA, 464 bp, Glycine max
  Clone ID: LIB3051-106-Q1-K1-B5
cacaaagcgggttactgtctgttcaagctaccatctctctctctctttcttagtgcctgcttgccagaagttaaaatggcccaagaaactttcctattcacatctgaatcagtgaacgaggggcaccctgacaagctctgtgaccagatctccgatgctgtgctcgatgcatgcttggagcaggaccctgacagcaaggttgcctgtgaaacctgcaccaagaccaacatggtgatggttttcggagagatcacaaccaaggccaacgtggactatgagaagattgtgcgtgacacatgcaggaacattggttttgtctctgatgatgttggtcttgatgctgacaactgcaaggtcctcgtcaacattgagcaacagagtcctgatattgctcaaggtgtgcacggccacctcacaaagaggcctgaggagattggtgctggtgaccaaggtcatatgttcgg

SEQ ID NO: 27892 - DNA, 460 bp, Glycine max
  Clone ID: LIB3051-106-Q1-K1-C7
acaaaaccaagttaatgttgcaatcgcataataataaccatccaaagtttattgagagaaatttgcaagtttgaaaagaaacatggcatctcatcaacaaaacaagcaagagcttgatgaaagggcaaggcaaggagagactgttgttccgggtggcactggtggcaagagccttgaggctcagcaacatcttgctgaaggaaggagcaggggagggaaaacaaggaaggagcagctggggacagaagggtaccatgaaatgggacgcaaaggtgggttgagcactatggacaagtcaggagaagaacgtgctcaagaggaagccattgacatcgatgagtccaagttcaagactggtaataaccaagacaagaaccagaacaagtgatcatgcaacacccttcactatcatatgtagtgtgttcttatgctagcttaaatgctagtgtcttagtgtttt

SEQ ID NO: 27893 - DNA, 456 bp, Glycine max
  Clone ID: LIB3051-106-Q1-K1-C8
cccacgcgtccgcccacgcgtccgcccacgcgtccgcccacgcgtccgtgaacaagggggtctctgtctgcttcttcactttctctcgtttcaatcgaaaccaaaacaaaatcatgggcagaaaattcttcgttggtggcaactggaaatgcaatgggaccactgaggaggtaaagaagattgttactactttgaatgaggctaaagtccctggagaagatgtcgtagaagttgttgtgagccctccttttgtgttccttcctgttgtaaaaagtttgctgcgccctgatttccatgtttcggcacaaaactgttgggttcgcaaaggtggtgcttataccggtgaggttagtgctgaaatgcttgttaatttgggaattccttgggttattattggtcactctgaacggaggcagcttttaaatgaatcaaatgagtttgtgggagataaagttg

SEQ ID NO: 27894 - DNA, 443 bp, Glycine max
  unsure (1)..(443): unsure at all n locations
  Clone ID: LIB3051-106-Q1-K1-C9
attcaataccatttaccaaactcactcatcaattctcatctttcttctcactaactattagtggatcatgtcgagcgcagctggccaagtcatcaaatgcaaagctgcggtttcatgggaggcagggaagccacttgtgattgaagaagtagaggttgcgccaccacaagctggtgaagtgcgtttgaagatcctctacacctctctttgccacactgatgtttacttctgggaagctaagggccaaactccattgtttcctcgtatatttggtcatgaagctggagggattgtggagagcgtangtgaaggtgtgactcatctgaaaccaggggaccatgccctccctgtgtttaccggggagtgtggggactgccctcattgcaagtcagaggagagcaacatgtgtgatcttctcaggatcaacactgataagggtgtca

SEQ ID NO: 27895 - DNA, 453 bp, Glycine max
  Clone ID: LIB3051-106-Q1-K1-D6
cccacgcgtccggtgatgtctgggaatgcagcagtcaaaaggagtgattgggcctcatgggtacaagtgtttttaacaaacagcaacagtacagagcattttgatgcatgtaagtggacaaaatcggaaccacattcctgggaattgatcttcccaatagaggtatgtggtcctaataatggttttgaaatgtggagttctgagtgggcaaatcaaacttcatggcatttgagtttccttattgacaatcccaaacagtctacagtttttgatattctcttgggaatttctcaagattttgaaattgctggtaatactcttatgccagctttttctgttccacaggctactgccagatcttctgaaaatgcggaatcctctgcatgatctggaatttgtgttttctttcgcttgttcgtttgtttaattcaataaaggaaattaggcatgacc

SEQ ID NO: 27896 - DNA, 471 bp, Glycine max
  Clone ID: LIB3051-106-Q1-K1-E6
tttaggttcttcttcttcttcggtgagagttagagagagagagagagagagagaaggctctttttttcttttgggttggtttctcttgtttttttttttgtaggtactgaggaagaaagaccaaaactttatccgcttgcttcacttagctcaagagcgtacaattcaggcaaaggccttgaagtcggagtgtgtgttaaggaatttcttaggagttgcttctgtcttgactgaagaaatggaggtatatggcaaatctatggttgcaggtcctgcaaatgttatttttctgtcaagtattttgggccaagaaggtccagttcccggtcacaaatgcgactggaaatgtcaaaatgaacatgtttgtggaaacatgtatcgctgcaagctaactgggctgactcacatctgtgataaaaactgtaaccagagaattctgtatgacaaccatagctccctttgtcgagctag

SEQ ID NO: 27897 - DNA, 437 bp, Glycine max
  Clone ID: LIB3051-106-Q1-K1-E12
gttctacatataatcattcataatgggtgttttcacattcgaggatgaaatcaactccggtgtggctcctgctactctttacaaggccctagttacagatgccgacaacgtcatcccaaaggctcttgattccttcaagagtgttgaaaacgttgagggaaatggtggcccaggaaccatcaagaagatcactttccttgaggatggagaaaccaagtttgtgctgcacaaaatagaaagcattgatgaggcgaacttgggatacagctacagcgtggttgggggtgctgcattgccagacacggcggagaagatcacattcgactccaaattggttgctggtcccaatggagggtctgctgggaagctcactgtcaaatacgaaacaaaaggagatgctgagcccaaccaagacgaactcaaaactggaaaagcca

SEQ ID NO: 27898 - DNA, 436 bp, Glycine max
  Clone ID: LIB3051-106-Q1-K1-F5
gtgctgtactattacttcatactaagttctgaaaatgagttccaaggttatgcttgttctacttatgtggttgggcactatacttctgatctcctctgatgttgcacccgatgatgcatacgagaattttgacaaaatagatgggaagcctagtgcagatggggtagatgaaagcaagtattggcgtggcggctatggtggcggctatggtggtggttatggaggtgggcgtggaggctatggaagtggtcgtggaggctatggagggggacgtggtggatatggcggcggacgatgtggctatagtggcggacgaggtggctatggcgcttgtcgtgggggctgacgtagtggctatggtgctcatgaacataaccaggctgaggttgatgcctagccttacaacttagaatgcaactttctaaagcttatatat

SEQ ID NO: 27899 - DNA, 453 bp, Glycine max
  Clone ID: LIB3051-106-Q1-K1-F6
gaaacatggcttccttaaactccttagtgctgctccttgcagctctaattctatgccgggatgttcttgcagactatgataatcccccagcgtacaagcctcccactgagaaaccaccagctgataagcccccagttgagaagcctcctgttaacaaaccttcagttgaaaaccctccaattaataagcctccagtacagaagccaccagtgtacaatgcccccagttgagaaacccccagtttataagccaccagttcatgaaaccaccagagtacaagcccccagctgaaaaaccaccagtgtacaagccctcagctgataaacccccagtgtacaagcccctagttgacaaaccaccagtgtacaagcccccagttgagaagcccccagtttacaagcccccagctgagaagccaccatgttacaagcccccacatgagaagccaccagt

SEQ ID NO: 27900 - DNA, 442 bp, Glycine max
  Clone ID: LIB3051-106-Q1-K1-G9
ctcacgcgtccgctcaatcctctgttactcgcaaaacatacacctcttctctatgctccggggggctctctctctcgctcactctgcaactaacaaggcaatcgcaaaccaagacaccgttgtcagagaaatcaagcccaagatcaggacaatcatgcctgctggagggcctgatgatgaggacaataggtggacaccgctgttgaagccactgctgaaagagagctgctatgttcaatgcaagtcgcatgctgattctcacaacatcgaatgcaacatgtatagcttggactgtatgaacggtcctctctgctctctctgcctcgaccaccacacagatcaccgtgcaatccagattaagaggtactcataccatgatgcgatcatggactatgagattcacaaggcgttggacatcactggcgttcaaacctacattatg

SEQ ID NO: 27901 - DNA, 291 bp, Glycine max
  Clone ID: LIB3051-106-Q1-K1-H8
acgccacgcgtcacgcgtccgcagccctcacaactaagaaggaaacttgctaaagcttatataggatttaagttatcgtaataaataaaacttcattggaagggtagttataatagatgtggagatctttcttcgctctggtcatataaaggaataatacttttctattaaaaaaaaaaactaaaaaaaaaaaaaaaaaaaaaaaaaacaactaaaaaaaaaaaacaaacaaaaaagcaacacaaaggcacaagaagaagaacataaatgaagcgaaaatactaggggaac

SEQ ID NO: 27902 - DNA, 447 bp, Glycine max
  Clone ID: LIB3051-107-Q1-K1-B12
ctcacgcgtacgctccgcaccagtttcaccggacgaatatctcgttgcttggagcgatccgagaaaatctctgtaaacatgttggtttaccaggaccttcttacaggtgatgagcttctctctgactccttccgttacaaggaaattgagaatggaatgctgtgggaagttgaggggaagtgggctgttaaaggagcagttgatgcagacattggtgctaacccttctgctgaaggtggaggagaagatgatggagttgatgatgcagctgtcaaggttgacgacattgttgacacattcagacttcaagagcatcccgcattcgataagaagcagattgttaccttcatgaagaggtttatcaagaatctgactgccaagctcgatgcatagcatcaggagctgattaagaagcacattgagggagcaacttattacctgctctat

SEQ ID NO: 27903 - DNA, 490 bp, Glycine max
  unsure (1)..(490): unsure at all n locations
  Clone ID: LIB3051-107-Q1-K1-E10
ttcccgggttcgatcccacgtcgtctcgttccatctttcaatctggaatcacatanntcctgaaacataaaacattcttagcantttaatcatactactgagacgaacatgaccatccacattgtgaaagagagtttctcggaagagcaatgaagctctggtnggtgaagtcattggaatgtcantgaagaagaattctggagagttgggtctcaagtttttcttgaaaatatttgagattgctccatcagctcagaaattgttctcattcttgagagattcaacggttcctttggagcaaaatcccaagctcaagccccatgccgtgtctgtctttgtaatgacctgtgattcagcagttcagctgcggaaggccgggaaagtcactgtcagagaatcaaacttgaaaaaattaggtgctacccattttagaaccggcgtatcatacgagcatttcgaggtgacaaagtttgcacttttggagaccata

SEQ ID NO: 27904 - DNA, 417 bp, Glycine max
  Clone ID: LIB3051-107-Q1-K1-E12
cgacgcgtccggtactgttctattagttcatactaagttctgaaaatgagttccaaggtttggcttgttctacttatgttcttggccactatacttctgatctcctctgaggttgcacccgatgatgcatacgagaattttgacaaaatagatgggaagcctagtgcagatggggtagatgaaagcaagtattggcgtggcggctatggtggcggctatggtggtggttatggaggtgggcgtggaggctatggatgtgggcgtggaggctatggaaggggacgtggtggatatggcggcagacgacgtggctatggtggccgacgtggtggctatagcggcggacgtggtggcggacgtggtggctatggtcctaatgaacatatcgaggctgtggctgatgctaaccctcacaac

SEQ ID NO: 27905 - DNA, 350 bp, Glycine max
  unsure (1)..(350): unsure at all n locations
  Clone ID: LIB3051-107-Q1-K1-F1
cccacgcgtccggctgactgtgctgttcttatcattgattcgaccactggtggttttgaagcgggtatttccaaggatggacagactcgtgaacatgctctgctctcattcacccttggtgtgaaacagatgatttgctgctgtaacaaaatggatgctactacacccaagtattccaaggccaggtatgatgaaattgtgaaggaagtctcttcctacttgaagaaagtaggatacaaccctgacaagattccttttgttcctatctctggttttgagggagacaacatgattgagaggtccacanaccttgactggtacaagggtccaactctgcttgatgcacttga

SEQ ID NO: 27906 - DNA, 426 bp, Glycine max
  Clone ID: LIB3051-107-Q1-K1-F6
attctctttgcgcagttccctacctctcctttcaagatgcagatcttcgtcaagaccgtgaccggaaagaccatcacccttgaggtggaaagctctgacaccatcgacaacgtcaaggccaagatccaagacaaggaaggaattcccccggatcagcaacgtcttattttcgccggaaagcaacttgaggaccggcgtacccttggcgactaccacattcagaaggaatcaacccttcaccttggccttcggcttcgtggtggcattcaaatcttcgtcaagaattttaatggcgaaaccattacccttgaaggctaaaggtctgacaccattggacaacgtcaaggccaagatccaggacaaggaaggaatccccccagaccagcaacgtctaatcttcgccggaaagcaacttgaggacgggcg

SEQ ID NO: 27907 - DNA, 415 bp, Glycine max
  Clone ID: LIB3051-107-Q1-K1-G7
tttctgtgtttatacaaacctcatgtatgtgggagagagagtgtctttcttggctcatagcgtagcatcactatggctcttctgagtcgagcctcttcacgcttccctcagctggtttcccctcaaagagttgtttccctccacacaacgctcccatctcttaacgcatcaacatccacacccacgcccgccccatatgccccggcaccgactccgtccgcttaccctcccgacggcgtgtctaaggccgcggagttcgtgatctcgaaggttgacgatctgatgaactgggcccggcgcggctccatctggcccatgaccttcggactcgcctgctgcgccgtcgaaatgatgcacactcgcgtccgccgctacgatctcgaccgcttcggcatcattttcaggcccagccctc

SEQ ID NO: 27908 - DNA, 445 bp, Glycine max
  unsure (1)..(445): unsure at all n locations
  Clone ID: LIB3051-107-Q1-K1-G10
cccacgcgtccgttccaatatattccattctctctgtgtatttccctacctctcccttcgagatgcagatcttcgtcaagaccctcaccggcaagaccatcacccttgaggtggaaagctctgacaccatcgacaacgtcaaggccaagatccaggacaaggaaggaatccccccggaccagcaacgtctcattttcgccggaaagcaacttgaggacggccgtacccttgctgactacaacattcagaaggagagctctgacaccattgacaatgtgaaggccaagattcaggacaaggaaggcatcccaccggaccagcagaggctgatttttgctggcaagcagctcgaggatggaaggaccctcgctgactacaacatccagaaggaatcaacccttcaccttgtcctncgtctccgtggggggttttaagctcgttgtgt

SEQ ID NO: 27909 - DNA, 452 bp, Glycine max
  Clone ID: LIB3051-107-Q1-K1-H11
gaaccatcctggtcagattggaaatggctatgcccctgttcttgactgccacacttcccacagtgctgtcaagtttgctgaactcatgaccaagattgacaggcgatctggcaaagagcttgagaaggaacccaagtttttgaagaatggtgatgctggttttgttaagatgattccgaccaaacccatggtggttgaaactttctctgagtaccccccacttggtcgctttgctgtcagggatatgcgtcaaactgttgctgtgggagtcatcaagaacgtggagaagaaggatcctactggagccaaggtcaccaaagctgcccagaagaagaagtgaatcgtgcggtttggttcatcaggggatgtcgtttcttatggttacaataaatgttggtttcttgcccttgtgtcttcgtttctaggtagcttgtttttcggacatagtttga

SEQ ID NO: 27910 - DNA, 376 bp, Glycine max
  Clone ID: LIB3051-108-Q1-K1-A1
gttccctacctctcctttcaagatgcagatcttcgtcaagaccctcaccggaaagaccatcacccttgaggtggaaagctctgacaccatcgacaacgtcaaggccaagatccaggacaaggaaggaattcccccggatcagcaacgtctcatcttcgccggaaagcagctcgaggacggccgtaccctcgccgactacaacatccagaaggagtcaaccccttcaccttgtccttcgtctccgtggtggcatgcagatcttcgtcaagactctcactggcaaaaccataaccctagaggtcgaaagctctgacaccattgacaacgtcaaggccaagatccaggacaaggagggaatccccccagaccagcaacg

SEQ ID NO: 27911 - DNA, 444 bp, Glycine max
  Clone ID: LIB3051-108-Q1-K1-B6
acttgttatgcagctgcaagatgtacccagacttgagctacaccgagtcaaccacgaccgagaccttggtcatgggagtggcaccagttaaggctcaattcgagagtgctgaaatgggtgttcccgctgagaacgatggctgcaaatgtggagctaactgcacctgcaacccctgcacttgcaagtgaggtgttggagagctaaagcttcaagcagaaatggcccttagaaataatgataaaaactatatgtagtttcaaaacttcaaaattatgtagtatgtattatgttgcactctggtgttttgtgtctaaacaaacacccttagaataaagtggtcatttcttgcccttgagcaagttcaagtgttttggacttgtgatgggtgtgttaaggtcatggttgccttttttttatatatatatatatatataaatgtttggt

SEQ ID NO: 27912 - DNA, 443 bp, Glycine max
  Clone ID: LIB3051-108-Q1-K1-C2
cccacgcgtccgcctctctctcctccaatggccgaccagctcaccgacgaccagatcgccgagttcaaggaggccttcagcctcttcgacaaggacggcgatggttgcattactaccaaggaacttgggactgttatgaggtcacttggtcaaaacccaactgaggcagaactgcaggatatgataaacgaggttgatgctgatggcaacggaaccatcgatttcccagagttcctcaacctgatggctcgcaagatgaaagacaccgactcagaggaggagcttaaggaggctttccgtgtgtttgacaaggatcagaatggtttcatctctgcagctgagctccgccatgtcatgacaaatcttggggagaagctgacggacgaggaggtggatgagatgatccgtgaggccgatgttgacggtgatggacagatcaacta

SEQ ID NO: 27913 - DNA, 450 bp, Glycine max
  Clone ID: LIB3051-108-Q1-K1-C11
cccacgcgtccgtaaggctgtttggacggtcacacgcagttgtattgtagaactgaacaggggtttctctttctctttctctgtctgcttcttcactttctctcgtttcaatcgaaaaaaatcatgggcagaaaattcttcgtcggtggcaactggaaatgcaatgggaccactgaggaggtgaagaagattgttactactttaaatgaagctaaagtccctggagaagatgttgtagaagttgttgtgagccctccttttgtgttccttccttttgtaaaaagtttgctgcgccctgatttccatgtctcggcccaaaattgttgggttcgcaaaggtggtgcttatactggagaggttagtgctgaaatgcttgttaatttgggaattccttgggttattattggtcactctgaacggaggcagcttttgaatgaatcaaatgagttt

SEQ ID NO: 27914 - DNA, 440 bp, Glycine max
  Clone ID: LIB3051-108-Q1-K1-D10
tgaaaattttggttgagcaagagccttctctttgttccgttccgcgaccatgtctcatgggacatgcccttccgtaaagaacttccttcttttggattctgatgggaaacgtgtcgcagtcaaatacttctctgaagactgggcaacgaatagtgccaaggaaaattttgagaaagttgtcttcaacaagactcagaagaccaatgcccgcacagaagcggaaatagcaatgtttgagaataacattgttgtttacaagtttgtccaagatcttcacttctttgttaccggtggtgattatgaaaatgagcttatcttagccacagttctgcaggcattttttgattctgtgggccttctgctcaggttgtggtcttacataaacaatttatatatgttccatgttcaagggtgtttttaatctatcactattaacacag

SEQ ID NO: 27915 - DNA, 442 bp, Glycine max
  Clone ID: LIB3051-108-Q1-K1-D12
cccactcgtccgcccaatcgtagccgtcgcactctgtgttttcagcgccgtctccgatcggcgacaatggcgacccaaatgagcaagaagagaaagttcgtagctgatggagtgttcttcgctgaactgaacgaggttctgacaagagagttggccgaggacggttactccggcgtggaagttagggttacgccgatgcgcaccgaaatcataattagagccaccagaacccaagctgttctcggtgagaagggaaggagaataagggaacttacctctgtggttcagaagaggttcaagtttcccgagaacagtgtcgaactttatgctgaaaaggtcaacaataggggtctttgcgctattgctcaagctgagtctcttcgatacaagctccttggtggactcgctgtgcgcatggcctgctatggtgttttgaggttgg

SEQ ID NO: 27916 - DNA, 448 bp, Glycine max
  Clone ID: LIB3051-108-Q1-K1-E9
gtaaatagtaaatataaataccaacgctggagtgatggtagtttagggcggtgttactcgttctctcgttgattcggatctagagtcttttttcactcttcagttctcgttgttgttcttcgctttcctgaaactagggttttcaatttcgattcattcgttaataattaaagatgtttgggagggcaccgaagaagagcgataatacgaggtactacgaaatcctcggcgtctcgaagaacgcttcgcaggatgatctgaagaaggcttacaagaaagccgccatcaagaatcaccctgacaagggcggtgatcccgagaagtttaaagagctggcacaagcatatgaggttctgagtgaccctgagaagcgtgagatatatgatcagtatggtgaagatgcgcttaaggaaggaatgggtggtggcggtggccatgatccgtttga

SEQ ID NO: 27917 - DNA, 430 bp, Glycine max
  Clone ID: LIB3051-108-Q1-K1-E11
aatgggcgttctcacattcgaggatgaaatcaacttccgtgtggctcctgctactctccggacggccctaattacagacgccgacatcgtgataccaaacgctcttgataccttcaagagtgttgaaaacgttaagggaaatggtagtccaataaccatcaagaagatcactctacttgaggatggagaaaccaagtttgtgctgcacaaaatagattgcattgatgaggcgaacttgcgatacagctacagcgtggtaggcagtgctgcattgccagacacagcggacaagatcacattcaactacaaatcagatgctggtcctaaagaatggtctgctgggaagctcactgtcaaatactaaacacaaggagatgctgatcccaaccaagacgaactcaaaactggaaaagccaaggctgatgctctc

SEQ ID NO: 27918 - DNA, 439 bp, Glycine max
  unsure (1)..(439): unsure at all n locations
  Clone ID: LIB3051-108-Q1-K1-G2
cccactcgtccgcccactcgtccgatttgcctgcatgcctttggtattgtggggtgtgggtcgtttagtggtgtcaagtcttgcgaacgtgagggtgcatgagtggtaatcgggatgtttttgttgcacggctccatgcttgcgcatgcaacgtgtgacatgcatccttttcattgtcaccttagccttcgtggcttaggtgctgacgattggttcctgtgttgcctacctaccaaacggtattcgtgtggctagtcagacccattccatccaggcctctttgttggggacgctggaggatttcaaagtcccacacgtgaaccacgttagtcgtccatcataacggcttnctgtggcacacgtgtggtgatggttctcttcgatgcngtgcatgcagtgaacgtgggtggtctagtgcctccacattgtccctaaaatc

SEQ ID NO: 27919 - DNA, 395 bp, Glycine max
  Clone ID: LIB3051-109-Q1-K1-C3
cccacgcgttacgaagaacaaccccatcttgccttctgatccttaccaaagagccttggctcggttctggtccaaattcattgatgataaagtttttggtgctgcatggaaatccgttttcacagctgatgagaaagagcgtgagaagaatgttgaggaagcaattgaggctctgcagtttcttgagaatgagataaaggacaagaagttctttggaggagaggagattgggttggtagatattgctgctgtctacatagcattttgggtccctatggttcaagacattgcagggttggagttattcacaagtgagaaatttcctaagctccacaattggagccaagaatttttgaaccatccaattgtcaaagaaagtctgccccctagagatc

SEQ ID NO: 27920 - DNA, 231 bp, Glycine max
  Clone ID: LIB3051-109-Q1-K1-C5
cttcactggtgttttcccccaattcccagtcccacatagcttaaaacttaccatctacgattggacaaatacaaatacccttctgcctcgctcaaaacacaaacaagctcgcttctttcttctctcattaacaacatgcagatcttcgtcaagactttgaccggcaagaccatcaccctcgaggtcgagagcagcgacaccatcgacaacgtcaaggccaagatccaagac

SEQ ID NO: 27921 - DNA, 308 bp, Glycine max
  Clone ID: LIB3051-109-Q1-K1-C12
cccacgcgtccgggaaataattgatctttgaaaatgcagggaggaaagaaagctggagagtccatcaaggaaacagctgcaaacattggtgcttctgccaaggcttgcatggagaaaaccaatgccactgttcatgagaaagcagaaagaatgactgcacgtgatccgatgcaaaaggagttggcaacccagaacaaagaggcaaatatgaaccaggcagagctggacaagcatgctgcgcgtcaacataacacggcggcgaagcatgctgtcactgcaaggcacatgggacaacccatggggaccca

SEQ ID NO: 27922 - DNA, 374 bp, Glycine max
  unsure (1)..(374): unsure at all n locations
  Clone ID: LIB3051-109-Q1-K1-D4
gtactgttctattagttcatactaagttctgaaaatgagttccaaagttttgtttggggtacgtatgntcttggccactatacttctgatctcctctgaggttgcacccgatgatgcatacgaaaattttgacaaaataaatgggaagcctagtgcagatggggtagatgaaaagcaagtattggcgtggcggctatggtggcggctatggtggtggttatggaggtgggcgttgaggctatggaggtgggcgtggaggctatggagggggacgtggtggatatggcggcggacgaggtggctatggtggcgggcgtggtggctattgcngccggcgttgtggcnggcgttgtggctatggtccttatgaacat

SEQ ID NO: 27923 - DNA, 380 bp, Glycine max
  Clone ID: LIB3051-109-Q1-K1-F9
cactttcactggaatcacaatcctgaaacaaaaacatcttatcatttaacatgctacgagacaacatgaccaccacattggaaagaggtttctcggaagagcaagaagctctggtggtgaagtcatggaatgtcatgaagaagaattctggagagttgggtctcaagtttttcttgaaaatatttgagattgctccatcagctcagaaattgttctcattcttgagagattcaacggttcctttggagcaaaatcccaagctcaagccccatgccgtgtctgtctttgtaatgacctgtgattcagcagttcagctgcggaaagccgggaaagtcactgtcagagaatcaaacttgaaaaaattaggtgctacccatttt

SEQ ID NO: 27924 - DNA, 376 bp, Glycine max
  Clone ID: LIB3051-109-Q1-K1-G6
cttgcggctagggttttagcgcagcttcttctagatttaaggaagatgggtaaggagaaggttcacatcagtattgtggtcattggccatgtcgactctgggaaatccactaccactggtcacctgatttacaagcttggaggcattgacaagcgtgttattgagaggtttgagaaggaagctgctgagatgaacaagaggtctttcaagtatgcctgggtgctggacaaacttaaggctgagcgtgaaagaggaatcaccattgatattgctttgtggaagtttgaaacaacaaagtattattgcacagttattgatgcgcctggacatagggatttcattaagaatatgattactgggacatcccaagctgact

SEQ ID NO: 27925 - DNA, 306 bp, Glycine max
  Clone ID: LIB3051-109-Q1-K1-H5
gttaaagttcatcaatggcaggtcgtggcaaaaccctaggatccagcgccgccaagagggccacctcaaggagcagcaaagccggcctccaattccccgtcggccgtatcgcccgtttcctcaaggccggaaaatacgccgagcgcgtcggcgccggtgctcccgtttacctcgccgctgtcctcgaatatctcgcagccgaggttttggagttggctggaaacgctgcgagagacaataagaagactcgaattgtgccgcgccacattcaattggcggtgaggaacgacgaagaattgagcaagc

SEQ ID NO: 27926 - DNA, 453 bp, Glycine max
  Clone ID: LIB3051-109-Q1-K1-H7
ctcgcattcttcctcatagatggtctcaactactacccctaattgattcaaacccctcatctgtttctctcggggctctttctttgaattgaatcgctcttatgcactatgcacaggacacacttctgaaaagatttttcaatgctttaattataatcatattcataggtattgttattcactgtaataagatcaataacgggtgagaaaactggaaatagcaacagttccagggcgatagcgatgaggcttcttgactccaccggttgtcggtgcagatttccttgtagcctacacagaaatcacgcgtttattgaattattaatatccaaaatcacataattacgtaattgaagaatcaattgtcaataaaccttcgggaaattaagaataaaaggtaattgaaatcgagaaaccctaactagaaaaaaaaaacgaaacacttaataaaaa

SEQ ID NO: 27927 - DNA, 251 bp, Glycine max
  Clone ID: LIB3051-109-Q1-K1-H9
cccacgcgtccgatttccattaaaaagaaaatatcataaatgggtattttcagattcgaggacaaaatgagctcccctgtggctcctgctactctttacaaagctctagttacagatgccgacaacatcatcccaaaagctcttgattccttcaagagtgttgaaaacgttgaaggaaatggtggccctggaacaatcaagaagataactttcgttgaggatggagaaaccaaagttgtactgcacaaaat

SEQ ID NO: 27928 - DNA, 249 bp, Glycine max
  unsure (1)..(249): unsure at all n locations
  Clone ID: LIB3051-109-Q1-K1-H10
caaacatcgggtttttgatgtctcattggctgatctccaacgcgattaaggccacttcttcaaagaagagtcgtttganaacttatgaccttcaaaggaaaaatgttctgacaaacttcttgggaatggatttcacaactgacaagttgaggtcttttgttccaaaatggcaaactttaattgaagctcatgttgatgttaagaccactgataattatacattgaggatgttctgcattggctttacta

SEQ ID NO: 27929 - DNA, 409 bp, Glycine max
  unsure (1)..(409): unsure at all n locations
  Clone ID: LIB3051-110-Q1-K1-D4
cccacgcgtccgtatgcttccatttccattaaaaagaaaatatcataaatgggtattttcgcattcgangacgaaatcacctcccctgtggctcctgctactctttacaaagctctagttacagatgccgacaacatcatcccaaaggctcttgattccttcaagagtgttgaaaacgttgagggaaatggtggccctggaacaatcaagaagataactttcgttgaggatggagaaaccaagtttgtactgcacaagatagaagcagttgatgaggcaaacttgggatatagctacagcgtagtgggtggtgctgcgttgccagacacagcggagaagatcacattccactccaaattggctgctggtcccaatggaggctctgctggcaagctcactgtcgaatacc

SEQ ID NO: 27930 - DNA, 342 bp, Glycine max
  Clone ID: LIB3051-110-Q1-K1-E1
gtaatattattcttcgaatccattttattattcataatgggtattttcacatttgacgatggaaccacctaccctgtggctcctgctaccctttacaaagctctagttacagatgccgacaacgtcatcccaaaggctgtcgaagccttcaggagtgttgaaaaccttgaggggaacggtggccctggaaccatcaagaagatcactttcgttgaggatggagaaagcaagtttgtgttgcacaaaatagaatcagttgatgaggcaaacttgggatacagctatagcgtaattggtggagttgggttgccagacacagtggaagaagatcacattcgaatg

SEQ ID NO: 27931 - DNA, 404 bp, Glycine max
  Clone ID: LIB3051-110-Q1-K1-F12
acatactagaagtattattattctttcatttccattaaaaagaaaatatcataaatggggattctgacattcgaggacgatatcacctaccctgtggctcctgctactctttacaaagctctagttacagatgccgactacatcatcccaaaggctcttgattccttcaagagtgttgaaaacgttgagggaaatggtggccctggatcaatctagaagataactttcgttgaggatggagaaaccaagtttgtactgcacaagattgatgcatttgatgaggcaaacttgggatatagctacagcgtattgggtggtgctacgttgccagacacagcagtgaagatcacatatcactccaaattggctgctggtcccaatggaggctcttctggcaagctcac

SEQ ID NO: 27932 - DNA, 419 bp, Glycine max
  Clone ID: LIB3051-110-Q1-K1-H5
ggaggttctttttttcttgctggaactgaaagggctggggggctgagtgtgtccttgtcagggccagatggccgtgtcttgggcggtggagttgcacgtcttttggtagctgcttcccctgttcagattgttttggcaagctttgtttctgatgtacgcaagcacttcaagcatgctaagcagatgctgaatgcagaggttttcatagcagcaggccaaagcagctcaccatcaagaggcactctcagtgagtcttcatgtggggttgggagtgggagcccactaaaccaaagcacaggagcctgcatcaacaccatgaacaactgtaccaccccaacacacagctttcaaggcatgccctgcaagtagaacttgactcacctcacatgtttgtgtagtaggtttggtgtggtgaaaga

SEQ ID NO: 27933 - DNA, 441 bp, Glycine max
  Clone ID: LIB3051-111-Q1-K1-B2
aaaagtctatcacagggaggtacacctccacgattcctcatcatagatgatggttggcaacagattgaaaataaagcaaaggatgctactgaatgtttggtacaagaaggagcacagtttgctactaggttgactggtattaaagagaatactaaatttcaaaagaaattacagaacaatgagcagatgtcaggtctgaagcatctagtacatggagcaaagcagcatcacaatgtgaaaaatgtatatgtatggcatgcactagctggttattggggtggagtgaagccagcagcaaccggcatggaacattatgacactgccttggcatatccagtgcagtcaccaagcgtgctaagaaaccaaccagacattgtcatggacagcttggctgtacatggccttggcctagtgcacccaaagaaggttttcaatttctac

SEQ ID NO: 27934 - DNA, 438 bp, Glycine max
  Clone ID: LIB3051-111-Q1-K1-C1
cccacgcgtccgctagaagtattattattcttccatttccattaaaaagaaaatatcatagatgggtattttcacattcgaggacgaaatcacctcccctgtggctcctgctactctttacaaagctctagttacagatgccgacaacatcatcccaaaggctcttgattccttcaagagtgttgaaaacgttgagggaaatggtggccctggaacaatcaagaagataactttcgttgaggatggagaaaccaagtttgtactgcacaagatagaagcagttgatgaggcaaacttgggatatagctacagcgtagtgggtggtgctgcgttgccagacacagcggagaagatcacattccactccaaattggctgctggtcccaatggaggctctgctggcaagctcactgtcgaataccaaaccaaaggagatgc

SEQ ID NO: 27935 - DNA, 360 bp, Glycine max
  Clone ID: LIB3051-111-Q1-K1-E10
gttgaacaccatcttaagaatcccccttctgtcccgtctgacaaattatctcatgtgtgcactggcattttgaagcctgacaatgagttgcaaattttgattgatggggaacagaagaagaaggtaaatttcttatctgctgatgattttgaaccccctcttatccctcccaagacaatcccagatcctgatgataaaaaacctgaggactgggatgagagagagaaaattccagactcaagtgcagtaaagccagatgactgggatgagaatgcacccttggaaattgttgatgaagaagctgagaaacctgaaggatgggacaatgaacctgaggagatagatgatccagaggcaaca

SEQ ID NO: 27936 - DNA, 394 bp, Glycine max
  unsure (1)..(394): unsure at all n locations
  Clone ID: LIB3051-111-Q1-K1-G5
cccacgcgtccgcccacgcgtccgcccacgcgtccgctccttctcaaactagtaatatatagtattattcatccattccattctatatatttcataatgggtgttttcacattcgaggatgaaaccacctctcctgtggctcctgctaccctttacaaagctctagttacggatgctgacaacgtcatcccaaaggctgttgacgccttcaggagtgttgaaaacgttgagggaaatggtggccccggaaccatcaagaagatcactttccttgaggatggagaaaccaagtttgtgttgcacaaaatagaagcgattgatgaggctaacttgggatatagctatagcgtagttggnggagatgggttgccagacacagtggaagaagatcaca

SEQ ID NO: 27937 - DNA, 328 bp, Glycine max
  Clone ID: LIB3051-111-Q1-K1-G6
cccacgcgtccggcaatgggcggtatactttctgcgcttcttggcggcgacgcggcggcggcggcgtcttcgccggagagttctacttctagagtctcctccttccactcgtcgccgcgctggcagctctacttcaacgagatcaaagataccgataagctcgttgcgatagatttctcggcgtcgtggtgcggtccttgcaaattcatagagccagcgattcacgccatggccgacaagttcaacgacgttgacttcgtcaagatcgacgtcgacgaattacctgatgtggcgcatgagtttcaggtgcaggcgatgccgactttcg

SEQ ID NO: 27938 - DNA, 385 bp, Glycine max
  Clone ID: LIB3051-111-Q1-K1-G9
gtactgttctattagttcatactaagttctgaaaatgagttccaaggttttgcttgtgctacttatgttcttggccactatacttctgatctcctctgaggttgcacccgatgatgcatacgagaattttgacaaaatagatgggaagcctagtgcagatggggtagatgaaagcaagtattggcgtggcggctatggtggcggctatggtggtggttatggaggtgggcgtggaggctatggaggtgggcgtggaggctatggagggggacgtggtggatatggcggcggacgaggtggctatggtggcgggcgtggtggctatggcggcgggcgtggtggcgggcgtggtggctatggtcctaatgaacataacgaggcttgg

SEQ ID NO: 27939 - DNA, 436 bp, Glycine max
  Clone ID: LIB3051-112-Q1-K1-A7
cccacgcgtccgcccacgcgtccgtccacgcgtccgattcattttaatcctaatggtgcagttcttgatcattcgatttttctcctcaagatgcagatattcgtaaaaactttgaccggcaagaccatcacccttgaggtggaatcctccgacaccattgacaacgtaaaagctaagattcaagacaaggaagggatcccacctgaccagcagagacttatctttgcgggtaaacaacttgaggatggtcgcacccttgccgattacaacatccaaaaggaatcaaccctccatctcgtgcttcgcctcaggggtggcatgcaaatctttgtcaagactttgaccgggaagaccatcacccttgaggtggaatcctcggacaccattgataatgttaaggccaagatccaggacaaagagggcattcccccagatc

SEQ ID NO: 27940 - DNA, 401 bp, Glycine max
  unsure (1)..(401): unsure at all n locations
  Clone ID: LIB3051-112-Q1-K1-B1
ctcgctctatttctcagtctctgtgtttgcggctgaagattccgaacgagtgaccttctgcgttgctcgcaaagtttaagtaatcatgggtaaggaaaaggttcacatcaacattgtcgtcattggacatgtcgactctgggaagtcaactaccactggtcacttgatctacaagcttggaggtattgacaagcgtgtgattgagaggttcgagaaggaggctgccgagatgaacaagaggtcattcaagtatgcctgggtgctcgacaagctcaaagctgagcgtgaaagaggaattaccattgatattgctttgtggaagtttgaaaccaccaagtactactgcacggtcattgatgctcctggacatcgtgactntatcaagaacatgattactggta

SEQ ID NO: 27941 - DNA, 469 bp, Glycine max
  Clone ID: LIB3051-112-Q1-K1-B2
ctcgctctatttctcagtctctgtgtttgctgctgaagattccgaacgagtgaccttcggggttgctcgcaaagtttaagtgatcatgggtaaggaaaaggttcacatcaacattgtcgtcattggacatgtcgactctgggaagtcaactaccactggtcacttgatctacaagcttggaggtattgacaagcgtgtgattgagaggttcgagaaggaagctgccgatatgaacaagaggtcattcaagtatgcctgggtgctcgacaagctcaaagctgagcgtgaaagaagaattaccattgatattgctttgtggaagtttgaaaccaccaagtactactgcacggtcattgatgctcctggacatcgtgactttatcaagaacatgattactggtacctcccatgccgactgtgctgtccttattattgactccaccactggtggttttgaagctggtatttct

SEQ ID NO: 27942 - DNA, 446 bp, Glycine max
  unsure (1)..(446): unsure at all n locations
  Clone ID: LIB3051-112-Q1-K1-B5
accatttaccaaactcactcatcaattctcatctttcttctcactaactattaattcatggtgtcgagcacagctggccaagtcatcaaatgcaaagctgcggtttcatgggaggcagggaagccacttgtgattgaagaagtagaggttgcgccaccacaagctggtgaagtgcgtttgaagatcctctacacctctctttgccacactgatgtttacttctgggaagctaagggccaaactccattggttcctcgtatatttggtcatgaagctggaaggatcgtggagagcgtangtgagggtgtgactcatctganaccaggggaccatgccctnnctgtgtttaccggggagtgtggggactgccctcattgcaagtcataggagagcaacatgtgtgatcttctcaggatcaacactgataggggtgtcatgatccatga

SEQ ID NO: 27943 - DNA, 440 bp, Glycine max
  unsure (1)..(440): unsure at all n locations
  Clone ID: LIB3051-112-Q1-K1-B11
aaacaagtgtacgtgggacccttccttcgcaagcaagagagagaaagtgctgctgacaaggcaaaattcaacaatgtttttgtgaagaatctatcagaatcaaccaccgatgatgagttgaagaacacttttggtgaatttggaactattactagtgctgtagtaatgagggatggggatgggaaatcaaagtgttttggatttgtgaattttgagaatgctgatgatgctgctagggctgttgaggctctcaatggcaaaaattttgatgacaaagaatggtatgttggaaaagctcagaagaaatctgaaagggagaatgaattgaaacaacgatttgagcagagcatgaaagaagctgctgataaatatcaaggcgcanacttgtatgtaaaaaatttagatgatagcattggtgatgaaaaactaaggagctgttc

SEQ ID NO: 27944 - DNA, 463 bp, Glycine max
  Clone ID: LIB3051-112-Q1-K1-B12
gaaaatcatttcctaattattggcctgttttgtgtatatagatgaatagagtttcactaggggatatttacaagagaaaaacgacaaatatgaaaaatatcgtcgaaataaaagtgatgcttttacaaactaaaggtgaatatggaactattactagtgctgaaataatgaaaggatggagatgggaaatcaaagtgttttggatttgtgaattttgagaatgctgatgatgctgctagggctgttgaggctctcaatggcaaaaattttgatgactaagaatggtatgttggaaaagctcagaagaaatctgaaagggagaatgaattgaaacaacgatttgagcagagcatgaaagaagctgctgataaatatcaaggcgcaaacttgtatgtaaaaaatttagatgatagcattggtgatgaaaaacttaaagagctgttcttcccttttggtaccatta

SEQ ID NO: 27945 - DNA, 404 bp, Glycine max
  unsure (1)..(404): unsure at all n locations
  Clone ID: LIB3051-112-Q1-K1-C4
cgtgtcctaactctgaaactctactattctttctcctccgcagaaccttaacaaccaaaaggaagcattacagttcccaatttcacagaaacaccagaattgatcaaaacacataacanaaaaaaagtgaaaatggcgagcgctgtagagaaagagggtggcgcgagagaggaaactttctctttggagcttnctgctccacctggttggaagaagcagttcatcccaaagaaagctggcacccccaagaaaaatgagattgtgttcactgcagcaacaggagaggagatccataacaggaagcagctggaaaaatatttgaaagcacaccctggtggtccagctgtatcagaatttgactggggcactggtgagaccccangaagatctacaagaattagtga

SEQ ID NO: 27946 - DNA, 176 bp, Glycine max
  Clone ID: LIB3051-112-Q1-K1-E1
gtcgtcattggacatgtcgactctgggaagtcaactaccactggtcatttgatctacaagctcggaggtatcgacaagcgtgtgactgagaggttccagaaggatgctgcttagatgaacacgaggtcattcaaggatgcctgtgcacttggcaagctcaaagctaaccgcgaaaa

SEQ ID NO: 27947 - DNA, 389 bp, Glycine max
  Clone ID: LIB3051-112-Q1-K1-E11
gccaaatcaatcaaattcttcgagttgaacacaggggccaagattccttctctggggtggaggacttggcaagctgaacctggtgtcgtagctgaagctctcaccacagccattcaagtcggatacaggcatatcgactgtgctagtgcgtataccaatcaagcagacattggttctgctcttaagaagcttatcgatgatcgcgtggtcaatcgcagaggacttatggatcactttcaaactctggtgcacaaatcatgcaccaaaagatgtgccaaaagcatcggataaaacattacacgaattgcaacttgactatctcgacctctatctgatccactggccataccgcatgaaaagtacaacatctggactcaatagagaatatc

SEQ ID NO: 27948 - DNA, 299 bp, Glycine max
  Clone ID: LIB3051-112-Q1-K1-F5
ctgctatgaaacaagatgtggatgacatgtatccaacaactctttctcacacgatgaagtgggggacaaaaagtcatgcagaatgtgcttgcttttcaccagatgggcagtttcttgtatcatgctcagttgatgggtttattgaggtgtgggattacataagtggaaagctgaagaaagatctacagtaccaggctgatgaagtgttcatgatgcatgatgatgctgtgctttgtgtagactttagcagagattcgaaaatgcttgcatctgggtctcaaaatggaaagattaaagtc

SEQ ID NO: 27949 - DNA, 319 bp, Glycine max
  Clone ID: LIB3051-112-Q1-K1-G8
tccatgtcgtttttgtcgtttccttttaatcaacatttcttcatttaggtttttgtggcgataatgtgatgatcacttggccatcatcaccttaacgaactcctcgtagtttatttggccatcgccatcaacatcggcctcgcgaatcatctcatcaacctcttcatcggtgagcttctccccgaggttggtcatcacatggcggagctcagcagcagagatgaacccattctggtccttgtcgaaaacccggaatgcctctttcagctcctcctcagaatcagtgtccttcatcttcctggccatgagtagatcgcga

SEQ ID NO: 27950 - DNA, 384 bp, Glycine max
  Clone ID: LIB3051-112-Q1-K1-H9
tcaacgccatctccagctgcttccttatcagaagcgcttcgccccagagattctcgcttggtctccttcaatccttcttccaacgctattaattacaaaattaacctctccgcttccctccgatccattcactccctacctcttaaaacctacttgcggatcaaatgctcccaaacagatgggaatggaagtcctgcaaagaggacagtgcttcatgatctttatgagaaagataggcagaatccatggaatgacaatctctgcaaacctgttacagaccttcttcctcttatagcaagtggtgtcagaggcgtcactaggcaccctgcgatttttcagaaagctatctcatcatcgaatgcttacaatgatcaattcaaggaa

SEQ ID NO: 27951 - DNA, 331 bp, Glycine max
  unsure (1)..(331): unsure at all n locations
  Clone ID: LIB3051-113-Q1-K1-C4
ccaagacgaccttaaaattggctaagccaagtctgatgctcttttcaaggccgttgaggctgaccttttggcccatcctgattacaactgatcctcttcatcactattcagtcagcaacgaccttgctttatattatatacaagagttttcttgccttgtgtggagctttatccaatcactgtgtgtggtgtgtgcttaagttaaaaacttgccttgcaattaatgtcacgagtgattcctttctcattcacttgtgccacagaattgtgagagtcagtggatatctntgtatgtgacttcaataaattttaataaaagaaagcatcattt

SEQ ID NO: 27952 - DNA, 393 bp, Glycine max
  Clone ID: LIB3051-113-Q1-K1-C10
cccacgcgtccggcggcatgcaaatctttttcaaaacccttactggcaaaacaatcacgggagaggtggagtccttcgacacaatcgataacgtgaaagccaagattcaagataaggaagggattcctccggatcaacaacgtttgatcttcgccggaaaacaactcgaagacggcagaaccctcgccgattacaatatccagaaagaatcgactctgcatttggtgcttcgtctccgcggagggatgcagatcttcgtgaaaaccctaaccggcaaaacgattactctagaggtagagtcctctgacacaatcgataacgtgaaagcgaagatccaggataaggaaggtattccaccggatcagcaacgtcttatcttcgccggaaagcacc

SEQ ID NO: 27953 - DNA, 305 bp, Glycine max
  Clone ID: LIB3051-113-Q1-K1-D4
cccacgcgtccgattcttccatttccattaaaaagaaaatatcataaatgggtgttttcagattcgaggacgaaatcacctcccctgtggctcctgctactctttacaaagctctagttacagatgccgacaacatcatcccaaaggctcttgattccttcaagagtgttgaaaacgttgagggaaatggtggccctggaacaatcaagaagataactttcgttgaagatggagaaaccaagtttgtactgcacaagatagaagcagttgatgaggcaaacttgtgatatagctacaagcgtatg

SEQ ID NO: 27954 - DNA, 298 bp, Glycine max
  Clone ID: LIB3051-113-Q1-K1-D6
ctcgtcctccgccttcgcggtggcatgcaaatcttcgtcaaaaccctaaccggtaaaacgagtacgctagaggtcgagtcctctgacaccatcgataacgtgaaagctaagatccaggacaaggaaggcattccaccagaccagcagcgcttgatcttcgccggaaaacagctcgaagacggcagaaccctcgccgattacaatattcagaaagaatcgacgcttcatctggtgcttcgactccgcggagggatgcagatcttcgtgaagacgctcaccgggaaaactattactctgg

SEQ ID NO: 27955 - DNA, 433 bp, Glycine max
  Clone ID: LIB3051-113-Q1-K1-G9
gccgcggatattcaaccccttgtttgcgacaatggaactggaatggtcaaggcaggattggctggtgacgatgctcctagggctgtctttcccagtattgttggccgacctcgacatactggtgttatggttgggatgggtcaaaaggatgcctatgttggtgatgaagcccaatccaaaagaggtattcttactctcaagtatcccattgagcatggtatagtcagcaactgggatgacatggaaaagatctggcatcacacattctataatgaacttcatgttgctcccgatgagcacccagtgcttctcactgaggcccccctcaacccacaggccaacagagaaaagatgacccaaatcatgtctgagaccttcaatgtgcctgccatgtatgtggccatccagactgttctctccttgtatgcgagtg

SEQ ID NO: 27956 - DNA, 250 bp, Glycine max
  Clone ID: LIB3051-113-Q1-K1-H1
cccacgcgtccgatatattccattctctctgtgtatttccctacctctcccttcgggatgcagatcttcgtcaagaccctcaccggcaagaccatcacccttgaggtggaaagctctgacaccatcgacaacgtcaaggccaagatccaggacaaggaaggaatccccccggaccagcaacgtctcattttcgaccgaaagcaacttgaggacggacgtacccttgctgactacaacattcagaaggaga

SEQ ID NO: 27957 - DNA, 441 bp, Glycine max
  unsure (1)..(441): unsure at all n locations
  Clone ID: LIB3051-114-Q1-K1-A2
ctctctctctctgtctctctctctctagacttagattttgtgaatggctgaagtggaagagggacaggtcatcggcgtccacaccgttgatgagtggaagctgcaactccagaatgcaaaagactccaaaaaactgattgtggtggattttactgcttcctggtgtggtccatgccgttttatggccccagttcttgcagagattgcaaagaaaactcctgaattgatcttcctcaaagtggatgtggatgaagtgaggcctgttgctgaggaatattccattgaagccatgccaaccttcctcttcttgaaagaatgcgagatcgtggacaaagtggttggtgctagtaaagatgaccttcangccaccatagccaagcatgcatctgcttgtgctgctgcttcttcttcttgaagtgaagtatcataatatgaaagaag

SEQ ID NO: 27958 - DNA, 412 bp, Glycine max
  Clone ID: LIB3051-114-Q1-K1-A3
cccacgcgttcgcaggcttattatctggctctgctcttcccaattgagaaggcccccactaagagaattgcaagtgtaaatggtggggtgaagatatctgaactgttgaagtatccggttagaggctttgtctttgagggcggcgaaatgctggaagatctatcaaacgttgtttcagatgcatgtatatgtcttcacaacaacaacatacctttcaatgttcttatctctgactgtggaaagcaagtgtatctgttaccacagtgttatgcacagaaacaagctcttggagaagtgaatgctgagcttcttgacacccaagtgaatcctgctgtgtgggaaattagtggacacatggttttaaagaagaagaaggattatgatgacgcgtctgtaagcaatgcttggaagc

SEQ ID NO: 27959 - DNA, 295 bp, Glycine max
  Clone ID: LIB3051-114-Q1-K1-B2
ctacaaattttcaatttttcaatggcgtctttgcttcaaaaagaggatcgagctgatgggggtgcgaaagttgctgcgaaagaactcgaacaactcaaccgagaaaaagaccgtgatttcagtgttggtgttgcagaccaacaccaacaagaataacatcagttagatcaacaaaagccttgtgtaatccgatccatgttcaatgcggtgcaagacacctactagaacgccaaggaagctgtcgttggcaagaaagaaccttcgactacgactaactcgtacagtaccatagagg

SEQ ID NO: 27960 - DNA, 439 bp, Glycine max
  unsure (1)..(439): unsure at all n locations
  Clone ID: LIB3051-114-Q1-K1-D5
aaaaaatgaaatgaatcatttcatattgattgtattgctatgcttagtccccaagggacgagatttcgttaacaacatagaggaagaatgaaaggaatatcctatcgagggaatcatatttgcttcggaagatatgctcttcaagcacttgagccagcttggataacatctagacaaatagaagcgggacggcgggcaatgtcacgaaatgttcgccgaggtggacaaatatgggtacgcatatttccagacaaaccggttacagtaagacctactgaaacacgtatgggttcaggaaaaggttctcccgaatattgggtagctgtcgttaaacctgggaaaatactttatgaaatgggtggggtaccagataatatagcaagaaaggctatntcaatagcatcatccaaaatgcctatacgaactcaattcattattt

SEQ ID NO: 27961 - DNA, 424 bp, Glycine max
  Clone ID: LIB3051-114-Q1-K1-E2
cggacgcgtggcgtggatgtctctgttgtttacctcacagtgaggctggagaaagaagcgtcctacgatgaaattaaaaatgctatcaaggaggaatcagagggcaagttgaagggaattcttggttacactgaagatgatgtggtctccactgactttatcggcgatagcagatcaagtatttttgatgcaaaggctggaattgcattgaataagaactttgtgaagcttgtttcttggtacgacaacgagtggggatacagctcacgtgtcattgatcttcttgtattcgttgccaagaagtctctttaaggtgttacttcaaagtagcttgtcttcacattattaccgtatgtttatgtttagctgcgatttagtgtcttgctcgagcaaaaaatgagaggtctgaataaatcggcttctg

SEQ ID NO: 27962 - DNA, 449 bp, Glycine max
  unsure (1)..(449): unsure at all n locations
  Clone ID: LIB3051-114-Q1-K1-E7
gtagaaaagaaggcattaggttaagagtgatggcagtgagcgaaagagagcatagtggtgcgttactgagtgcttacagttgctgcgtcgcaaggtaccggcggcgacggagaactatcttctcaattttcgatcactgcattggttctgttgtcaagggttttgttcttcctgacttgcatacttgatggcttcaaagttgcagaagttgcaggccacagcatctcaagcgtctcaatttgtatgcagtcgtggaactaactactacaagcaattgctggaacagaacaagcaacacattcaggagcctnctacagtagagaaatgcaacctgttggcaaagcaattgttttacactcgccttgctagtattccgagtcgtaatgagtccttttggaaggaacttgattatgccaagaatttgtggaagaacaggaaagagcttaagg

SEQ ID NO: 27963 - DNA, 450 bp, Glycine max
  unsure (1)..(450): unsure at all n locations
  Clone ID: LIB3051-114-Q1-K1-F4
gttttgttagttcacacactaagttctgaaaaatgagttccaaagtttttcttattctacgtatgttcatggccactatacttttgatctcctctgaggttgcacccgatgatgcataccagaattttgacaaaacagatgggaagcgtagtgcaaatggggtagatgaaagcaaatattggcgtggtggctatggcgactatggtggttggcgtggtggtggttggcgtggtggctatggaggctggcgtggtggctatggtggtgggcgtggtggctatggtggctggcgtggtggctatggtggtgggcgtggtggctacggaagttggggtggtggctttggccctaacgaacataatgaggctgggattgatgctagccctcacaactaagaaagaaacttgctaaagcttatataggatttaagttatcgtaatanataaaact

SEQ ID NO: 27964 - DNA, 435 bp, Glycine max
  unsure (1)..(435): unsure at all n locations
  Clone ID: LIB3051-114-Q1-K1-F7
tagatctctgtgaagtcgctttataacacttaacctaagatgcagaacgaggaaggacagatcaccgagctttacattcctaggaagtgctctgccacaaaccgattgattaccgctaaggaccatgcttcggttcaggttaacattgggcatgtggatgagaatggcgtctacaatggccatttctccacttttgctctctgcggcttcatacgtgctcagggtgatgctgacagtgccctagatcgcttgtggcagaagaagaaagttgaagttaagcaacagtagacacccatgatagtttgttactttgctatgtattaatttctacgcttgctagagatatttgagtactatgattgtcgtcttgagcaaatactcattctaaattntcgttggtatttggtaccgncagctaaatttgcttttttgacc

SEQ ID NO: 27965 - DNA, 421 bp, Glycine max
  Clone ID: LIB3051-114-Q1-K1-F9
ctcgggaagctgctttcagaaacatctatacaattgctgaatgcttggccggggaacgtattaatgcagccaaaggttcatccaatagttatgctatcaagaaaaaggatgaaattgagagagttgccaaggctaatcgttaagccaacccaacaaccagtattgtggccagaaagatttcgacctttgtacttcatttatttaaattttgaatattgtgtattacttttgatgaatttagttaatttttagttcgcgtaaggattttacatgaacgatttatttagttaatttagtttgcgtaaggattttacatgaacgatttattcagttaatttagtttgcgtaaggattttacatgaacgatttatttagttaatttttagtttgcgtaagtattttacatgaacgatttttgttc

SEQ ID NO: 27966 - DNA, 435 bp, Glycine max
  Clone ID: LIB3051-114-Q1-K1-F11
gcaccgtggtcctgactggagtgggctccaccaatatggtgataactattgggctcagcaacggttagccatagttgatccagcttctggtgatcaacccctcttcaatgaagacaaaactgttgttgttacggtgaatggagagatctacaatcatgaagaactcaggaaacaattgcctaatcacaccttccgtacaggaagtgattgtgatgttattgctcacctgtatgaggagcacggagaaaactttatggacatgcttgatggtatattttcatttgttctgctggatactcgtgacaacagttttatagtggcacgggatgcaattggggtcacttccttgtacattggttggggtttagatggctctgtctggatttcctctgaattgaaggggttgaatgatgattgccaacattttgagtcttt

SEQ ID NO: 27967 - DNA, 423 bp, Glycine max
  Clone ID: LIB3051-114-Q1-K1-G9
ctcgagtacgcgtccgctcattgcttctctcatgttacaatcttcttgccgctgagctccctttctggtacgtgcacagagacaaaatgtacgacaggtgccaacagttcatcacgaaagaaaggactagctgagccgagatcactaactaaaacgaatctaatactaatcgaatatactaatagaatagaaatagaactgtcttttcatatagatatcccttcaacacatcataggtcatcgaaaggatctcgaagacccaccaacgcacgaaagccgggatctttcagaaaatggattcctattcgaagggtgcataaccgcatggataagctcacactaacccgtcaatttgggatccaattcggatccttaggaggtatcgggaaggaattttggaatgtaataatatcgattcataca

SEQ ID NO: 27968 - DNA, 432 bp, Glycine max
  Clone ID: LIB3051-114-Q1-K1-G12
cacgcgtccgcagacactaagctctgaaatatgagtttcaaagtttttcttattctactggtgttcagtgccactatacttttgatctcctctgaggttgcacccgatgatgcataccagaattttgacaaaacagatgggaagcgtagtgcaaatggggtagatgaaagcaaatattggcgtggtggctatggcgactatggtggttggcgtggtggtggttggcgtggtggctatggaggctggcgtggtggctatggtggtgggcgtggtggctatggtggctggcgtggtggctatggtggtgggcgtggtggctacggaggttggtgtggtggctttggccctaacgaacataatgaagctgggattgatgctagccctcacaactaagaaggaaacttgctaaagcttatataggatttaaggtat

SEQ ID NO: 27969 - DNA, 297 bp, Glycine max
  Clone ID: LIB3051-114-Q1-K1-H2
acggccacgcgtccgtccacgcgtccggcgagtgaccgttagcgaacaagtaccgctagggagagatgagaaggactttgaaaagagagtcatagagtgcttgaaattgtcgggagggaagcggatgggggccggcgatgtgtcccggtcggatgtggaacggcgagagcctttccgccgatcgactcgggacattgaccgacgcggattgcgatggtggcccaagcccggtctgttgatatgctcatggagacgtaattatcgcgattgtggatggcagcgcgcgcccttggcgtg

SEQ ID NO: 27970 - DNA, 452 bp, Glycine max
  unsure (1)..(452): unsure at all n locations
  Clone ID: LIB3051-114-Q1-K1-H4
gatctctctctatctgggatctgcttccttctcttctctttctcaattctcattcataatgctaattcattcctccgatctgcgactntctatttctccctcaacacaacacgagacaacatgttcctctttgactggttctatggcattctcgcttccctcggtctctggcagaaagaagccaaaattctcttccttggtctcgataatgccggcaaaaccaccctccttcacatgctcaaagacgagagattagttcagcaccagccgacccagcaccccacttcggaggaattgagcattgngaagatcaagtttaaggctttcgatttggggggccatcaagttgctcgcagggtctggaaagactattatgccaaggtggatgctgttgtgtacctggttgacgcctttgacaaagagaggttcgcagaatctaagaaggagctcga

SEQ ID NO: 27971 - DNA, 419 bp, Glycine max
  Clone ID: LIB3051-114-Q1-K1-H6
aaataaaaaaaaaatctgcttactttctattcaatatatcaattataattacataatggtagtgtcattacctacgatctgcgactttctaatttctacctcaacacaacacgagacaacatgttcctctttgactggttctatggcattctcgcttccctcggtctctggcagaaagaagccaaaattctcttccttggtctcgataatgccggcaaaaccaccctccttcacatgctcaaagacgagagattagttcagcaccagccgacccagcaccccacttctgaggaattgagcattgtgaagatcaagtttaaggctttcgatttggggggccatcaagttgctcccaaggtctggaaagactattatgccaatgtggatgctcgtgtgtacctgggtgacgcctttgacaa

SEQ ID NO: 27972 - DNA, 421 bp, Glycine max
  Clone ID: LIB3051-115-Q1-K1-A6
gccaccatctgttggtcctcgtgtgccaatgtatcccccaggtggtccaggtattggtgaacaattattttatagccaaggccctcctgctatcattccttcccaggtaatctcttctactctgtctatacttagacttcaatcagtgcaatcttgaatggtgcttgatgttattcctctgattttgctccatggagtaatttcctaatcattctcctttctgtccatgaaatttttttctcagcctggatttggctatcaacaacaacttatgcctggtatgaggccaggtgcagctcctgtgccgaattttttcgtgccaatggttcagcagggacaacagggacagcgtccctgtggaaggcgtccaggtgcagttcagcagtcccagcagccagttcctatgatgccacagcagatg

SEQ ID NO: 27973 - DNA, 436 bp, Glycine max
  unsure (1)..(436): unsure at all n locations
  Clone ID: LIB3051-115-Q1-K1-A9
ggagcaatgatgtttatcttccaagagatgaggcttttggacacttgaagtcatctgactttcttacttatggactaaaatccgtatctcaaaatgttcttccattattgcaatctgcttttgatttgaatttcacaccccgtgagtttgatagctttgatgaagttcatggactctattcaggcggaattaagctgccaacagatataatcagcaagattagtccactacccgtgcttaaggaaatcttccgaactgatggtgaacaggcccttaagtttcctcctnctaaagtaattcaagtgagtaagtctgcatggatgactgatgaagaatttgcaagagaaatgcttgctggtgtaaatccaaacttgattcgntgtcttaaggatttcccttcacgaagcatgctatatagccaagtctatggtgatca

SEQ ID NO: 27974 - DNA, 430 bp, Glycine max
  Clone ID: LIB3051-115-Q1-K1-A10
ctgaactcttggttcactctgtcttgatgtcttccattttatgcttttctgatatggctcttcaaccactacattcactttattggcctagacccaaccaccaaagcaccaagagaccttaggtgaaccttttctctctagctctgtttgcagaaattcaagcgcaggaatggaggttgcaacaaacacaaccgcgaccacgtcaaattcattcgatgctctaactgtggaaaatgctgccctaaggacaaggctattaagaggtttctggtgaggaacattgttgaacaggctgcagtcagagatgtgttggaagcctgtgtctatgagcataattttcttctttaccttctctcttttttttgaggaaaatttcacatgtgtttatgttatttatttagtttttaattgctatttacagaatatactc

SEQ ID NO: 27975 - DNA, 373 bp, Glycine max
  Clone ID: LIB3051-115-Q1-K1-B3
aacgccatctccagctgctgccttatcagaagcgcttcgccccagagattctcgcttagtctgcttcaatccttatgccaacgctatcaattacaaaattgacctctccgcttgcctccgatccattcactccctgcctattaaaacctacttgcggatcaaatgctcccaaacagatgggaatggaagtcctgctaagaggacagcgcttcatgatctttatgagaaagaagggcagagtccatggtatgataatctctgcagacctgttacagagcttgttcctgttatagcacgtggtgtcagaggcgtcactagcaaccctgcgatttttcagaaagctatctcatcatcgaatgcttacaatgatcag

SEQ ID NO: 27976 - DNA, 441 bp, Glycine max
  Clone ID: LIB3051-115-Q1-K1-C7
gcctcacaaaagcaaagatcaaacaaaccaaggacgagaacacgatgttgcttgaacttgcacttggtttattggttttggctctgtttctgcacttgcgtcccacacccactgcaaaatcaaaagcacttcgccatctcccaaacccaccaagcccaaagcctcgtcttcccttcataggacaccttcatctcttaaaagacaaacttctccactacgcactcatcgacctctccaaaaaacatggtcccttattctctctctactttggctccatgccaaccgttgttgccttcacaccagaattgttcaagctcttcctccatacgcacgaggcaacttccttcaacacaaggttccaaacctcagccataagacgcctcacctatgatagctcagtggccatggttcccttcggaccttactggaagttcgtgagga

SEQ ID NO: 27977 - DNA, 432 bp, Glycine max
  Clone ID: LIB3051-115-Q1-K1-E9
caagattacaggcatatggatggttttggagttaacacatatacgctgatcaacaaggctgggaaagcagtgtatgtgaaatttcactggaagaccactagtggtataaagtgtctattggaggaagaggccattaaggtgggaggagccaaccacagccatgccactcaagacctccatgattcaattgctgctggtaactatcctgagtggaaactgtttgttcagacaatagatcctgagcacgaagacaaatttgactttgaccctcttgatgttactaagacttggcctgaggacattatacccttgcagcctgttggtcgcttggtcctgaataagaacatagataatttctttgctgagaatgaacaacttgcattttgccctgccattgtggttcctggtgtatactactcagatgataagatg

SEQ ID NO: 27978 - DNA, 431 bp, Glycine max
  unsure (1)..(431): unsure at all n locations
  Clone ID: LIB3051-115-Q1-K1-E12
tcgcaaaaacgcattaattaagtgcctgttgggaattgggtgagccaaagagagaggaagagaagaagaaggaggagaagaaggagctttggatttcaactttttccgttcctcgagaccggtggtgtgcttgttgctcttcaaacaaatctgacatggatttactaagatttgtccatgttcttgcgttctaaggtgacctgggattgaatctaaaagatctngatttacattttgagatatgggaggagtttgttctggacaaattgctaccagtatcgggtttttgcattccaagaagtgctngattggcgagttttcatccttggagattttcttcgggtttcctttggtaattgcacttaaggttctgctccgctttaatgatcagcacaaggtacgtgatgctacattcttctgatacaggtgct

SEQ ID NO: 27979 - DNA, 430 bp, Glycine max
  Clone ID: LIB3051-115-Q1-K1-F4
gttggagttaaccagaaaaatttaggtagagccggatctaaatgttggctaggtaagggtactgtactaagaggagtagttatgaaccccgtagaccatccgcatggaggtggtgaatggagggccccaattggtagaaaaaaacccgcaactccttggggttttgctgcacttggaagaagaagtagataaaggaagatatatagtgataattcgattcttcgtcgtcgtactaaatagtagagaaaatagaaattgattcttagtctttacaagaaataggagtaattaactgtgacacgttcactaaaaaaaaatccttttgtagcgaatcatttattaagaaaaattagtaaacttaacacaatagcggtgaatgatataataataacttggtccagagcatctaccattatacctacaatgattg

SEQ ID NO: 27980 - DNA, 396 bp, Glycine max
  Clone ID: LIB3051-115-Q1-K1-F6
gctagccaatcaaacactcaatcacttcacgatttcacagttaaagatgccaggggagataatgttaatctcgccgactacaaaggaaaggtccttctcattgtcaatgttgcctcacaatgcggcttgactaattaatactacacagagcttaaccaattgtatgagaaatacaaacggaaaggacttgaaattctggcattcccatgcaatcagtttggggctcaggatccagtaactaatgaagagattgtggagtttgcttgtactcgcttcaaagctgagttacccattctcgacaaggcggatgtgaatggtgacaatgctgctccactgtacatgtttctgaaatcaagcacatgtggactctgtggggatagtatcaaatggaacttc

SEQ ID NO: 27981 - DNA, 434 bp, Glycine max
  Clone ID: LIB3051-115-Q1-K1-F9
cccacgcgtccgggaactaccaaaagccgaacgtcgcacaaaaaccccaaacgtagcaggcattgagttttgtttgctttgaaacatcgtgtgcacagtaccccagaagatcgaacaaggatctccacaaagacaaaccccagttctcaactgtgttttacctctctctcacctactttcagaccatacccagggtttttgctttttctttttaaattagtttcagtgacattaacgaggctgagaagatgcagcagacaccgccaatgattcctatgatgccttctttcccacctacgaacataaccaccgagcagattcaaaaataccttgatgagaacaagaagctgattctggcaatattggacaatcaaaatcttggaaaacttgcagaatgtgcccagtaccaagctcagcttcaaaagaatttgatg

SEQ ID NO: 27982 - DNA, 397 bp, Glycine max
  Clone ID: LIB3051-116-Q1-K1-A9
ggtgataacaggtctagcatatttgacgccaaggccggaatttctttgaatgaaaactgtgtaaaacttgtttcctggtatgacaacgaatggggttacagttcccgtgtgattgatttaattgcccacattgcatccgtggcttaaacagttgaggctgatcttggatatcatcgctaaaccgttccaaatttttatcttaatcgagtttattttagtgtgaattcggaataaacacgtgttgctgtgtgtgatatcattgaaaaacacagtgcaatatttgtatttatatttttgagtttgatagacggccttaggtttttcctcctcttgtaagggacggttgactattctgtttcgtcatcacaatcataatataagcaacattttgttttcc

SEQ ID NO: 27983 - DNA, 439 bp, Glycine max
  unsure (1)..(439): unsure at all n locations
  Clone ID: LIB3051-116-Q1-K1-B6
cccacgcgtccggcctcgaagagatcaaaaacgagaacgtcgatctggaacggattccaatagaagaagtgtttgagcagctgaaatgttcaagagcaggtctaacatcagaggaagggggcaatcggcttcaagtctttggaccaaacaaattggaagagaaaaaagagagcaagtttttgaagttcttgggttttatgtggaaccccttgtcttgggttatggaagctgctgctataatggccattgctttggcaaatggaagaggaaggccaccagattggcaggactttgtcggaattatcgcgctgctagtgatcaactccacaattagttntattgaggaaaacaatgctggcaatgctgctgctgctcttatggctggtttggctcccaagactaaggtactaagggataaccgatggagtgaacaagatgc

SEQ ID NO: 27984 - DNA, 319 bp, Glycine max
  Clone ID: LIB3051-116-Q1-K1-B8
tgtttgctgttgtaactcgttcttcttcttttgttgttctgtgtttgtgtttgatttggctctcacctgaaaatgtctagctgcggtggtaactgtggttgcagaagctcctgcaagtgcggcaacggctgcagaggctgcaagatgcacccagtcttgagctacactgagtcaaccaccatcgagaccttggtcatgggagtggcacctgttaaggctcaattagagggtgctgaaatgggtgatcccgctgagaacgatggctgcaaatgtggaccatactgctcctgcaaccactgcacttgcaagtgaggtgttg

SEQ ID NO: 27985 - DNA, 414 bp, Glycine max
  unsure (1)..(414): unsure at all n locations
  Clone ID: LIB3051-116-Q1-K1-C2
taccattaaaggtgacaatccagatgcagtggtttctggattgatggctgctggggaaacggcctgtgcatcagtccatggtgccaataggcttggtgcaaattcacttctcgatattgttgtttttggtagagcttgtgcaaatagagttgcagaaatccgtagaccaggagagaaacaaaagcctctagagaaggatgctggtcagagaacaattgcatggctggacaaattgagaaattcaaatggctcattgccaacttcacaaattcggttgaatatgcaacgagtaatgcaaaacaatgctgctgtgtttcgtacacaagaaacattagaagaaggttgtcaattaattgataaaacatgggagagcttncatgatgtccaggtgaaggaccgcagtttaatctggaa

SEQ ID NO: 27986 - DNA, 410 bp, Glycine max
  Clone ID: LIB3051-116-Q1-K1-D1
aaaaatggaatcatcggagatcgaagacaggaagccggagattctgaaaagcggaggaggttgtcttctgccgccggttccgccgccgcaagcgaaggcggcggtgaagacggattacatgtacttcgacccgtcggattcaatcccgaagctgcacacggactcgagctgttcggagcacgtggtatcgccggaattcgcgagcgaggtgcagagcgagccaaagtggaaggagtgggagaaaagcctcgagtttccgtttaattacgtggatgccactctgaacaacagcaacagcttcacgacgcaattccagggcaataatcagatgatgtcgccgctgcaagacatgttcatgtactggcccaacaagcccttctgaacaaaccgatccaacgccgccattcgca

SEQ ID NO: 27987 - DNA, 387 bp, Glycine max
  Clone ID: LIB3051-116-Q1-K1-F2
cccacgcgtccggttgcacagaacacaaaagactatgctgcagagaaggctaaagaaggaaaagatgctactgtgaataagatgggagagtataaagattatacggcggagaaggctaaagaggggaaagatacgacgttggggaagcttggggagctgaaggactctgcggctgatgcggcgaagagggcagtgggttacttgagcggcaagacagaggaaaccaaagagaaagtctcggagacggcagaggcgacggctaataaggcggcggagatgaaggaggccaccagggagaaggctgccgggactgcggaggcggccaagaacaaggccgcagaggtaaaggacagagctgcagaaaccgcggaggcggccaagaacaag

SEQ ID NO: 27988 - DNA, 410 bp, Glycine max
  Clone ID: LIB3051-116-Q1-K1-F5
cccacgcgtccgcggacgcgtgggtgccattctcatcctcctctgtctctctctctcgaccattgccatggatccttacaagctccggccatccagcgccttcaattctcccttctggactacaaattctggtgctcctgtttggaacaacaactcctctttaaccgttggagctagaggtccaattctgcttgaggattatcatcttgtggagaagcttgcaaactttgacagggaacgtatcccagaacgtgttgtccatgccaggggagctagtgcaaagggtttctttgaggtcacacatgacatttctcacctgacatgtgcagatttccttcgagcccctggagttcagacgcctgtaattgttcgtttctcaactgtcattcatgagcgtggtagccctgaaa

SEQ ID NO: 27989 - DNA, 301 bp, Glycine max
  Clone ID: LIB3051-116-Q1-K1-F7
gtgaactcttgagggtcgtggtagtttggcaaccacacttatcttcatcaatagtcgcggaaacagtttccggtgcatctcatgcgcttcctaaatgaacgacgcatatgtctcgaagcatatccagcatattgtgcgtgtcatccgccacgaatcttatgagaaagccatcgagatctctgtatctgtcgaagaggatttcaatatcgagaagctgcatttggtcgaagccgaagagcagaagatcaggcgagaatacgaacgcaaagagcgccaagtcaaaattcgcaagaagattgag

SEQ ID NO: 27990 - DNA, 417 bp, Glycine max
  Clone ID: LIB3051-116-Q1-K1-F9
gttcattctctatgcgcagttccctacctctcctttcaagatgcagatcttcgtcaagacccttaccggacagaccatcacccttgaggtggaaagctctgacaccatcgacaacgtcaaggccaagatccaggacaaggaaggaattccctcggatcagcaacgtctcatcttcgccggaaagcagctcgaggacagccgtaccctcgccgactacaacatccagaaggagtcaacccttcaccttgtccttcgtctccgtggtggcatgcagatcttcgtcaagactctcactggcaaaaccataaccctagaggtcgaaagctctgacaccattgacaacgtcaaggccaagatccaggacaaggagggaatccccccagaccagcaacgtctcatcttcgccggaaagcaact

SEQ ID NO: 27991 - DNA, 449 bp, Glycine max
  Clone ID: LIB3051-116-Q1-K1-G4
actactacaagtacttccttacaatcaaaaccaacaacaactatggcaagttatcaaaagcagtacgatgatcagggtcgcaaggttgacgagtatggcaacgttgagaagcaaaccgacgaatacggcaaccctgttcatgctgctagtgtcacctatgtagccaccagaactgctgctggtggttacagtgatgacattaataagcaacatgataccaccaatgcctacggcgtagacactggtagacagcattctagtggtggctacgatggtgacactaataaacatcatggaactactggtggctataatgatgacaccaatagacatcatggaactaccggtgtctatggtatagacaccgataggcaacaacatgggactactggtggctatgccggtgacactggtaggcaacatgggaacatcggtggcccttactatgg

SEQ ID NO: 27992 - DNA, 410 bp, Glycine max
  Clone ID: LIB3051-116-Q1-K1-H10
gagaattttgtcaaaatagatgggaagcctagtgcagatggggtagatgaaagcaagtattggcgtggcggctatggtggcggctatggtggtggttatggaggtgggcgtggaggctatggaagtgggcgtggaggctatggagggggacgtggtggatatggcggcggacgaagtggctatggtggcgggcgtggtggctatggcagcaggcgtagtggcgggcgtggtggctatggtcctaatgaacataacgaggctggggttgatgctaaccctcacaactaagaaggcaactttctaaagcttatatatgggtttaagttatcgcaataaataaaacttcatgagaaggttagttgtaatagaagtggaaaactgtgtaaaggaataatacctttcatgaattt

SEQ ID NO: 27993 - DNA, 441 bp, Glycine max
  Clone ID: LIB3051-116-Q1-K1-H11
cttcaagattcaggtactgcgtttcggaagcagacacagatggctcgtacgaagcaaaccgctcgtaagtccacaggaggaaaggctcctaggaagcagcttgcaaccaaggctgcacgtaagtctgcaccaactactggtggtgtgaagaagccccaccgttatcgtcctggtaccgttgctcttcgtgagattaggaaataccagaagagtaccgagcttttgatccggaagctccccttccagaggctggttcgtgaaattgctcaggacttcaagactgatctgcgtttccagagccacgccgtgcttgcattgcaagaagctgctgaggcataccttgttgggctctttgaggacactaacctgtgtgccattcacgccaagcgtgtaaccattatgcccaaggatattcagctggcaagaaggattcgtggtgag

SEQ ID NO: 27994 - DNA, 431 bp, Glycine max
  Clone ID: LIB3051-117-Q1-K1-B11
acaataaattattggaccgttaaaatcagcttacagctcactaaggttttgtcctcaagccaaataattgaggagtaagactatgaatatcaggaatagtttatttaataaaagaatttgtgtttgatttttaatctagtaaagtaagagaaacttgtgatttcttacacaggataacacttttgatttaattttgagataaaagtgatacgtgtagatctaggaagaggcgttgcctatttaaagaagctaaccctccacaaggaattaaggtgcaagagtttgttgtgagctataagctagtttatcgtgaggagaatatgaagttgtttgttttctttgttgctgcagtagttttggtagcatggccatgccatggcgcaggctaccaaaggttccctctccgaatgaaaactggctatggtgagcat

SEQ ID NO: 27995 - DNA, 290 bp, Glycine max
  Clone ID: LIB3051-117-Q1-K1-D3
gttctagatcgcgatctagaactacggacgcgtgggtgataagaggagataccaacaagagaggagaaaaaaaagagttgagattccctttgaagaaaagatggcatcccataggcaaagctatgaagctggtcaaactaagggccgaactgaggaaaagacgaaccagacgatgggcaatattggagagaaggctcaagctgcaaaggagaagacccaggaaatggcccaagctgcaaaggagaagacccaacaaacagcccaagctgccaaggacaagacttgcgaca

SEQ ID NO: 27996 - DNA, 400 bp, Glycine max
  Clone ID: LIB3051-117-Q1-K1-E2
gttattgtacaggattggcttcctacggagagaaagagtggtacttcttttcaccacgggaccggaaatacccgaacggttccaggccgaaccgggcggcgggaaccggttactggaaggcaaccggggcggataagcccattggccaccccaaaccggttgggataaaaaaagctttggtgttttacgcagggaaagctccgaaaggggacaagagcaattggatcatgcacgagtatcgtctcgccgatgtagatcgctccgttcgcaaaaagaacagcctaaggttagatgattgggtgctttgccgtatttacaacaagaagggcacgatcgagaagttccaaccaagcagcgatgttgttgttagccgaaaaatggaatcatcggagatcgaaga

SEQ ID NO: 27997 - DNA, 465 bp, Glycine max
  Clone ID: LIB3051-117-Q1-K1-E11
gaatttgggggtagtcgtacgcgtgcttgcgtctgctccaggtgcttccttacattcaaaaccaacaacaactatggcaggttatcaaaagcactacgatgatcagggtcgcaaggttgacgagtatggcaacgttgagaagcaaaccgacgaatacggcaaccctgttcatgctgctagtgtcacctatgtagccaccagaactgctgctggtggttacagtgatgacattaataagcaacatgataccaccaatgcctacggcgtagacactggtagacagcattctagtggtggctacgatggtgacactaataaacatcatggaactactggtggctataatgatgacaccaatagacatcatggaactaccggtgtctatggtatagacaccgataggcaacaacatgggactactggtggctattgccgtgacactggtaggcaacatgggaacatcgg

SEQ ID NO: 27998 - DNA, 395 bp, Glycine max
  Clone ID: LIB3051-117-Q1-K1-F7
cccacgcgtccgcgaggacggacgtacccttgctgactacaacatccagaaggagtcaacggtccacttggtgttgcgtcttcgtggtggtatgcagatcttcgtcaagacccttacgggtaagactattaccctcgaggtggagagctccgacaccattgacaatgtgaaggcgaagatccaggacaaggaaggaatcccaccggaccagcagaggcttatttttgctggcaaacagcttgaggatggaaggaccctcgctgactacaacatccagaaggagtcaactctgcacttggtgttgcgtcttcgtggggggttttaagctggagctgatttctgtgtgatgttcgatgttggattttcccaaacattttaagaagaaatgtgatgtg

SEQ ID NO: 27999 - DNA, 394 bp, Glycine max
  Clone ID: LIB3051-117-Q1-K1-F9
acgaaaccctaggttttagtgagtggctaaaatggcggtgattttttcaagtgcaataccaggaggggcagcaccagcagcaatcgagcaagtgcagtgcttcgggcggaagaagacggcggtggcagtgacctactgcaagcgcggccgaggcctcattaagatcaacggctgcccgatcgagctggtggagccggagatcctccgcttcaaggccttcgagccaatcctcctcctcggtcgccaccgcttcgccggcgtggacatgcgcatccgcgtgaagggcggcggtcacacctcccagatatacgccatcaggcagagcatagccaaggctctcgtcgcttactaccagaagtacgtcgacgagcagtccaagaaggagatcaaggac

SEQ ID NO: 28000 - DNA, 345 bp, Glycine max
  Clone ID: LIB3051-117-Q1-K1-G3
cgtgatggcaccaaaggcagagaagaagcctgcctagaggaagccttgggaggagaaaaagtcgccggtggaagacaaggttccggcggagaaaaagccaaaggccggaaagaagcttccgaaggagggaggcgccggcggagaaggtaagacgaagaagagaaacaagaagagcgtggagacatacaagatctacatcttcaaggttctgaagcaggttcaccctgacattggtatctcaagcaaggccatgggaatcatgaacagcttcatcaacgacatcttcgagaagcttgcccaggaatcttctagactttgccgctacaacaagaaacccaccatcac

SEQ ID NO: 28001 - DNA, 405 bp, Glycine max
  Clone ID: LIB3051-117-Q1-K1-H12
ctagttctagatcgctttgttgttcgtttcagcaacaaagacattgttgcacaaataatatctgctagcattgctggcgatattgttcttgctgcagcatatgcacatgagctgccacgatatggtcttgaagtagggcttacaaattatgctgcagcttattgcactggtctcctgttggcccgaagagtcctcaaaacacttgaaatggatgaggagtacgaaggaaatgttgaggctactggagaggactattcagtggaacctgctgagagcaggaggccattccgtgctctccttgatgttggtcttattaggactacaactggcaaccgtgtctttggtgcccttaagggagctctggatgggggtttggatattcctcatagtgacaagaggtttgct

SEQ ID NO: 28002 - DNA, 403 bp, Glycine max
  Clone ID: LIB3051-001-Q1-E1-G3
agcccacgcgtccgcccacgcgtccgcacacgcgtccgcccacgcgtccgcccacgcgatccgaagaaaccttatcttggtattttgattggttctgtggagagtttttttttctttggtgtggattttggtttgtgctgtttttggctgggaataacaatggccgatgatggaaacagaagcaattacttccagtccatcttggggttgcagaatgagtgcactgaattggagctaatgaatgcgtataagaaacatgcagagaaatggtacccagatcgttgttcagctagagggaattcagatttagtggaataagctactaaaaaatttcatgaaattccggaagcctattcaattttatctgaagccaacaaagcgttaatgtacgacatgggagtct

SEQ ID NO: 28003 - DNA, 333 bp, Glycine max
  Clone ID: LIB3051-001-Q1-E1-G7
agaaaaaaaaaaaaaaaaaaaaaaaaaaaaaaaaaaaaaaaaaaagaaaaaagggcagcagctcaaaaggttccatacttaagtaagcgggcagccgatctaaaggatcatccataatgtcacataaattcaattcaatgagccctccttttatgacatcgaaattgagatcactgtgccatattatttacattattcgccttgcaaaaaatctgcctttcgccatcttaattactatgcagcagagcctcatttctcgaccttccgaacaattgtacaggctgaatgggatcgcccatccaacctgttacgaagcattaatcgcgaatggta

SEQ ID NO: 28004 - DNA, 233 bp, Glycine max
  Clone ID: LIB3051-002-Q1-E1-C3
aaaactccagcaggatttgcattgttttcgttgaaataagcaaaagagatcaaaggaagataacgaaaacttgattatattataagatagcaataaaaataagaggtagcggacgcgtgggtttttttttttttttttttttttttttttttttttttttttttttttttttcttttgtttttttttttttttttgtgtctttttttctttttttttcttttttgtttttttt

SEQ ID NO: 28005 - DNA, 419 bp, Glycine max
  unsure (1)..(419): unsure at all n locations
  Clone ID: LIB3051-002-Q1-E1-C5
attcctcgatgccttcctcccccaattccaattgcacaccgacgaaaggcgcaggtggtgaaatcgtgtcaccaaaacgagagctctgcttcggctcacacagaccactcctcaaatccaaaggcatccgctgctgatggaaatggaatcatggaaaaacctgtgtgcagaaattgcttgggaagcggtgctgtgctttgtgatatgtgtggtggcacaggaaaatggaaagctcttaaccggaagcgagctaaagatgtttatgaatttactgagtgtccaaattgttatggtcgaggaaagcttgtctgccctgtttgtttgggaactggttttactaataatacaggtctccctaaggngcctgaaacaacgaaactgcttgataagatttataatggacggctacttccaaactc

SEQ ID NO: 28006 - DNA, 343 bp, Glycine max
  Clone ID: LIB3051-002-Q1-E1-G10
ggagaagcgtacttttttggttggttattcattgtcaattgcagacctagcaatctgggcaggtcttgcaggttctggaaagagatgggaaagtctaaggaagtcaaagaaatatccaaatcttgcacgatggttcaattcaatagtggaagaacatggtactgccttaaatgaagtcacatcagtatatgctggcaaaaaaggattgggtgaaccaacagcaaccaagtcaaaagaacagtcagtaaacactgataaagtgaagaaggtgaatggagatgtgtctgagaacaacaaaggaggaagcaaaccttcagcagaaatagatcttccagatgctgaa

SEQ ID NO: 28007 - DNA, 445 bp, Glycine max
  Clone ID: LIB3051-002-Q1-E1-H6
agcccaggtttgaattgtgttctatgctaagattttgtgtcattgtcagatatataaggaggggtacaccagatgctggctttgctctttttgaatctgagtctctgaagtggccaggttttgtagagtttgatgatgtaaatgggaaggtattaacatactctgctcaagacagcatatacaaggtatttgacctaaaaaactatacaatgctgtactctatttctgataaaaatgtccaagagattaagatcaggtaatttttcttaccgtgcttgtattatttttacttttagaaaacacttccatccatagatgtgatgttctatggtcaattggtcatgcacaactttctgaaattatatcacattaactattaaatttttaagaatatattagttttttctacattttatagtttctttgggcgatcctggtttctata

SEQ ID NO: 28008 - DNA, 452 bp, Glycine max
  Clone ID: LIB3051-003-Q1-E1-A6
ggtttttatatttgatcttcagcagaggattgttcttggtgaacttcagaccccttttattaaatatgttgtctggtctgatgatatggaacatgttgctttactcagcaaacatgccattataatagctagcaagaaacttgtgcaccaatgcactctccatgagactatccgtgtaaaaagtggagcttgggatgaaaatggtgttttcatttatacaacactaaatcacatcaaatactgtcttcccaatggagataatgggataataaagacattggacattccaatttatatcacaaaggtctctggcaacacaatcttctgcttggatagggatggctatgattgcttatcttcagcagaagggctttcctgaggttgcactgcattttgtgaaagatgagaaaattcggttcaatttggctttagagagtgggaacattcaaatt

SEQ ID NO: 28009 - DNA, 324 bp, Glycine max
  Clone ID: LIB3051-003-Q1-E1-B4
cttcagcatgatgcacatggggtttaacaacttctctgggaagttccctccagagattgcaagtattcccattgtggtgctaaacatcacaagtaaccagttttcaggtgaaatccccgaagaaattggcaacttgaagtgtttgatgaatcttgacttgtcttgcaacaacttctctgggacgtttccaacaagtttgaacaaattgacagagcttaggaagttcaacatctcatacaaccccgtaatatccggtgtgggtccatcaacacgacagtttgctacctttgagaaagattcatatttaggcaacccctttcggat

SEQ ID NO: 28010 - DNA, 421 bp, Glycine max
  Clone ID: LIB3051-003-Q1-E1-D9
gctacttgaaattatatcaaagttaaaggatgaagaaggatgtctcatgggtgtcagtacttcaaatcttataattgccaactctggaaatgatttacctgttattgatcttacaagggtgtcacaggaacttgcataccttgccaatgatgcagatcttgtcatcttagaagggatgggtcgtggaatagaaacaaatctctatgctcaatttaaatgtgattccctcaagatagctatggtaaaacatcctgaagttgcggaatttcttgggtcacgtttgtatgattgcgtgatcaaatatgatgaactttagagcttaaaattaacgctgattctttactttgataaatacctaacactacatttgcaattagtccaggcttattgtttcaactgcatatgcctccaactttccaag

SEQ ID NO: 28011 - DNA, 429 bp, Glycine max
  Clone ID: LIB3051-003-Q1-E1-E10
cgtttcttctcttcactctgcccgctgcatcaatggcttcagagaagaaactttcgaacccaatgagggagataaaagtgcagaagctcgtcctcaatatctctgttggcgagagtggagatcgtctcaccagagcctccaaggtgttggaacaacttagtggccaaaccccagtgttttccaaaggttatttctcaataagtttctaaatgggtagtattcagggatgctggtaatgggcatagatctcaaatctgtgttcattgaaacgttttgttgatcattttttgtgattctatcattttcctaaaatatagattgctgctggtgaagtgattttgaagaattcctaaggtttacggtagtttattttagtgtttttaatggagagtttgttttgtttttttaattgtattgtcaacattcaaa

SEQ ID NO: 28012 - DNA, 430 bp, Glycine max
  Clone ID: LIB3051-004-Q1-E1-A5
aagagatcagaatcggcatctccacgatgtggatcttgattcttctgttgatgtgcttggggacagtgcacctcctgaatgggcgttgcttctcattggttgcctcattggactcaccactggcctctttgtggcactttttaataaaggggtgcataatacatgaatgggtatgggctggcactccagttgagggtgctgcctggcttcgtattcagagattggctgatacatggcatcgaatccttttaatacctgtcactggaggagtcattgtcggcatgatgtgtggtttactggaaatactggaccaaataaagcaatccacttcctctcaaacacaacgttttgattttcgtgcaggaatctttccaacaataaaggctatccaagctgcagttactttaggtacgggctgttcaatgggccc

SEQ ID NO: 28013 - DNA, 434 bp, Glycine max
  Clone ID: LIB3051-004-Q1-E1-A8
tggtgctggagatcctcggcttgcaaattttaggttccgtcaggtacttattgatgagtccactcaagcaactgaacctgagtgcctcatacccttggttcttggagcaaagcaggttgttcttgttggtgatcattgtcagcttggtccagttattatgtgcaagaaagcagcccgtgctgggttagcacagtcactttttgaacgcctagttctacttggtgtcaaaccaattaggttgcaggttcagtaccgtatgcatccatgcctttcagaatttccctcaaacagtttctatgaaggcactctgcaaaatggagtcactgttaatgaaaggaagtcttctggaattgattttccttggccagtgccaaaccgtcccatgtttttctatgttcagatgggacaagaagagataagtgctagtggaacat

SEQ ID NO: 28014 - DNA, 441 bp, Glycine max
  unsure (1)..(441): unsure at all n locations
  Clone ID: LIB3051-004-Q1-E1-B10
gcttgcttgagttgccaactttaagtttgtcaatttccgtgctgcttggttggttgcaattgcaagtgaacaattggctagtgtgtactagttttgaatcacaatggcagaggatgatggttacacgaaagatggaacagtcgattactgtggaaatccagctaataaaaaggaaactggaacctggaaagcctgcccctatatcttaggtaattgttgtgttcgtttaagtccaaggtangatgtgatgtgtatgtactgtgttgtgtgtgaaatatttatcgtttcaagcttctatttgcaggaaacgaatgttgtgagagattggcttaatatgggatgagcacaaacctggtgctttatttcaagaaccggctaaatcagcatagtgctactgcttccaagaatgtctctaattggagtggaacttgctatatcaca

SEQ ID NO: 28015 - DNA, 425 bp, Glycine max
  Clone ID: LIB3051-004-Q1-E1-B6
cccaaagcatgttttccaaccagtttttgaatttgcttctgtaagctgtcaaaatgcaaacccgaagtttcgggaagcatctgttactgctttgggtgtcatttcagaaggttgtttggaactcatgaaaagtaagctagaacctgttctccatattgtcctgggagctctgagggacccagaacaaatggtcagaggggcagcttcctttgctttgggtcaatttgctgagcacttacagcctgaaattgtatcccattatgagagtgttcttccctgcattttaaatgctcttgaggatgtatctgatgaagtaaaggagaagtcatactatgcgttggctgctttttgcgagaacatgggtgaagacatccttcctttcttagatcctttgatgggaagactgttgacagctctccaaaata

SEQ ID NO: 28016 - DNA, 379 bp, Glycine max
  Clone ID: LIB3051-004-Q1-E1-D10
attcataccttgctccagatcctactattcaagctctgttttagggttcgattccgatcgatccctaaccggcgagcgcgagttccttcgattcgtttcgtttcgacgactaagcttcttctccgtttaggatccgttgatcgattcatcatccatggcggcgatcgaggacttgtcggagctcgccgattcgatgcgccaagccgcggcgctcctcgccgacgaagacgtcgacgaatcctccaccaattctcgaagaccttccactttcctcaacgtcgttgcactcggcaatgttggtgctggtaaatccgcagttctcaacagtttgattggacatcccgttttgcctactggtgagaacggagctactcgaagc

SEQ ID NO: 28017 - DNA, 439 bp, Glycine max
  Clone ID: LIB3051-004-Q1-E1-D6
atgcaattgcagggtaacaacaacaaatgaagaggtgcaaaccctaaacacaaacactcacttcaacccacaggtcccacccctccgaaccctctcttcctcgaagcggttcgagggttcctcggagttcgtgaagctcctcatcaaggacttcctcaactcaatctccgacgaccaccaccgcgcctccccctctccctccgtctccgactggtggcgcactgtctccctctacaccgaccagaccggcgccaacatctcccgctccgtctccatcgccggcgagtactccgacctccgctactcccacggcacacacctcacccgcctctccgtgcaggacgtcatcgccaccgccgtccaggccaagcccttccccgtcgaccaccgcaacgggatctacctaatcctcaccgccgaagacgtcaccatggaagac

SEQ ID NO: 28018 - DNA, 443 bp, Glycine max
  Clone ID: LIB3051-004-Q1-E1-F2
ggaaatggcaacaaagatggactgttctctgtgctactgagagactatagagcacatgctgctgcatcttgcatgaatcgtttagctaaattgagtgcacgatggattggcaatcatgggttctcaataggcattgatgatgtccaaccaaaagagattctgattaacaagaaagatgaaacaatttcagaaggttatagggaatgtgataaacacatagaagctttcaataagggaaaactagaactcttagctggttgtgatgctgcgcagacattagagactcggattactggggtattaaatggacttcgtgatacggcagggaaggtctgcatgcaaaccctacactggagaaatagtccattgatcatgtcacaatgtggctccaaaggatcttctattaatatcagtcaaatggttgcctgtgttggtcaacaatc

SEQ ID NO: 28019 - DNA, 133 bp, Glycine max
  Clone ID: LIB3051-004-Q1-E1-F8
gttcactttagtttgaaggcaagttttgaaacattgtttgtcatttcagtttcatgatgaagcatatggattaacatgagccctgtttaaactgcacttttattgcaaagaacttgtgaaccccacgttatgc

SEQ ID NO: 28020 - DNA, 440 bp, Glycine max
  Clone ID: LIB3051-004-Q1-E1-G5
attttagaatatatgtggggattctattataagtgaagagtgaagcaacagaaaaacttctcatagatcaattctgttctatttttctctgattttcttaaagctgaaagccatttttatctcccctatgactgacttgatttatttgcagcccacagtagacatcaagacagtgttatctcagttaatggacaggttgtcaaattatgctgcctctagtactgaagtattgcccgaatttctgcaagtggaagcatttaccaaattaagcacagcaattggcagggtgatagaagcacaagttgacatgcctattgtgggagcaatagctttgcatgtttctcttcttacatttactctccgtgttcatccagatcgacttgattatgtggaccaagtactgggatcatgtgtcaagaagctttatggaaaaccaaagc

SEQ ID NO: 28021 - DNA, 409 bp, Glycine max
  Clone ID: LIB3051-005-Q1-E1-D8
acggtgtctgatgcggttcacttgacttttggttgtggtcttcttacattttcgttatttgttatggctgcgtctaggaagaaagccgatagagagtatacttatgggtataaaaggctagaagtcttgtctgcatttacaaatgccctgtttcttttgtttatgtcattctccctagcagttgaggcacttcatgcattcatacaagatgaatcagagcacaagcattacttgattgtttctgcagtgaccaatttatttgtgaatcttgttggtgtatggttcttcagaaactatgctcggattaatctcacttacagaaatgcagaagatatgaataatcactctgttttcctgcatgttgttgcagattccattcgcagtgcaggtctgatattggcatcctggt

SEQ ID NO: 28022 - DNA, 389 bp, Glycine max
  unsure (1)..(389): unsure at all n locations
  Clone ID: LIB3051-005-Q1-E1-F3
agggaaaaggtgggaaccacttttggaagtccattgggcttggatttaagactcccaaggaatccattaaaggtatctctctcattcactactatctcttataaaatgtttattctatgcaatgtgaatctatcaggttattgttctatgatgaagatccaccttaaagtgtacagaagtatgttcttcattagtgtaggaaatggaatttggtttgggtgggaaggaataaggttgctgcattagagcctaatgaagtagaaacattgttgggcttcccaaggagccacactagaggaggtggaataagtangactgacagaaagtgacccattatcaggtttctctccatttctccttgtctggctactttaagataagtttcgctg

SEQ ID NO: 28023 - DNA, 252 bp, Glycine max
  Clone ID: LIB3051-006-Q1-E1-E10
tcttctttttcttttttttctttcttttttttttttttgttctttttttttcttttcttttttttctttctgtttcttcttgtttttctttcttttttttttttttttttttttgtctttttttttttttttttctgtttttttctttttttttttttttttttttttttcttttgtgttttctttcttttttttcttttttttctttttttttttttttttgtttttttgttcgttgtttttttttttttt

SEQ ID NO: 28024 - DNA, 186 bp, Glycine max
  Clone ID: LIB3051-006-Q1-E1-E9
acccacgcatccacccacgcgtccgcccacgcgtccgtttttaagaatttattaaacataagctttctagcaaaaaaaaaaaaaaaaaaaaaaaaaaaaaaaaaaaaaaaaaaaaaaaaaaaaaaagggaagaaaaacaaaaaggtaaaaaaacttaaataaacataaaagcaatagtaaacaata

SEQ ID NO: 28025 - DNA, 262 bp, Glycine max
  Clone ID: LIB3051-006-Q1-E1-F6
gagatcagtcagtgatccccatgtctacgttcaacatatgtgtgcgcagttgtgtctaacctaagtcacatggggagatagtgtggacatgggagatttgtgcccgcagtgttctatctaattcagctatggctgactcggcatagaccatccaactcaagcttggcgaattgtgagatctgcatttcgagcggctctagggtgaagcaagttggcgtccctgcattgcacatgacagcgactattggcctgactgttatgt

SEQ ID NO: 28026 - DNA, 295 bp, Glycine max
  Clone ID: LIB3051-006-Q1-K1-B8
cccactcttccgcccacacgtccgttttgcttttgcatgcatcaatcataaaggatgtattctatctaatttctgactaaaattagcttttttatttcatttacatatgttttataaatgtttctaattctataatataatattgtattcattattttttatttattatatcattatttatttttttatatttttttttatatttattttttaattttttttattttatttaatatatatattaaatttttatattttattttattatttttttttatatttatattttttttta

SEQ ID NO: 28027 - DNA, 370 bp, Glycine max
  Clone ID: LIB3051-006-Q1-K1-F6
gtgagatacactaagttatcctcataaatacactctaattatgtggcaagatgagtgtctaaccttagtaacattgccacatattgtgttcatttttgaattatgccactaatattttatttattacatttatatcttcttttattttttcttttctttatttcatatcatttatttttatacttttttatttcttttttattaatttattttttttttatttttttttttattttttatatattatttttatttatttttttttttttttattatttaatttattttaatttttagtttgttttttttaatatttattattttatatattttttattttttttattaattttttttttattattttttt

SEQ ID NO: 28028 - DNA, 258 bp, Glycine max
  Clone ID: LIB3051-006-Q1-K1-F9
gcgcgatggaaaaggtagctttgtaaggcttgaagttgtcacagcttcactgggcttcggtaactgattttgattatgtgtataaatttatggcttttgatgtatatattttaaacattacatttatcataataaatatttataattatatatttaatattgtatctatattattataattaatattatattttatatatattttttataatattaaatattattatattatattttatattatattataattatatt

SEQ ID NO: 28029 - DNA, 287 bp, Glycine max
  Clone ID: LIB3051-006-Q1-K1-G6
cccactcgtcctaaaaaaaaataaaaaaaaaaaaaaaaaaaaaaaaaaaaaaagaaaggaaaaaatataaaaatataaaaaaattaaataatcataaatacaaaataataaaatataaaataatgtaacctaaattaaatataattttcaataattttataacataaaataatagaaaaaccattaacttttacataacttaataacatttttattatatatctatttttttcaatatatcttatttatctaaaaggtttttactaatattctattttcaatatttt

SEQ ID NO: 28030 - DNA, 392 bp, Glycine max
  unsure (1)..(392): unsure at all n locations
  Clone ID: LIB3051-007-Q1-E1-A12
agaatgtatcaatgtttggttcaaacataggtccagataaatcacttgaagtctttntgcatattttacctgctgcttctgaatttgatgaactacctgtgcgtcataatgaggaaaaatacaatgaagcactgtctgagaaagttaaatatccagtggataagaaccgtctagatgaccctcacatcaaagcacttcttctatttcaggctcatttttctcaattggagttaccaattagtgactatgtcacagacttgaaatcagtattagatcagagtatacgcgtaattcaggccatgattgatatttgtgcaaacagtgggtggctttcaagctcaattacttgcatgcatcttctgcanatggtcatgcangggtttgtggtttga

SEQ ID NO: 28031 - DNA, 155 bp, Glycine max
  Clone ID: LIB3051-007-Q1-E1-A2
agtttagatcgcgagcgccgcccttttttttttttttttttttttttttttttttttttttttttttttgtttttttgttttttgtgttttttttttttttttttttttttttcgtttttttttttttaaagaggttatagtctcagttgattag

SEQ ID NO: 28032 - DNA, 355 bp, Glycine max
  Clone ID: LIB3051-007-Q1-E1-A7
acgcgtccagatgaattgattgtatataggatactctgtccagatgaagttattgggagtgttattgggaagaatgggaaagtgataaattcaataaggcaagaaaccagggcgaaagtcaaggttgtcgatccgtttcctggctccaaggatcgggtaataacgatctactgctatgtcaaggagaaggaagacgttgagattgatgatgagtttgctggtaaagaacctctgtgtgctgctcaagatgctcttctaaaggttcatgtagccattgcgagttccatagcacctattggagattccgagaagaagcgaaaggatagagatgaatgtcaaatccttggttccagca

SEQ ID NO: 28033 - DNA, 233 bp, Glycine max
  Clone ID: LIB3051-007-Q1-E1-B5
cacatgtatggttcattatatatatcatacctgaaaagaatgtcaggggtagggagaaactatcaattataaatatcactgtggagagtgcaagggaaagaaggttattgaggatatgacagtccttgaatttattgacgagcacgggatgtagaataggcacaagattacattcactggcgaagttaaggaggctggggagagtagtattggggatatcgtcattgtcatta

SEQ ID NO: 28034 - DNA, 116 bp, Glycine max
  Clone ID: LIB3051-007-Q1-E1-F6
aaaaaaaaaaaaaaaaaaaaaaaaaaaaaaaaaaaaaaaagaaaaaaaaaaaaaaaaaaaaaaaaaaaaaaagggaggcaaaagaagagaataaaacaagaaagaaggaaagaaaa

SEQ ID NO: 28035 - DNA, 393 bp, Glycine max
  Clone ID: LIB3051-008-Q1-E1-B2
agctaccttacgctctctattgctgctccatgcaggtctaaatccattccctcaggttctggcattctatgacaatccctcagtgttcaagcctcccattgaagaaccacagtctagaaggccccagttgagaagcctcctgtttagaatcctccagttgaaaaccccccagtttagcagcctccagtacagaagccaccaggtgtcaagcccccagttgagatacccctagtttataagctcccagttgagaatccaccagtgtacaagctcccagttgacaatacaccagtgtataagcccccagttgaataacccccagtgtatcagcccccagtatagaaaccatcactgtaaaactcccagttgagaagccccagtttacaagccccc

SEQ ID NO: 28036 - DNA, 445 bp, Glycine max
  unsure (1)..(445): unsure at all n locations
  Clone ID: LIB3051-008-Q1-E1-E10
cgggtcggncacgcgtccgaagtactgaggttcttcattctggctcaggcgttgcgacatccccgtcccactctcttcttcagccttcttggagtctctcacgccagttgcacacacatctactggggctaaggtcggaacgatggctgcctcttaaaaacatgtgcatgacgcatgtactcagacctagtcatagccattctcagcgaattcggcaatggtccaaccccataaacgaaccgtgctggtcactgggaccccacagtcaattcctgcacaatgtacagctctgagttcgaagactgctactgcgaatgtatcaaggtgttgctttcattaggtggtcgcattggatgctacactttggcgtcactacaatacgcatgagtcgtttcaatgttgctgtggaacactttcttgggaggcaagtcatctacttcgccac

SEQ ID NO: 28037 - DNA, 383 bp, Glycine max
  Clone ID: LIB3051-008-Q1-E1-G3
cggtcggcccacgcgtccgaacaagcgtatgcccacgcatccgcgcgggcagccgctgcgatctacccaatgcgaccgaaaatgttcgtctgcacctatacacgcaccgggaacagatttagcgcgtagaggcacctccattggcggcaagcaactcgatccgcaatgggaatcgatttgcatgcaggatgtaggtcaactataacgaatccatgcgcccccagatgcgattaaatctacctcaagctgtccgtaaagctgtaccatgttcatggtcagaagactgggagtaacttcaacgctgttgtctccaaacgccattgcatgagcagggtcaacaagccgtcgctgtccctctcgtgattgatccgttacacgattgg

SEQ ID NO: 28038 - DNA, 281 bp, Glycine max
  Clone ID: LIB3051-008-Q1-E1-H5
agaaggtatcacagcagcctatgacacgctcagcattggctcgaaatatcttgaatacggtacaacccgtgctgactatcacgtccatagggattctaccctgaagttggagttgcagcttcgtagtggcatgcattctttgtcagaactttgagatggattctccatcactttagttgttgatagttcagatatcaatgaaaagctcaatgcaaatatccaaagacaggagggtattccatcagatcagcagaagcgtatttttgctgggatgcatatgc

SEQ ID NO: 28039 - DNA, 324 bp, Glycine max
  Clone ID: LIB3051-009-Q1-E1-E12
accaatatattccttgacatatgttttttctttattggcaaggatagagtcaatgttacagagatattaaaaggttgtgatctgcatgctgaaattggaataacaatcctggttgaaaggagcctcataaagcttgaaaagaataacaagatcaaaatgcacaatttgctacgtgacatgggaagagaaattgttcgtcaaagttctctagaggaacctgagaagcgtagtcgattgtgggttcaccaagaagtgcttgatttgttgttagaacatactggaacaaaagcaattgaaggcttggctttgaagttacaaagaact

SEQ ID NO: 28040 - DNA, 434 bp, Glycine max
  unsure (1)..(434): unsure at all n locations
  Clone ID: LIB3051-009-Q1-E1-G10
accatttaaaggcagcaagaagcagcattcaatgcccaatgctcatgtgcgttcagaactcaaagatatggatcaaattcgaaaggagaggcagacaaaggccaacagggtttcttatataaagagcaagtcgacaaagggtaaaaggtttggtaaaaatggtaaaaaaaggaaaaggcaaatagagtttgtttgaagctctagaaattaattagttaaggagaaaaggcttgccaatgaatttttatattttggagtggtaaggggggggggggaaaggagaaacccaactgnagaaaaagtgactttttgattttgtttttttttcttggttcaccaacaaattttgtttgttcaaagtaatgattcttgcacttgttgctgtacatggatcacacatctgtgcgcttccttttatatttgaagttcccctt

SEQ ID NO: 28041 - DNA, 412 bp, Glycine max
  Clone ID: LIB3051-009-Q1-E1-H4
accacagcgtccgcagatttttagttgtttaaaattctgttttaaaattctaaaattttaaattctttataaaaagtatccaaacaataaattctaaattacagaaattcaaattctctgataaattactttcctcggttaaaattttctatccaaacgtactctaaggttaatcagttttaagatagaatttcaacagtgaaataaacttgattaacaacttaaccttttgttgatcattttttttttctgaatcaagatatctcttaattgaaagtcaaagattaatcttttgagataccgagatttatttaagagattaacatctttcaaacatatgtatgttttttcatatgtgcaggccaaaaatcaaacttatgaccacatatttttgttgaacatattgggttta

SEQ ID NO: 28042 - DNA, 429 bp, Glycine max
  Clone ID: LIB3051-010-Q1-E1-B9
accacgcgtccgcttttctttattttattctcttctgttctccgctacctatggcgaatttcacctcttcctcctcctcctcttgttctcccttacctctatctctaactatgtcacacatttcacctccgtcatcttctgcggctttcgacgacagttccgaggacgcctgcagcatatgtctagagccattcagcacccatgaccctgccaccataaccagttgcaaacatgaatatcatctgcactgtatccttgaatggttgcagagaagcaaagaatgcccaatatgttggcagttacttatcttgaaagaccctgccagccaagagcttctaaatgcagtggaagctgaaaaacgcttaagttcaagaactgtatattcacatgcattcatggattctcgtagcccccttcaacggcttaaca

SEQ ID NO: 28043 - DNA, 385 bp, Glycine max
  Clone ID: LIB3051-010-Q1-E1-F4
cgatccagttcactacttccatgatgctagtttcaaccatgtgaagttgttgtgcgtgctgtgtttgttgttgtgtactgtattggaccttcataaccaaccatgaatctcagcatcggcaacggatccacttcgagttctcctccgaaagccggagattctgtcgccgaccagtttccggcgggtccccgggtgctagtggtgaatcatgaacccacctatcttatgatcattgatacgatgcgccgtgcatgtctctactaagtgacgatgtgtcatcgaactcaggttgcatcgtacttctcgatgacagacgatcaccggtttgataacgtttaaagcgatgtgcatatgccacatatggatggatttaagcttttggggc

SEQ ID NO: 28044 - DNA, 325 bp, Glycine max
  Clone ID: LIB3051-010-Q1-E1-G2
cggtcgaccacgcgtccaactcagtcacagccctcatcttcatatcagacatctcaacctcaaggttcatagaaggagaatgatccaaatactacaactacttttgtgggtaatttggatcctaaggtcgctgatgatcatctgacgcaagttttcatccagtatggagaattattgcatgtgaagattccagcatgcaaacgatgtgcgtatggccaattcgcatacaggagctgtgcgtaacaggcatttcaggtgtataatgggacactgttgagtgagtaaaatgttcgtctttcatgtggccgcattcattcaaacaaac

SEQ ID NO: 28045 - DNA, 318 bp, Glycine max
  Clone ID: LIB3051-011-Q1-E1-B3
cacgcgtcaactcaatcgtacgctccttctcaatcaaattatacatacaattcatcatacattccacactaaaggtttcatcaagggtgttgtaacattcaacgatccaagtagctctgctatgggttatgctaccctttttaaaggtccagttaacgttagcgaaaacgttgtttcaaacggtatggatgccttcaagatttttggaaatgtttacggaagtagtagccccaggatcattttccatatcgattgtcatgacgaatttgaaatccaatttgttgtagcccattgttgaagctaatgttgaagctaact

SEQ ID NO: 28046 - DNA, 429 bp, Glycine max
  Clone ID: LIB3051-011-Q1-E1-B8
aggaagacattccgcgtttgcgggaggaggatcgagcagaaagttgctatctgctgtttttggatcaattgaacagacagaaacagaaggatcaatcctcgcagccatcagttttgaggacaataattttatgccattggaaagaaattttaatatcaggattctttgcattgcttaaggtagttgctctgtcttcaggacctcttcttttgaattcttttatattggttgctgagggtaacgagagtttcaaatatgagggttttgtgttggccatatcacttttctttacaaaaaacatagaatccttatcacaaaggcaatggtacttccgctgcagactcattggtgtgaaagttaggtcgttgctaactgcagccatttatagaaaacaattgaggttatccaattctgctagattgatgcact

SEQ ID NO: 28047 - DNA, 410 bp, Glycine max
  Clone ID: LIB3051-011-Q1-E1-E9
gacgacgcgtcagagcagacgcaccacatgtccacgtttgattcgcagagtgagaagcacatgcggtataccgataccaggattgatgaacaggagaggaggatttcgatcaaggcggttcccatgtcgctcgtgctggaggatagcaattccaagtcctatttgtgtaacatcatggacacgcctggccatgttaacttctccgacgagatgaccgcggcgttgcggctcgctgatggcgctgtcttgattgtagatgctgctgaaggagtcatggtaaacacagagagagcgatacgtcacgcaattcaggagcggttgccgattgttgttgtaattaataaggttgacaggcttataactgagcttaagttgccaccgaaggatgcttatcataaactaaggcatac

SEQ ID NO: 28048 - DNA, 399 bp, Glycine max
  unsure (1)..(399): unsure at all n locations
  Clone ID: LIB3051-011-Q1-E1-F12
acgcgtcagcccacgcgtccgcccacgcgtccgcccacgcgtccgcactttccttgcagattcttttccaaggaaaaatttgggagttttgggggaaaaattaaaagtttaattaaaaaacggaaaggttaagttgaaccggaataaaaggataatcttgttgcttcaactctgtcagtcaagtggtccgagggcgttcttcatgttactccgggcaaaggcaagagcagtcagtcctcagtcaagtatggccatagcctagttaaagggaaagcaaaccatccgatggangactaccacgtagcaaaatttgtgcagttcaaagggcgagagcttgggctttttgctatatatgatggacacctgngtgacagtgtaccagcctatttacaaaagcat

SEQ ID NO: 28049 - DNA, 430 bp, Glycine max
  Clone ID: LIB3051-011-Q1-E1-H7
agcccacgcgtccgcacaaagttgggacgtggcttgtacaaaagcacaagacggctttgctcgaagctctggaaaaggtcaaggctgagttgatgattttaggtttcatttcactgcttttaactttcgggcagagttacattgtcagaatatgtattcctgaaaagctcgcagacattatgttaccatgtccgtataaggaagccaaaaaggcatcagatagtgaagaggaacatcgtaggaaacttttgtcctatgagcgtagatatttagctgctgatactgcctcgttcaaatgcagcagggagggacatgagccacttttatctgtcaatggattgcaccagttacacatcctcatattcttcttagcagtcattcatgtgttttacagtgctatcacaatgatgcttggaagactaaagatacg

SEQ ID NO: 28050 - DNA, 411 bp, Glycine max
  Clone ID: LIB3051-012-Q1-E1-B10
aggcgtgctcagcggcagcggcactgtcaccaacgtcacgctccggcagccggcctcgccgggagcagttgtgacccttcatggaagatttgagattttgtccctgtccggttcttttctgccgccgccggccccacctgcggcgtcaggactagccatatatctggctggcggacagggacaggtagtaggtggaagtgtggtgggaccccttgtggcctcaggtcccgttgtcatcatggctgcttcatttggtaatgctgcttatgagagactgcccttagaggaagaggaaactccggtggcagttgctggcaacggaggattaggatccccaggaatcccaggaacccagcaacaaccgtaacagcaacagtacagagcattttgatgcatgtaagttggacaaat

SEQ ID NO: 28051 - DNA, 191 bp, Glycine max
  Clone ID: LIB3051-012-Q1-E1-C7
agcccacgcgtccgcccacgcgtccgaaaaaaaaaaaaaaaaaaaaaaaaaaaaaaaaaaaaaaaaaaaaaaaaaaaaaaaaaaaaaaaaaaaaaaaaaaaaaaaaaaaaaaaaaaaaaaaaaaaaaaaaaaaaaaagaaaataaaaagaaaaagacatcgaaaaaaaaaggtcgagagaggagaaaaagg

SEQ ID NO: 28052 - DNA, 293 bp, Glycine max
  Clone ID: LIB3051-012-Q1-E1-D6
gttacctagtcgtggccccagagcatcccttgttgtcatcattggtttccattgcccagagcaaacatgtagaggattatgtagaccttgcctcaaggaagagtgaccttgagaggactgaacttcagaaggaaaagactggggtctttactggctgttatgcaaaaaatccagcaaacggggaagccattccaatatgggtggcagattatgttttggggagttatggaacacgagctatcatggctgtgcctgcacatgattcacgtgattatgaatttgccttgaagtat

SEQ ID NO: 28053 - DNA, 376 bp, Glycine max
  Clone ID: LIB3051-012-Q1-E1-E10
cgacccaagcgtcagcccacgcgtccgcccacgcgtccgcttttggtgaggtttgtacttgcgtcctccttaagcttgttctgtctcgctagaacagaattgtttactgggctcatgagtctagactctagaagttccaatttatatatttatcctttattattgaataaaggaggatgcggtttggaaaaaaaaaaaaaaaaaaaaaaaaaaaaaaaaaaataaaaaaaaaataaaaaaaaaaataaaaaaaataaaaaaaaactgaatgaagaaaaaacagataattaaattcgaagagttgtgaatgtaataaactaattgcggtgaacatttataacaatcggcaggacctctagatgacagtaactataac

SEQ ID NO: 28054 - DNA, 177 bp, Glycine max
  Clone ID: LIB3051-012-Q1-E1-F9
agattacttcaacactataattatatcataaaaaaaaaaaaaaaaaaaaaaaaaaaaaaaaaaaaaaaaaaaaaaaaaaaaaaaaaaaaaaaaaaaaaaaaaaaaaaaaaaaaaaaaaaaaaaaaaaaaaaaaaaaaaaaaaaaaaaaaacaaaagataaaaagggtggccacccaa

SEQ ID NO: 28055 - DNA, 339 bp, Glycine max
  Clone ID: LIB3051-012-Q1-E1-H5
agctcaagctttcagaaaaagaaagagccagattgcttctgctgttgaggatgctttagaagttgcagaatttaaggggtatagcctacgcactcgagattcgttgtcctgctggtgccctgactcaattggttttaaccttattgaacatgtgctttgccacattgttaagaatgaaacgccaggtgctgttttggtttttatgactggttgggatgatataaactctttgaaggatcaacttcaagttcatcctttgttgggtgatcatagccaagtagtgattcttgcatgccatggctccatggccagctctgagcagaggttgatatttgaaaa

SEQ ID NO: 28056 - DNA, 429 bp, Glycine max
  Clone ID: LIB3051-013-Q1-E1-A2
atcaactgaaatctccttttggcacttcacttactataccttggtcaactgaaggtattgagtgcaacaaatgctggctggggccccgtcttcccatatgagttcaactgtcccaacatctcaaggaatatttccaacttcaagaattggaagtggtgaatcccccaatagtggggcctcttcttttacccagcctattgcagatatgaatgaaaatgacgaaacagacttgctctcaatatcatggaatcaggactatggttgctttgctgctggcacaagtcatggttttcgtatctataattgtgaaccttgcaaagaaactttcagacgtgatttaaaaagcggtggttttaaaattgtagagatgctgttccgctgcaatattctagcacttgttggtgctgtagctaattctcactatccacc

SEQ ID NO: 28057 - DNA, 270 bp, Glycine max
  Clone ID: LIB3051-013-Q1-E1-C11
acgcgtcaggtatagtgtcattattcttcgattctgttcgacctagatttactcgtaattggtgttttcacattcaaggataatatctacatccccgtcgctcatgctactcgttagcatgtctctacttacatctgcctacaatgtcggcctcattgctcttgaggctcttaagagtgttgcagtcatatatcgaaatggtggcctcttaacgatcaatcagatcactttccttgatgatggcgaaacgagctttgtgctacctgctct

SEQ ID NO: 28058 - DNA, 434 bp, Glycine max
  Clone ID: LIB3051-013-Q1-E1-C5
attctccggtcgatctatgcatccacgttttttatttctcacataactcctcttttcctcacctcaatctcacttttttttgtggttttctcttttgggtcttcagcttttcaagtgaagtcccaaagatcaaaatttcaggtttctggaagctaattaattattggcaatgagcaacctcaagctaggtgtggaagttgtgggtgctcatgaccttatgcccaaagatggacagggctcatgtagtacttatgtggaacttcactttgatggttggaaatttcggactacaactaaagagaaagatctgaatcctgtttggaatgagaaattttacttcaatgttactgattcaagcaaattgccgaatctcactcttgatgcctgtatctaccattatagcaagagaaataatttcaaaattttcccggggt

SEQ ID NO: 28059 - DNA, 347 bp, Glycine max
  Clone ID: LIB3051-013-Q1-E1-D7
aatcgtttgaagtgacatgtttcaatttttaaaggagagaaagaatattatgaaagacagtttgctactctaaaatcatttgaagaagttgactccatagtaatatcggactgcactgatgtagaagacattggaaaacaagctgaacatgaacgggcaatgaagatttctaattatgcaaatgcagttttattggcattgaagatttatgtgactataaggagtggatcaatagctgttgcagcatcaacattggattctcttcttgacttcatggctggtggcatactttgctttacccaccttgcaatgaaggatataaatatgtacaaatacccaattggaaa

SEQ ID NO: 28060 - DNA, 377 bp, Glycine max
  unsure (1)..(377): unsure at all n locations
  Clone ID: LIB3051-013-Q1-E1-E11
cacgcgtcagcaaacgcgtccggaaaaacaatttccggaaaattcaaaaagcttcaaatatttcaaactaaaatgggtcggtcttgcaataagatggtacttgtttgatgatccagatgatatgatggcaatgaagatgatcagccaagcacatgtgangaatgggaaaataaagtctttcacttcttaatgtggtggacttccatctcctgaagctgctaacaatccattagcatatagattcagttggaatcctgcaggagccatccgagctgggcgcaatcctgccacctacaaatggggtggtgaaactgtacatattgatggggacgatctttatgattcggctacaagactaaggctaccggaccttcctg

SEQ ID NO: 28061 - DNA, 319 bp, Glycine max
  Clone ID: LIB3051-013-Q1-E1-E12
aacattctaggatcttcaaagagttccaaacaaaatgggtcagtcatgcaatcagactggacttgtttgatgattcagattagatgacggcaatgaagaagatcaaccacgcacatgtgaggaacgggaaaagaaagtctttcacttcctacagaggtggatatccagctcctgaagctgctaccactccagtaggagtggcattcagttggagtcctgcaggagccatctgagctgggcgcaatcctgcgagctacaaatggggtggtcaaactgtacatattgatggggacgatctttaagattcggctacaagact

SEQ ID NO: 28062 - DNA, 335 bp, Glycine max
  Clone ID: LIB3051-013-Q1-E1-F10
acgcgtacggatgatcatgtcatatcagagcacttttgaccgtcatggatatcaatggactagttgagcagaacgttcaatctagaagccctgtatctactatttcaggccagatggcatctcttgaagtggactccattgagaagcttgcaatggaactgtggtaacagcctgagaaatctggttctaaagtttcaacagttctgcatagatcagtaaagctccgtcacatgatttaaacgcttcatgcatcggtttcgatgtagaacaagttgtatgaggaagagcagttccttcagttcacgcagacccattcgtcacaaacacttgcagct

SEQ ID NO: 28063 - DNA, 404 bp, Glycine max
  Clone ID: LIB3051-013-Q1-E1-G12
tcgacccaagcgtacgggagttttggtgttgtgcgtttgtcatattgcataaacgaatttacggctgacacgacagatgagtaagctcagcctatttgaaaatttcgacacctctttaaattgtccaagaggtatgtgaaatgtgtgtaacttggacttacaaaagatggttcaagcacttccacaatacagtgaataaattgacaagctctccctccatgtagagattgcaggaaaaattaacagaatcattagggagtcatgacttcgggaacgtgggaagctagagcaagatcttgtttttggagatgcacggatgaaagatgtgatcaaatttttgactacatacgaagatacaagtcgttgaaaaaagttgcgcttgataatgattcttgcgtccatat

SEQ ID NO: 28064 - DNA, 357 bp, Glycine max
  Clone ID: LIB3051-013-Q1-E1-G6
acttgagaagacatcaaaaagcagatgttgaggtttgcatgctcttccaaactttgaatttaagtatgactgtactagtatgttacctaagtcatctaaaaaaaacaaagctcattgtggatgaaagttatgctgcttaatttaatagggattgttggctttctatggtcttcctctaccacacacactggttcaaggaactacccaacccctttcatccttgcctgatggagttcaatttgaaatgcacaccttgccggttgatgcaaaggcagtagcagatggagacactataactgtgtatgttagcacaacagaccccagggaatcagcatttgtccctggaaatgtgcatgc

SEQ ID NO: 28065 - DNA, 419 bp, Glycine max
  Clone ID: LIB3051-014-Q1-E1-A7
gacccacgagtcagcagtgaaagacgtggtgtcgaaattgacgccgcttttgacgaataacaagcttttggattcggtcgctgctggtaccaaattgaaagatcttcaggaatgggctgggaacgacagatttataagagtgatgcctaataccccagcagctgttggccaggcagcatctggtattatatataacttcttcgttttttttactttttaagagcatattgtgtttagttcctcagttactttcaatacacagcagaatgtgagaatggatgctgcgtgaattagttgtttaacttggtagttccgtaattgactctctgaattcaaaattgtcagttatgttgatgatgaatgatgctattttatatgatggaagttgcacatgatttgctataagagtccatgttttg

SEQ ID NO: 28066 - DNA, 420 bp, Glycine max
  Clone ID: LIB3051-014-Q1-E1-B5
acgtcagtgatagtccaccaacatggcatccttctgatgaagaagggaatcttctaagcatacattttacttattctgagatcatctggccttggactggttatttggcccttcacatgcaaatcaaggaagaaggtgcacagttttctggaaagattgaaggtaatgtgactctcagggtttctagccccccggctcatggagagaaggaccctcgaattagcatatgtgtgcttcaattaaagttaaatgtggtgccaacaccaccacggtcaaaacgaattttgtgggatcagtttcacaatatcaaatacccacctggttatattcccagagattccttggatgttcgtaatgacattcttgactggcatggggatcatctgcatacaaattttcacatcatgttcaacatgttac

SEQ ID NO: 28067 - DNA, 381 bp, Glycine max
  Clone ID: LIB3051-014-Q1-E1-C12
cgacccacgacgtacgaaaaaaagtcaaaaaaaaaaaaggaagaaaaacaaaaagaaaaaaaaaatgaggataggggtggtagaggatgtaggactcactgtctacgttctcgtgaagtcaaagttcttcgacagtgtcagtgaaatttaattccagggcagtggctgtcgtttttcaacattgggacagggaagacgttgcccattttaatcgcagtcgacttgatgaacatgtcgctagctgtagtagtagtaaacaggaccgcgccgatagcgattcccaagacttgcactgtctcaacggaaaaggcgacgcggattgtcccggtacatgcagcgtaaccgctgtggttgttatggtcagcgtgaccgtgacatttg

SEQ ID NO: 28068 - DNA, 389 bp, Glycine max
  Clone ID: LIB3051-014-Q1-E1-G12
aagttttggcgctgtattgtatgagatcctcacaggaagaaggtcattggaaagaaaccgtcccacagcagaacaaaagcttctagattgggtcaaacaataccctgccgacaccagcagattcgtcatcataatggacgctcgtctcagaaaccagtattctcttcctgcagctcgcaaaatagctaagttggctgatagctgcttgaagaagaatccagaagatagaccctccatgagtcagatagtggaaagcttgaagcaagcattgcaatattcagacactacttctcaggacattgctgaatcctcctcctcatctcgttctaaattggtccgaaaaaagtaaatatggagctttttttttttttgaaggacttgtgggaaat

SEQ ID NO: 28069 - DNA, 320 bp, Glycine max
  Clone ID: LIB3051-015-Q1-E1-A12
gaaataaccgggaagccacacaaaggtaaagatgtaaccgaaaggtttgaagaagccccaacaaagttttaaggccttgtgcctaagcaagcacaatttcctaacaacacaacaaactcaagtggctgatctattaattccattgagagagttaacccacacagatgctaatgttgcataccacttgtgggtactggtatttccaattgtctgggttacattgaataaagacgaacaagtaacacttgctaaaccaatgattaatcctttgtccaaagaattacataagaggcagcaagccaacagaccaaatgttgtgc

SEQ ID NO: 28070 - DNA, 328 bp, Glycine max
  Clone ID: LIB3051-015-Q1-E1-A4
cgactcaagcgtcagataatagagaggcagctaagaaatgcaggcttaagatcaaagcacatgttcaacagctaaagtcgaatacgattatgctgaatcagcttgaacaagagctacaacgtgctaaaactcagggcatgttgttgggtgtatgcacacttttgggtggagagcaaggcgttccggtcataactactactaggattacagatgcagcagtgttttaagtccaatcatcgtgacagatcttttagcaacacatcctaggattggcacggaggctagagatcttcgtcgtgcctccagttcacgctcttagcactgtttg

SEQ ID NO: 28071 - DNA, 357 bp, Glycine max
  Clone ID: LIB3051-015-Q1-E1-A6
taatagggatgcagctaagaaaagcaggcttaggataaaagcacatgttcaacagctagagtcgagtacgattatgctgaatcagctgtgaacaagagctacaacgtgctacaactcagggcatgttcgttgggtggaggcgcacttttgggtggagagcaaggccttcctgtcactatgaatactattagcacggatgctgcaatgtttgacgtagaatatgctagatggcaagaggagcaccaccgcatactgtgtgagctaagagctgcagtgcaagagcaccttcctgaaaacgagcttagactgtttgtggacaattgtttggcgcattatgatgaagtgatgaacctcaag

SEQ ID NO: 28072 - DNA, 402 bp, Glycine max
  Clone ID: LIB3051-015-Q1-E1-B6
aaataacggagagtaataggactagatgatcatattgacctgtatattcataacctgttgattatttatttgtttgttttttattcatgccaggcccaggcatgtatagtcaagcattcagtttctgtgagaaagttaaggggaagttgagcagttcagatgattaccagacattcttgaagtgccttcatattttcagcaatggaataattaaaaggaatgatttgcaaaatttggtaactgatttacttggaaagcattcggatcttatggatgaattcaatgatttcttggagcgttgtgaaaatattgatggattccttgctggtgtcatgagtaaaaagtcactgtctactgatgctcatttatcaagatcatcaaagttggaagaaaaagacaaag

SEQ ID NO: 28073 - DNA, 431 bp, Glycine max
  Clone ID: LIB3051-015-Q1-E1-B7
gacccacgcgtcaggaagaatattactaatggctaaaatatttcctacatgtttctcggccaagatgctttttgatagtagtattgttttacagggttgttgacaagtatttgtttttaccaaatttttggccacagaaataaaatatggcgtgattagagtaaaatgatttaaaaaatgaataaagaaaataacttggattgagctttggtcttttgcaattctaaatatagttcatttctgatagttgaatgtggtatagatgactaggcgttagtcaaataattaaatatgtaaatatttaattttataaaaataagagatgttttaattgtcaataataaatattttatttaaagaatattaaaatttaaaaatattatataatgaagaaattaaagatgtagtttttaatatcgagaaaaaataac

SEQ ID NO: 28074 - DNA, 426 bp, Glycine max
  Clone ID: LIB3051-015-Q1-E1-E7
gacccaagcgtcagcccacgcgtccgcccacgcgtccgcccacgcgtccgcaagattcttgcaggtcgaaggagatatatgggtcacaaaagaacaattagaccaaatgcaaagaagcttagcacgatattggcaggaaggcatcaaatggactgggatacctttgccaaaaaggttaagtcatgccagagaggattcatgggagagccagatgagatgagacctggtcgaggtgaatttcatgaatttccaagttcttgcgtgtgcaagagaccatatgtggatgaagaactcagcaaagaggtatatcgttccccaaaactcgttgcaattaaccttactgcaaaagcttattcctcctcgaatggaattagaagaggcaggacatgaagttaacttgaaccatgaggttatccggaagggggg

SEQ ID NO: 28075 - DNA, 349 bp, Glycine max
  Clone ID: LIB3051-015-Q1-E1-G12
gtcaggctagtactagtcgcgagcgcccttttttttttttttttttcttttttttttttttttttttttttttttttttttttttttttttttttttttttttttttttttttgaaagggatacgactcaataccaaatgctattggaataaacaccaacctgcgttaatacctaaatttccaacccaatttgggctccacataattaaatacaataaatggaaaaaaatcctttgagaccccttatttccgggcaacctccattttacccttagacgaatgcctagcatcccaaagctaaactcctaacaggacctggtcccccgcgaaatttaccccccataccgtg

SEQ ID NO: 28076 - DNA, 402 bp, Glycine max
  Clone ID: LIB3051-016-Q1-E1-A10
aggatgcttatagaattggtgaatttccctattggtttcaccagacttggacaacaagcttacagctatgtatctcattagttatactttttcgtgctgttggatgggcaacaattgcctccttggtggtgatagtaatcactgtgctttgcaatactccacttgcgaagttgcagcacaagtttcaaagcaagcttatggtgacacaagatgagagattgaaggcttgttctgaggctcttgtgaatatgaaggtgttgaagctgtatgcgtgggaaaccaattttagaagttctatagagcgattaaggaatgaggagctcaaatggttgtctgcagtgcaattaagaaaggcatacaacacctttctcttttggtcctcccctgtcttggtctctgctg

SEQ ID NO: 28077 - DNA, 434 bp, Glycine max
  Clone ID: LIB3051-016-Q1-E1-B5
gaccaacgcgtcagcccacgcgtccggagaattgttcctctcttctcttccattcgtgtacgcgcaaaagaatcatgacgagttcctctgctgccgctcgcaagaatctgagtaagattgcctgcaataggctccagaaagagctcgtggagtggcaggtcaatccccccactggtttcaagcacaaagtcacagacaatctccagaggtaccagattcttctcaatccacaccctaaatattatcgatttcgtgcttccattattcctttacattcctttgctttgtttctctctggaaggtgggtggttgaagtcactggagctcctgggacactttacgctaatgagacgtaccagcttcaggttgattttcctgagaattacccactggaggctcctcaggtgatattcttgcatccggctccgctgcat

SEQ ID NO: 28078 - DNA, 450 bp, Glycine max
  Clone ID: LIB3051-016-Q1-E1-C1
aattctagggctcgacgacgcgtcagcccacgagtccgcccacgcgtccgcccacgcgtccgcaaggaagaaattagtcctcaaagtaactattgtgattccaccaacacacaatggccttgttatccaggacaaagttacaaaggcagaggaccaattcaactctcatggaactacaactatgggccagcagggaaggctttgggatttgatgggttgagaaacccggatgtggtgtcaaacaattcattgattgcctttcaaacaggtctctggttttggatgacagagcaaaagcccaaaccttcttgccacaatgtaatggttggaaaatatgtgccaacacaagctgacatagcagctaatcgaactaaagggtatggcctagtgactaacataatcaatggtggacttgaatgtggaattcctgatgattcaagggtgaatgat

SEQ ID NO: 28079 - DNA, 421 bp, Glycine max
  Clone ID: LIB3051-016-Q1-E1-C5
agcgagaacaaaaaaaaaaacgtgattcgctcttctcttcgaataaaccacaaaaccaacaaacgagaagaggagtgagagaagatggggttgtcgttcacgaagctgttcagcaggttgtttgcgaagaaggaaatgaggattctgatggtaggtctcgatgctgctggtaagacaaccatcttgtacaagctcaagcttggagaaatcgtcaccaccatccccaccatcggatttaatgttgagactgtggagtacaagaacatcagcttcactgtgtgggatgttggtggtcaggacaagatccgtcctctgtggaggcattatttccagaacactcagggtctcatttttgtggttgatagcaatgatagggatcgagtggttgaggcaagggatgagttgcacaggatgttgaatg

SEQ ID NO: 28080 - DNA, 389 bp, Glycine max
  Clone ID: LIB3051-016-Q1-E1-F6
aagtggagtgattcttgctcagtttggaagctacaaaaagaaagaaaacatgggttctgcttcaagagttgaaagtagcaactacgattactcctttaaggttttgttgattggtgattctggtgttggcaagagtagtcttcttctcagctttatctccaactctaactccatcaatgacctctcccccactattggtgtggatttcaagataaagctttttacagttggtggtaaaagattgaagcttactatttgggatacagctggacaagagaggtttggaacagtaataagttcttattatagaggcgcacatggaatcattcttgtctatgatgtgacacgacgtgagacatttacaaacctcatcgatatatgggcaaaag

SEQ ID NO: 28081 - DNA, 387 bp, Glycine max
  unsure (1)..(387): unsure at all n locations
  Clone ID: LIB3051-016-Q1-E1-F9
aggggacctcaaagataagtgtaggattggatcagggcctcagaatgagtggtatttcttcagccataaggacaagaaatacccaacaggaaccagaacaaatcgagcaactacagctggtttttggaaagcaactggaagagacaagtccatataccacactaattccaagaggattggcatgaggaaaaccctagttttctacactggtcgtgctcctcatggccagaagactgattggatcatgcatgagtatcgccttgatgaagatgatgctgatgttcaagaagatgggtgggtggtatgcanggtcttcaaaaagaaaaaccaaagccgaggtttccaacaagaacttgaagaagaagagcacttaaccacccacatgag

SEQ ID NO: 28082 - DNA, 389 bp, Glycine max
  Clone ID: LIB3051-017-Q1-E1-B11
acgcgtcaaccgacgcgtccgcatttcccgacgaccaatcggagggaaggggctcgacgtgctgcatcttcgtgacagcaccttcacgccgacgaccttctgagatggccgcggacgaatcagcggtcaaacaatgcgtgtccacgcacgatcatgcccacctacacgactctgtgcaggtgcactatctcaaccgcggctagttccatgcaccaaggattggccacggaacgaagcatgtccccgagtaggtgaaatcagccacgaccatgagtagacacgattcaccagttgtgatggtgaaaagcaagtccaatgcggagaccaactaatagactgcgtcaccatacgatgccaggggaatggccccagatctgattctgcgacat

SEQ ID NO: 28083 - DNA, 294 bp, Glycine max
  Clone ID: LIB3051-017-Q1-E1-C2
cacgcgtcagccaattgatgctccgcctctcctcgctcgtctccaacgccaccctccaacagggcttcttcctcagtaacatctccctcggaaaccccgatgaggtcaagggactcttcctctgccgcggtgaagtcaccccctccgtctgtcacgactgcgtcgccgccgcggcaaccaatatcacagacctctgcaccatcccaacagattccgtgatccggtatgaccagtgtatgttgcgctactccaagctttccttcctcaataacatagtccctggagttcacttga

SEQ ID NO: 28084 - DNA, 435 bp, Glycine max
  Clone ID: LIB3051-017-Q1-E1-F11
cgggccgacccacgcgtcaggtgtattataaatttaagagtgcaagagattatgattcaattcccatggacggtcctttcatctctgttggtacattgaaagaaaaaatatttgaatccaagcatttaaggaggggtactgatttcgaccttgtggtcaccaacgcccagaccaatgaagaatatcttgatgaagaaatgttgattcctaaaaatacctcagtgttaattcgtcgggttccatgaaggccacgtttaccaattgttactgaaatagaacataaggtggaaaataaggtggtggaatctgaacctgaaaatggaagcctaccagctgaagatacatctgccatgaaatatcctgaagattcagattgggatgaatttggcaatgatttgtattcaattcctgatcaagtgcctgttcaatcaagca

SEQ ID NO: 28085 - DNA, 357 bp, Glycine max
  Clone ID: LIB3051-017-Q1-E1-H5
atcaggttcaaaagcatataagagatggggttagaagggaaggaaacgccgtcgtttatgagggattttctcgataagtgtggtggctgcgccgttattgacggtggttttgccactgaacttgaaaggcatggggcggacctcaatgacgaactctggagtgccaaatgccttattagctccccacatcttgtccgaagggttcacctagattacctcgatgcaggagcaaacataatattaacagcatcttatcaggtaattatcatattaattttttttttcatccctacaactctacattttaattttgccgtctttttggggttggggtgcaggccactattcaaggttttg

SEQ ID NO: 28086 - DNA, 405 bp, Glycine max
  unsure (1)..(405): unsure at all n locations
  Clone ID: LIB3051-018-Q1-E1-A1
cccacgcgtcagcagtttaactcagttaaccaagttgaacccttaaacaaaaatttaacaaaaggtaaacttcaattccaaatgaacaacaacaaaagcaaccccaacccaaatggaataataaaataataaaagtgaagccgaaatttccggttgaaacccaacaagcttttaacttgaataaaggtaattcagaggctttcaacttaaaaagaaaaaatgcacggaaatgttgctgcaacttgcccggtggtgctgctggtgcatcatcccttttgtttgtttactctcttgactatgcncgttaccgtcttgcaaaatgatgcaaagctgcaaaaaagggtggagagagacattcaatggtctcgttgatgtctacangaagacattggcatctgatggtgt

SEQ ID NO: 28087 - DNA, 372 bp, Glycine max
  Clone ID: LIB3051-018-Q1-E1-A10
agcgagaacaaaaaaaaaaacgtgattcgctcttctcttcgaataaaccacaaaaccaacaaacgagaagaggagtgagagaagatggggttgtcgttcacgaagctgttcagcaggttgtttgcgaagaaggaaatgaggattctgatggtaggtctcgatgctgctggtaagacaaccatcttgtacaagctcaagcttggagaaatcgtcaccaccatccccaccatcggatttaatgttgagactgtggagtacaagaacatcagcttcactgtgtgggatgttggtggtcaggacaagatccgtcctctgtggaggcattatttccagaacactcagggtctcatttttgtggttgatagcaatgat

SEQ ID NO: 28088 - DNA, 359 bp, Glycine max
  Clone ID: LIB3051-018-Q1-E1-A3
cgtcaggccagccttcctcgcccgcgttagctctgtccatttccgtgctgcctggttggttgcatgtgccagtgagcaactggcctgtatgtacgactgttgactcgaactggcataggatgatggttacactaaagatcgaccagtcgagcactgtgtacatccggcttcatccttgggagcctggaacctggaatgcctgcccctctatcttacgatacgaatgttgtgatagattcgcttatgatgggatgagcactaacctggtgctttaatcctagaaccggctgattcagcatagtgctactgcttccatgaatgtcgctaattggagtcgaacgtgctctatcacaccattg

SEQ ID NO: 28089 - DNA, 404 bp, Glycine max
  Clone ID: LIB3051-018-Q1-E1-E8
agcaggcctcaagtcctctgcatttgaacaaaatttcaatacaaaagtcctgtccgcggtgaagaaattgactaaaaaatctccccctgatattgtgctgtacgtggatcgcctggacctgcaaactagagatatgaatgatctgccaatgttaagatcaattaccagtgtcctgggttcatcaatatggcgaaatgtcatagtcactctgacccatgctgcctctgctcctccagacgggccatcaggtgccccattgagttatgatgtatttgttgctcaaagatctcacatagttcaacaaaccattggacaagctgttggggacctacgtcttatgaatccgagcttaatgaatccagtttctcttgttgaaaatcatccttcttgtcggaaaaatagag

SEQ ID NO: 28090 - DNA, 409 bp, Glycine max
  Clone ID: LIB3051-018-Q1-E1-E9
agcccacgcgtccggcttacgttttggcccatcccgaatacaacaaaccctcttcacattacatgtcatcacatttcatgcatggatacatatccaatcactctgttctcaacgtacattgccttccaatgtatctaatctttcctgtctacgatccatatcccagattggtgtgagacttaggagatatctgtatctcacatcagtactaatcacatttgctaaacatgaacactcattgcattgaagggtctgatatggaatttgccgcttacaacttgctttgtgtcataatgcattcaaataataacagagatcttgtatcatcaatggcaaggttatctcacgaagcaaagaacgatgaagctgtaaaagatgcccttgccgttcgtgctgctgtaacttcagg

SEQ ID NO: 28091 - DNA, 415 bp, Glycine max
  Clone ID: LIB3051-018-Q1-E1-F6
aggtctgattgcagatgtttgatatagtgctagctccaactcccaatcatctgcattcacttcttcacaatacacctatcactaatccaacgattaacatcatcgaatgttttatctaaggtaagctgcacaatctctgcctcactgccgtttgcgcatctatcaccgccagctcgcaacggttgtcatcgtgtcagagacacacgatcacagtcgcggtgcgtatggaaacctcgacatacagaggatctccactcttccatatgtatatgataagcactcacagtacatcatcaactgagtgtcaatcacacgagtaataccatcattagcagttactccactaatcacagtgcacaatgttcctacggatgaagggacacaatagcagtagatatgcttcatgccatcggag

SEQ ID NO: 28092 - DNA, 422 bp, Glycine max
  Clone ID: LIB3051-018-Q1-E1-H1
agcacaaacaccaaaccctacaaccaacaacaaccctccaaacaccatcaccccagcttccttccccaacttctccgcagatctcttgtcgaattcgagtttttcatcgacttcgtcggaggaaacaacgacgatggggggagggggaatgaggcgcaagaggaagaggaagtggaaggacttctttgagaggctgatgaaggaggtgatagagaagcaggaggggctgcaaaggaggttcttggaggccattgagaaaagagaacaagagcgtgtggtgagagaggaagcgtggagaatgcaagagatgcaaaggatcaacagggaaagggagattctagcacaggagaagtccattgctgcagcaaaagatgctgctgttatgacatttttgcaaaagatagccgaacatcaacaacaag

SEQ ID NO: 28093 - DNA, 600 bp, Glycine max
  unsure (1)..(600): unsure at all n locations
  Clone ID: LIB3051-019-Q1-E1-B10
gggtggggggntggggggggggcgggtggggggggggggggggggggggggggggggggggggggggggtggtggggagagtagctgacgggcaggntaggtgtggannggggncnanngnggggaagaggggnggggggggggggggggggggggggggggggnggggggggggggggggggnggggggggggggggggggggggggggggggggggggngggggggggggggggnnggggggggggnggggggggggggggggggggggggggggggggggggggngngggggggggggggggggggggggggggggggggggggggggggggggggggggggggggggggggggggggggggggggggggggggggggggggggggggggggggggggggggggngnggggggggggggggggggggganggggggggggggggggggggggggggggnaggggggggggggggggggagaggggggaggggggggggggggggggggggggggangggggggggggggggggggagggggggggggggggggggggaggggggggggggggggggaggggaggggggggggggggg

SEQ ID NO: 28094 - DNA, 427 bp, Glycine max
  Clone ID: LIB3051-019-Q1-E1-D4
actcatctgttttgacacagcacaagaaacagagtgaacacagaaccatcgccatgcttgatccaagaacacagcacaccaccaagtcttttgaattgtacgacgcagcaccacacagacctcacacatgggaagctacgaacagttccggtttgtggccctcgaaagcagctttcgacgaggtacaggttgatgattccggactatgtcacctccatgtggacaacgagccctgcacgccgcaagaacaacctccgtagcctctcgccgacgtcgatgacgcaagccatagtgagtgggcagacggagctcatggagatggtgaagaacatgccagagtccaactacgagctctctttgaaggacctcgtggagcaccacagggttgttgatgctactagacatgagacaaatgtggtggaagaga

SEQ ID NO: 28095 - DNA, 547 bp, Glycine max
  unsure (1)..(547): unsure at all n locations
  Clone ID: LIB3051-019-Q1-E1-E9
gggggggggggtgtgggggggggtgtgtgggtgtggggggcgggggggggggggggcgggggtgcgggggggggggggtgatgggtatgggagggtagcgtcagtacggtgtagttccggtcgaccagcgtcgaagnggggggggggggggggggggggggggggggcggggtgggggngggggggggggggggnggggggtgggggggggngggggtgggggtgagggggtgtggttgtgtgtgggtgtggggggggggggggggggggtgggctgtgtaggcgcgtgggggggagggtcgttgtttgtgaggtggtgggggggggggggggggggggtggggtggcggggggggggggggggggaggccggggggggggggtgggggcgtgggggggggggggggganggggggtgggggggggggggggggttggggggggtgtgggggggtgggggggggtggggggggtggggtgggggggggggcgtgggcggtgggggggggggggggggggggggggggggggggtggggggggggggg

SEQ ID NO: 28096 - DNA, 428 bp, Glycine max
  Clone ID: LIB3051-019-Q1-E1-F3
actaaatgtttcaactatgaaggagaatgtggcggttcggcttttcactgacattgatcctaactatgaccctctgcagtatgagtatcctgtgaagacaaattttccgcagtttgtgttccatcagagcgggacggggacaggttgtgagtgtgcggacaggtgtgttgaggggtgcttttgtgccatgaagaatggatgggattttccttagaatcagagtgggattctcttgagagggaagcctttggtttttgagtgtggcccattttgtcgttgtcctcctcactgtcggaatcgtgtcacgcagaaggggttgaaaaatacgttggaagtgttcagatctacggaaactggttcgggagttaagtccatggaccttattcaagctggtgcttttatatgcgagtacacatgggttgttctga

SEQ ID NO: 28097 - DNA, 397 bp, Glycine max
  Clone ID: LIB3051-019-Q1-E1-F7
accatgcgtccgcactcttgcccgtatttgctaatacatacgctcttcccaatgcaactaatggggctgtcgattatggtcaatctgggtctccactctcgcagatttggccactggttgatccaaagcacttgtggaatctcgggggagggtcgttattggggtttggtatggctttccagtgaacatagcatatagcgcttgatgctttctggtaatcttcttgaggatagggtattcgagatgcaggggtgaacagtaccgattatgtatttttggtatctcgcatgagcaaatttggcattatgtaaatgtaccagtgcataagacatatttttggctataattacagtacgaacattgtgtcatgggatgtctacatacttttgagttatgt

SEQ ID NO: 28098 - DNA, 365 bp, Glycine max
  unsure (1)..(365): unsure at all n locations
  Clone ID: LIB3051-019-Q1-E1-G12
ttcggccgccgacccacgtccagtattatctggttcataattatatatgtttatcctcatttttgactcagtcgtatgcttgtgattaaagatgggatttgctgtctgggaaccaccacatggtcattacaaaatgcttaagtatccatggaagaattatgtgaaattaagtggggctctaaggcactgtgcgtttatggtcatggctatgcatgggtgcatactttctgaaatacaggcccgagctgagaagagacaagttttccgcagtgagcttcagagggtaggttctgaangancaaaagtgttgcgtgaacttggaaacaaagttaaaaggatggagaaactaggtcgtggaaacttgc

SEQ ID NO: 28099 - DNA, 240 bp, Glycine max
  Clone ID: LIB3051-019-Q1-K1-E9
aaaaaaaaaaaaaaaaaaaaaaaaaaaaaaaaaaaaaaaaaaaaaaaaaaaaaaaaaaaaggaaaaaaaaaaaaaaaaaaaaaaaaaaaaaaaaaaaaaaaaaaaaaaaaaaaaaaaaaaaaaaaaaaaaaaaaaaaaaaaaaaaaaaaaaaaaaaacaaataataacgaaaaaaaaataaaaataaaaaaaaaaaccaccatataaaaaaaaaaagtaataacaaaaaaaaaaatataa

SEQ ID NO: 28100 - DNA, 255 bp, Glycine max
  Clone ID: LIB3051-019-Q1-K1-H8
ttctgttacaccctctacttttcttaattactctcatccttctttctttcaagtgcgaaatcgatctctcactgcctcagcaatggctgcagatgatggtgtgaaacctccaactctcgagtgaatcagcatctgcaagtctctcctcgccagcggagtggccggaagagtagcacgaagtactgtagctcctctggagctattgaagattctgctgcaggttcaagatcaacaagatataaaatacaatggaac

SEQ ID NO: 28101 - DNA, 264 bp, Glycine max
  Clone ID: LIB3051-020-Q1-E1-B11
agagacacgtgatttgattgatcggtataagaggttgaacggtaggatgatcaggctattccgttcaatgatatgtgcaaatgcgacagtagactcacaacgattcaaggggaatattgaagaagttagcactgctggacatctagtgggcacagagtgctaaattacatggacagtgaggctgtcaaaactcaagccaacaactagtctgcttcacaaggagggcaaaatcatatcataagcgagtagacaagtagctttatg

SEQ ID NO: 28102 - DNA, 195 bp, Glycine max
  Clone ID: LIB3051-020-Q1-E1-B8
acccacgcgtccacaaaaaaaaaaaaaaaaaaaaaaaaaaaaaaaaaaaaaaaaaaaaaaaaaaaaaaaaaaaaaaaaaaaaaaaaaaaaagaacaaaaataaaaaaaaaaaaaatgattatgcatgtggggcgggggccccagcgtttccgtctttgggtttcctttctttggctttcgttttccttcttcttt

SEQ ID NO: 28103 - DNA, 436 bp, Glycine max
  Clone ID: LIB3051-020-Q1-E1-D4
aggagtttaaaagaggacatgaagaaaaacctttgaaatgaccgaccttggtttgatgagttacttcctcggcatagaggtaagtcagagaaatgaagggatattcatctcgcaaaagaaatacacagaaggcttacttaagaaattcaagatgtatggttgcaaacctattgctactccactcataacaaatgagaaactacagaagaatgatggagcaccagaagctgatgcatccaaataccgaagtctaattggaagcctcctatatttgacagctacacggcctgacataatgtatgctacaagtcttctatcaagattcatgcaaagcccaagtcaaatacactttggagcaggaaaaagaattttgaggtatctacaaggaacaaaagagttcggtatatggtatactaccgaaaccaactcaaaatta

SEQ ID NO: 28104 - DNA, 419 bp, Glycine max
  Clone ID: LIB3051-020-Q1-E1-D6
acaggtgtatttactggtgtcttctgcttcttgcaagtagcaagtgcagagctgcaacaagcattacacattcatcgcatatctgaacaaacttcattgaaaagactgacagatttaacttatttgaagcggcaaatcgagattcctttatatgggattatgttctctcggaaattgttacagggtactgaattgggagctgaagaatgacaatttctgcaaatgggcagtcggtgtcaacgccagattagcaaaattctggatgactcggatcttgaaagcatcattgatggctacatggattttgatatggctgaattcattttgcatgaagttctggttgactctctaagctcgagtcatgatcaagagtaatgcacaaggtattcgagtattcaatgaagttgatgagaagatca

SEQ ID NO: 28105 - DNA, 313 bp, Glycine max
  Clone ID: LIB3051-020-Q1-E1-F1
cacgcgtccgattgctgaacgtgacactaatcgaggactacaccaaaatctgggagaactttggtaggttcataaaattaggttgcattgaagacactggacttcactacgcgcattacaccagtactgcacgttttacacttccaccagtgaggaggaacttacgagcctagatgattatgttgaaaacatgggagaacaccaaaaggctatcttttacctagcaactgacagcttgacgagtgcaaagactgctccatttttggagacattggttcagacagatattgaggttctttatctggttgaacct

SEQ ID NO: 28106 - DNA, 335 bp, Glycine max
  Clone ID: LIB3051-020-Q1-E1-G9
aattcggggccgacccacgcgtacacggaagcgtgggaaaaaattgaagaaaaaaaaagaatatgttaatttaacgggttagagaaaggaggggagtccaaaaggatagagacagatataggtgtacatgagaggtgatagctcgtataatgtgagataaattcaggacactggagagtggttataataacagcttttaaccaggtgaaagaaatggtggttattaaacttaatcggcttggtggaaaacggtcttttgtgagctggcgtaatagggaaaaggttagtactgaatgggcttcgcaatagttgcgcatcatgaaaggtgaatggga

SEQ ID NO: 28107 - DNA, 246 bp, Glycine max
  Clone ID: LIB3051-020-Q1-E1-H5
atatagttctgacatcggtaataatatatactataatacataggtcattgatgcatgtactgtgcataacggctgagttatgtacttatgttaagaataaaataaagtgctgttgttgcaaaaaaaaaaaaaagaaaaaaaaaaaagaaaaaaaaaaaaaaaaacaaaaaaaaacaaaaataacaaaccgcacaacatgagagaccaaactggggtcgaacaaaacgcaacttccaccacaaagga

SEQ ID NO: 28108 - DNA, 259 bp, Glycine max
  unsure (1)..(259): unsure at all n locations
  Clone ID: LIB3051-020-Q1-E1-H9
gggggggggggggggggggggggggnggggngnggggggggggggggggggngggnggggngggggggggggggggggggggggggggggggggggggggaggggagggggggggggggcgacgggggggggggcggggggcgggggggggggggggggggagcgggggggcggggccggcggggcgggggggggcggggggggggggggggcggggcggggggcgggggggcgggggggcgggggggggggggggggg

SEQ ID NO: 28109 - DNA, 129 bp, Glycine max
  Clone ID: LIB3051-022-Q1-K1-D3
ttttttttttttttgtttttttttttttttgttttttttttttttttttgttttttttttttttttttttttgttttttttggggtttttttgtgttttttttttttttttttgttttttttttttttt

SEQ ID NO: 28110 - DNA, 388 bp, Glycine max
  Clone ID: LIB3051-023-Q1-K1-A12
caatggattctcactaatgatggaacacgacagagaaaggaaaatagcacttgttgcggctggtgcagcagctggtatttcttcaggcttcaatgctccagttgctggttgtttctttgctattgaaactgtgctgaggcctcttcgtgcagagaactcacccccatttacaactgccatgattatattggcttctgttatctcgtcaactgtatctaatgttttacaggggacccaatcagcttttacaatacccgagtatgatttgaaatctgctgctgagctacctttatacctgatattgggaatgctatgtggtgttataagtgttgccctgactcgtttggttgcttgggtcaacaaattacttaagattattcaagataag

SEQ ID NO: 28111 - DNA, 425 bp, Glycine max
  Clone ID: LIB3051-023-Q1-K1-A6
cccacgcgtccgccagatctcactctcactctcactctgttttgctcagtgcggagaggagaagaaaatatggcggtgatggcggttcaccaattcgcgcaatgcatcacttgccacgcttggagccccgatcaatccatggttgctttatgtccaaacaataatgaagtgcacatctataggttggttgaagacaaatgggaaaagttgtatgttcttcaaaagaaaacaaatttgcagtgggaagtggagccaaaactgtttgtatatgctactatgagcaggagaacaactggtgggtcatcaaacttatcatgaaaagacatgattcttctgtgacaagtgtttcttggcatcccgataatattcttcttgctctacctccacaaattggaaatgcttaatattcatcacctttattaaaa

SEQ ID NO: 28112 - DNA, 417 bp, Glycine max
  Clone ID: LIB3051-023-Q1-K1-B1
gtggtctccaactgatccaattaacgctctttttgctcctgagatcggacgccgtcggcagcctgacaacgtctatctggttcaaatccccagcaaaatggaactcaggcagataaacctcttcagtgtcactgactgcaatatgtactggcaaatcaatggagactacctggctgttaatgtacagaggtacacgaaaacgaagcataccacatacacacgcttcgagcttttccgtataaacgaacaggatatacccattgaagttttcgaacttgagaataagaatgataagatcattgcattagcttgggatccaaagggccacaggtttgcacctattcatggtgataaccctaaacctgaactgaacatttactccatgcatactggtcagaacatccgactatcaaaact

SEQ ID NO: 28113 - DNA, 381 bp, Glycine max
  Clone ID: LIB3051-023-Q1-K1-B5
gtcctggattgggtctttgctgatggtccacctaagaaggcagttgtctatgataagaatcgtaaacaagattgccatgccattgtccctggggctatacctgatgaacagtattgggttgaggaagagcagctgatatacagaaaatttcaggaggagaggaggttaagagaggatgcgatacgtgcaaaggctgaaaaaacagcacaaatgaaagctgaaacaaaggaaagaactttgaaaggatttttgctttctcaaaagcatattgtattcactgaccctctcgatgttcaagcaaggagtacagtgacaatattttataacccgtccaacacaaatcttaatggaaaacctgatgtttggtatatatgtacattt

SEQ ID NO: 28114 - DNA, 400 bp, Glycine max
  Clone ID: LIB3051-023-Q1-K1-C1
gacccacgcgtcccaaaaatcccacttcctttttcttctttttatgatccttgtgattaggctcattagaagcttgcatatataaagcaggcggtacaatcctaccttattggcaataacgccattgctaaggagctaagtattaatgggcaactgcacaacatgcatatgaaatcagctcatggaaaagctcaagaatctatttaccgccagaggaatcccgttgctccagagaatggaagagggcaccagagaatgatagacctacacggtctgcacgtaagtgaagcgattcacgtgctgaaacacgaactgagtgtgctaagaagcacggccagaaccgctgagcagcttttgcaggtttacatctgtgttggcacttgtcaccatactcggggct

SEQ ID NO: 28115 - DNA, 177 bp, Glycine max
  Clone ID: LIB3051-023-Q1-K1-C3
atcctgagggacgtgctactcacataatcatcctcaatgctgctaacattctccccttcaacacaccaatcaccaaaataccatactactatacaatgatatttgacaagttcttccctcataactcatccattccttatgttcctagattaccaaatgtcacatgtaacacatcca

SEQ ID NO: 28116 - DNA, 149 bp, Glycine max
  Clone ID: LIB3051-023-Q1-K1-C4
gacccaagcgtccgaagaaaaaaaaaaataaaaaaaaaaattaaataaaaaaaaaaaaaaaaaaaaaaaaaagagaggaaaaaaaaaaaaatgggaaaaaaaaaaaaaaataaaaaaaaaaaaaaaaaaaaaaaaaaaagtgataaaat

SEQ ID NO: 28117 - DNA, 280 bp, Glycine max
  Clone ID: LIB3051-023-Q1-K1-D6
cacacgcgtacattgacgcatgtgtatcaataccataactataggataaataggcggacatatataattaccacggaatatccaataatatatacatatatatagttctatatggcaatcacaactgtggggctcgaatactacaacataccatcatagtctgcaacatcctctatacctactagatatcagcggatgacgactgtagcactacactggcacctaatgaaaattcaaagactctgagttcaagatggactctggctgacacgctgaaact

SEQ ID NO: 28118 - DNA, 336 bp, Glycine max
  Clone ID: LIB3051-023-Q1-K1-F9
tactcttcttctcttgctgctagggttctagcgcaacttcttctacatttaaggacgatgggtaaggaaacaggttcacatcaatattgtggttattgcccctgttgactctgggatagctcactaccactggccacctgctctacatgcttggacgcattgacaagcgtgccattgacagatctgataaggatgctgctcagatgcacaatacggcttatgagtatgcctgggtgcttgatcagctcatagcttagcgtgaaagacgaatcacaattgatcttgccctgtggaagtttgaaaccactcagtactattgcacagacattgatgccc

SEQ ID NO: 28119 - DNA, 364 bp, Glycine max
  unsure (1)..(364): unsure at all n locations
  Clone ID: LIB3051-023-Q1-K1-G11
atgtgctcatgtattttttgagaggaagtctcgcatggcaaggcttgagagctggcaccaaaaagcaaaaatatgacaagataagtgagaagaagatgcttactccaatagaggtcttatgcaagtcatatccattggaattcacatcatacttccactactgccgatcattgcggtttgaagataagcctgattattcttatcttaagagactctttcgggacctatttatccgagaaggttagcttcatatatatatatatatatatatgtngcttaatgagtcatgaaattctattaggcttgtaaaatcttgcttttacaggttatcagtttgattatgtatttgattggactatgctga

SEQ ID NO: 28120 - DNA, 426 bp, Glycine max
  Clone ID: LIB3051-023-Q1-K1-G3
aaaaaaaaaaaaaaaaaaaaaaaaaaataaaaaaaaaaaaaaaaaaaaaaaaaaaaaaggaaaggaaaaaaaaaaaaaaaaaaaagaaaaaaaaaaaaaaaaaaaaaaaaaaaaaaaaaaaaaaaaaaaaaaataaaaaaagggaggaataaaaaaaaaaaaaaattataaaatgacaaaaaaaaaaaaataaaagagcatataggaaaaaataaaaaaaatatgaaaaacgaaaaaattaaaaaaaataaaaagtaaaaaaaaaattaaggaaataaaaataaaacaataatgaaaaaaaagcaataaaggagaaagttatataaacaaaaaaagaactaaaaaagaaaattagaaaaaaggtataaaacattaaaaatgaaaaaatgaaaactaaaatgtatataaaaaaaaaaaataaaaaga

SEQ ID NO: 28121 - DNA, 192 bp, Glycine max
  Clone ID: LIB3051-024-Q1-K1-D3
cccacgcgtccggggagtacaggaagaagcacaagcatgtgtccatgagggccttgagggagtggtccaagcatatcttggaagggctgaattacttgcatttgcatgatccttgtatcatccacagagacctcaactgcagtaatgtgttggtgaatggtaatactgaccaggttaagattggtgacttgg

SEQ ID NO: 28122 - DNA, 139 bp, Glycine max
  Clone ID: LIB3051-024-Q1-K1-F7
aaaaaaaaaaaaaaaaaaaaaaaaaaaaaaaaaaaaaaaaaaaaaaaaaaaaaaaggggggaaaaaaaagtaaattggggaaaaaaaaataaaagaaaaaaagaaaaaaataaaaaagaagaaagtaaaataaaaaaaa

SEQ ID NO: 28123 - DNA, 148 bp, Glycine max
  Clone ID: LIB3051-024-Q1-K1-G4
cccacgcgtccggcggaggcagatcggagatctgtgatagatatagatggagggagggggggcccggcttgggcgggcctcgacccgctacagaccgggcacagtgttcactggaccggtgcggaagtggaagaagaaatggatccac

SEQ ID NO: 28124 - DNA, 419 bp, Glycine max
  Clone ID: LIB3051-025-Q1-K1-A11
cccacgcgtccgtccacgcgtccgccaaagcctctgatggttgcgaggatattgtttttaatcccaatgttttcactgaattcaaacttgctgggagtccagaggaaatagcagctgatgaagataatgttagaaaagttagtcaatatcttactgatgtggtacttccaaagtttatacaagacttgtgtacacttgaagtttcaccaatggatggccagacattaactgaagcattgcatgctcatggaattaatgttcgctatattggcaaagtggctggagggactaaacatctacctcatctgtgggatctttgtaataatgaaattgttggcagatctgctaagcatattatcaaggacttattgagagagacagaggaccacgatcttgcaccagcactatctcatttctta

SEQ ID NO: 28125 - DNA, 430 bp, Glycine max
  Clone ID: LIB3051-025-Q1-K1-B1
cttccggttatgaccggtgtgaaccaaactccggggaaaagtccctggtccagttggaagactttgcaaatcacaatgcttttgagttacttgctaaatatgggacaactcatctcgttttcaatgacgatatacaggggactgcatctgttgttctagctggagttgtagcagccctaaaactcattggtggtacattgcctgagcacacattcctcttccttggtgctggagaagcaggaactggtatagccgagctaatagctcttgagatgtcaaagcaggtgatcaagccaacagttttgattggatcatcaggagtgggaagaacatttacaaaggaagtagttgaggctatgacttcaaacaatgataaacctctcattctggctctctccaatcctacctcacagtctgagtgtacagctga

SEQ ID NO: 28126 - DNA, 432 bp, Glycine max
  Clone ID: LIB3051-025-Q1-K1-B3
aaattcttccaaaatcacgttattcagggatagtatcatggcaactgcaaccatggctactgcagcaggtgcagctgcccttttgtactacacattgaatcggaaattgcagactcacgatgcaatcgacgaagatggtgaagaaaatgggagtgatacgcccactgatacgccattaggtattggccgtgtttctcatcggttaatccaagcccctgcaacatggttggagacaatttcaacattgtcagagactctcaagttcacgtattcggagacacttgggaaatggccaattggggatttggcgtttggcatcagctttcttctaaagcggcagggaaactatcatgttgacagtgaattttgggtacggacagtgtacagctgaaaggatctgagattactgctgaacttaagtatctcttaaac

SEQ ID NO: 28127 - DNA, 236 bp, Glycine max
  Clone ID: LIB3051-025-Q1-K1-B6
ctgatactttcttttaggatctactgtggagacctcaaaatcagagatcttttgctagtacaaccaatgtagaaggactccacatcagaattacttttatcaggattcggaagaattagttagcgttgtttatgtatgttaaaagagaaattaagggttagtcaatttaatgcaaatcccagctttacatcgtatcacaatgctagagatcaatgttaaatataatattttatcct

SEQ ID NO: 28128 - DNA, 447 bp, Glycine max
  unsure (1)..(447): unsure at all n locations
  Clone ID: LIB3051-025-Q1-K1-B9
atccttttaatcaggagcctgcttctgtggctttctcagctctcaatctcgcaatgcattttcatggttgggtttcctttttcattcttatacactataaattgcctctaaaagatggaaagaaggcatattatgagtatgctggtttgtggcatatgtatggacttttatcacttaactcctggttctggagtgctgttttccacagtcggtaagttacttatgtggatattttcagtattttgcactgattctaaagaatgattgattgttatgctgtctattggtatttcttagtgcagtgatactacttagttcttatattgaagttttaatcacctggcaaactatgtgacacaaattgaataacaatatatgcatacaacatgctaatgcataaactatntcttatgttaatttttagtatatgattattcctaatacttc

SEQ ID NO: 28129 - DNA, 277 bp, Glycine max
  Clone ID: LIB3051-025-Q1-K1-C8
aaaaaaaaaaaaaaaaaataaaataaattaaaaaaaaaaaaaaaaattaaataataaaaagaaaaaaaaaaaaaataaaaaaaaaaaaattaaaaataaaatgggaggatcgttctaagtgttccagtgttagttacccttgaatggggcttctttttttttggatacaggtatttaaattcattgctattggcggttgttttttatattggggcctggaaaatccatggcgttgccgaactttttagctttgctagcacttgcaaatttttgtagt

SEQ ID NO: 28130 - DNA, 417 bp, Glycine max
  Clone ID: LIB3051-025-Q1-K1-D5
aaaaaaaaaaaaaaaaaaaaaaaaaaattataaaaaaaaaaaaaaaaaaaaaaaaaaaaaaaaaaaaaaaaaaaaaaaaaaaaaaaaaaaaaaaaaaaaaaaaatttaaaaaaaaaaaaaaaaaagggccgccctttttaagggttcaagttttccttccccttctttccaactttttatttttttttttggtcccctaaatttaatttatttgccctttttttaaaaacttcttatttggaaaacccttgcttttcccaattttattccctttgaacaatttccctttttcccaatttgctttattaccaaaaggccccgccccattcccttttccaaaaatttccccaccttaattgccaattggacccccccttttaacggccttttaaccccgccggttttggtgtttccccc

SEQ ID NO: 28131 - DNA, 402 bp, Glycine max
  Clone ID: LIB3051-025-Q1-K1-F8
gtcttccatttgtgtgtcatacacttgttgcgaagcctgttcagctgtcatataacaagtctttaatcctgatcataccatgtcatacccacaatgtacgaaacaagggctcactgtttaacacattatctgctattacagcgatctcagtttgaccttggattgcccttcttccactatgagcttgttgcttcgcaatgctaagcccctatttgactgtatatgagactcaatcgactactctttcaattactaccattcattccattactatcattgtacttaaatgactccaacaccaagtacagttttcacgacagcactggtcaaacatggatactatatgctacctacgctcatgaaggacgcaccagcactcttgctaagatagcttctaatgca

SEQ ID NO: 28132 - DNA, 159 bp, Glycine max
  Clone ID: LIB3051-025-Q1-K1-G9
aaaaaaaaaaaaaaaaaaaaaaaaaaaataaaaaaaaaataaaaaaaaaaaaaaaaaaagaaaaaaaaagaaaaaaaaaaaaaaaaaaaaaaaaaaaaaaaaaagaaaaagaggaaggggggtctaagttttttaggtttgattgctagtgctggggac

SEQ ID NO: 28133 - DNA, 348 bp, Glycine max
  Clone ID: LIB3051-026-Q1-K1-A12
aaaaaaaaaaaaaaaaaaaaaaaaaaaaaaaaaaaaaaaaaaaaaaaaaaaaaaaaaaaaaaaaaaaaaaaaaaaaaaaaaaaaaaaaaaaagaaaaaaaaaaaaaaaaaaaaaaaaaaaaaaggccaaaataaaaaaaaatgaaaagaaaaaaaaaaaagcaaaaaaaaaaaaaaaaattgccgaaagcaaaaaaaaagtactgacgtacaaaaagctgaatacaacacagatatagagaggacaacgaaccaggtactgagtgtacgtggtggcatgcacatattggtaaagacaattggcatttacaccataacgctagactaagaaagctattggatcagccat

SEQ ID NO: 28134 - DNA, 187 bp, Glycine max
  Clone ID: LIB3051-026-Q1-K1-B5
aaaaaaaaaaaaaaaaaaaaaaaaaaaaaaaaaaaaaaaaaaaaaaaaaaaaaaaaaaaaaaaaaaaaaaaaaaaaaaaaaaaaaaaaaaaaaaaaaaaaaaaaaaaaataaagagaaaagtaaataaaaaaaagaagacgaaaagaaaacaaaaaaaaagcatataaaaaccaagacgaaaaacaa

SEQ ID NO: 28135 - DNA, 384 bp, Glycine max
  Clone ID: LIB3051-026-Q1-K1-C3
atcaatcgtgcgattcataacaggcgatgatacattcaacgatgaaatgaactccgctgcggcttatgatactctatacacagacctagttaccgatgccgacaacgttatccaaaacgctcttgatagccttcaacagtgttgaaaacgctgagcgaaatactgtcccaaaaaccactaacaagatcactgtacttgccgatggagaaacccacatagtgctgcgcataatagaaagcatcgatgaggccaacttcggatacagctacagcactgttagcggcagctgcattggcaaacacgacgtttaacatcacattggactccaaaccgaatgctggtcccaatggaaggcctactgggaagctcaatgtcaaatgcgac

SEQ ID NO: 28136 - DNA, 439 bp, Glycine max
  Clone ID: LIB3051-026-Q1-K1-D1
cccacgcgtccgcccacgcgtccggctgatatgactggaaaagagattgaacgggctctactgaaggaagttatcagtaatcccagaatttttgtgtttgaacaccattttgctatagatcttctcacttgtcaggatcgatctgatatgatttgtcttggtgttgacacactgaattctaaaaccctagagcttttaggtgattagatttctttcaaaggtcactttacttgcgtcaggtggagctggacatatttatcctaaaactacaaatcctctggtagccactggagatggaattgccatggcacaccgagctcaagctgtgatttccaacatggagtttgtgcaattccattcaactggcttaactgatgaaaggcttcctattaaaccaaccaagcctcgggaaaatgcatttctgattactgaagctgtc

SEQ ID NO: 28137 - DNA, 234 bp, Glycine max
  Clone ID: LIB3051-026-Q1-K1-D2
aaaaaaaaaaaaacaaaaaaaaaaaaaataaataaaacaaaaaaaaaaaaacaaaaaaaagaaaataaaaaacagatcaaaaacaaaaactattaaaatacttaaagaaaaaaaaaccaaaataataacagaaaatatatgcaatgaattaataaaaacctaaaacaaaaaaaacacaatgaaactaaaagacaataaaacaattagatgaataaacgaaagggaaccgtaagt

SEQ ID NO: 28138 - DNA, 403 bp, Glycine max
  Clone ID: LIB3051-026-Q1-K1-D6
cccacgcgtccgaaaaaaaaaaaaaaaaaaaaaaaaaaaaaaaaaaaaaaaaaaaaaaaaaaaaaaaaaaaaaaaaaaaaaaaaaaaaaaaaaaaaaaaaaaaaaaaaaaaaaaaaaaaaaaaaaaaaaaaaaaaggggcggcctttaaaagaaccaaagttaacgtccccgtaaatgcaacgaaaaaccttttttaaagggaaactaaaataaaattaatgggccgaaatataaaaagttgggaaagggaaaaaccttggcataaccaaattaaatcgcttggaagaaaatcccctttaagccagttgcggaaaaaccaaaaagcccgaaacgaatcccatttccaaaaagtgcccaacctaaaagggaaaaggaaacccccctttaacgggacataaaacc

SEQ ID NO: 28139 - DNA, 397 bp, Glycine max
  Clone ID: LIB3051-026-Q1-K1-D9
gaaggtttggaagaatcgcgatggagggtgaggaaggaggaggcataaggctgagcaagcgaatcgcaaacggagaggttgactacaagacgaaatccggcaccgcctggagccactcctatctcaaccagaagccatggcaccctctttcttaccccaaccaacgccgcaagtggatcgccgaacagacccacgccaatcgccaacgccgcaccgaagaggtttctcgcgagttcgctcaggagcaagagttctttcgccaaaccgctctcatctccaaaaaagagaaagaaaaggtccgaatcggattcttttttctttctctgcgtcttccctcgtttcatgaattttgaaattagggtttggggtaggtggagctcatgcaagctggtaagtt

SEQ ID NO: 28140 - DNA, 440 bp, Glycine max
  Clone ID: LIB3051-026-Q1-K1-E11
cccacgcgtccgtgcagtgaagaagattgaagacaacaacactgtggatttgatagtcgacttgcgggctgacaagaagaagatcaaggatgcagtcaagaagatgtatgatattgagaccaagaaagtaaacaccttaatcaggtgagtctttatgtagagatgcttttagaatttgttagatgatatgatattgctaatgacaatggtatgcttgcagcgaatactattactgagacatacatgtggtgtgctttatggtttgtggcatgctggtgtgacaacgggttcatgttgcgcacagggaaactttgaaatgtggcatatgaaactcaatgttgccataacatgcaaatgagacagcaaatttgtatgagatacttgcatcgatacttacaacatatcattacttctgaatgtagattgttctgttgcacgcc

SEQ ID NO: 28141 - DNA, 427 bp, Glycine max
  Clone ID: LIB3051-026-Q1-K1-G7
cccacgcgtccgcccacgcgtccggttggacccgaattcgtgggaagcatcgaattcggtgtttgtttataatttcttgtcggcgaagtggcgccgcggggcggacatgccgggtgggcctcgcacattcttcgcgtgcgcgtcggattccgaggagacagtttttgttgccggcggacacgacaacgagaagaacgcgctgcggtcagcgttggcctatgatgttacctcggacctgtgggtcatgcttccggacatggaggcggagcgcgacgagtgcaagggcgttttctgccgcgggaggttcgtcgctgttgggggttccccgacggagacgcatggaaggttcgtgaagagtgcggaggcgttcgatcccgccacgcggagttggagcggaatgaacgaggacttcttggattgcgccacg

SEQ ID NO: 28142 - DNA, 226 bp, Glycine max
  Clone ID: LIB3051-026-Q1-K1-H7
cgcgatataacgtataccagaccaaaatcaatctgaggagtcagaaagccatggatccctacatgaatagggcatcaagcgcgtgcaattatcactaatggactacatattacggtgctcccatatggaacaataactgatcgataactgatgaatatagaggtgcaattgtgttggacgattaccatttggagcataagcttgcaaactctgacagggaacggat

SEQ ID NO: 28143 - DNA, 424 bp, Glycine max
  Clone ID: LIB3051-027-Q1-K1-A11
cccacgcgtccgcccacgcgtccggccaggggcaccgtccagggcctccgtgaggctgagtccggcgactccctcaaaatccgactcaaccgagtcctcaactcggggggccacgcgggtcgcagactcgggaactcgctcggcgtggtgggcctcatcttcgcgggactcgagagtgggatgacctacttaaggggcaccgatgacctcgtcaacagcgccgtcgccggactcggcaccggaacgctctttagggccgccgccggaccccgatccgccgctattgccggcgccatcggcgggatcgccgccgccggcgcggtttccgggaagcaagctttgaaaagatacgttccgatctaggaaacaattaggttaacgaccatggggatggtggtacaaattagattaatattttggaata

SEQ ID NO: 28144 - DNA, 443 bp, Glycine max
  Clone ID: LIB3051-027-Q1-K1-A4
cccacgcgtccgtgctgttgtaacatctgctggtcaattatttacttttggtgatggtacatttggtgctttgggtcatggagacaggaaaagtgtttcattaccaagggaagtagagtctctcaagggtcttcgaacagtgcgggctgcatgtggtgtttggcatactgctgcagttgtggaagtcatggttggaaattcaagttccagcaactgctcttcggggaagctgtttacttggggtgatggagacaaaggtcgacttgggcatggtgataaggaagcaaaacttgttccaacccgtgttgcccttggtaatgttaaacccaatttttgtcaagttgctttgtgtcatagtctcactgttgcacttaccactaagggccatgtctatacaatgggtagtccagtctatggccagttaggaattccttaagctgatg

SEQ ID NO: 28145 - DNA, 441 bp, Glycine max
  Clone ID: LIB3051-027-Q1-K1-A8
gtaattttaatgaatattgaaataaatttaaaaaactgaacaagctggagcagtttactcaggtgattaattctttgctcatgtatatttctgatcttcagccaaaatattagtcaaggctctattcaattgaaaaagtttttttttcttttaacaggaactgagtgatatgactgccattaaagctgaagacatattaaccactctgcagagcctagaattgattcaatacaggaaaggtcagcatgttatatgcgcagatccgaaagtgttggatcgccatcttaaagctgctggcagagggggcctggaggttgatgttagcaaactgatctggactccttataaagaacaaagttgatggtcattggtcatatccatcaaggaaatactatgataatcctttggcgtgctatagctgcagctgccagtgtaacgttt

SEQ ID NO: 28146 - DNA, 437 bp, Glycine max
  Clone ID: LIB3051-027-Q1-K1-B8
cccacgcgtccgctttatgaatataaaattttggtggatgcccaaaaaactaacctttttattttttgcaggttggacagcatttggattcttgtgtttttcttggagcaaacagtagctattcagctttagaggatgatcatgtctacttggaagaattagttgaaagccctcagtctaggtctttgagaggaagtgtggatgaattaccatctcagaatagtgcagttaacaactccacagaattgatcattgagcttcaggctgttggcccagagcttaccttttataacacatcaaaagatgtaggagggttattaaacctgtctaataaacttctacttgcacagttggatgcattttgcaggtgagttcctctacttaatagattaatatgttaggagggctgaacatttggcatggtattcaagtgtatc

SEQ ID NO: 28147 - DNA, 410 bp, Glycine max
  Clone ID: LIB3051-027-Q1-K1-C5
cacacgcactagatggactatattgcggttataaccttcttcatatatcgcttgttatgagaagctctagaaatgatcacaggcacctaaggttgacattgtgttctagatccttcactcaaatctgacactccgacaacgctgatagagctgctagcttcagatatcaccccaccaacactgacgctggtggtaacagagatcacatttacacgcggcaccatacctgcattgactacatcattgacactaatatacagatttctagtattatatacgacagtgacactactagacatcatgaggctacactgggttatcaaggagacacagagatacagcatgtgctctaccggtgtctatggtataggctcctaggagcggcaccatgaatcatccgaatgctaatc

SEQ ID NO: 28148 - DNA, 446 bp, Glycine max
  Clone ID: LIB3051-027-Q1-K1-G11
ggtgtatcagaatggcaacgatcagcgctgttcatgtggagttcctggagtttccagcggtggttacttcaccagcctccggcaagacctatttcctcgtcggcgcaggggagagaggattgacgattgaggggaagttcataaagttcacaggcataggagtatacttggaggataaggcggtgccatcactcgccgctaagtggaagggtaaaacttcagaggagttagttcacaccctccacttctacagggatatcatttcagggccgtttgaaaagctaattagagggtcgaagattctgccattggctggcgctgaatactcaaagaaggtgatggaaaactgcgtggcacacatgaagtctgttgggacttacggtgatgctgaagccgcagccattgaaaagtttgctgaagccttcaagaatgtgaattttgcacct

SEQ ID NO: 28149 - DNA, 334 bp, Glycine max
  Clone ID: LIB3051-028-Q1-K1-A12
cacacacacacagacccacagacccacacttaacacatgcacctaaccacacttggttaatctcttcttcaaggcactatgtaataactggcatttctcgaatgttctgtatgtgattggatccattaaaaggttttttgagtctaaagttattatgtaagtggacaaaaaaaaaaaaaaaaaaaaaaaaaaaaaaaaaaaaaaaaaaaaaaaaaaaaaaaaaaaaaaaaaaaaaaaaaaaaaaaaaaaaaaaaaaaaaaaaaataaaatataaaaaaaaaaaaacaaaaaaagaaataacaaaaaaataatgtaccctaaaattaaattaaat

SEQ ID NO: 28150 - DNA, 251 bp, Glycine max
  Clone ID: LIB3051-028-Q1-K1-B5
gtgattatgttcaatggattggctgaactttccatggtcgtttcacggcttcctgttttctacaagcaaagggactatctcttcttcccttcatgggtatatgcacttcctgcatggatcctaaaaatccccttgacttttgtggaagtgggtgtttgggtattccttacctactatgccattggttttgatccatatgttggaagattgtttaggcaataccttgttcttgtactagtaaatcaaatggc

SEQ ID NO: 28151 - DNA, 411 bp, Glycine max
  Clone ID: LIB3051-028-Q1-K1-B7
agcacgcattcgattacatgagctcagatgttgtcaccgttgacatctgtgtgtacgactaggagcttatggcatgatttcgttgaagtgtaaagtacggtgctggaatctgccatggagagtatgacttccactgtggatgcttacaatgaactgaaaagatcgatgacagaatctacttgacgatgtcatagctcgagaagaacatttatgaaacataccatggctgatgactctagaccaataggatcactgatgtgtacactgaacctctaaacatatatgccatgagtcatctctttcatagcgtacttgtcaagtgaatggcatacgattgtggaatctgactggtcatttggtcatgactaatattataatacaccaatcttataattaactatatattgcact

SEQ ID NO: 28152 - DNA, 424 bp, Glycine max
  Clone ID: LIB3051-028-Q1-K1-C9
tagacctagatcgcgagcggtcgaccttttatttgaattggaaatctaggatgctatgcttatcacttgcagtgcttactgaggctctcagacgatctacgtgacacacacactgattgagcgttatccctaaaatgatgtgttgcaacatatttagtacggtgtggtgacacagattgctactgaggacagagttgacagagccaattagatctgcataccttaaacaccaacttcaacatcacctaaatgcggtggtgagattatcagattcatcatctctagtctatttgatcaaatgcttaaataccgagacgatggcctatgatctgaccatggatactacagatatcatgattgcattgaccctggaggatctttcaatagctttggcacatctgcagatgacaacactcataggaac

SEQ ID NO: 28153 - DNA, 232 bp, Glycine max
  Clone ID: LIB3051-028-Q1-K1-D5
gaattttatgcaagcaagcactctgtgaatgtaaagaaggaagctggtgtgcttcctgtcataaatgttgacatgggcacagtccagctgactagaactaatggagagaccactaataaatgcctaaattggctctatcagcattgtacccattactacgaagctgttgcacattgtgccaaatggcgtgcagaagtgaagatcggtgctaactagccatatgatctgacta

SEQ ID NO: 28154 - DNA, 448 bp, Glycine max
  Clone ID: LIB3051-028-Q1-K1-E2
ctcacgcgtccggtcttggtaagatcaatttggctcacgatgaagtcagatctagggtgtcaagagctttgcatgctgtaagcctgtctgactacatgaaggtattaaggatgacaaccttgagcactcatacaaatgtgtgaattatacaataaatgaactgtccttctgtgacaatattcacagatctgtccaaactctgagtggcggtcagaagcagagggatgccattgctggtgctcttgcttaagcttgtaaagttctggagtcggatgagctcacaacatacttagatgaagctgaccaggttgcggtcatcaaagctgtgaggaactcattggatacctttgcagaaggtacagcattatgattcacccatcgcttggataaactggagtatgcaaatggtgccatctacatggaggatgggaaagtaaccatgcatgga

SEQ ID NO: 28155 - DNA, 445 bp, Glycine max
  unsure (1)..(445): unsure at all n locations
  Clone ID: LIB3051-028-Q1-K1-E6
ttttctctctctctctctctctctctctctctctctcatcattacttgcgcatatactagaacatgccattcctagaactgacatgagtatcttcatgtgtagctggatggtctttttaactcatggtgtgaatcttggaggaggaagatgtggttgaaaacatctgttggatcatatgagtgaatgtgtatgctcttacggtgttaaacatgtagatatagggtaagataaatacctgcattgtatgtatatttggaagggttatattagaggaaataaggctcgtttctgtgagtcttgctaactaatgtgttatgctgantattatgcaatcaattttataatctatttattatagtatcatgtataacattattttacgcagttatacttcaagttactcaacttaatataatagttaatatttggtatatatgtaattca

SEQ ID NO: 28156 - DNA, 445 bp, Glycine max
  Clone ID: LIB3051-028-Q1-K1-E8
cccacgcgtccggtttaattcaaagacacttattccatttgacattagaggccgtgttcgaatacttcatcctccagttatgacttgtttcccattctcatttggtaagaaagtgcgctttgtggcaacacatgatccagatattgatgaagtactctcaggcattcaaaatgtaagaatctatacctacaaagaactaaaagttgcctctgacaatttcagtccggccaataaaattgggcagggtggatttggttcagtttataagtgaaaccttaacaatattatggtggatgatcagggactgctaaaagatgggaaagtagctgccataaaagtactttcagcagaatcaagtcaaggggtaaaggaatttatgacagagattaatgtaatctcagaaatagagcatgaaaatttggtaagctatatggttgttgtgtgg

SEQ ID NO: 28157 - DNA, 398 bp, Glycine max
  Clone ID: LIB3051-028-Q1-K1-E9
acggcacgtgcagcgcgatactcagccttcggaacacgctactgctgtatcacagttaccgattgaattacccacacgctactatgtcgacattgggcttcttctttcctggacattgactttgaccttgcttcgtcctacgatggccactgttctgcacccattatgattcagatgactagctgaagctaactagatcctcctccatctacagatccactatcaaatgcttgactcaatatcctctttattcactagttgacaactcccataactatctcgagagcttacacgaaggggaacgtcattcctctcttatgctgcatagtctacgatcacctcactcagatgcttgcgtaccgctccctgattaaggaggacgagagagatgctcccag

SEQ ID NO: 28158 - DNA, 458 bp, Glycine max
  unsure (1)..(458): unsure at all n locations
  Clone ID: LIB3051-028-Q1-K1-F7
gttcaaaccactcagcttcgtcttcataccacaacacagagacatgttcccatcatcatctcccacctcactccacaccccaatccttcaccaccgttactgtcaccaccctacaccgtcccgcacccagttctcccctctcaccctcccacccttccgtcacaccctctccttcctcgtccctccgccgcttcttccggctgcgcgcgccatccccgccgcatccgccgcgaagggcgacaagtccggcgagcagaagtgggtcctcgagggtctggtcatggagtccctcccgaacggcatgttccgcgtgcgccttgacaacgaggacttgattctaggctacatctccggcaaaatccgcaagaactacgttcggatcctccccggcgatagagtcaaggtcgaggtcacccgctacgactcctncaaaggacgcatcgtttacaggctccgca

SEQ ID NO: 28159 - DNA, 369 bp, Glycine max
  Clone ID: LIB3051-028-Q1-K1-G12
ggagcattggtggaccccaaatgccattacttatggtgccgtgatgcatgggctacgtagggagggaaaattgtccgaggcgtgtgatttgaccagggaaatggttgaaaaaggcttgttacctactacaggtgaaattaacctgctaatacagtctctctgtcaaaatcagaaggtagtataagctaagaagtatacagaggaatgtctgaataacgagtgtgccattaatgtagtacacttcactactgtaattcatcgcttttgtcagattggtgacatggaagctgctctatccgtgctagatgacatgtacttaagcggcaaacatgctgatgctggcacatatacggcattgattgatgcatt

SEQ ID NO: 28160 - DNA, 447 bp, Glycine max
  Clone ID: LIB3051-028-Q1-K1-H9
atgtcttcttctcttcctcctcgtactctccgacttctccatttccgaatcacaatccccctgggctgccaagaaaaaacgcatgagagacaaagttcgcaatatcttttaccacgcatatgacaactatatgactcatgcatttccgcatgatgagcttaagcctatctctaaaactttcaccaactctctaagtgagttgggaaatttgaagcttgaacacttgcctcaagactacaacggctctgcccttacgcttattgaatcactgtctagccttgttattatgggaaattatactgaattcgagagggcagtgctctggctttcagaaaatctgacatttgatgttgatgcgcgcataaatctttttgagtgcaacataagagttcttggaggacttgtctctgctcatttacttgcatctgattcttcaaagaagttttt

SEQ ID NO: 28161 - DNA, 386 bp, Glycine max
  Clone ID: LIB3051-029-Q1-K1-A4
cttactcgtacgattgcttttagcatttgttatagtattatgaaacatgacatcagcaagcagacacaatacaagagttatattatttgtaaaccgtgcttctcacagtccaagtgaattattcagagtcatatatagttaactaaacaagctctttgcttgagttattaagacctggaactgaaaggaaagcactgcatttctattttttaaaaatctggatatccctccaacgagattccatgtagttggaagcaccatgctgtgcgtaaaccccaaacttgaagtagtgagtgctggctccacggacaggtccattgtacctgggattatcctgcccattaagaaaaatcttgacattgtttgcacccacatgatggatcacg

SEQ ID NO: 28162 - DNA, 410 bp, Glycine max
  Clone ID: LIB3051-029-Q1-K1-A5
cccacgcgtccgttgcagtgtacccaggaaatgtcttggccttgcacatgtctaaaccacaaggatttaagtactctagtggacagtatatttttctgagctacccagatgtctcgccttttcaatagtaagtgaacattggttttcttaatatttatatagcttattaccattaaaatcagggagagacgttaacaaaaaaattaatttgcttctttgtaaatttcccatttcttttagttgttaggaagtagtagatatatatcagacttgggaaaatgacatggttggaaggattgacaacagtttcacattttattgcatgttatttattatgagatttatttttattataactataaagatttatttgattaaagtttttagttttttttaaggaaaaagatttt

SEQ ID NO: 28163 - DNA, 337 bp, Glycine max
  Clone ID: LIB3051-029-Q1-K1-B9
cggacgcgtgggcggacgcgtgggtttactcgtgggaaaaaaaaaaaaaaaaaaaagaagaaaaaaaaaaaaaaaaaaaaaaaaaaaaaaaaaaaaaaaaaaaaaaaaaaaaaaaaaaaaaaaaaaaaaaaaaaaaaaaaaaaaaaaaaaaaaaaaaaaaaaaaaaaggaggaaattaaataaaattaaagttaaaagaaaaaaaaatggaaaaaaaaagttttttttaagagaaattaaaattaaattaaattgggtatttaattaaaaaggaataaaatggaaaaaattatggattaatataatttattagtagtgaaaaaaattttatttttta

SEQ ID NO: 28164 - DNA, 376 bp, Glycine max
  Clone ID: LIB3051-029-Q1-K1-C10
cccacgcgtgcgggatcccatggcttctcttaattggccttcttggaggtatggattgaggcattgataccggctattcaagcagagaatcaccaaggaaggtcaggaggacgtagcagaggactggatcgagaagtatagcccctgggatgtcgtgaggcatgacattttataccccatcagagtctatgctcatgttgaggttaatcctgattgaagccgaaaatgggttgtacgagaggttgcgcatgcactggcttatgaagtgccaattacaggttaccacaccaagatcaccatcagtcttggtctatcgaatgcaaaagctagtgctgaagatttcaataaatatggatataatgatgctcatcatgat

SEQ ID NO: 28165 - DNA, 280 bp, Glycine max
  Clone ID: LIB3051-029-Q1-K1-C6
cccacgcgtccgcgaacgatttgattgtttggaatgcattaacaaagcaacgagtgttcggttcgaaaccagcagagagaaaaaaaaaaaaaaaaaaaaaaaaaaaaaaaaaaaaaaaaaaaaaaaaaaaaaaaaaaaaaaaaaaaaaacaaaaacaaaaaaaaaaaaaaaaaaaaaatataaataaaaaaataaaaaacaaagagaatcaaaaggaatagagtcagattaaatagaaggcttttaacagaaagtgaaggttacgattaagacgagcaga

SEQ ID NO: 28166 - DNA, 404 bp, Glycine max
  unsure (1)..(404): unsure at all n locations
  Clone ID: LIB3051-029-Q1-K1-E10
ctcatgatcgttgtgaagccgttgtcacaatcgcttatgatgtttaggctcgtatcagagaccctgtctatggctgtgtctctcacatttttgccttacaacaacaggtaccattatatatgttattacaaacctcatcaaaacttttaaacttttttttctctagaaataatagatcttgtcatgctcatctttaatgtttatatatcctgttagacatcaaataagtaacacattaacacctatttaatgtaggacaaaacttagatggagttctaatggtgtttttgatgttatttaatcagaattggagtttccaaaatacctaaagaattgtatgtaggttatattcttttatggttntcaataacggaagaaatagacttaaatatctaaacatttgc

SEQ ID NO: 28167 - DNA, 373 bp, Glycine max
  unsure (1)..(373): unsure at all n locations
  Clone ID: LIB3051-029-Q1-K1-F7
cccacgcgtccgacaacccatcggtgaaattcaaaagccccgaaagcgtgacgcgcccactctcctcacagcgcgtaaacgacgacgtcgtcgtcgtcttcttattactactcctcaacgacagcttcccagcctgcgttttcttaaccgttcgatccgccgtcaagtcaacggaacagtcaatgtcttcaatcactataattgaacggttcgtcgtttggatcagtaatgagcgtaactcggagttatcagagactntggttagttccaagtcgtaaacgtcgtaacagagaaaattcgccattgccggtattaagctcgaattacccgagcccgggtggccgtggagtaaatacccacgcttccaggcccc

SEQ ID NO: 28168 - DNA, 358 bp, Glycine max
  unsure (1)..(358): unsure at all n locations
  Clone ID: LIB3051-030-Q1-K1-A2
agaacatacaccttttctcgtggcccgagcactgccgtacttatttgactagggtggctgccggcangatgaggcatccacaatggcaaaccaacactccagggaatgatatagctgatgaagagtctttcaatgactcactaaaggatgttcaggacatgtcccttaggctctcaattgatgctgacttagcaggtttaagttctggacccgacatgcaagaccaagtgaagcgtctcctaagcaggatgaagaagccagattctggtggttcaaatgacactgatggtgggaataagatgcctgacaatgtaactgggaaatatcctctactgtggagaagacgtcggttgattgt

SEQ ID NO: 28169 - DNA, 357 bp, Glycine max
  Clone ID: LIB3051-030-Q1-K1-A7
ctagcgtgtgccaaatatgctgtgttcggtatggattatgaagggcatggacgttctgaaggtgctcgttgttacataaaaaaatttgataacatcgttaacgattgttatgactttttcaagtcagtcagcgagctgcaagagtataaggcaaaggctagattcttgtatggagagtccatgggaggagcagtgagccttcttttacataaaaaggacccttcattctgggacggtgcagttctcgtcgcacccatgtgtaagatatcagagaaggtgaagccacacccggtggtggtcaacatattaactaaagttgaagatataatcccaaagtggaagatagttcccacaaag

SEQ ID NO: 28170 - DNA, 215 bp, Glycine max
  Clone ID: LIB3051-030-Q1-K1-B1
aaattaaaaattaaaaagatctatttaaaaaaacaaaattttaaaaaattaaaattcaaataaaaaattatttaaaattaaaacataaattaaatttattaaacttatttttaaaaaaaaaccaatttaaaaaacattttattttcctaaataaaaatcctattaaaaaaaattatattatataaattagaattatataaaaaattcccttaaaa

SEQ ID NO: 28171 - DNA, 285 bp, Glycine max
  Clone ID: LIB3051-030-Q1-K1-B10
cctgactcttgtacacatatgcacattttcgagaattaagtgcaaggtaagtgcttcaagtgactagcatgaagcgcatattacggacaaatgaacgtagacagtgctggtgaagagagtgcagatctcatcctcacggccactggacttacggtgcactcacgctatcttcgtatcaactatccattcacccattagagagcacttctgttgcactcaaagtgctatccttggaatcctgatcctgatatatataagacttggagacagagtacgactgtctat

SEQ ID NO: 28172 - DNA, 188 bp, Glycine max
  Clone ID: LIB3051-030-Q1-K1-B9
ttcgccacgcgttcgtctgatattggaaactcggaagattaaaggcggccagtccagaattgggaccctgaaaaataaagccattgattcctcctctaaattcactcattctctttaaaaaagagggaaaagggaaatttattatccggttccatcaatgtccctttgagattttagaaattccccgg

SEQ ID NO: 28173 - DNA, 425 bp, Glycine max
  Clone ID: LIB3051-030-Q1-K1-C12
cacacatcgtacgaccgaattcactgcaatcctaattctgcacttcgcgagcattcgaagatggggctgatgatacatctcatcatccttactctgtcagacactactatcaccgttatcgcagagtacatatacaccattgactccggaatggccctgattcagcgacacggggactatcccaggaccagtgcacagccttatctatcttgctaagcagctctatgatggttgcagcataggcgatgctaacatacaagacggatcaaccattatatacgcacttgccattagcagtgacccactcatattgggcaacactatcaccgttatgaccgatactcacactgcagcttgataacacattattactaacgtgaggcacgatactcacaacgtttacagccttcctgatgatcatgctg

SEQ ID NO: 28174 - DNA, 348 bp, Glycine max
  Clone ID: LIB3051-030-Q1-K1-E4
tcatgacttcttcaatggtgcctgcagaaaccttgtttgtactgatcttttcactaggggaatagacattcaagcagtcaatgttgttattaattttgattttccaaagaactcagaaacttatctgcacagggttggtcgttcagggaggtttggacacctaggtttagcggtgaacttgatcacctatgaggatcgcttcaatttatataggattgaacaagaacttggcactgaaataaaacaaattccaccacacattgatcaggcaatatattgccggtaactggtggtaaatacccagattgtattcacaaccgtggtgaatagcattggttgatgcgaatg

SEQ ID NO: 28175 - DNA, 422 bp, Glycine max
  Clone ID: LIB3051-030-Q1-K1-F10
cttcaaggctgtgtgcacattgtgctttctttatgggtttgcagaggaaacagggagaggttggtcaagaaggtcagcaatttgatatacgagggacagttgaagaatttcggcattctgttaatatgtacatgttctggaaaccggggatggagatttatgtttctcatgttcgtagaaggcaaattccattctatgttgttcctgatggttataaacgatctcggctatcaaggccaacatcacaagttgagaattgtaaatcatttcataatgaggtttcggggactgaacatgttgagagaatccgtaagaggaagaacaatgactgtgtggatgtgaggggggatgctatagttaaaaggcaatctgctagtccttctgaagatagattggcaagacacaggcaccttggtactggt

SEQ ID NO: 28176 - DNA, 380 bp, Glycine max
  Clone ID: LIB3051-030-Q1-K1-G11
cgaaaaattgaggattttgttgcaagagcaaaggaaacagcatgtggcagagttattggagaaggtggaatcgaatgctcttcatttgttgagacagaaagatgaagaaatagcgcaggcaacaaagaaaagcaccgagttgaaagaatttatgacaaggctgaaggaggttgaagccgtttgcaacccaatcatcagtgctgcgtatcagagatcaggaggagccccaggtggtgcaggtggcgaaggcgaagacgaggatgattctcacgatgagctctagattagtctaaatttttatcatatatgggaaattaagaattcccatgcgctctgcgcttgctttcttggtgccgatgataagatacttgtgaaattac

SEQ ID NO: 28177 - DNA, 309 bp, Glycine max
  Clone ID: LIB3051-030-Q1-K1-G12
ggatggcccttctgcttcggctggaggttgctgcagtggaagagtacctatcataacctatctgcatcaatgtagtcctttatgtcttctcttctttcattttgggtttggatatgaagatatatatgttctacgtccattcataaaatcagataattgtataatgttttctttttaatcttgactttgtttctttgaaaaacccaaactcgtgctggacacgatagcaaagaccaacatgattctctcgatatgcatctacttacgtctaaattattaccaggttcgcccactctagagttcccatgc

SEQ ID NO: 28178 - DNA, 424 bp, Glycine max
  Clone ID: LIB3051-030-Q1-K1-H10
cccacgcgtccgcccacgcgtccgatatatttatcttttcttggaagaaggaatccatagaatggcaatgcacaagagcagttcaggttcagcattgggtccgggaggcttggacttaactcaagccttcttcaagtcgatcatgaacgctgcagcttcttctcccaccaaacgccacaacaaaatctctgttgttggggcaggcaacgtgggaatggccatagcccaaaccatcctcactcaggatctcaccgacgagcttgtgctcgtggatgcaattcctgacaaactccgcggcgagatgcttgacctccagcacgccgctgccttactgccccgcaccagaattcaggcctacaccgattactcggtcacgctagtctctgacctttgcattgtcacagccgtagctcgtcaaattaac

SEQ ID NO: 28179 - DNA, 426 bp, Glycine max
  Clone ID: LIB3051-031-Q1-K1-A10
cccacgcgtccgggtgccctgtctaatctaggccatatatgctcgatgctgttggacggtaggttgtcaatgcagctgactcatctatgttcggacaagatggtagacttatctgaacttcaaaaccactatctggaaatggaaacgaaacatggaatgagaaaggatatgcagtcagaatgtctacatgtaacccttgacgaggtactatgaaaataaacgatggtgcatacctaactctaaagatgatatacagcaacaacgagtgccgcattggagtaatgaagattttctacatctaggaggctgaacaactgtcgcacgaacacctgctatgacatgatgcatgcgtactaagtgaatagatcttggaatggatccaacagactattatcttatatgatatctatatgagcaaatgaatat

SEQ ID NO: 28180 - DNA, 315 bp, Glycine max
  Clone ID: LIB3051-031-Q1-K1-A12
ccactcgtcctaaaaaaaaaaaaataaaaaaaaaaataatttaataaaatataaaataatataataaattagtaagttataatataaaaattaataaataataaaaaaaaaaaaaaaaaaaaaaaaaaataaaaaaaaaaaaaaaaaaaaaaaaataaataactttatcattttaaaaaacaatatttttcttattcattctattcttaaaaaaatcatataaattattattaataaaatatattacaattactactattaaaattttttaatttaaaaatattaattatatcaaatttaaattcccttatataa

SEQ ID NO: 28181 - DNA, 367 bp, Glycine max
  Clone ID: LIB3051-031-Q1-K1-A3
agccgaagtaggccgagtatctcttgctgaagtgagtgaccgaggtgaagccgcagggcagggccacctctagcaccgacagggtggagtgctgcagcaggcgccgtccttcggtgatgcgcaattccaggtagtagcgcatgggcgcggtgtcgagctgctcgcgaaacagccgctcgacctggcgccgagagcggccggcgtagtcgcacagctgctcgatggtcaggggctcctcgatgttggcctccatcagggtcaccacctagcgcagcggcggcgtcatctgcaccttgagcgtctgattgacctggccgaagcgcgattcctcgaaagccaggatattgaccaggccatcggccagggc

SEQ ID NO: 28182 - DNA, 414 bp, Glycine max
  Clone ID: LIB3051-031-Q1-K1-C2
tcgaccacgcgttcgatcactcgttcgcattcattggcttaatgctagcaatgtcttcctggttgtgcattcatttctttcctcttctctcaataacccttttttcaatttggtgcttaacaacatctcaagcctccaataacatatcacacccctatatccttcccattaataaaggccccggcacaaaatatgtactacacttcagttggcattggaactcctaggcacaaccttgattcagtcattgatctttctggtgaaaacttatggtacgattgtgacactcattacaactcatcatcctacagacctatatcttgtggctcaaagcaatgcctcgaaattggatgtgttggatgcaatggccccttcataccaggttgcacaaacaatacattccctgttaatgta

SEQ ID NO: 28183 - DNA, 429 bp, Glycine max
  Clone ID: LIB3051-031-Q1-K1-D10
atgacacattactagtaaatgtgtactctcatgttacgaacacatttctcaatcaagagcatgagcactgaagtatgctcgcataacatccctaaggtgaattacatcatatggtcagagatgcagttctaattcaaacagtgatgcattgcatctaatcagatcactcagagcatgcatatcactatacaccttatacattgaaagaagctgagtggatgagcatggtgtatgatgattatttttgcactcatttgttgctatacggacaccctaatgagatattgctttgaaagcagagaatgaatcactagctatccagatatcggagaagctgcattcggaaaatatggtcgtattattgtctcaatcatattgtacactgaattatattcatgttgtgtggaattcatcaccttggaaggagac

SEQ ID NO: 28184 - DNA, 400 bp, Glycine max
  Clone ID: LIB3051-031-Q1-K1-D2
tacttgcgatctctgcttgagttgcacccaatgaatacgaaaattttaacaaaaaaggatgcaagcatgctccaaatgggttatatgatagcaaatggggttacggttgttggggaggatcatgttaaggtcgcaggagcaagtcacaccaatatttcctgcccaattagaaaggattcgcaacaaaattgtactacacttcagttggcattggaactcctaggcacaactttgatttagtcattgatctttctggtgaaaacttatggtacgattgtgacactcattacaacttatgattctacagacctatagcttgtggctcaaagcaatgccctgaaattggatgtgttggttgcaatggccctttcaaactcatgtgcacaaacaatacatgccc

SEQ ID NO: 28185 - DNA, 337 bp, Glycine max
  Clone ID: LIB3051-031-Q1-K1-E6
gcccgtcttcttgaacttggttacaaacaacaactcaagcgtgatctttcgtaggaggcgatttcaaatttctccctctcgtcatccgtttcatcagtgctgactggtatcaccactctatacaacactgggttgaactacagtgtccccgtctcactgcagtacgcgggactctattataggagtgccaagctagctgtccctacattggcactctatgactcctggattactggctgcatacaatatcatcaggtcagtcttcaggttcaacatgcttacatcttacactcgcacagcttatccactcttattattcatactacaacctcctgct

SEQ ID NO: 28186 - DNA, 366 bp, Glycine max
  Clone ID: LIB3051-031-Q1-K1-F12
tatactagcatgggtgtatgcccacagcatgacttgctgtgggaatccctaacaggaagagagcacctactcttttacggcagacttaaaaatcttaaaggttcagccttaacacaagcagtggaagaatcgttgaaaagtgtaaacctttttaatggaggagttgctgataaacaagctggaaaatacagtggaggaatgaagaggaggcttagtgtcgcaatttcattgattggagatcctaaagttgtttatatggatgaaccaagtactggattagaccctgcatcaagaaacaacttatggaatgttgttaagcgtgcaaaacaggatcgtgcaatcattcttaccacacattccatggaa

SEQ ID NO: 28187 - DNA, 383 bp, Glycine max
  Clone ID: LIB3051-031-Q1-K1-F6
aagcaattgtgattcctgaagattttctttgccctatatccttggaactaatgaggggtcctgttattgtagccactggtcagacatatgagagatcttacatacagagatggatagattgtggaaatacaacatgtccgaaaactcagcagaagctccagcatttgacccttacaccaaattatgttttaaggagccttatttctcagtggtgtatagagcacaacattgagcagccaacaggactaaccaatggaaaattaaagaaaagtgatggatcgttcagagatgttacaggtgacatagcagtaatccaaactttggtccagaagctctgctgcctaactgatcacgagcgtacagcagctggcactgatctctta

SEQ ID NO: 28188 - DNA, 429 bp, Glycine max
  Clone ID: LIB3051-031-Q1-K1-G5
agaaaaagttaaccataacaaatatcccgccacgtccagaaagaagtgccgtcgggagggctgacgtgtacttgtatcatcgtttgacttgccagctttacagtgttagctgcctcctatgatgggaggagtgtcgggcggcgacgactacttcgttcaaatccaccaaccgaacaagcccggcgaccctttcatcatcaccttcaattgccccgacaaaaccggtctcgcttgcgatatctgcagaatcattctcgatttcggtctctgcatcaccaaaggaggtctctcactttcatggaattcttcgtttacagatcctattccattttattcttatcttaatttaatggaccttcttttgaatatcattcagatgtttcaaccgatggagtgtggtgttactttgtgttatgggttattccacac

SEQ ID NO: 28189 - DNA, 354 bp, Glycine max
  Clone ID: LIB3051-031-Q1-K1-H8
ctcgttggcgaaaccggtagcggcaaaaccactcagattcctcagtttgttttggaagctgtggatatagaaaccactgataaacgtaggaagatgatgattgcgtgtactcagcctcgtagagtggctgcaatgtctgtttccaggcgtgtggctgaggagatggatgtgagtatcggagaagaggttggctacagcatcagatatgaggattgcagtagtgccaggacagttttgaagtatctcactgatggtatgctttcgagagaggcattgacagatccgctattgtagcgatacagagttattattctggatgaagcacatgataggactttggctactgatgtgcta

SEQ ID NO: 28190 - DNA, 337 bp, Glycine max
  Clone ID: LIB3051-032-Q1-K1-A1
cgacaagcaaacgaaaagtaaatcaatcaatcgttggaatctctcaacttatcgctgcttcctggtacgtccattttctcttttgtttctatgttatcttgttagggtttccttctcaattgcaattgcaattcgcacattattattgattagttttagatttgggggtttccgtttcaatggacgacggcgagctggatttctcgaaccatgaagtgttttcgagtccgaacatgggggagcttccgagcagcggttcaatggacagtttcttcgacgagcttctcaaggacacgcacgcgtgcacccacacccacacgtgcaacccttccgggcc

SEQ ID NO: 28191 - DNA, 388 bp, Glycine max
  Clone ID: LIB3051-032-Q1-K1-A9
cccacgcgtccgcccacgcgtccgcccacgcgtccgaaaaaaaaaaaaaaaaaaaaaggaaaaaaaaaaaaaaaaaaaaaaaaaaaaaaataaaaaaaaaaaaaaaaaaaaaaaaaaaaaaaaataaaaaaaaaaaaaaaaaaaaaaaaaaaaaataaaaaaaaaaaaaaaatgggcctccttttaaaaattccaatttttaatatcctttcttttaacattaaaatttttttttatggtccccaaaattaaaatatttgtcccattttttaaaaatcgtgattttgaaaaacttttgggttttccaaattatactcttttaaaaaaatccccttttttcaaattgggtatataccaaaaaggcctcatcaaatagctttttcaaaaa

SEQ ID NO: 28192 - DNA, 343 bp, Glycine max
  Clone ID: LIB3051-032-Q1-K1-B5
cccacgcgtccgaaaaaaaaaaaaaaaaaaaaaaaaaaaaaaaaaaaaaaaaaaaagaaaaaaaaaaaaaaaaaaaaaaaaaaaaaaaaaaaaaaaaaaaaaaaaaaaaaataaaaaaaaaaaaaaaaataaaaaaaaaagaaaaaataatacataaatctatctatttagaatattattatcaaccttattgacaattaatactatcacaaaaactcaaaattatcatcactgaattaatacctattatcaaggttgatacattttgctaaatgatatttattaatcatactttcattcagtattataatattagatttaaaagagaattgccattatatta

SEQ ID NO: 28193 - DNA, 415 bp, Glycine max
  Clone ID: LIB3051-032-Q1-K1-D4
cccacgcgtccgaaagactccttttctctctggtcacgaaggcattactcaatcagcatcgtggaaggaaggtttagtgcaaaaacatttatctggtgaattacccattggtcgtgagtgcagctttcttcaaacagttttcaatgcaactaatgtgatggctggagtaggcattctgtctacaccttatacattgaaagaagctgggtggatgagcatggtgttgatgattctttttgcagtcatttgttgctatacggccaccctaatgagatattgctttgaaagcagagaaggaatcactagctatccagatatcggagaagctgcatttggaaaatatggtcgtattattgtctcaatcatattgtacactgaattatattcatgttgtgtggaattcatcaccttggaa

SEQ ID NO: 28194 - DNA, 409 bp, Glycine max
  Clone ID: LIB3051-032-Q1-K1-E3
cccacgcgtccgcttttgcattgaatttagcagacgcagagccaagtgtcgctgattctgaattgaaggatgatcttaaaccatcatatcatgtggctcttggttcagataacacatggtatctatttacagaaaagtggattaaaacggtatatgggacaggctttcctaatgttccattggctgaaggggatgctcgacctcgagaaattatgagtattctccttgataaggaggacatgaagtgggataagctttctcactccgagcatggtggtttatggttcatggaaggatctctagatacatggtcttggagcttgaatgttcctgttttgagtagcttgtcagaaaatgatgagctactactacagtctcaagactacaaagatgccattgaacgttacaa

SEQ ID NO: 28195 - DNA, 347 bp, Glycine max
  Clone ID: LIB3051-032-Q1-K1-E4
gtgttgttccaactttgtggacggcagtgcgtgttaaaggatgttgattgtaacagcagattttaagatttttttttatgaatcaactaaaataaaaaaaaaaaaaaaaaaaaaaaaaaaaaaaaaaaaaaaaaaaaaaaaaaaaaaataaaaaataaataaaaaaaaaaaaaaaaaaaaaaaaataaaaaaaaaataaaaaaaaaacaaacataaaataaaaaaaaaaaaaaaggggaatcctataaagaagtccaaactttaaagcacttgatatatatgttataagtcattaatatgagaccatataaataatgaattacccttttaataaaaacatttgattg

SEQ ID NO: 28196 - DNA, 410 bp, Glycine max
  unsure (1)..(410): unsure at all n locations
  Clone ID: LIB3051-032-Q1-K1-F3
ctcgctgtgggtgtcaagcttacatgcggattagcaaaacaacagaatttggagctccagaatggcgtgtgactggttttgctaaccatcacaatcatgaacttttagaaccaaaccaagttcggttcctccctgcatacagaactatctcggatgctgacaaaaaccgaatactcatgtttgccaaaacaggaatatctgttcatcaaatgatgaggcttatggagcttgagaagtgtgtggaacctggatatttgccttttactgaaaaagatgtaaggaatttactccagtcatttaggaaattagatccagaagaagaaagcttagatttattaagaatgtgcagaaatattaaggagaaagatcctaattttaaatttgagtacacacttgatgcanacaaccgt

SEQ ID NO: 28197 - DNA, 414 bp, Glycine max
  Clone ID: LIB3051-032-Q1-K1-F6
ctttggcgctgcgcagaagagagagaacgaacgaacgaacgagcataacacgctttaataatctgtggcagtgagtagtgatatgcagcaaggtgatccaacggtcctaagcttgaggcctggtggtggtcgtggcggcggaagcaggcttttcggtcactcctcctcctctctctccgccgatctccctctctgccgccctcatgcctatttctctctcaaggaatggaatgggagttgagagtttgaaacttggaatgtcctgattcttggtgggggcacttggttatgtgttcttgctgtaatatggacagaaagcaacagcatgtgggctgtaggtgtgcttcgttgagttttagattgcccataaaggacccacacacattcctgctcgtttgcctttccaactagggt

SEQ ID NO: 28198 - DNA, 400 bp, Glycine max
  unsure (1)..(400): unsure at all n locations
  Clone ID: LIB3051-032-Q1-K1-G4
cccacgcgtccgaagacttcttgttcgcaccctacggaccctattggaagttcatgaagaaactctgcatgtccgaactcctcggtggccacatgctggaccagtttcttcccgtgagacagcaagagacaaaaaaattcatcaaacgtgtcctccaaaagggtatttctggtgaggccgtggattttgggggagagttcatcacgctctcgaacaacatcgtgtcgagaatgatcgtgagtcagacgagtactactgaggacgagaacgaagttgaagagatgaggaagctggtgaaggatgccgcagagctctcggngaagttcaacatatcggacttcgtttcgttcttgaagcgctttgatttgcaggggttcaacangaggctcgagaggattcg

SEQ ID NO: 28199 - DNA, 424 bp, Glycine max
  Clone ID: LIB3051-032-Q1-K1-H11
cccacgcgtccgcgggtgtattcctgatgataagtttggtgggttcaaagatgtgggcaccaatgtgtcttgtgttgtttcaaggagggacatggcaacccagatgagcccacaggggatgtgcaggtagatgaacacttaccgtgacaagatggtccaagaaacatagggccttattcactggctgaggctcagaacaagtcaaaagctggaaaaaagaaaaagtaagcactcaattgtcaacttgggatgtttctgaaacgccaaaacctgccccaaaggcaaaaagtgaggaagccaaaatctctgcatgggagaacttgcaaaaggcaaaagcggaggcagcaatacggaaactagagatgaaattggaaaagaggcgagcatcctctatggattagattatgaacaagcgtatattggc

SEQ ID NO: 28200 - DNA, 406 bp, Glycine max
  unsure (1)..(406): unsure at all n locations
  Clone ID: LIB3051-032-Q1-K1-H5
aaagagcgtgtacttgttcttgctgctacaaacaggccttttgatcttgatgaggctgttattaggaggcttcctcgacgattgatggttaatttgccagatgctccaaacagagaaaaaattctcagagtcattttagtgaaagaagatttggcacctgacgttgattttgaagcaatagctaatatgactgatggatattctgggagtgacctaaaggttgtatgtatatttatgtatttttcacttcctttcttggtttctggagaaggtaccatctgtttctacataaaatattctcattgttatcttttgattgcagaatctgtgtgtcacagcagctcactgtccaatacgagagatcttggagaaggaaaagaaagagagaagcttagctntgtctgag

SEQ ID NO: 28201 - DNA, 268 bp, Glycine max
  Clone ID: LIB3051-033-Q1-K1-H9
gcacaagtctattcagagcatgctggaaaatctgcaattgactgtgacgacgttaagcttgcgattcagtccaaggtcaacttcagcttctcgcaaccaccccctcgtgaggtgcttctggagttggctcaaaaccgcaacaagataccgttgccaaagactatagcaggacctggtatcccacttccacctgatcaggacacattaatcagtcctaactaccagtttgcaattcctaacaaaaggcctgccgaacctttagaagaaa

SEQ ID NO: 28202 - DNA, 205 bp, Glycine max
  Clone ID: LIB3051-034-Q1-K1-B7
ataaaagccctagttagaagagttggtcgaatgagggatagctcaataattaatgtagaggaaaactcttaagtgcctttgaagactattaaaaggattcgttttttacataaaaaaaaaaaaaaaaaaaaaaaaaaaaaaaaaaaaaaaaaaaaaaaaaaaaaaaataataaaaaaaaaaaaaagcaaaaagaatagcagccat

SEQ ID NO: 28203 - DNA, 437 bp, Glycine max
  Clone ID: LIB3051-034-Q1-K1-D10
gctatcttgcccctttcagaaggaacatatatcatttgcgcgatttttgtgaaggatgtggacgtccacatggaaaagaagaattattcaattacagacagtcttcattaaggaatgtcattgaaagatgcgttggagttttgaaagcaagatttccaattttgaaattgatgccaagttatcccattagaagacaaagattaattctcattgcttgttgcactatacataattttataagaatgcaaaatggcgtggatacactctttgaccaatatgctgaacaactcgtggacatggatgagcaatggttaagtgtagagcaacaaggtgtcaacaaaaatcaagcagctaaagtggcacaagttcgacaaaccataacaaatgaaatgtgggaagattaccgtaaatcttaaaagaatttatattaaatgtta

SEQ ID NO: 28204 - DNA, 432 bp, Glycine max
  Clone ID: LIB3051-034-Q1-K1-D9
cttgtgtcatatgtttggaggaaactgatgttggtcagattttttcagttgatggctgtcaacaccgctattgcttctcatgcatgaaacagcatgtggaggtgaagttgcttcatggaatggtgccaaagtgccctcatcaggggtgcaagtatgagctcctagttgacagctgccagaagttcttgactcaaaagttaaccgagaccatgcagcaacgaaaattggaagcttcaattcctgttgctgaaaaaatttattgtccttatcctacgtgctctgcattaatgtcaaaaactgaggtcttagagtactccaaagatatcactggtcaatctgaacaatctgaacccaagatatgcctaaaatgtcgtggccttttctgttttaactgcaaggtcccttggcatagtggtatgacatgtaatactt

SEQ ID NO: 28205 - DNA, 395 bp, Glycine max
  Clone ID: LIB3051-035-Q1-K1-D1
gagagagagagagagagatctagtagagaggctagtaggtggtcctcgaacgaagatgttggcggtgttcagcgggcaggtggtggaggtgccggcggagctggtggcggcgggcagccggacgccgtcgcccaagacgaaggcgtcgcagctggtggggcgcttcctggccgcctccgagccggccgtgtccgtgcagctcggcgaccacggccacctcgcctactcccacaccaaccaggcgctcctccgccccaggtcgttcgcggccaaggacgaggtgttctgcctgttcgagggggtgctggacaacctgggtcgtctgagccagcagcacgggctgtcaagcaagggcgccaacgaggtgctcctcgtcatcgaggccctacagacgc

SEQ ID NO: 28206 - DNA, 430 bp, Glycine max
  unsure (1)..(430): unsure at all n locations
  Clone ID: LIB3051-035-Q1-K1-E3
aaaactactgcctgcaaggatgctgaaactaagaagtatgtttcagaattgaatgctgaggaggatgatgttgatggcaatggagatgaatgtcgcttgtgtggcatggatgggaccttgctttgttgtgatggttgtcctgctgtttatcattcaaggtgtattggtgtgatgaagatgcatataccagaaggggcatggtattgtccggagtgcaaaatagatatgattgggcctactattgcacggggaacatcacttaaaggggctgaagtattcggaaaggatttgtatgggcaagttttcatgagtacttgcaaccacttactggtgtatgtttaacttcttttgtgtntcttccactccttcatttgttatgctggatgattctggctcaatgtcaacagtgatgggctttggtcttaaatac

SEQ ID NO: 28207 - DNA, 447 bp, Glycine max
  Clone ID: LIB3051-035-Q1-K1-E8
caaaatccttagtttgaacaaatgataatctcccagctctcgaagttgtttatcttttgtttcatatgcattacactcatatgtttctcttcaagttctaatttcccagtgcaatactccatattaggccctaatttggacaagcttccttcacaggatgaaaccatccaactattccaactatggagaaaagagcatggactagtgtataaagacctaaaagagatggcaaagagatttgagattttcttgtccaatttgaattatatcattgagtttaatgctaaaagaagctccccttctggctaccttcttggtctaaacaattttgctgattggagccctagtgagttccaagaaatctacttacatagccttgatatgcctacagatagtgctcctaagctgaatggccctcttttatcatgtattgctcctgcatcggta

SEQ ID NO: 28208 - DNA, 261 bp, Glycine max
  Clone ID: LIB3051-035-Q1-K1-F2
gtcagactggcagacgcacttcgctgcgtacctaatgaacatgaagcaaagcttcaagtggtggaggttgagaagatctccctttatgcatccagttcatccatcactgaacttcagaaacttgtacttgacccaacacttgtcgcccagatcggttcttgagatcctaatgagactgcagtgtggtcctagaattactcgacgatggttaacctgaggcatattacttgcgctcgaacttacacactccgtcattgaatc

SEQ ID NO: 28209 - DNA, 448 bp, Glycine max
  Clone ID: LIB3051-035-Q1-K1-F6
gttatggatgaggctgataagcttctctcccaagagttccaaccttcaatagagcagctgattcaatctcttcctggaaaccggcaaatcctgatgtatgctgctacatttactgttactgtcaaggacttcaaagatcgatatcttcgtaagccatacatcgttaaccttatggatgagctaactctgaaaggtattacacaatatgacgcatttctggaagagaggcagaaagtccactgcctaaatacacttttctctaagctgcaaataaatcagtcgatcatcttctgcaattccgtgaatcgggttgagctactctccaagaaaatcacagaacttgggtattcatgtgtctatattcatgcatagatgttgcaagatcaccgaaatagagtgattcatgacttgtgcaatggtgcctgcagaaacctttgttgtactgatc

SEQ ID NO: 28210 - DNA, 378 bp, Glycine max
  Clone ID: LIB3051-035-Q1-K1-G11
gtactgtgcataacggctgagttatgtacttatgttaagaataaaataaagtgctgttgttgcaaaaaaaaaaaaaaaaaaaaaaaaaaaaaaaaaaaaaaaaaaaaaaaaaaaccaaaaaaaaaaaaaaaaaaaaaaaaaaaaaaaaaaaaaaaaaaaaaaaaaaaaaaaaaaaaaaaaaaaaaagggccgcccttttaaaagaaccaaagttaactaacccttccttccaacttaaaacctttttaaaagggcccccaaatttaaattaattgcccgtattttaaaaactttgaaactggaaaaacctgggcttaaccaaattaaatcccttggaaaaaaatccccttttcgcaagtttgcataataccaaaaagc

SEQ ID NO: 28211 - DNA, 426 bp, Glycine max
  Clone ID: LIB3051-035-Q1-K1-G12
gtgaaggttccgtgattatcattctcgcagcgattcggatcgcgaaagcggtccgccagccttaattttgatttgtgtcgaggaaaggacaggtcttggaaccctaacacgcacctctttctttcttaccgagtgcgtcaaagcgaagcaacactacacgatggtgttctacttcaaagcgcgcccctaagcccgcgatttcaccatcttcatgggccttgacaagtacgagaacgaggaactcatgaaatacaggtttgccgaagacatgtggttccatgtcgataaaatgtcttcagcccatgtctatggcatgtttcacaaaggccagaccattgatgacatgactgatggtttactggaagactgtgctcatcttgtcaaagcaaattcaattcaaggaaatgaaatgaacaatgtcgatgt

SEQ ID NO: 28212 - DNA, 435 bp, Glycine max
  Clone ID: LIB3051-035-Q1-K1-H10
cgacggaaccgcgtccatgcggttcatgaccacgtgggccaagttggctaggaaggaaaatttggaccacgtggaaatgatgccgtgctgtgatcgaaataagttgaattcgtacaaggttgatgattcgaggtcccacgaccattcggagtttcgcactcctccgaattggttaggttcattaggaggcagagacactaatgttgtggttgcaatagtgaagctcacagatgcacaagtgaagaagctcaagcacaaggtaaattacgttaacataattaacactactagagctagtagtacttcacgaccttattcaacttttgaggttgttgctgggtatttgtggaagtgtgtgagtaaagcacgttatgaggggaaaagtgaccaacctacgaggttgtctactttggttaattgtaggaaccgaataac

SEQ ID NO: 28213 - DNA, 448 bp, Glycine max
  unsure (1)..(448): unsure at all n locations
  Clone ID: LIB3051-036-Q1-K1-B2
agagattcaatgacagttctatcgatttcaaaggaaatagctttgagtatataccttttggggcaggaaggagaatgtgtccaggcatgacatttggattggctagcattacgcttccattagctttattactctatcattttaattgggaactcccaaataagatgaaacctgaggatttggatatggatgaacacttcggaatgacagttgcaagaaaaaacaagttgtttttgattcccactgtttatgaagcttcatgatacacgtattttttttataggccaaaagagatttaataagaataccagtggtactcaaaataaaaaaaagttatggagaataaagaaacttaaaacacacacaaatataatatttgtagtgtctgttgacacctncacactttggggagtctagtttgatgtaattttttggttgttattgaatc

SEQ ID NO: 28214 - DNA, 429 bp, Glycine max
  Clone ID: LIB3051-036-Q1-K1-B3
acgcgttcgcactctaaggctgtattatatgacaaatgatacatgagcaggtgttcaaaaccaggtataaatctacatgctgatacaaaaacataaaaaatcacttaaataaaaaatcacatgaaccaaaaatatgaaaaatcacatgtttttcgattttcacatcttgttttaaaaatcaaatcagtatatcataattatattaatgtttatattgcgataattaataacgagtattaactaattcattactaagatttaatatataatcacgatgtatatggaattctcatgtacttatatagctaaaaacgaatgttacatatcatgggatacacgaattactattatattataaaataagttgataatattattatattgtaatactaaatagaagtgaagagtataattgttaattaaaatata

SEQ ID NO: 28215 - DNA, 325 bp, Glycine max
  Clone ID: LIB3051-036-Q1-K1-C5
cccacgcgtccggaagaaccagatctctctttctcaaatcaccaagttgaaaatggggctgtctttcacgaagctgttcagccggctctttgcgaagaaggagatgcgtattcttatggtgggtctcgacgccgccggtaagaccaccattctctacaaactcaagctaggagagatcgtcacaaccattcccaccattgggtttaatgttgaaactgtggaatacaagaacatcagcttcactgtctgggatgttggtggccaggacaagatccgtcctctgtggagacactacttccaaaatacccaagggcttatctttgtg

SEQ ID NO: 28216 - DNA, 435 bp, Glycine max
  Clone ID: LIB3051-036-Q1-K1-C6
gtgccaagctcgagagtctaaaattcaaatcctagcttgggttaacttagatatgagtggtctatttttaattttccttatccttcttgttgccgatggggtccttgtccgaggaagtataaatattacagaaataagcttcgatcaaaactatgaggttacgtggggtgataatcatgttgtctccttaaaccaagggaaagaaattcagctcacaatggataactcttcaggatccggttttggatccaagatgtcatatggctctggactattccatttgaggatcaaagtaccagataggaattctgctggagttgtcacagcttactactattcttaatgtatttgatgcagttaacttcacaaggaagaagtcatgacgagttagactttgaattcttgggcaatagagaagggaagccatatagatta

SEQ ID NO: 28217 - DNA, 337 bp, Glycine max
  Clone ID: LIB3051-036-Q1-K1-D6
gtactgccctattacaccatactatgctcttaaaatttgatccatggcctaacttgctcgacttatcagcttgaccactataccttagatatggtatcatgttacacgatcagattcatacgacaaatcttacagattgactgagatgccatagaccagattgatcagatgatcgctcagcgtcacgctcatgactatccttatcggatatggacatggctaatgatgactgagtccttgctataccatgatgacaccgatgatatagtgacagtcgtaagggctatagcaactgtcaaatataatgtggcaacaaacttcgcgactattactccag

SEQ ID NO: 28218 - DNA, 437 bp, Glycine max
  Clone ID: LIB3051-036-Q1-K1-E6
cacccccatcacatgtggttgcaattacaaatggtgatgcccgtcttcttgaacttggggacaaacaagaactcaagcgtcatttttcattaggttctctctttctcgtttaattgaattccttccttcattttgtgttcttttttggtttatcattaatttccaattctaggttcttagcttgatcagggccatttgaattttcgccctctcgttttctgttttatcagtgctgactggcatcaccaattcaccaccctctacaacactgggttgaactacggtggccccgtttcaatgcaatatgggtggtttatggctttagctttcaccatgcttgttgcactctcaatggctgaaatttgttcttcaatccaactactggaggtctctattattggagtgccaaacttgctggccctagatgggcacccttt

SEQ ID NO: 28219 - DNA, 453 bp, Glycine max
  Clone ID: LIB3051-036-Q1-K1-F6
aaaaaaaaaaaaaaaaaaaaaaaaaaaaaaaaaaaaaaaaaaaaaaaaaaaaaaaaaaaagaaaaaaaaaaaaatataaaataaaaaaaaaaaaaaaaaataaaaaataaaaaatataaaaaataaaaataaaaaatataaaaaaataaaaataatataaaaaaataaaagtggatgaatttttatgactttaattttaaatatgtttttttagataataattttttttttttgattaattctaatttaataattttggattttttttaaaaagatattatttttaaaaaactgttaatttttcaaattttatttattttaaaaaaatttcttttttcaatatttgatattttttataaatgctttaaactttctgtttttataaaatttttcaatattaatttgtaaatttgccccctctttttatcggtttttttaccctttgattttttt

SEQ ID NO: 28220 - DNA, 387 bp, Glycine max
  Clone ID: LIB3051-036-Q1-K1-H6
gacctacgcgtacgcttactgcttatggtgggggctccagaattcgagtacacttggccagggacttcaaactagcacctatcctggggaggttatcttttcaatagcactagctataagtggcctcatcctttttgcccttctgattggcaacatgcagacatatcttcagtctctcaccattaggcttgaggaaatgagagtcaaaaggcgtgattcagaacagtggatgcaccatcgcttactcccacaagatcttaaaaaaccttttaaaccgtattacccatattagtggcttgccacacctggtgtaaaatgaagaaaatttagttcaaagtttaccaaaggatcttcgaaaagatattaaccgtaatctttgttgggcct

SEQ ID NO: 28221 - DNA, 342 bp, Glycine max
  Clone ID: LIB3051-037-Q1-K1-B11
atggctcgtgggccttaaccgacagtgtcccttctaacatgactcttatggtccaggttgacaataagtagcgcatgcaattgttcctcagcaccaaaccttgcaaattgagaacccaagtgaacttggaccctacatcggctagtaccgtgaccattacagaatgctaagcatcttcaactattcattcgacgtgggtttgtactacatcacgccgcataccgtgactctagcttagatgatatggctccaacgctctgatcagacatcccgattggcttgagaggccaatatgggcatcccagttggagaaaatgccactatatcacttggtactgatgg

SEQ ID NO: 28222 - DNA, 347 bp, Glycine max
  Clone ID: LIB3051-037-Q1-K1-B12
cccacgcgtccgcccacgcgtccgcccacgcgtccgcggacgcgtgggaaaaaaaggaaaaaaaaaaaaaaaaaaaaaaaaaaaaaaaaaaaaaaaaaaaaaaaaaaaaaaaaaaaaaaaaaaaaaaaaaaaaaaaaaaaaaaaaaaaaaaaaaaaaaaaaaaaaaaaaaaaaaaaaaaaaaaaaaaaaaaaaaaaaaaaaaaaaaaaaaaaaaggggaataaattataatgattcaaactttaaatgcatgtgcttaaaaattataatcttatatttaggagaactaaaaaaatagaaggggggctattgataaaagctatagagatggaaaaaactggagtttta

SEQ ID NO: 28223 - DNA, 364 bp, Glycine max
  Clone ID: LIB3051-037-Q1-K1-B3
ctcttacagaattctgcacgccaagtaactgcccttcaatgactgcaggaccaaagtatgagtatcgatgggctgatggtgttactataaagaaaccaatagaggtgtctgctccaaaatatgttgagtatttgatggactggattgaatctcagctagatgatgaaacgattttccctcaaagattgggggctcccttttcaaccaatttccgagatgttgtcaagacaattttcaagcgattattccgtgtatatgctcacatttaccactcacattttcagaaaatagtgagtttgaaagaagaagcttaacttaatacttggttcaagcattttggtttatttacttgggaattcccgtt

SEQ ID NO: 28224 - DNA, 423 bp, Glycine max
  unsure (1)..(423): unsure at all n locations
  Clone ID: LIB3051-037-Q1-K1-C10
gggggcccatgttcccaaggctgcatgtgaatgatgcagagaaaggagggccaagagcaccaccaaggaacaagatggctctttatgaacagttcagtattccatctcagaagttcaatccacgccttcttccacgaaaaccaaattcttcttctaacatagttccttccccaacccagggaaatggccatgagagaagttatgtctacccagttcgtttctcttcacatacacccactcatcgagctgaaagttatatttctcgccaatctgatgatggatcaaggtcgaacacttcattggtgcaacttgaacggagaaaaaaagtagatgatgacattcacgtgtacacttgctcggggattgatcaatctaatgatanaacgatggacagtgtanatgggaaaaaattcactcctttcg

SEQ ID NO: 28225 - DNA, 316 bp, Glycine max
  Clone ID: LIB3051-037-Q1-K1-F11
taaacctaattctaatttcttcatcgttctacacttctcctactaaatatggggatcgtctttaaatcttttaccactaataccatcaccctatatgtggaatcctccgtcaccatctatcactagaacgctaacattcactacaacgaaagatatactacctgaccatcatatactaatatgtgcatctaaactgcttgaggatttcctaaccctaacctactaccacatccaaactgaatccactattcacatctagcttcttctcatacttgacatgcaaatctttgttaagactttcactgacattaccatt

SEQ ID NO: 28226 - DNA, 391 bp, Glycine max
  Clone ID: LIB3051-037-Q1-K1-F12
ctctttctaaacatttggatttcaaagggattacatccgaccttgttactctgaacatcctcatcaactgtttctgccatctgggtcagatcactctttccttttctgtattggccacgattctcaaacggggttatcacccagatgtaataaccctcaccacactcatcaaaggcctctgtcttcgtggggaggttaagaaagcactgaaatttcacgatgatgtcgttgccctagaattccagttagaccgaattagttatgggacattaatcaatggtttgtgtaaaataggagaaacaaaggctgccatacagttgatgaggaatctggaagaacgctccattaagcctgatgtggtaatgtacaatataataattgatagcttatg

SEQ ID NO: 28227 - DNA, 365 bp, Glycine max
  Clone ID: LIB3051-037-Q1-K1-F6
gactgaacaagtgatcaaagcatcagaagagaaagtagctctacaaggattgaaagtcacgcgcagcacctaaatgtaaaaaaagcaagaagagccagaacaagagtgtggtgaagcaggtgacaacagcagaaggtcttgatgatgcatgggcatggcgaaaatatggacagaaaccaataaagggttcaccctatcctcgaagctattatagatgcagcagttccaaagggtgtttggcgaggaaacaggttgaaaggagccacttagatcctgcggtttttctggtaacctacactgctgaacacagccatccccacccaactcgaagaaactctcttgctgggaccactaggaagaacaat

SEQ ID NO: 28228 - DNA, 388 bp, Glycine max
  Clone ID: LIB3051-037-Q1-K1-F7
cccacgcgtccgctcagattatatatatactccacatctgaagccacaccatcaaactcaacactgaccaaaatggcctcaccccaaacccctctatcccttctcacaattgcactcctttccctaatccctctcttcatcttcttcttcttcaaccgctccaaaggcaaacaacccaaagaaccaccaaccattcccggcgcatggcccatcctcggccacctccccctcctagcccgctccccaaccacccaccacctcctcggcgccatcgccgacgaccacggccccctcttcaccatcaagctaggcacagtaaaagccctagtcgtcagcaactgggaaaccgctaaagaatgcttcaccacaaacgatgtcgcccgttctt

SEQ ID NO: 28229 - DNA, 347 bp, Glycine max
  Clone ID: LIB3051-037-Q1-K1-H6
tccacaccttcaaaagacaacaaatactttcacttttttactacaactgactcacactactgggaatgttcacctatcatcttgaggatatctttccaataacactaactataactcacctaatcctttatgcccttctcatttccaacatccaaacatatcttcatactctcaccattactatcaccttacactaaatcacaacgcattaatcatatcattttatgcaccatctcttacttccacaagatcttataaagctattgatacattatgaccaatataagttactggcaactcatcctttaaatgaagaaaatttaattcaaaatctaccaaatgatctt

SEQ ID NO: 28230 - DNA, 428 bp, Glycine max
  Clone ID: LIB3051-038-Q1-K1-A5
ctatgaccaagtaatgaacctgaagagcatggtggccaaaaccgacgtattccaccttgtttttggcgtgtggaagaccccagccgaacgttgctttatgtggattggtggcttcaggccatctgaactcatcaagataattctgggtcaaattgagcctcttacggagcaacaaatacttgggatatgtgggttgcaacaatctacacaagaggcagaagaggctctttcccaagggcttgatgctcttaatcaatctctctcagagactataacatcagactctctgtggtgtcctccaaatatgactaactacatgggacaaatggctgtggcaatcaacaaactctccacccttgaaagctttgtgagacaggtacgttacatatatgctttgactagtactatattatataaccattatttct

SEQ ID NO: 28231 - DNA, 442 bp, Glycine max
  Clone ID: LIB3051-038-Q1-K1-B10
cttttccgtcagcaacattctttattctatatgcctcagcagtataaagaagttgcttactcataagcatgctcaatttcttgtttccctgttgaaactggttggtaatctttgaaccactcgcatacattaagtgggacctgcacaatgcaagacattattagactgaaatgatgataccgctccagcaaggataaaatgtacaacattcagatggttcttactttcaggatcttcttctcaaatatgtcaaacttgtttaagaataacatgaaggatgttttctgtgtagaaaagagaatgacatcatttttttgtgagataagtagaaaagttaactgacaaaaaagtacaaagggacctgagaaagaaaagtatggcatagaaatttctacgtaattgtagtagaagttgaagttaaaaaagactataaaaaggaaac

SEQ ID NO: 28232 - DNA, 405 bp, Glycine max
  unsure (1)..(405): unsure at all n locations
  Clone ID: LIB3051-038-Q1-K1-C9
gcaccaactatccaactcacacgaaacctaatggacaagggcatgattggaagcattggtcgagccacatattaccaacctatgcagctgtgggacaaagccacagggaatctcacagatttcacaacccatttttcttttgtcatagattcacagaaccgaagtaaatatggagatgggattgcattcttacttgcccctgctggttcaaagattcctaatgccacaaaaggagcttctatgggtcttacacttgataaccaacaattgaactccacagacaattcatttgttgctgtggagtttgatatctatcagaatggctgggatccaccccatgaacatgttggaatagacatcaactctatgagatctgcttctaatgtaacatggntggctgatatc

SEQ ID NO: 28233 - DNA, 431 bp, Glycine max
  Clone ID: LIB3051-038-Q1-K1-D5
gtcttcactactatcctcctggaagggtgttgcattttcagcatttggtttgggagttgtcactctactcatgcacatcttgatcatgttctcacaatctgagcgttcaaccccttccaaggttgcccctacaaaaaagtccaagaatagcgaacaactggaagctagggataacaaacaagactagatcacacacgttacctgaatattctatacataagagaattcttctgaggtcacatcttgaacttgttttgcatttatgtgcttttttttataaaaaaaattgcattaacgtgtgtttagggactcactaccccctttctttatttgtttgctttggaattgtacctcgtatgtgttcagttcttgtattatgtattatgcatatactattcattactttcaaattaattaagatgaatttgtat

SEQ ID NO: 28234 - DNA, 370 bp, Glycine max
  Clone ID: LIB3051-038-Q1-K1-D7
atttattaataattagaactttcttttttcttaaaaaaaaaaaaagtaaataaaaagatttgatagaatcgtaatttcaattcgattatatagatacatagaaaaaaagaatatataataatagaagtaggaattattgatagaaattcattcaaaaatgaattcttaattaatagtaatagtaatataaaagattttatttagaagagaatatctattataatagattatatctatatagatataatctattatatacatttattttgaattacccctaatagaatatcaggccgatctctgtacaaataaaataacatatcaagtacattaaaaacgcggatatagtccaatggtaaaatttctcttt

SEQ ID NO: 28235 - DNA, 400 bp, Glycine max
  Clone ID: LIB3051-038-Q1-K1-D8
aaactcctcaacatctccaaaatttctgaccagagaagaagctgaccagattcctttctcatgcaaacacctaccatcccttctcaaattcttctccatcccacaacactctccccaagccaaggcaatgaaatataccctcaaacaatgtgaatttgaacccatggaaggagagaccaagttctgtgccacttcgttggagtccttgtttgattttgcgcactatctgtttgggtccaatgcacaattcaaagttctgaccactgtccatctcacaaattcaacagccctgctacagaactacacaatctcagaagtgaaagtgatttcagttccaaatgttatagggtgtcaccccatgccttacccttatgcagttttttactgccacagtcagcat

SEQ ID NO: 28236 - DNA, 330 bp, Glycine max
  Clone ID: LIB3051-038-Q1-K1-E6
gtggaagatagggttacgccgatgcgcatcgaaatcatcatcagagccaccagaaccctagccgctctcggttagaacgtaaggagaatcagggagcttacctacgtggctcagatgaggctcaagtttcctgagaacagcgttgaactctatgctgaaaaggtcaacagtaggggtctttgcgctatagcacaggctgagtctgtgcgatacaatctccttgttggcctagctgtgcgcaaggcttgctatggtgtcttgaggtttgttatggaaaggggtgctaacggatgctaggtcagtcgtagtggctaattgagagcccatata

SEQ ID NO: 28237 - DNA, 424 bp, Glycine max
  Clone ID: LIB3051-038-Q1-K1-G2
ttcaacctggtgctgatcaccaacgtcgcacgtgcaggggatatcgtgcgcgtgagcgtgaaaggaagcaaaaccgcgtggatgagcatgagccgcaactgggggcaaaattggcaatccaacgcggatctggtgggccaggccctttcctttagggttaccggcagtgaccgacgcacctcaacctgctggaacgtggcaccacctaattggcagttcggacaaaccttcaccggaaagaatttccgtgtctaaatccaagaagaagaagaagaagaagacaagagagaagaaaataacaatactcttaaattaatggctcctggtatttttgagtttgtttgcttcagtttccctgcttctaacttccctctattttcctgggaaagctttggaatgggtggtaaggggttaaaagaaaatt

SEQ ID NO: 28238 - DNA, 334 bp, Glycine max
  Clone ID: LIB3051-038-Q1-K1-H9
aaaaaaaaaaaaaaaaaaaaaaaaaaaaaaaaaaaaaaaaaaaaaaaaaaaaaaaaaaaaagaaaaaaaaaaaaagaaaaaaaaaaaaaaaaaaaaaaaaaggaaagaagaaaaaaaaagggccaagcttacaaaagggatccaaaataatgaccgagttgaaaaaaaagacaaaaatggtaaaacgattgccaaaagaaaaaaaacgggacgacggtaaaaacacagtggactggaaaataaatgggataaaaaaacataaccgtttggaaataaagccaatttgacaaaagggctgaacaaacgaaaaggccaaaaaagtgggcatttaaaa

SEQ ID NO: 28239 - DNA, 296 bp, Glycine max
  Clone ID: LIB3051-039-Q1-K1-A9
aaaaaaaaaaaaaaaaaaaaaaaaaaaattaaaaaaaaaaaaaaaaaaaaaaaaaaaaaagaaagaaaaaaaaaaaaaaaaaaaaaaaaaaaaaaaaaaaaaaaaaaaaaaaaaaaaaaaaaaaaaaaaaaaaaaaaaaaaaaaaaaaaaaaaaaaaaaaaaaaaaaaaaaaaaaaaaaaaaaaaaaaaaaaaaaaaggggattgattaaagatatattaatttaagaagagggaaaatataaaatggtttgtttttataggggtaaaaaaaaaaagataattgggagaatttttt

SEQ ID NO: 28240 - DNA, 253 bp, Glycine max
  Clone ID: LIB3051-039-Q1-K1-B2
gttcatctcttgaggaagaagtcttgctttaccctgcatctacacttataaaggttgcgaatgcttacgcggtttcgttgttgattccaactgatgtagtcatagcatacaagtatgcttctgatgctaacactaaaactgtacccgcatcaatcaaaccaaactggaggatgggattacatatatgaaccgagtccaacaaaacattaggtgaaccatttgatatgtcccatacctgcattctaaatgtacc

SEQ ID NO: 28241 - DNA, 316 bp, Glycine max
  Clone ID: LIB3051-039-Q1-K1-C12
gtcctattatactcccaatgtaccccgttcactcgatgattactgcaatcattgacaatggctatcaacacttcatgaatccctcattgctgctcaatacattgtaggaggtttgtaatgacccagatagcttggtgagctaatcaccataccagaaagcacacgctagatcactgggctgattatgctgatctgaagatatctgcgtctcgcaaggccgatatggacatgtcaatgagcagaccttgtagctgaacctaaggagtttattgaaccacatcaattgtcggatgcacagctacgagacatgacttat

SEQ ID NO: 28242 - DNA, 360 bp, Glycine max
  Clone ID: LIB3051-039-Q1-K1-D12
cgaaaaaaaaaaacccaacctaacccattacctcattcctcaattcaattcaatgttttccctctcaaaacccatcctttctccggttcgccccacccttcctccggttcgctgcgggtcccgcgagctccgcgagcgaatcaagaccgtccaaaccactcaaaagatcaccgaagccatgaaactcatctgcgccgcgcgcgtccgccgcgcccaggaggcccgtgtcagtggccggcccttctcctcaaacctcgccgcaatgctaaacgacatcacccagcgcctgcaaaacgacgacgtctgcacccctctcaccctcgccagacccgtcagaaccgttgcactcgtcgtcgtcac

SEQ ID NO: 28243 - DNA, 385 bp, Glycine max
  Clone ID: LIB3051-039-Q1-K1-D5
aaaaaaaaaaaaaaaaaaaaaataaaattaaaaaaaaaaaaaaaaaaaaaaaaaaaaaaaaaaaaaaaaaaaaaaaaaaaaaaaaaaaaaaaaaaaaaaaaaaaaaaaaaaaaaaaaaaaaaaaaaaaaaaaaaaaaaaaaaaaaggggaggagtttttaggggtctaaatttaactatatgtatattggaaagttatgattttttttagggtatcctaatttaaattatattgcacggtttttaaaatcttgatatttggaaaaatttgatgtttaccaatttattaagttttttaaaaaatcctcttttaatgatttggtttataagaaaatgggcattctctatagattttttcaaatatttgtagattttaatggatattt

SEQ ID NO: 28244 - DNA, 402 bp, Glycine max
  Clone ID: LIB3051-039-Q1-K1-E10
cccacgcgtccggggaagtaagatatttctcaccacaaggaattgggatgttgctttacatgttgatgcttgtagcaatccgcatcagttgaggccattgacagaagatgagagtttcagattgctctgcaacaaagcgttccctggagcgaagggcatcccgttagagttggtccagttggagagtcttgcaaaggagattgtggttaaatgtggagggttgccattggctgtggtagtggttggtggttcgctgtctaggaaactcaagtcaagtggtgaatggaaacggaggctgcataatatcagctggcacttgctagaagagcatgagaagatagcatgaattttggccctaagctacaatgatctgcctgctcatttgaagtcatgctttctata

SEQ ID NO: 28245 - DNA, 429 bp, Glycine max
  Clone ID: LIB3051-039-Q1-K1-E7
caccctcctccgtcgccgtggccaacttcctcgtcaacatgtacggcaagtgcggtgacctaaccgccgcgcgccaagtgttcgacgaaatcccggaccgagaccacgtgtcgtggaactccatgatcgcgacgctgtgtcgcttcgaggagtgggaactgtcactacatttgttccggttaatgctgtcggaaaatgtggaccccacttcgttcacgctggtcagcgtggcacacgcgtgctcgcacgtgcgtggtggggtgcggctcgggaagcaagtgcatgcttatactctgaggaatggcgatttgagaacttacacgaacaatgcgttggtaacgatgtatgcgagattgggcagagttaatgatgctaaagcattggttgggtgtttttgatggtaaaagacttggtgtcatggaaacactg

SEQ ID NO: 28246 - DNA, 427 bp, Glycine max
  Clone ID: LIB3051-040-Q1-K1-A1
gaaactttttcacccccttgataccgcttcaattcaccaatggcaagtcgaggaaaaacccagggatctggcacaaccaaaaagggcatctcccgaagcaacaaagctggtctccaattcccagttggtcgtattgctcgatacctcaagattggcaagtatgctgaccgtatcggttctggcgctcccgtgtatctcgcctctgttcttgaatatcttgctgctgaggcaatttttcttaatcgcctttgatttttgttttcgtgtgttgtcattggatttagggtttataaattagggcttattttcctaaagtttagtggatggttttggtttaatgatcaaccttgaataattgaaatgataaatttactttaatcaatattaattacttttttgaaaggtttatatcacacttggtgtgttc

SEQ ID NO: 28247 - DNA, 267 bp, Glycine max
  Clone ID: LIB3051-040-Q1-K1-A11
aaaaaaaaaaaaaaaaaaaaaaaaaaaataaaaaaaaaaaaaaaaaaaaaaaaaaaaaaaaaaaaaaaaaaaaaaaaaaaaaaaaaaaaaaaaaaaaaaaaaaaaaaaaaaaaaaaaaaattaaaaaaaaaaaaaaaaataaaaaaaaataagaaaaaaaaatatatagataaaaaaaaaaaaaataaataacaaatataaattaatctaaaaataagcttatttccaatatcatctataacgacgaggtcaaatataacaaaggta

SEQ ID NO: 28248 - DNA, 426 bp, Glycine max
  Clone ID: LIB3051-040-Q1-K1-A2
cccacgcgtccgcagcatttgagtgaggaattgaaacgtaggttctacaagaactggtgcaagtccaagaagaaggccttcaccaagtactctaagcagtatgaaactgaggagggaaagaaaaacattgaggcgcagctggagaaactgaagaagtatgctactgtggttcgtgttttggctcacactcaggtactaaccccacattaatgtgattgcataccttttctttgtttccctgatttcattttatataatggttgttacatatataatgatagtttagcactttcttttcaagcatttatccattttatgggtttattttgccttgtgtcctgagaatgatgaaattcttgttcttgtgcaaatgcagcaccatgaattaggtgctatgagcggcactttccacacgagatttctgac

SEQ ID NO: 28249 - DNA, 294 bp, Glycine max
  Clone ID: LIB3051-040-Q1-K1-B10
aaaaaaaaaaaaaaaaaaaaaaaaaaaaaaaaaaaaaaaaaaaaaaaaaaaaaaaaaaaaaaaaaaaaaaaaaaaaaaaaaaaaaaaaaaaaaaaaaaaaaaaaaaaaaaaaaaaaaaaaaaaaaaaaaaaaaaaaaaaaaaaaaaaaaaaaaaaaaaaaaaaaaaaaaaaaaaaaaataaaaaaaaaaaaaattaataaaaataaaaaaaaataaaaattttataaaaaataaaatattaagggaaatataataatattggaattgaaaaaaaaaaaattattaaaaggaaaa

SEQ ID NO: 28250 - DNA, 438 bp, Glycine max
  Clone ID: LIB3051-040-Q1-K1-B3
cccacgcgtccgaaaaaaaaaaaaaaatttaaaatataaaaaaaaaaaaaaaaaaaaaaaagaaaaaaaaaaaaaaaaaaaaaaaaaaaaaaaaaaaaaaaaaaaaaaaaaaaaaaaaaaaaaaaaaaaaaaaaaaataaaaaaaaaaaaaaaaaaaaaaaaaggggggggcctttttaggggtcccagttttattttccctggtttgggttttcttgttttttttttggggtccctaaatttaatttatttggccgtgtttttaaacctttggttttggaaaacctttgggttttccaattttattccctttgaaataattccccttttcccaggttgggttattttaaaaagggcccgtccggttggcttttcataaagtttgccattcttgattggtattgggaacctcctttttttgggctttttaacgtgggg

SEQ ID NO: 28251 - DNA, 414 bp, Glycine max
  Clone ID: LIB3051-040-Q1-K1-B5
cccacgcgtgcgtccacgcgtatgaaaataaaaagaataaaaaaaaaaaaaaaataaaagaaagaatgaaaaaaaaaaaataaaaaaataaaaaaaaaaaaaaaaaaaaaaataataaaaaaaaaaaaaaaaaattaaaaaaaaaaaaaaaaaaaaaaaaaaggtgaaaataatagatggctttacattaatcttcggtgttgtaataaagatctgtaactttttaaaagagatagatggatagactgaactctttctttaaaaacctaagatactggataaaatctgtgtttatctatttagatgattttgatatctatataaacttataatatttgtatatatcattaaatgatttgatcaaaaccatttagtaaagaatgttgaaactttataagtgtatgatgaatgtca

SEQ ID NO: 28252 - DNA, 318 bp, Glycine max
  Clone ID: LIB3051-040-Q1-K1-B6
aaaaaaaaaaaaaaaaaaaaaaaaaaaaaaaaaaaaaaaaaaaaaaaaaaaaaaaaaaaaaaaaaaaaaaaaaaaaaaaaaaaaaaaaaaaaaaaaaaaaaaaaaaaaaaaaaaaaaaaaaaaaaaaaaaaaaaaaaaaaaaaaaaaaaaaaaaaaaaaaaaaaaaaataaaaaaaaaaaaaaaaattaaaaaataaaaaaataaataaaaatataaaaaaaaaaaaataataagattttagaatagtaatcgagaaaaaatacaatagaatatagttaaaaaaatttgtaatgttataattattgtaaaggggaata

SEQ ID NO: 28253 - DNA, 426 bp, Glycine max
  Clone ID: LIB3051-040-Q1-K1-D10
cccacgcgtccgcccacgcgtccggttttcaggtcatatatgttaacagattcttaccatcatcaaggaagcaggctgttagggaaataaagaaatctgctttcaaggaactgaataacagagaagggcctcttgtgataaatttcctcgagtactattatttcccgagggaacaacaactaatggcaggaaccttatctccttccaacttggtgcatttatccctggatacccaatccagcctgtaattatacgctatcctcatgtacactttgaccaatcctggggtaatgtttctttgggaaagcttatgttcagaatgttcactcaatttcacaacttttttgaggtagaatatcttcctgtcatttatcccctggatgataaggaaactgctgtacattttcgggagaggactagccgtgc

SEQ ID NO: 28254 - DNA, 425 bp, Glycine max
  unsure (1)..(425): unsure at all n locations
  Clone ID: LIB3051-040-Q1-K1-D5
cggacgcgtggggtacgtagtgtgaagatatagtattgtatgctgcagaatatgattgtcttttgcaatggcggttgttgcgcaaacccctgacatcgccggcgagcgacagtccggccaagacgttcgcacccaaaacgttgtggcatgccaagccgttgccaacatcgtcaaaagctctttaggccccgttggcctcgacaagatgctcgtcgacgacattggcgacgtcactatcaccaacgacggtgccacgattctcaagatgcttgaagtggagcatcctgctgccaaggttttggtggaactcgccgagcttcaggaccgagaagtcggaaacggcactacttcggtgcgaattggctctgctgagcttctcaaaagggcaaatgaccttgtcaggaacangattcatcctacctcga

SEQ ID NO: 28255 - DNA, 142 bp, Glycine max
  Clone ID: LIB3051-040-Q1-K1-F8
gctaaactcaaaaaaaaaaaaaaaaaattaaaaaaaaaaaaaaaaaaaaaaaaaaaaaaagaaaaaaaaaaaaaaaaaaagggtagaagatataaaagatcaaaaaattaaataaaaataaatgaaaaataataagatatta

SEQ ID NO: 28256 - DNA, 426 bp, Glycine max
  Clone ID: LIB3051-040-Q1-K1-H7
caaatgtgctcaatgatgccttccccatttctcatgatggagagtttggaacaattaacaattttcgacttggaagacttcctaaaattcctgttgaatgggatgagataaatgctgcctggggccaagcttgcctccttcttcacactatgtgccagtatttccgaccgaagtttcaatatcgaataaagataattcctatgggtagctaccctcgaatcacagacaccaataacagtacttacgagctgtttggtccagtcaacttgttctggagtactcgctatgacaaagcaatgacattgtttttagcatgcctcaaggattttgcagactttgccaaatccaaggatcaagagaataacataccacctgagaaatgtttcaaactgccttacaagattgagaatgacaaggtggaaaact

SEQ ID NO: 28257 - DNA, 428 bp, Glycine max
  Clone ID: LIB3051-040-Q1-K1-H8
gcggccatctttcccaaaactgggcatagaagttttatctcacaaggctcaaaatcttcaacaataatttatcaggcagtatttcaccagagctaagtcaggcaaccaagttacatgtacttcacctgtcttcaaaccatctgacaggaggcattccagaagattttggtaatttgacctacttggtccatctttcttttaataacaataatctttctggaaaaggtcctattccaatagcatcattgcaagaacttgaaccttagaccttggagcaaattattttgctagcttaattccaaatcaacttggcaatttggtcaagttattgcatttgaatttgagccaaaataattttagggaaggtattccatccgagtttggtaaattaaagcatcttcaaagtcttgatcttagcagaaactttt

SEQ ID NO: 28258 - DNA, 310 bp, Glycine max
  Clone ID: LIB3051-041-Q1-K1-A10
cagagagcaacactggatattaagagagctgatggtaatgaggccatcattgctgaagaagcatatataggagtcgattggggagatggatgcccttttggtgctgctatagttcataatgatgaaatagtttctagttaccacaacatggttctgtgtaacacagacccaacttctcatgctgaggtgacatcaataagatatgcttgtaagaatcttaagcagatagaacttgcagattgtgaaatatatgctttttgagaaccttgccccatgtgcttaagagcaattcacctttcttgaataaata

SEQ ID NO: 28259 - DNA, 439 bp, Glycine max
  Clone ID: LIB3051-041-Q1-K1-A4
cccacgcgtccgcccacgcgtccgaatacaacgaatggatgagccattcgtgaccgtgaattcgggctccatattttacccacaactcaaagacctaccacgaaatccagcatcatccatcattacccacccattaaccaatcgaattaagactcaacagaaagcaccacccttttctatgtgggagcagtgaagggcgttcaacgccggcggcggagccataacctggttccccggccacatggccgccgctacacgtgccatccgccaccgtcttaaactcgctgacctcgtcatcgaagttcgcgacgctcgcattcccctctacttcgccaacgccgacctccagccacacctctccgctaaacgacgcgtcgtcgcactcaatagaaaagacctcgccaaccctaacatcatgcataaatggacgcattatttt

SEQ ID NO: 28260 - DNA, 425 bp, Glycine max
  Clone ID: LIB3051-041-Q1-K1-B12
gtgatgttcaagctttcagaaagatcagtctattcacgatagttaacccttcaatttgggggaaatttccatgtaaaatcaatgccagattttgaagtggtttttattttgcatgaatcttcaattgaattttatattacaaaaaccaaattgattacatacttgaaaataacccaaagaaaatgaattatgtcaaaaagatttggtaatcattacccaaaacacagtacaccatagaggagcatctgtaccgaagaacaagatcaagtatagctgtaaaggtggatggaaatggagggacacttctaagccaaacccaaatacaattgttggtgccatggttgccggtcctgacaagcatgatggcttccatgatgttcgtacaaactacaattacacagagccaacacttgctgaaaatgccg

SEQ ID NO: 28261 - DNA, 330 bp, Glycine max
  Clone ID: LIB3051-041-Q1-K1-B6
gccacgcgttctgccaagcgttcgcacatcgttacagatccgtttcaagtttcactggggacttcatctgttgatgaaactgctgatttgaggtaataccataccagaaactatgcttattctaaccgctgctgattgtgctaacaacctctcactattcagccagaatgctgaacgttttcggttggttcttgctagtggattggtggttagggcaacgaaaggatccactaaccagatgtcgctgatcggaatgatgattgaaccgatccaataggcgaagaacgagctcgcattgaatcccacctcaaggtatgctagactcgtgcg

SEQ ID NO: 28262 - DNA, 432 bp, Glycine max
  Clone ID: LIB3051-041-Q1-K1-C3
gaaaaaatgggcagattatagtgcctgttttttaccatgttgacccaacccatgtacgccatcaaacgggtagctatggacatgcttttgcaatgcacgaacaacgttttgttggcaacatgaacaaggttcaaacttggcggcttgtgctgggtgaagtagccaatatatctggctgggattgcttaaccacaagggtggagtctgaactagtagagaaaattgcaatggacatattacaaaagttggactctattacaagcgggggcctagaaagacgcatagcaacgtacaagcaaatggcacagcaaaagctagaaaagtcactgaagacgagtaacatgagagacatggaagacttgatcacgacactgctccaacttggggagctgaaattggagaaagccatgcgcactgatgattcgagcgttt

SEQ ID NO: 28263 - DNA, 405 bp, Glycine max
  Clone ID: LIB3051-041-Q1-K1-C7
cccacgcgtccggtagaattcacaaaggagtatgttcaacctggatgaagaatgctattcccttagaaaaaagtcccgactgtagctgggctcctatttttattaggccatcaaatttcaagctaccagttgatcattcaattcctattattatggttggacctggtactggtcttgcacctttcaggggatttttacaggaaagatttgccctcaaagaggctggtgttcaacaaggccctgcaatactcttctttggatgtaggaatcgtcgattggtaaattaattgatctttgtgctttagatccaaatgggttttcagagcaatttctgatttcccaatatgtttgtataggattttatttatgaggaggagctaaagaattttgtggaacaaggttctc

SEQ ID NO: 28264 - DNA, 347 bp, Glycine max
  Clone ID: LIB3051-041-Q1-K1-C8
gccagtggagagatctgggagaaggagctgaaggaggaggaggtgcaaggtttgatataataatttgcccaccaaagactcgccggccgcctggaaggcctaaaaagaaggttatacgagtggagaactttaagcgtcccaaaagagttgttcaatgtggtcgctgtcatatgttaggacattctcaaaagaaatgcacaatgcccatttgaaaaatttgtttacttgttgaaatatcttttgtttatgggacatatatgagatagaacgaatgttgtgtttgtattgtaatttaaatgtattctgaacaaaataagaatccattagtttttgccaaggttctcatc

SEQ ID NO: 28265 - DNA, 367 bp, Glycine max
  Clone ID: LIB3051-041-Q1-K1-D1
cccacgcgttcgaaaaaaagaaaaaaatttaaaattttaaaaaaaaaaagaaaaaaataatgtaaaggtaaaaaaaaaaagataaaagtaaaaaaaaaagaagaaaaaaataaaaaaggacaccatcttacaagacaaacgcttgagtggatgcacattaaagaataaggatcttaaagcagttcacgagataatgaaattggctcacaaagcgatagagactaatgatgtaatagtggatgtgaagctcaagatggctgtgtggaaccagtggatactcagcgtggtaagtaggattaggattcggattgctcgaaagaggaactacgatgaggatgcaaaggaagagcttaattgtaacgttact

SEQ ID NO: 28266 - DNA, 213 bp, Glycine max
  Clone ID: LIB3051-041-Q1-K1-D7
gtgctggtataactacaactttttagtctatgctctagatctcacgacaagggatttgggcctgtcttagatggctacaactgttattgttggcagcgattagcctcttagaagatctgatggtaatgcaactaacttcaactttcgggataaatcatgggcaccaagttctaacttgtacttgaaggcaaacatctcaagtttaagaagtcg

SEQ ID NO: 28267 - DNA, 193 bp, Glycine max
  Clone ID: LIB3051-041-Q1-K1-D8
aaaaaaaaaaaaaaaaaaaaataaaaaattaaaaaaaaaaaaaaaaaaaaaaaaaaaaaaagaaaaaaaaaaaaaaaaaaaagaaaaaaaaaaaaaaagaaaaaaaaaaaaaaaaaaaaaaaaagaaaaaaaaaaaaaaataatatagagaaaccaaaataaaataaaaatggaagaggtataaaaaaataaa

SEQ ID NO: 28268 - DNA, 428 bp, Glycine max
  Clone ID: LIB3051-041-Q1-K1-E6
gaaaatgggaggaagaaggaaagaaagggtatcatggattattcaacatctaaacgccgtcgtcggcataatttgtgtgtctgtagaatacaactcattccccttcgaaacttgaaataaacaaaaacccacacaacctgcgatcatcaacacaattaggttttcccctcaatggtcgccaattcccacagagtgggttcttcctacggtggcgctgccccttaccgatcaagagatgggcttagcccccgacccgttggtgcctcagaggagatccaattacgaattgatcccttggacttggacgatgagatcactggtcttcatcgccaagttagaagattgaaacatgtatgtatctgaagacctttttttcttaatttcttttttctatctattcactttgtacttgttatttctttgttttt

SEQ ID NO: 28269 - DNA, 340 bp, Glycine max
  Clone ID: LIB3051-041-Q1-K1-H7
gagagagagagagggggcaaggcaccggtaaaagtgccactaattgtgatgccgaatcccgaggctcaccacccctcccggtcccgggcccggccctccacgtcagccgcggcccgccccccggcccgggcccgcgtctccctccgccagcttctgcgcgtggcatcagtcgcgagcggcatccagttcgggtgggccttacagctctctctgctgacgccctacgttcagcagctggggatcccccaccaatgggccagcatcatctggctctgcggcccagtctccggcctcttcgtgcagcccctcgtcggccacatgagcgaccgctgcaccagcc

SEQ ID NO: 28270 - DNA, 257 bp, Glycine max
  Clone ID: LIB3051-042-Q1-K1-B10
cccactcttccaaaataaaaaaaaaaaataaaaaaaaaaaaaaaaaaaagaaaatttaaagaaaaataaaaaaaaaaaaaaaaaaaaaatataaaaaaaaaaaataaaaaaaaataataataatataaaaactaaaactacaaaatataaaacaacaattacattttataaattcaaattctatctactaaacatttcaaacatacataacttttctatacacataaacattatattatattacaatttttacatta

SEQ ID NO: 28271 - DNA, 317 bp, Glycine max
  Clone ID: LIB3051-042-Q1-K1-B4
ggtacagccccacttcacctgggtacagccccacttcacccgggtacagccccacctgtcctactgagagtcctagctctccgggatatagtcctacaagtccagcttattcgcccaccagtccatcctactctcccacatcaccgagctacagccccacatcacccttcttcagtcccacatcacccagctacagccctacctctcccagctatagcccaacttcaccagcttacagccccacttcacctgcttacagtcctacttcaccagcatatatcccctcatcttctttctatatttcgacttcaccttct

SEQ ID NO: 28272 - DNA, 433 bp, Glycine max
  unsure (1)..(433): unsure at all n locations
  Clone ID: LIB3051-042-Q1-K1-B9
caagacctgcaggtgtaggtcttgcaggtgtaactgcctgtccgttgcggaggattccggagtcgtagacgggagtgaaatcaggttggaagacctacacctacaagacctgcagctcctacaaaacctgcacctgcagtaggaggtcaaaaatggtgtgtgccaaaggcagatgctagcaaccaagctttgcaagcaaacataaactatgtgtgcagccaaggagttgattgtaggccaattcaaccaggaggagattgctttgcagccaacaacgttaaggctcttgccacttatgccatgaatgcctactaccaggccaatgggcgccatgatttcaactgtgacttctctcaaactggtgttattactactactaatccaagccatgataaatgcaaaatctgagcatgtntatttaaaggttataatc

SEQ ID NO: 28273 - DNA, 440 bp, Glycine max
  Clone ID: LIB3051-042-Q1-K1-C4
cttggaactgcaacaatggtgccgcaacccattttgcatctaacccttttgtcattaataatctctgtgaccactctttccttggtcgatgccgccgatcccacatttggcttcacccctcttggattatctagtagctcaaacttgcaaatccaaaagccttacgacgttgcagtcaacgagcgctacagcttttcaaatggagtgcacagattttgggtatactccacggacaagcctcatatgcaaggcagcaatacgaagccacgaactgagattcgtatcgctgtaagccccaactcgtagcttgcttaatcattgtctatgagaaatattagtaatacattcatgacccttatttttcagggtcttgctgattaatattcctaaaacacaacactatggtttttttttggattagatatatttttaatttccct

SEQ ID NO: 28274 - DNA, 278 bp, Glycine max
  Clone ID: LIB3051-042-Q1-K1-C8
aagagaacgttcatctcgttatggagctttgcgccggcggagaactctttgatcggggcgtctcgcgggggcactacagcgagcgtgcggcggcgtacgtggcgaggactattgctgaggttgttagaatgtgtcacgccaatggagttatgcatcgtgaccttaagccagagaattttctgtttgcgaataagaaggagaattctgttctcaaggctattgactttggactctccgtgttttttaagccaggggagagattttcggagattgtggtg

SEQ ID NO: 28275 - DNA, 243 bp, Glycine max
  Clone ID: LIB3051-042-Q1-K1-C9
aaaaaaaaaaaaaaaaaaaaaaaaaaaataaaaaaaaaaaaaaaaaaagaaaaaaaaaaagaaaaaaaaaaaaaaaaaaaaaaaaaaaaaaaaaaaaaaaaaaaaaaaaaaaaaaaaaaaaaaaaaaaaataaaaaaaaaaaaaaaaaaaaaaagggttttttctatattaaatatacatttttaaattattgccctaaatttaaattaattgcctttttttaaaaacctttaaatttataaa

SEQ ID NO: 28276 - DNA, 173 bp, Glycine max
  Clone ID: LIB3051-042-Q1-K1-E8
tcttcctaaaaaaaaaaaaaaaaaaaaaaaaaaaaaaaaaaaaaaaaaaaaaaaaaaaaaaaaaagaaaaaaaaaaaaaaaaaaaaaaaaaaaaaaaaaaaaaaaaaaaaaaaaaaaaaaaaaaaaaaaaaaaaaaaaaaaaaaaaaaaaaaaaaaaaaaaaaaaaataataa

SEQ ID NO: 28277 - DNA, 396 bp, Glycine max
  Clone ID: LIB3051-042-Q1-K1-F5
ggaatcaaggactcaattcctgcttggattaaatttgctgtacaggctcccggtgaaattccatacagcggaatatactatgatcccctagaagaggtaagattctagacttcttacatgtaggatacacttagaaaaagagatgacaaatctaaatatctctttttccattatgggatagaattgtatctatgacctctctttgtagtactcatcatgacagaacttttaatggtgatatgcaatgatgttgaaagttttgtagtttcttttaagccattggcacactctggctttattcttatattaggaagaaatattccccactcttttgcccaaagggataatggtatgatcgatgtatataagaagtgtatataagaagtgcgatatttt

SEQ ID NO: 28278 - DNA, 304 bp, Glycine max
  Clone ID: LIB3051-042-Q1-K1-F8
aaaaaaaaaaaaaaaaaaaaaaaaaaaaaaaaaaaaaaaaaaaaaaaaaaaaaaaaagggaaaaaaaaaaaaaaaaaaaaaaaaaaaaaaaaaaaaaaaaaaaaaaaaaaaaaaaaaaaaaaaaaaaaaaaaaaaaaaaaaaaaaaaaaaaaaaaaaacaacaaaaaaaaaaaaaaaaaccatgacataacaaaacaaaaatcaaaaaacaaaaaatccccttttcgaaagctgacaaaaaagctaagagaccctaacatatcgaccttacaaacagtagcgcaacccaaaaggcaaatggaac

SEQ ID NO: 28279 - DNA, 276 bp, Glycine max
  Clone ID: LIB3051-042-Q1-K1-G2
taaaaaaaaaaaaaaaaaaaaaaaaaaaaaaaaaaaaaaaaaaaaaaaaaaaaaaaaaagaaaaaactaggactataataaatcctaaacttacttacacatccttccaacaacataacaaatctttaaattacacctaaattaaataaactaccacgccattttacaacttcataacttctaaaacctcgtcgtctctcaacttattatcctttctgcaaatcatcctttttccatcttccttaataacaaataagccccctcctattacccttc

SEQ ID NO: 28280 - DNA, 285 bp, Glycine max
  Clone ID: LIB3051-042-Q1-K1-G5
taaaaaaaaaaaaaaaaaaaaaaaaaaaaaaaaaaaaaaaaaaaaaaaagaaaaaaaaggaaaaaataaaaaaaaaaaaaaaaaaaaaaaaaaaaaaaaaaaaaaaaaaaaaaaaaaacaaaaaaaaataaaataaaataaaacaattaaaataaattaaaaaaatctaaactaaaaaattaaaagaaacactaacataatataaatctaaatactaataataactttaaaacaacatacataaagaatattacataaaaataacacaaattatataaaaattaa

SEQ ID NO: 28281 - DNA, 126 bp, Glycine max
  Clone ID: LIB3051-042-Q1-K1-H3
gcagatattacatacacgtgaatcactaattaagccatggagaagaaatcaatatctgtgttgttcttcctcttccttgttctctttgttgctcaagaagttgtggtgcaaactgatgcaaatact

SEQ ID NO: 28282 - DNA, 354 bp, Glycine max
  Clone ID: LIB3051-043-Q1-K1-A6
cccacgcgtccgaaaaaaaaaaaaaaaaaaaaaaaaaaaaaaaaaaaaaaaaaaaggaaaaaaaaaaaaaaaaaaaaaaaaaaaaaaaaaaaaaaaaaaaaaaaaaaaaaaaaaaaaaaataaaagggggggcctttttaaaggatccaattttacttccccttgttttcaaatgtattagctttttttttgggtcacttaaattaatttaactggccgtggttttaaaaattcttgattggaaaaaccttggtgttaccaatttaaatccctttttagaaaattccctttttgccaattgggttaataccaaaaggccttccacaaattgcctttccaaaaatttggaaagct

SEQ ID NO: 28283 - DNA, 414 bp, Glycine max
  Clone ID: LIB3051-043-Q1-K1-B10
tatgatttgaatcagcaactgacgcctgaactttacgtttgaacctgaggtggaactttgcataattcgaccttggaggcatacttccatatgtctgtcagtcataaggaacttcatttagaaatgtgattttgcttaattgtagttatgtattatcggcttaataattacaattgtggcacaacttaaggagtattttgcacctgacattcgctcaaaaaaaaaaaaaaaaaaaaaaaaaaaaaaaaaaaaaaaaaaaaaaaaaaaaaaaaaaaaaaaaaaaaaaaaaaaaaaaaaaaaaaaaaaaaaaaaaaaaaaaaaaaaaaaaaaaaaaaaaagggggggcccttttaaaggacccaagtttaattccccgggcttggaacagtaaagctttttttaaggggcccctaa

SEQ ID NO: 28284 - DNA, 350 bp, Glycine max
  Clone ID: LIB3051-043-Q1-K1-B9
ggcagaagagatgaatttgttatcatcgccttccagtgccgcttctacttctctatcaccttgctgttttcttccttgctaccctcatcatggtttcacttctctctctctctctctctctctctctctctctctgacatgggtttctggtttggttagcagggttctcttctggtaccttcaaattctccaagaaagagagtagatgtataaagaaagctggaagtatcactgcaaagttcgagttgaagccaccaccctatccactgaattctttggagccaattatgagtgaagagacaatcgaataccattgggggaagcatcacaggacttatgtagaatatctg

SEQ ID NO: 28285 - DNA, 283 bp, Glycine max
  Clone ID: LIB3051-043-Q1-K1-D4
cccacgcgtccgatttatgtaatgttctacctgaaaaataataatataatctgttttagtattgttaaaaaaaaaaaaaaaaaaaaaaaaaaaaaaaaaaaaaaaaaaaaaaaaaaaaaaaaaaaataaaaacaaaaaaaaaacaaaaaaaaaaacaaaatcaaatagacacctaaaaacaaagaactggcacaaagcaataaaacgataacgaaatacaaaaccactgaagctaaccaacttaattgccttctacaacatacttgttttcgaaaatgtcaaa

SEQ ID NO: 28286 - DNA, 419 bp, Glycine max
  Clone ID: LIB3051-043-Q1-K1-E4
gaaaaagaaggatgcagagcaatctgcagcagagattgctatagagaagcttggcgatttgtacagaggccattgatcccactccacaggaagcacaagaaagtttagtatctcgaattgcctacatattttctgaaaagtttgttgtatgtgatcatccactcagtggtcacattcgagcaactttgttgaggaaaggtgatctttgtggttccattcctatttctgtcattgctttctatgatgcaaagcttttcagcttgtgtaaatgtattaatcctgaggtggagtcaaacccatttttagttatttcatacataatgaatgccactgcaaacttacaccagtttcttgctacttctgaacgacatctctggattagaaggctgagtccatatccacaagatattatagagtca

SEQ ID NO: 28287 - DNA, 342 bp, Glycine max
  Clone ID: LIB3051-043-Q1-K1-E7
cagattcggtccttccaatcatcccgagttctggtcaacttttctccattcggcggatttgatcattctgctcctgattctgctcagacaccgcacagagaacaaatccaccattcattatgctttttcgcaacagcgcactggctctaagatccttgccgatactgaagcacctactctagcggtggatcccggaccgatccatgacgtacatgcaccgaccgtgctatgggacactgcggtcggtgacactgatccgggtcgacaggatcgggccgatggtgactggcgcggagtaaccggtcatggaggccatgcacacgcccgtctacgtcaagaaga

SEQ ID NO: 28288 - DNA, 301 bp, Glycine max
  Clone ID: LIB3051-044-Q1-K1-A5
ctcacttcctcttggtgaccaagcagagcactgtgattctttgttttcggacggtgtaatgagttttttttttatccttgagagctttggtatagaagggatatagaaaaagataggagcagggagagggaggaggatagggacaggagacaagaaaaggaaagagataggagctgggatacagtgatggagagggataggagaagggaaaaggaaagagatagaagtagggacagaataagaggtggcaagagagataaagacccagagaatgaaagggatgataagcatcgggcaagag

SEQ ID NO: 28289 - DNA, 425 bp, Glycine max
  unsure (1)..(425): unsure at all n locations
  Clone ID: LIB3051-044-Q1-K1-C7
cgccgctgcctcatttctgttctgttctcgtcacagattgtggtgattctattaggcgttggctgggttcaattgatgagagacaattgtggggatgcttgtttctgtcaattggctctgttttctttgttgggtatttctctattgctgttctttgcaagcttttcccaccttcacacattcccctcatttctgcactgcaaaatgactggtactactgcttcttggtgccattgactctccctataattgtggttgctgtgtactttcattggctcagcatgaagctgttcaagcatgcttaattagcttaactttgccagattttgaaggcagaaagaaatacatgtatgctngtggagcaagcaacaactacctatgacaattgctgcactcctctctcctaatcacctcaaaaagagttc

SEQ ID NO: 28290 - DNA, 373 bp, Glycine max
  Clone ID: LIB3051-044-Q1-K1-D9
cccatcttccagggtccggtgatagctgctgcaaaatgaaccttcagtttgtagatcgtaattcaagtgttgttggaaaatcttttaaattaaccctacctgaagtgaccagtttcccagattttcttgttgaaagaaccaggtttgacgctgctatgcaaagaaattggacacgcagggataaatgcagggtttggtggaagaatgaggatagttcctctggtaattggtgggatggtcgaattctgtgcatgaaagccaagtcttctgaatttccagaccgtccattggaaaagtattccggtccgtaccaggagggacttaattgaaccacattggcttagtccttggaagctttttgatgctgatactg

SEQ ID NO: 28291 - DNA, 426 bp, Glycine max
  unsure (1)..(426): unsure at all n locations
  Clone ID: LIB3051-044-Q1-K1-E7
gcaacctggaacctcaactaggacactccttcctatggttatgttccagaacatgtcccaaggtcctcctagctcacttttgcaggttgctgtaaaaaacaaccaacagcctgtgtggtattttaatgataaattctcattccatgtactttttactgaggatggtagaatggaacgttccgctttcttagagacttggaggtcccttcctgattcaaacgaggtttccaaggacttcccagacattgtgattggcggtgtggaagcgacactggatcgactagctgcatcaaacgtgttctttattgcaaagcgcaagaatgcaaaccaggatgtgttntacttctcagctaagattcctcgagggataccattataaattgaacttaccacattggccggaaaccctggcgtcaaatgtgcaat

SEQ ID NO: 28292 - DNA, 227 bp, Glycine max
  Clone ID: LIB3051-044-Q1-K1-E9
attaatcctatgtctttttggtccaaaaaaaaaaaaaaaaaaaaaaaaaaaaaaaaaggaaaacaaacaatataataaaatccaaacttacatacacatgcatgcaactttataaaatattatataaagtaacctaaattaaatatgactgaccttttttatacaaccaacttactggaaaaaccttgccgttacctaacttaattttcttgcaatacatcttcatt

SEQ ID NO: 28293 - DNA, 284 bp, Glycine max
  Clone ID: LIB3051-044-Q1-K1-F5
cccacgcgtccgaaaaatgattctcaaattcagagactaaaacaccaattaaatcgttacttttttacctttcaaaaaaaatttaaaaaaagaataaaaaaaaaaaaaaaaaaaaaaaaaaaaaaaaaaaaaaaaaaaaaggaaaaaaaaaaaaaaaaaaaacaaaaagtataaaaaaaagaaaaataaagtataagtacttaaaaaatgacaactaaaaaaaaaaaactgaaccggaggataccaaaataaatactaggaaaaaccaggtagtatacaacgaa

SEQ ID NO: 28294 - DNA, 129 bp, Glycine max
  Clone ID: LIB3051-044-Q1-K1-G6
aaaaaaaaaaaaaaaaaaaaaaaaaaaaaaaaaaaaaaaaaaaaaaaaaaaggaaggaaaaaaaaggaaaaacgataataaaagatccaaactaaaaaaaacatacatacaaaagggtcggcctttttt

SEQ ID NO: 28295 - DNA, 278 bp, Glycine max
  Clone ID: LIB3051-044-Q1-K1-H10
aaaaaaaaaaaaaaaaaaaaaaaaaaaaaaaaaaaaaaaaaaaaaaaaaaaaaaaaaggtaaaaaaaaaaaaaaaaaataaaaataaaataaaaaaaaaaatataaaaaaaaaaaaaaaaaaaaataaattatatagaatcactaaataatgggactagtgttaataatttaacaattttaataatgttaaaactataacaattacttttttttagggcatactattattaatttctttccccagttttatacacatttatatttggaaaatcgttgt

SEQ ID NO: 28296 - DNA, 339 bp, Glycine max
  Clone ID: LIB3051-045-Q1-K1-D10
gtcatttcagaggaagcagttagctctgtatgaagatgatgaatttggattgtcagatgaacaagctctttctctcctagcttctaaggcgtgcagatctggtcaaggagagggtttagccaatgctgctgcaatacaaatacagacaaagtttcgtggttggacgaagagaaaagaattcttgattattcgccaaagaattgttaaaatccaggcccatgtaagaggtcaccaggtcaggaagcagtataaaccaatcatttggtctgtgggaatcctgcaaaaggttatattacgctggagacgcactggcagtggattacgtggatttcgaccagc

SEQ ID NO: 28297 - DNA, 318 bp, Glycine max
  Clone ID: LIB3051-045-Q1-K1-F10
gccaccttcgtggactctgagctgagcttgaactgagcttactaaggctggggctcgttacgatgtgaagttgttcgatgagacagctagtgggaagtctaatgggtaattgtcagagttcaggtttattgacccttctgctggcactgcttgataagaacggatgaatgggcatgtttttaatgggacgccgagtgttgttgcgtccgcatcgccttttacagttaagaaaatgctggaggctcagatcaatagcaatcagcagatgaacccttctgctgttcctcagggaatgctgacgcctgctgatgcacgggc

SEQ ID NO: 28298 - DNA, 431 bp, Glycine max
  unsure (1)..(431): unsure at all n locations
  Clone ID: LIB3051-045-Q1-K1-F7
gagacgatccttagcattatcacagctcccttaatttgattttctttttgcttgcaatgttttttgtataatcgttgttaggttaaaacttgacaagacgaaatgattatctaaattttcctaggcttatatattatgattgtaatgtaaggattacctgtggtttctttttaaatgttactgaccagactcaattgtcatgtgctatgcttttgtttctcagatactttaaggggcctgaacttctagttgatttgcaagactatgactactcattagacatgtggagccttggctgcatgtttgctggaatggtgtgaattataactataagttactggttatatatggcatactcttgacatttatgcagatggtctaaatttgagcgtacatgattaanaatgtaaaattctcgtcataatttgttc

SEQ ID NO: 28299 - DNA, 426 bp, Glycine max
  unsure (1)..(426): unsure at all n locations
  Clone ID: LIB3051-045-Q1-K1-G1
cacattctcagactctgcacacaccttagaagaacagagcagaaccaccagtgctttaggaagacggtttcagcaatggcgttcttaaataaaattggaaatctggtcaagaattctgctgtcaagcacatcagtcaagatttttcagtgtctaccccatcacttttccaagcaattagatccatgtcatctgcaaagctttttgtctgaggtattgcttacagcactgatgatatgagtttgcgagagtctttagctcgctatggagaagtaatagatgtcaaggtcattatggatcgtgaaactggcacgtcaagacgttttggcttcataactatngcaacatgtgatgatgcatcttctgccattcagggcatggatggtcaggatcttcatggtcgcaggatacgggtgaattatgctaca

SEQ ID NO: 28300 - DNA, 420 bp, Glycine max
  Clone ID: LIB3051-045-Q1-K1-G3
caagcattcgatactatgttatgcccatcagttgcaaggatccgtgcgttctacccatgaggtctgcggctatactaccgatcttcgctcatagtgctactccagatgcgtacccataattcacactttacatatgcgagatctcacccactgtggataatgagttgctgctctctgtgcttcaattatgtggaactattatagacctggaactggctgaggatttatcaactggaactgctacaagttttgcgttttatgagttcgagtctgcaaaaggggttctccgggccttgcgtctccttactaaactgaatattgatgggcaagaactgaaagtcaacgtgaatcaagctatgaaagacattctggagctgtatgttaagacaaaaactgagaacttgaagaacaaagaaactc

SEQ ID NO: 28301 - DNA, 415 bp, Glycine max
  unsure (1)..(415): unsure at all n locations
  Clone ID: LIB3051-045-Q1-K1-G5
cccacgcgtccggagagatggaagcaactggaaaattcaaaatgcaaaggaagaaactgttccagttggtgggcaaggcaaattcaaatcttgctgatgtgattctaaagcttggactatttgagagatcagatattgcttggaaagatgccaaatatgctcagatatgggaatatctcatggatgaatttgaattaactcagagatttgctagtcttgatttcaagttgaaatttgtggagcataacatccgttttctacaagaaattcttcaaaataggaaatctgatttcctagagtggctcattattgcattgattggtgctgaaattcttctgtctctctatgacattgntcatcggtctgccatgaaattttagcagcattntttctggtggcatgtaaggttagcatg

SEQ ID NO: 28302 - DNA, 327 bp, Glycine max
  unsure (1)..(327): unsure at all n locations
  Clone ID: LIB3051-045-Q1-K1-H5
ctaacttgtttatgagagctataagtcaccaccttctagtttcactactcgagtggagaatctctacctcacgatcccttttttctcttagaaccatcatgtcacaatctgatcattcctctgcttttaccacacccagattagttctcaagaaggttttggccaaatctcaacatgaaggggatggagctgttgttagaagaggcattggaaggagcgagttgaagaacttggatcccttcctaatgttggatcacttctcagtatctnccncagcaggatttccggatcatccacaccgaggttttgaaaccgtcacctacatgc

SEQ ID NO: 28303 - DNA, 286 bp, Glycine max
  Clone ID: LIB3051-045-Q1-K1-H9
aaaaaaaaaaaaaaaaaaaaaaaaaaaaaaaaaaaaaaaaaaaaaaaaaaaaaaaaaaaagaaaaaaaaaaaaaaaaaaaaaaaaaaaaaaaaaaaaaaaaaataaaaaaaaaaaaaaaaaaaaataaaaaaaaaaaaagtgcacccttttttaggttttcatttttaattacccttttttccaaaattttattttttttttagtttcccttaattcaatttaattgtccctttttttacacattttaatttggaaaaccttttgctttcccaattttaatccttt

SEQ ID NO: 28304 - DNA, 254 bp, Glycine max
  Clone ID: LIB3051-046-Q1-K1-B4
agcgtccgaacaacaacggcaaaccacgacaaaaacggagagactgattccgagaatcgggacggggcactatcactgttatggacccaaggtcaacttcggccggacgatccaggcggtcgacattatcatatgcgagaattcaactgttgtcggcacatctatgaaaagatcacgcatgtgtccctggacgagcttaaccacaactagaatctccgaatacaacaaaatggccaaacctagtccgattctga

SEQ ID NO: 28305 - DNA, 395 bp, Glycine max
  Clone ID: LIB3051-046-Q1-K1-C8
tggaaaactacagctaattgccgagaaagagacaaaaggagctgtttattgcttgaatgcatttaatggtaaattgcttgctgctattaatcaaaaaattcagctgtataagtgggtgctccgggatgatggtacccatgaattgcagtctgaatgtggacatcatgggcacatcctagcactttatgtgcaaactagaggagattttattgtagttggtgatctgatgaagtcgatttccttgttaatctacaaggtaaattttaaactgttgtgacactagtttctgtctggttttggtaaatttcaactgttgtgctgcttatcgttttggatgaataactgattttttgtatatataatgagtacaccatgttcttttggaatgataagtt

SEQ ID NO: 28306 - DNA, 346 bp, Glycine max
  Clone ID: LIB3051-046-Q1-K1-D2
catattcagtggacatgtggttgcattattgcatatttgctataagcacatatggggagccaaaggctgttcgtaggctttttgaacgaggattagcttatgttggaacagattatctttcttttcccctctgggataaatacattgaatatgagtacatgcagcaggactgggcctgccttgctgtgatctacaccagaatattagagaatccaaatcaacaattagatcggtatttcagcagcttcaaagagttagctggaaatcgtcctttatcagagttacgaactgctgatgaagctgctgcagtggcaggagttgcttcaaaggctactggccaagctac

SEQ ID NO: 28307 - DNA, 290 bp, Glycine max
  Clone ID: LIB3051-046-Q1-K1-E8
aaaaaaaaaaaaaaaaaaaaaaaaaaaaaaaaaaaaaaaaaaaaaaaaaaaggaaaaaaggaaaaaaaaaaaaaaaaaaaaaaaaaaaacaaaaaaaaaaaaaaaaaaaaaaaaaaaaaaaaaaaaacaaaaaaaaaaaaaggaagcgaaaaaaaaaaaccacataccacaagccagatacagcaccaattaacacatgaaaaaggacatagcatgaaaagaacggagataatccctaaaaaaaacgaacccagaaaaaaccaagcaaccccaaacaactagcagtagag

SEQ ID NO: 28308 - DNA, 426 bp, Glycine max
  Clone ID: LIB3051-046-Q1-K1-F12
cacagctagcagatattacatacacgtgaatcactaattaagccatggagaagaaatgggtagctgggttgagcttcctcttccttgttctctgtgttgctcaagaagttgaggtgcaaactgaggcatagacttgcaagaacctggctgatacatacaggggtacatgcttcaccattggcagctgcgatgatcactgcaagaacaaagagcacttgctcagaggcagatgcagggacgattttcgctgctggtgcaccaaaaactgttaaatggatccattcactccaacgtgaagaagatgcatgcagcgctattttataaaaaataaaactactatatactatatataataagactggcgctgcatcaatgacctatgtattatagtatatagtattaccgatgtcagaactatagatgcat

SEQ ID NO: 28309 - DNA, 428 bp, Glycine max
  Clone ID: LIB3051-046-Q1-K1-G6
gtaggaatgagcacatgttatcctcgaccaggttctgtaaagataattgatggtgagactttaactctagaatctaactatagcagcagccgtgagcacactggagtgatggggcttttctatctattggtggcagaacagcttccagaccaacacttcagacatacctctcgttcttcattctttatgaatataaatagtatatttcattgatagataactagtgaaatgctaatatatttggagtgtcatcgatggtatcaaagtatgtatgacggtcaaaagaaatataatgacagaacttagaagtataattggaaaaatatacttctcttgtcggcggcaatagacaacaaaggtaaaagccggcgaagagcatatttccaagtttgaggattggtgaaatggggtcataagtcaattggctt

SEQ ID NO: 28310 - DNA, 357 bp, Glycine max
  unsure (1)..(357): unsure at all n locations
  Clone ID: LIB3051-047-Q1-K1-A4
gttcacagacagggggcagcagtctggggaggtgctgcaagctttaatagacttatgcgatatgcacatcctcaggtaaaacttattgatttttcgcctggtgagaagtatttggtaacatatagcagccatgaaccaagcaatccccgagatgccaatagagttgtgataaatatatttgatgtgaggactggtaaagtgatgagggacttcaaagggagtgctgatgattttgcagttggaggtgctgggggtgtcactggagtttcatggcctgttttcaaatggagtggtggaagagatgatcaatactgtgcaaggatggngaaaaatatactctncgtttatgaggcatag

SEQ ID NO: 28311 - DNA, 233 bp, Glycine max
  unsure (1)..(233): unsure at all n locations
  Clone ID: LIB3051-047-Q1-K1-A8
ctgggatgcgttttcctagggttgtgtcaaaccagataattaagatagaagcttagttgtgcatatatagaaatcattgtttgagatagccccttaaaaaaaaaaaanaataaaaaaaaaaaaaataaataaaaaataaaatataaaaaattaaaaattataataaaaaataaaaaataataataaaataaataaatattttataaaaaaaaaaagggaagaatttttaaaag

SEQ ID NO: 28312 - DNA, 385 bp, Glycine max
  Clone ID: LIB3051-047-Q1-K1-A9
cccacgcgtccgaaaaaaaaaaaaataaaaaaaaaaaaaaaaaaaaaaaaaaaaaaaaagggaaaaaaggataaaatgtaaattgaaataaaaaaaaaaatgaataaaaactaaaaaataaaaaatataaatatgtaatatatatttgaccataataattatatatacctatctatagcaaaaacataactggcagtcatctacatggaccgaactgaaaagtcctttgttgaaggcaacttggattgtaactggtcataggaatcaatctttaagctttttgctgacttgaacattgcacaatttgaacctcatgttgatgttgcctttgcacctccctttctgtatgtcgatcaagtgtgaatactaatcagtgaacggattg

SEQ ID NO: 28313 - DNA, 388 bp, Glycine max
  Clone ID: LIB3051-047-Q1-K1-B12
aaaaaaaaaaaaaaaaaaaaaaaaaaaaaaaaaaaaaaaaaaaaaaaaaaaaaaaaaaaaaaaaaaaaggaaaaaaaaaaaaaaaaaaaaaaaaaaaaaaaaaaaaaaaaaaaaaaaaaaaaaaaaaaaaaaaaaagggccgccctttttaaaggtccaaagtttacttccccttctttccaatttaaaactttttttaaagggccccctaattaaatttaattgccctatttttaaaaacgtggtacttggaaaaaccttggctttaccaatttaaatccttttaaacaatatccccttttccccatttgccttattaccaaaaagccccgaacaattcgcctttcaaaaaatttcccaaccctaaatggcaaatggaacccccctt

SEQ ID NO: 28314 - DNA, 216 bp, Glycine max
  Clone ID: LIB3051-047-Q1-K1-C12
aaaaaaaaaaaaaaaaaaaaaaaaaaaaaaaaaaaaaaaaaaaaaaaaaaaaaaaaaaaaaaaaaaagaaaaaaaaaaaaaaaaaaaaaaaaaaaaaataaaaaaaaaaaaaaaaaaaaataaaaaaaattaaaaaaaacaacaaataaaaaaaaaaatagaataaaaaaaaattaaaaattaaaaaacttaataaactttaaacaaaattctaat

SEQ ID NO: 28315 - DNA, 224 bp, Glycine max
  Clone ID: LIB3051-047-Q1-K1-D10
taaaaaaaaaaaaaaaaaattaaaaaataaaaaaaaaaaaaaaaaaaaaataaaaaaaaggaaaaaggagaaaataaaaaaaaaaaaaaaaaaaaaataaaaatgtaaaacatttttatggatccaagctttccttccctttcatacaatttctttctttttttcttgtgccacctaaattaaatttattttccatcgttttaaaatcttaataccttgaaaac

SEQ ID NO: 28316 - DNA, 450 bp, Glycine max
  Clone ID: LIB3051-047-Q1-K1-E7
tgtttatgctagccgcgaatcgggttccgtttggaccttggcatcttggactattaggatttgtgcagttgattagccccaacccaacaatgaaatataagctcacatcaacatttgtgaagacattgatcttggaaaggcctctgatcccagctgtgtatgctgttgctgtggctgtgtcgttgaaagccggcaacactggcagaattggtctcgggagctgtccattttttttgctgcaggtggcggatttgtattctaggattgcagtggtggtggtgttgtcaaatgcagcattcatcgcggtttgatatgcgcgcgctgccatgtagtatcgcccgggggtttgatcagcagtgaccaggacattgattgtctgaccaggacctatcatgaggacattggtggtgaaaggcttggtgtaagcagcatcagtagcaacaacagtca

SEQ ID NO: 28317 - DNA, 204 bp, Glycine max
  Clone ID: LIB3051-047-Q1-K1-H2
acgggtaccttgagcttggcgttggctgattatgtgttgagagagagccatttcaaacatggatggggtcttctcagtgaagagaacatacaccaattaaccaacacctgatatgctgataccgtgcaaactcctttacttttttgaccaccataattgctgctaaaactaattctagctcgacaacagcaaacgtggtgactc

SEQ ID NO: 28318 - DNA, 364 bp, Glycine max
  Clone ID: LIB3051-047-Q1-K1-H7
gtccagtgggcctccctcattcaggctctcgcctccaacaaaacgggcccaccgggcgcacaccttcgtataaccgcattgtcccgcaccggctccggacgccgctccatcgccaccgtccaagaaaccgggcgccgcttagccgccttcgccgcctcccttggccaaccgttctccttccaccattgcaggttggagcccgacgaaacgtttaaaccttcgtcgcttaagctggttcgcggagaggctttggtttttaactgtatgctaaacttaccgcaccttagttaccgcgcgcccgaatcggttgcgtcgtttttgagcggagccaaagcgttgaagccgaggctggtgactttagtgg

SEQ ID NO: 28319 - DNA, 387 bp, Glycine max
  unsure (1)..(387): unsure at all n locations
  Clone ID: LIB3051-048-Q1-K1-A4
taccttccaacactggggtcctggttttggtccttcaatggcggaaccctaaccgggcttggctcttaaactttccatgggcctggcccgcccttgcctaaagcctcaattctttcaatcctcaatcttctctcttcttgaccctaaacttcgcctattcctcttttcaaccaaacccttacgcgccgtcatcgacatggcccgcaccgggaagttctttgctggtggcaactggaaatgtaacggaacaaaagactcaatcagcaaacttgatgctgacttgaacaatgcanaatttgaacctgaaggttgatgttgtcgttgcacctccctttctttaacattgatcaagtgaaaaacttaattaattgaccgaatggaatattt

SEQ ID NO: 28320 - DNA, 286 bp, Glycine max
  Clone ID: LIB3051-048-Q1-K1-B2
ctagagaaccactttttgccttcttcaaatccctctatgaaagcctttctgcttcaaagtagattgtttaagaatgattgtgtgaactacttgtcgctcattgaattattgttgtttgaatttcatgtcaatttgatactatatgtaatttagtaacctgggatattaggatatccccaaggaacaaagaatcctaggattttgtttccattttggccatttcagttaataattaaagaaactctattttttcttgttaaaaaaaaataaaaataacaaatataat

SEQ ID NO: 28321 - DNA, 267 bp, Glycine max
  Clone ID: LIB3051-048-Q1-K1-D10
aaaaaaaaaaaaaaaaaaaaaaaaaaaaaaaaaaaaaaaaaaaaaaaaaaaaaaaaaaaggaaaaaaaaaaaaaaaaaaaaaaaaaaaaaaaaaaaaaaaaaaaaaaaaaaaaaaaaaaaaaaaaaaaaaaaaaaaaaaaaaaaaaaaaaaaaaaaaaaaaaaaaaaaaaaaaaaaaaaaaaaaaaaaaaaaaaaaaaaaaaaaaaaaaaaaaaaaaaaaaagaataaaaaataagtaaaaatagcaaaagaaccaaaaaacaaaaa

SEQ ID NO: 28322 - DNA, 408 bp, Glycine max
  unsure (1)..(408): unsure at all n locations
  Clone ID: LIB3051-048-Q1-K1-D12
ataaatttatattacttttataacagagaaagacagaagtaagataagaagaaagagaaagtgtgagataagatgagtgtgatgaaaaagataaaaataaataaataaattgttgtatgaatttgttttatgaataggatatccttttgtttaaatataggatatgagatcatcaaattttaacaatatctcttcgattttgacaatttttccggattcaagaaacgttgacataacaactaccttttttatttattaataaaattataaagcaataggggtcttagtacctaggattctgaacagtgccatatgttccatccatccatttaggataatgtttgctaaaaggatctatcacctagtagatgtgtatattaattanttaatattaatgatgcgtgtgag

SEQ ID NO: 28323 - DNA, 297 bp, Glycine max
  Clone ID: LIB3051-048-Q1-K1-F2
cccacgcgtccgaaaaaaaaaaaaaaaaaaaaaaaaaaaaaaaaaaaaaaaaaaaaaaagaaaaaagaaaaaaaaaaaaaaaaaaaaaaaaaaaaaaaaaaaataaaaaaaaaaaaaaaaaaaaataaaaaaaaataaaaaaaaaaaaaaaaaataaaaaaaaaaaaaaaaaaaaaataaaaaaaaaataaaaaaaaaaaaaaaaaaataaaaaaaacaacacatactaaatatgaaaaaatgatgtaaatgataaaaaatgacaacaatactaccaataacaaaaataaagaataa

SEQ ID NO: 28324 - DNA, 388 bp, Glycine max
  Clone ID: LIB3051-048-Q1-K1-F5
ctttcttctatatccaatctgcaacacccagaaaccagtttctttttttccttgtcatttcaggttattcaccagtttgagttgttgaatctcctccactgcttcttctcctgatcctgttcagaatccaaggagcttgggaacaaactcctgctccttcttcaccctggtcataagttcatgtctttgtttcttcatttcattttaattaccagaggcaccacttctggtttattgataggcaatgggaggtgcactgggaaagattgaatcacccaaaaagggatcagtgccagaaactaagctcgaggctaaaatggttgaagcaatgctgcgtagggaatctcaaggaagttccgtgaaatcattcaacactataatcttgaaa

SEQ ID NO: 28325 - DNA, 403 bp, Glycine max
  Clone ID: LIB3051-048-Q1-K1-F7
aatagctaaaacattcatgtttaatgttatggcagccattaatcacaatgacaacacaggtttaacacgggacaaaagaagaaacatcagccataacagttaagcaaattctcgtgggcatccaagacttacttgaccagccaaatcctgctgaccctgcccagacagaaggctatcatctattcatccaggatgcagcagagtacaagagaagggtccgccagcaggcaaagcaatatccacctcttctctaaggttgcatcagctaaatttatgaactatttttactatggcagatgtttcttcttttgtcccgggttaaaactgtggtgtcattgtgattaatggctgccataacattaaacatgaatgttttagctattcatgcgcgctggtagatctg

SEQ ID NO: 28326 - DNA, 371 bp, Glycine max
  Clone ID: LIB3051-048-Q1-K1-F9
aaaaaaaaaaaaaaaaaaaaaaaaaaaaaaaaaaaaaaaaaaaaaaaaaaaaaaaaaaaggaaaaaaaaaaaaaaaaaaaaaaaaaaaaaaaaaaaaaaaaaaaaataaaaaaaaaaaaaaaaaaaaaaaaaaaaaaaacaataacaaaaaaacaaaaaaaaaaaaaaaaaatgaaaaaatgaataaaaacaaaaaacataaaaaaaagacaagaacaaaaaaaaatgatactgacaaaaaaaaagctaatttacatgtaggtggacaagtacaaagatgcaaattattaagcggatttaacaacagatgttcctgaagtataaaaacatagacatcatctggaaacacataaacatatgtgctccatgta

SEQ ID NO: 28327 - DNA, 300 bp, Glycine max
  Clone ID: LIB3051-048-Q1-K1-G12
aaaaaaaaaaaaaaaaaaaaaaaaaaaaagaaaaaaataaaagataaaaaaaagaaaaaggacgacatcctacatcgtggttcctatattataaaatcaaatatgctaaatacgggcggccgttatacaacatcgtaaatactttcactgtcctgcgattaacaacgttaagcttgttgcacctcatccttttgtcaactgatgtcgtattacacgaggatgtcttgaaacatcctggttaacaacagttggaggccgaatgccgattgatattgactacgtgttgcgcagcatgaatgg

SEQ ID NO: 28328 - DNA, 257 bp, Glycine max
  Clone ID: LIB3051-048-Q1-K1-H7
aaaaaaaaaaaaaaaaaaaaaaaaaaaaaaaaaaaaaaaaaaaaaaaaaaaaaaaaaaagggaaaaaaaaaaaaaaaaaaaaaaaaaaaaaaaaaaaaaaaaaaaaaaaaaaaaaaaaaaaaaaaaaaaaaaaaaaaaataaaataaaaaaaaaaaaaaaaaaaaaagaaaaaaaaaaaaaaaaaaaaaaaataaaaaaaaaataaaataaaataaaaaaaaaaattatatttggaaaaaaataattaatagagaaa

SEQ ID NO: 28329 - DNA, 449 bp, Glycine max
  Clone ID: LIB3051-049-Q1-K1-A12
ggcgaaggagagcaattagtgagggacatgttaacgacacacatgcagtgttgaatatggctgcaatgtggctcttccctcaactttgcttgggtggcatagctgaagcattcaatgcaataggccaaaatgagttctattacaccgagtttcctaagactatgtcgagcattgcttcttccctttttggactaggaatggctgtaggatacgtgttatcttctttggtattcagtgttgtggaaaaggttacttcaagagggggaaaagatggatgggtttcagataacattaacaagggtcgtttcgacaagtactactggctttttgccacactcagtgctgttaatgtactgtattatctagtatgcagttggatttatggaccaactgctgatcaagaatcaaaagtaactgaagaaaatggttccaatgaggaagaattgcca

SEQ ID NO: 28330 - DNA, 351 bp, Glycine max
  Clone ID: LIB3051-049-Q1-K1-A8
cggcgttaagctaaacgtaacggagggacgacggtttttggtgcaagcaaacgctcgtgaactcgccggcgtgctctccgccgggaataccaagcgcccctggctgacctggagccaccaccctgtcacccacccgcggctccggtcgggttgcccgttgatgagtgattacgggtgcaatgttccggcgccggatgctcacccggcgagtcagtttatgtcggagtggtttgatatccggggcgggtttccgggtccggatatgaggctatgttctcattcgggttgcgggcgacccgagacatggaagcacgagtttcgaaggtgttcggtttgcgggttggtgaatta

SEQ ID NO: 28331 - DNA, 287 bp, Glycine max
  unsure (1)..(287): unsure at all n locations
  Clone ID: LIB3051-049-Q1-K1-B2
tgcctcactcttcctctctctccccaccattttccccttcgttcaacccaagaatatcccatcaaccacccttcaaccaaccaagctcaaagtcccaacccaagcctcatccctcacacacctttctctcttcaccaccactcctgctgcttccaaaacctgcttcaaatccaccgtcttcgccaacccccttcacgcccctctctgcctcgctccccaccgtccccgcgacccttccaacgccgtcgtccttcgncgcgccgtcgtcgtctggttccgcaacgacc

SEQ ID NO: 28332 - DNA, 326 bp, Glycine max
  Clone ID: LIB3051-049-Q1-K1-C2
cgtaaactttctgattgtgattcaagactgcgacgacgatgcaagtgatagacactcggctgggcagaacatgtaactgaatacaatcgaactatggacccatacgtgactgaatcctatggagtcgctatcaaatactgagacgggattctaatggccgctgacatgggaggtacggatggatatacccttcggtacaagaatgatgagcgtattaagcctattggaaagcattatcttcttggtactagcggtgagataagtgactttcaggagattctgcgatacctagatgagcttatcatatatgacaacatgtgagatga

SEQ ID NO: 28333 - DNA, 415 bp, Glycine max
  Clone ID: LIB3051-049-Q1-K1-D3
tcgtccacgcgttcgtccacgcgttcgtccacgcgtacgattttagggcatattaatgggcggaaagtcacttctgggtggggagcaaggctttcctatggccatgagtggaattagctcaggtgatctttctaatgcttatagagtctaatatttttatatattgtaattataaatatgttaaattattaattaaatttttaatgtagttattatgaaaatcaacaaatatttattatatttataattaaacgaaaatgtaaatacgagtactgcatatactatttatttgtaattataaataaaacatgcatttctaatatatatgatcttctatatatgaatatgacatttgcttgtgcctatgttatatatagctttgtgcatttaccaatcaatttcagaggcttcaatg

SEQ ID NO: 28334 - DNA, 285 bp, Glycine max
  Clone ID: LIB3051-049-Q1-K1-D5
aaaaataaaaaaaaaatgtgacctacaatataaaaaaaaaactatagaacaagaggcaggataatgatatgagaaacttgaaaagaatgaagagctgaaagtataaacagcaacaattgtattgaacgtttgacaaggtctactcacacatataaggctaatctcttgactttcaaggctaagcatggttacttgatttaccatagttcaagtaccaaaaggtggtcgtattaaaccatttccaaagggtattgtatatagtcagcctaccaaccaatgtgttac

SEQ ID NO: 28335 - DNA, 333 bp, Glycine max
  Clone ID: LIB3051-049-Q1-K1-D7
ataaaacactcatactcacacaaacacttaaacatcatcaatatcgtatattcttgttgtgttgtttaagttgtaaaagaatgtctggggtttgggttttcaagaacggtgtggtgaggctggtggagaaccctgggggtgaggcagtggaaggaagccgtggaggaagaaggaaggtgcttgttcatagagcaagctacgaggttatcacctcttatgcggtgttagagcgaaaactgtattcacttgtgtgggagcgttactatgacgaccctgatcttcttcaatttcactaacgctacaccgtgcaccttatttccctaccaagagact

SEQ ID NO: 28336 - DNA, 391 bp, Glycine max
  Clone ID: LIB3051-049-Q1-K1-D8
ctttcaactaaataatatctgtgtcataagaaagcatgaagtttcgcacattcgagtggcgttgtataactcgtatatgattgactggagtgcgggtgctcaagaactgcgtggctaggcttatggagatccatcgtggtgactcatcgaaggcgaagctcgtgactaatatcgaaggtgcttgatcataccatgtgctgctcaggaataacctattatgcactgtttgagcgtaaactgtattcacttgagtgggaacgtctctatgactactgtgatcttctgcagttgcacaaactctcatccgcgcaccttattttcctatcaagagactattgcaagttcaagcccatgctcatgtatgacatagtggtgaaaaacatgtacgctt

SEQ ID NO: 28337 - DNA, 230 bp, Glycine max
  Clone ID: LIB3051-049-Q1-K1-D9
aaaaaaaaaaaaaaaaaaaaaaaaaaaattaaaaaaaaaaaaaaaaaaaaaaaaaaaaaaaaaaaatttaaaaaaaaaaaaaaaaaaaaaaaaaaaaaaaaataaaaaacaaccattttaaaaaatccaaattttcatccccctccttcctacctcatacctctttttatattttcacctaaattcatttaattgcccttcattttacaccctttttacttgaaaaaccc

SEQ ID NO: 28338 - DNA, 383 bp, Glycine max
  Clone ID: LIB3051-049-Q1-K1-E6
tcgctgaattttatgtatagtaataccttgagcattacttcaccacctgctttattggatgggttgatggctgctgacaaattcgaagttgcttcctgtatgagatactgtagccgattattgcggaatatacctatgacacctgagtctgcattgctttaccttgagcttccttctagtgtcttaatggctgatgcagttcaaccattgactgacgcagcaaagcagtatcttgccagtcgatacaaagatataacaaatttcacatatgaccaggttccaggaagaggttatgggcttgcctctagctggaatagaagcaatattgtctagtgatgaactccaggttgcatcagaggatgctgtatatgactttgtgttga

SEQ ID NO: 28339 - DNA, 328 bp, Glycine max
  Clone ID: LIB3051-049-Q1-K1-F5
cccactcgtacgttcactcgttcgaacataaataatgggtgcccttagatcacattggggaatggtgaaggctaaggccagctaatggctacaccaaatccaacactggaactttacactgccttcatattgacagagatccaaccactgtagctcgataaattgcttgtacctatcctggtctcaatgcttttcatgttaatacatcgggggactctaccaatgattctctttcaagtggatcacacctcaatcatcttcaccctgagcatgctgcccctgacgattcgaatctgcatgctgatgatcctcacaatattcatatggg

SEQ ID NO: 28340 - DNA, 242 bp, Glycine max
  Clone ID: LIB3051-049-Q1-K1-H5
aaaaaaaaaaaaaaaaaaaaaaaaaaaaaaaaaaaaaaaaaaaaaaaaaaaaaaaaaggaaaaaaaaaaaaaaaaaaaaaaaaaaaaaaaaaaaaaaaaaaaaaaaaaaaaaaaaaaaaaaaaaaaaaaaaaaaaataaaaaaaatataaaaatataaaaaaaaatagaaaaaaataataataataaaatgaattcataaaaattaaaagaaaataaatattaacataataattatatgaaa

SEQ ID NO: 28341 - DNA, 376 bp, Glycine max
  Clone ID: LIB3051-049-Q1-K1-H7
gcaacacgaacgagttaactgccgatggtactagcactgcaataatttagcctggtgggatgattaagtctggactactaacattcgctattactgctaatcctatttctttgaagaaggggatggattgaactgcaaaggatctgttaaagtactcgaatgatagaaatgtacctgactaaagaactgagcatattcgagctctatgctcaatttctgctggaaacgacgattatgtaccgtaactctgattgcatgaagcatattgacgactagtgtgtcagatgggcagatatctaatgagtcttaaccatcattggaatcctgtgatgtaattgctgtagggatgaatgtatacataacgctttgaggacag

SEQ ID NO: 28342 - DNA, 414 bp, Glycine max
  Clone ID: LIB3051-050-Q1-K1-A3
cagattattgagaagaatatcctgcgcacccagacactcttgtgtgatctggtgatgcgagatgcacccctgggaattgtgtcagagagccccaatataatggatcttgtgaaatgtgatggagctgccctcatatataagaacaaggtatggagattaggagtaacaccaagtgaatcccagataagagagatagctttttggttgtctgagtaccatatggattccacaggcttcagtacagatagcttgtctgatgcagggttcccatcggctctttctctgggtgatgttgtttgtggaatggcagcagttagagtaactgcaaaagacgtagtattttggtttcggtcacacactgctgcagaaatccgatggggtggtgcaaagcatgaagctggagaaaaagatgat

SEQ ID NO: 28343 - DNA, 397 bp, Glycine max
  Clone ID: LIB3051-050-Q1-K1-A5
cggacgcgtggggcaaccaccatgccttcccgaagaagaactctcttgaaggtcatcattctcggtgacagtggggtggggaagacatctttgatgaaccaatatgtgaataagaagtttagtaatcagtacaaggcaaccattggagcggattttttaaccaaagaagtgcaattcgaagataggcttttcaccttacagatttgggatacagctggccaagaaagattccaaagccttggagttgctttctatcgtggtgctgattgttgtgttcttgtatatgatgttaattcgatgaaatcatttgacaaccttaataactggagggaggaaattctgattcaagaaacaaaatagatattgatggtggggacagcagagtggtgtcagaaaa

SEQ ID NO: 28344 - DNA, 308 bp, Glycine max
  Clone ID: LIB3051-050-Q1-K1-B5
cggacgcgtgggaaaaaaaaataatttaaaaaaaaaaaaaaaaaaaaaaaaaaaaaaaaaaaaaaaaaaaaaaaaaaaaaaaaaaaaaaaaaaaaaaaaaaaaaaaaaaaaaaaaaaaaaaaaaaaaaataataaaaaaataataattaaaaaaataaattttaaaaaaaaataataaaattaaaaataaaaaataaaaaaaataaaaaaaaaaaaattaaaaaaaaattagaaatttagtaaaaatgatttggtttttaatatatttggttttttaaaatttttggttttttatagggggatttaat

SEQ ID NO: 28345 - DNA, 420 bp, Glycine max
  unsure (1)..(420): unsure at all n locations
  Clone ID: LIB3051-050-Q1-K1-C11
ggtttttggcatgtcattgagtcttttccctagcttgtagctcatgcttggggttctgtctggtccttcgctcttggagttttggcattggaccaannnttttttctttgccccgaagtcttccttcgcttggcttggtcaaccaaaaggaaagggatgcttcgaaggctaaaaaaggtgcttccaaaagattgggcgggacgggaggatgtgtcgggccgagatggcgttgctggttgaagggtcttcgggattgggggtgatacatctatagaagagtacataattggccctgctgacaaggtggctgatggtcatgaacatgcaacagagaaagataaaattcgattatatggatcccaagcaggcctctcttggttagcaaaacctgtcactggacagagttctattggccttgca

SEQ ID NO: 28346 - DNA, 394 bp, Glycine max
  Clone ID: LIB3051-050-Q1-K1-C12
gttctagatcgcgagcggccctttttttttttttttaacaaaaatatataaacgcatgaaagtaaaacatgttttaagtacaaaacatttgcaatacgagaaacgattacattaaaaagtaatcacgagtcactattaggggtggaaatgagctaagtcaagctaagctttactagatttgaactgaatatgtaaagcttgaacttgacacaaggcttggctcgacttacataaaagcctgacttggctcacaagcctatttaaaagcttgcttaaagacgtctttgattaattaattattttaaaacctagtgaaatactaactaaaaaaagaaacctataaaattttgtataagtcatgtacaaatccaaaaaattattggttaaccaaaat

SEQ ID NO: 28347 - DNA, 397 bp, Glycine max
  Clone ID: LIB3051-050-Q1-K1-C6
tttctctatataagtttgttctttcattttcaaaattttatcacatgctaacattattgttttcaatgtttcagaattgttttacaaaaatattggaggagtgtcttataaggctgatgtctatagctttggaatgcttttgatggaaatggcgagtaggagaaggaactcaaatcctcatgcagaacattcaagccaacattacttccccttttggatttatgatcaatttaaagaagagaaaaatattaacatgaacgatgcttctgaagaggacaacattctatctaaaaagatgttcatggttgcactttggtgtattcagttaaatccaagtgatcgtccttcaatgagtagggtagtggagatgcttgaagggaagattgaaagccttgaa

SEQ ID NO: 28348 - DNA, 407 bp, Glycine max
  Clone ID: LIB3051-050-Q1-K1-C7
ctcagtctagtattttcatacatgaaagattttctgcttctaggaaagtggttgaaagagagtacaaacttttgaatctgctggatttcactagcaaaagaaagcgtatgtcagtgattgtgcgtgatgaggagggcagtctttttcttttttgcaaaggggctgacagtatcatatttgatcgattgtcaaagaatggaaaacattatttggaggctactaccagacatctaaatgaatatggagaagctggtttgagaacactagccctggcttatagaaagcttgatgagcaagaatacactgcttggaacaatgaatttcagaaagccaaagctgctgttggggctgacagagattcaatgcttgagcgggtatcagatatgatggagaaagggttgattctt

SEQ ID NO: 28349 - DNA, 293 bp, Glycine max
  Clone ID: LIB3051-050-Q1-K1-D6
ggtgtaccagagtccaacattatatttctcaatctcgtatcagcacctcaaggtgtgcatgtggtctgtaaaagatttccaagaataaaaatcctgacatctgagattgagattggtttgaatgaagatttccgtgtcatacctggcatgggtgagtttggggaccggtactttggaacagataatgatgaccagcaggtggtacccccttcacagtagttatacttgggaggaaattcacaatattttatggttcgtcatcattaatgagacctttactgccgaagggggaa

SEQ ID NO: 28350 - DNA, 373 bp, Glycine max
  Clone ID: LIB3051-050-Q1-K1-E6
cttgcttccacgaaacaaccgaagacaatgtcataagacttgtaacgggggttgggatacaagttctgtgcagctatgtgacattgccatatgctctagtcacacagatgggttcaaccatgaggcccaccatcttcaatcagagagtagcatcagctctgaagaactggcacaacactgccaagaagcatgtaaaaaacagtaagcacaccacaccattctcaagcaggccatcaacccctcaatatggtatgtctccaactcatctgctacacaaacaccttgctggaagaagtgagagtgcacaaacttctccaagaacatccaactatgaaaatgaacagtggggtgttgaaggatcaccttccccgag

SEQ ID NO: 28351 - DNA, 410 bp, Glycine max
  Clone ID: LIB3051-050-Q1-K1-F11
aaagaattgaagcttgtgagatatttggaggtcttaccggaaaactaaaaattctaagtataatagttaaaaaaattgaaaaatcactaaccaacccaatatatgaattggcagattttatgtggataacatccctattagggtatacaagaataaaagcgatattggagtcggatacccaacaaagccaatgcaaatacaagcatctttatgggatggagatagttgggcaacaaatggtggcaaaaccaaaactgattggagcttatgcaccattcagagcaagtttccaaggctttgaagttagtggttgtcaagttccaacctcaaatattagccaaaattgttcttctgataagtactggtggaatacgcagaatttttggcggttggattctgtacgacaaaga

SEQ ID NO: 28352 - DNA, 314 bp, Glycine max
  Clone ID: LIB3051-050-Q1-K1-F4
caagttcttaaaagggttcaatgccgtttccaagaaattggattaaggaaccaggcgaggggccaatgaatcctgtgggaggtttaaaacaggtggttctttctgggcttaaaagaaagggattggattattcccaggaaaatgttgaaggcccatttagaccggccaaaagccagggattattagtggaattaggtttggagtattaatccttgggctggattcaagttatgccaccaagttttaatcttgaacctgaatggtccagggttggaaaggcacctttaccggaggttttccggtcctttttggtt

SEQ ID NO: 28353 - DNA, 400 bp, Glycine max
  unsure (1)..(400): unsure at all n locations
  Clone ID: LIB3051-050-Q1-K1-H1
nccacgcgtccgcccacgcgtccgtacgatcctttgcaacaaccaaccaccaatcatttcaatgggggcaacaagttacctggtgaccattgtggtgattctggttttgaccaaagggtcctaactgctcccataaaatctgctgttgacaagttccagcttattcctgagttcctcaaggttaggggattggtgaagcaacatttggattcctttaactattttgtgaggacagatttaaagaaaatcgttcgtgctaacaatcttatcatggcgagtaggtacccacacatatatctaaggtttttaaatgtcggaattggtaaaccatccatgatgattgatgaggttactgagggccttactccacanacgtgccgcttaagtgacctgacgtatg

SEQ ID NO: 28354 - DNA, 277 bp, Glycine max
  Clone ID: LIB3051-051-Q1-K1-B2
cccacgcgtccgaaaaaaaaaaaaaaataaataaaaaaaaaaaaaaaaaaaaaaggccggctggtataaaaaaaggcaaggctgatctagaggatcaagccatacatacgctatcatgtaacgtcatatcaattcaatggactgacctaaattaaatatcgtggcgagtgataaacaccttacggaacggaaaaaccttgccttgcaccacattaatctcttgtcagctgataccatattggccaggtcccataatatcgaacaggccaacaccaat

SEQ ID NO: 28355 - DNA, 332 bp, Glycine max
  Clone ID: LIB3051-051-Q1-K1-C12
gccacgcgtccgctggtccctacaacttcacttaacttctccctctatatgtgtctgttaatacacaccaaaacattcattcattggtattattcatacaacaaatcaaaaaatgttacccaacaatacttgcactattgttcccgacgcgggggcccggcaccacacccacgtggtgtccccgcagcaatgctgatccgccgtggtccaagagatcgccagcccggtcttcaacggatggtccgaagtgcggggctttgacaacccgcaaggctacaagcactttgctaaaaagctgtcacgtgattctcggcgactgcgacatcaggacc

SEQ ID NO: 28356 - DNA, 281 bp, Glycine max
  Clone ID: LIB3051-051-Q1-K1-E10
cccacgcgtccgaaaaaaaaaaaaattaaaaaaaaaaaaaaaaaaaaaaaaaaaaaaggaaaaaaaaaaaaaaaaaaaaaaaaaaaaaaaaaaaaaaaaaaaaaaaaaaaaaaaaaaaaaaaaaaaaaaaaaaaaaaaaaaaaaaaaaaaaaaaaaaaaaagggggagctttttaaaaaattcaattttaactaactttttattgattgataattgttttaataatggagcatctaaatcattttaattggacgttttttaaaatttttgaaattggaaaa

SEQ ID NO: 28357 - DNA, 369 bp, Glycine max
  Clone ID: LIB3051-051-Q1-K1-F12
atttgcatcccagacaaagaagatgaatcggggccaatcatacttcattaggattcttggggtcttaactctagttaatcagttcttgattatattaaaagctatttgattgaagaaaataactacatggatcgagaagacattgcttcagatgtttcaattgctgataaaatatggaaacgccttcctagttgaatccaatctcacaatattcaagatcaccaacataagagttactatgactgaggtcgttctgtattgtacttcattgaacgattaatggaagaagcaatccagagactgagaatgaaagagttatatattgtcggaaagcgatggttcaaacccttagaagtgcacaatttgaga

SEQ ID NO: 28358 - DNA, 376 bp, Glycine max
  unsure (1)..(376): unsure at all n locations
  Clone ID: LIB3051-051-Q1-K1-F4
attattttcagggtttgtgggtgaactttgcaaaggatcagttattttgtcttctaggacccaatggagctggaaaaactacagctattaattgcttgacaggggtaactccagtaactgatggagatgcgttgatttatgggcattcaatcagaagttctactggcatgtcaaacattcgaaagcttataggagtctgtccacagtttgatatcctatgggatgcactgtctggtcaggaacacctncaactctttgctactattaaaggcctgtccccagcttccataaaatcaattacccagacttcattagcagaggtaagactcacggatgcagccaaagtgagagctggaagttacagcggaggaatgaa

SEQ ID NO: 28359 - DNA, 168 bp, Glycine max
  Clone ID: LIB3051-051-Q1-K1-H10
cttcatgaccataatcgactactgtttaaatctgaaaaaaaaaaaaaaaaagaaaagggaaaaaaaaaaaaaaaaaaaaaaaaaaaaaagaaaaaaaaaaaaaaaaaaaaaaaaaaaaaaaaataaagcatgctgtggattaatttttacgtactctcgcttatagct

SEQ ID NO: 28360 - DNA, 381 bp, Glycine max
  unsure (1)..(381): unsure at all n locations
  Clone ID: LIB3051-051-Q1-K1-H3
ctttttagagagtcatctataagagctttggtttgtgggtattatattccaacaaagggctggatatttggcaaatgttgggctattggtagggaccccaatcactgggagaaccttcttgagtttaggccagagagggtttgttgaaaaatgggaagagtcaattggatgttaggggacaacattatcatctacttncgttcggtagtggaagaagagcatgtcctggtacttctttggcattgcaagttgtgcatgtgaatttggcagttctaattcagtgtttccaatggaaggttgactgtgacaatggcaaggtgaacatggaagaaaaggctggcatcactcttccgagggctcaccccataatttgggtcccta

SEQ ID NO: 28361 - DNA, 278 bp, Glycine max
  Clone ID: LIB3051-052-Q1-K1-A10
ggggaacaaccgcttccttatccaaatgcatttcacaccaaggcctcaaccaacgggccctggttaaagtccatgcggacgctctactaaccgggagtctctgacccgaagagcgaaccataatggaagagtaaattaccggaaaccgaataaccgtttttacgtgaaagcctccgccaaagagagtgcctgtgacctgcattcccgctctgcgatgcaggccggcattgacaagcgcggctactctgattggcatactcatgagcccagagggagtg

SEQ ID NO: 28362 - DNA, 290 bp, Glycine max
  Clone ID: LIB3051-053-Q1-K2-A12
attatgcgtgcgcccatgcgtccgtgctttgaatactcacacagtgagacacttgaacgtgagacctctgctgtgtaccgtccacggatgcttcagatcctgcactgatcgtcctttggctggtgtgctgtgcatgattgtggagttagaactgacgatattcactagtctcacagatgcattcttagagattcacaaggctcttgattacatgctgaaaggtgtgtctatcatatgcatcattcgcatggctgtgataatctctatgagaccagtgctgacatgacatg

SEQ ID NO: 28363 - DNA, 352 bp, Glycine max
  unsure (1)..(352): unsure at all n locations
  Clone ID: LIB3051-053-Q1-K2-C1
cacaaactcagcgtgctaaaagaatctcgttctcgcggtctcaaggaaccctagatcggatcatgtctggagcgtacggtcaagacggcggcggttccgcgccaccgtcttatggagccagcggcggatacggttccaccggcggtggtgccggtggaggtggtagttatggtggcggaggctatggaggaggaggaggtggtggcggatatggtggtagtgatggcggnggaggtggaagttacggagccaaaggcagcggaaacggctgcggatatggtggtaacgatggtggaggttatggcggaagaagcggctacagtggaaaccgtggcggaggctatggaggaag

SEQ ID NO: 28364 - DNA, 258 bp, Glycine max
  Clone ID: LIB3051-053-Q1-K2-C9
cacccgtgggcccacgccttcggatctttcttttttcatctgttgtgcaattctagccatattcgaccgggttaacccctttctatattgcaccataggatttgtcaagaagagaatatgatgggaaagtcctggatgtttgttcttgttgggtgaccttatatgtaaagtcctttggagcatattcttttgaagacccagaagatccacgatacttcataactacacttcatctaattcttaatggacacatattca

SEQ ID NO: 28365 - DNA, 391 bp, Glycine max
  Clone ID: LIB3051-053-Q1-K2-D5
acgaccacattataattaatattacatacattatgctgcttggctgagcaaggtactacttgtacatgttgatgggtatgtggcaaccattgtaacaatggtaatcataatggtgcctaaaaacgtgtgtgctcaaaccatcggatcttacatctgaacacaagactatttaaacagcataatctggcaggctgactatggttgtgcatgtaagaaattctactcacgagatgcttgacttaatgcatagaataactacaatgagttagattggctaggtaatcaagatgacttcaagcgtgatgaagcagctgatttcgaccattttagccatgaaacaagacatgtctgctacatagcagagattcacggtgcatcaggcgactactgt

SEQ ID NO: 28366 - DNA, 390 bp, Glycine max
  Clone ID: LIB3051-053-Q1-K2-E4
cggacgcgtgggcgcgcacttcctcgagcacatgatcttcaagggcaccgcgaagcgcaccgtcagggagctcgaggaggagatcgagaacatgggaggccacctcaacgcgtacacgtcgagggagcagacaacgtattacgctaaggtcacggagaaggatgttcctaaagcgcttgatattttggctgatatattgcagaattcgaagtttgatgaaaaaaggattagccgcgagcgtgacgtgattcttaaagaaatggaagaggttgaggggcaaatggaggaagtaatttttgaccatttacatgcaactgctttccagtacactccacttggtagaacaattcttggtcctgctcagaatattatgaccatcacttaagatca

SEQ ID NO: 28367 - DNA, 346 bp, Glycine max
  Clone ID: LIB3051-053-Q1-K2-E5
acggttagcagtcactgctctgattaaccgattctggacgtatagatcacaaccaagtattggactctatcattggcacacatggcagctcaaatgagcaagatcagaaagtttgtcgcggtcagattgttcactgccgagctgtactaggatctgacacatgaattgtcagcagacgtacactgcggcgtctatattagggttaccacgatgcgcaccaaaatcatgataagagccaacatatcacaaaccggtctaggtgagaagggaaggtgaattagggaacttaccttactggttcataagaggttcataatccacctaaacaacatactgctatatgctc

SEQ ID NO: 28368 - DNA, 414 bp, Glycine max
  Clone ID: LIB3051-053-Q1-K2-E8
tctagatcgcgagcggctgccctttattttttttaatttcaccttttatactctaccttagttatcttttattatatatctataacattttattccacctaaactcttacacatctatttagcatacaacttattacactaaattcacatataaagatattcctaatgcgcttgatattttttctaatatattccataattctaaattttattaataaacgattatcctctatctttacattattcttatataaatttaataaatttatttgcaaatttattaattaattttttaccatttacattcaactgcttttcaatacactccactttttataacaattatttttccttctcataatattattacaatcactataaatcatctacaaaactacattcatacacactata

SEQ ID NO: 28369 - DNA, 283 bp, Glycine max
  Clone ID: LIB3051-053-Q1-K2-F5
acgtatacttgtaccttttgaaggctaaaagtgcttcaatacaaacactggctaactgctcaggatgatgtgaatctcttgagtattgcagtaagcccctatgtatgcaatgtccaaatggcccatatgttgaagggacgtgaatccagatatgtggaagaaaatgtgagcaagcagagtgatttgcttctcaaatacaacgctgttcacaagactgtttcagagtttgaacacaatgagcatgacataacatagtctgttgtaattgctgaatacatatatg

SEQ ID NO: 28370 - DNA, 417 bp, Glycine max
  Clone ID: LIB3051-053-Q1-K2-F7
tatacgcgactccactggcagcacaagctgcatactacgctcaaacatcaacacctcggggatatctcatcactgaaggcaccgtgatatatccaacttcttccaggtttcatcatgttcctagaatatactcagatgaacacgtataggcatggagaaatgtagcggacaccgtgcatgccaactgcagatctatcttctgtcaactatggcatcattgccgggcatcacatacaatgtatcagcctggtctagctctaccctcttattccatcatcaaacacatatgatacaagtggtaaaacctcatgctccatagctaacatcgcatgtatccagcacctccagcacttaccacttttgagatatctgaaatagtgcatcattatcgccaagcaactattaatgcaattctag

SEQ ID NO: 28371 - DNA, 377 bp, Glycine max
  Clone ID: LIB3051-053-Q1-K2-G7
acgggccagtaaaggcgtaaacatataggctgagatcagagagtacagatatggttgcaaaggtggagctctcacagaaggcgtgaagcacagctctgtgaatccgtgtgactatgtggacatctttgatgcagatttacaacctgaccctaacttactttggcgcaccataccataccttgcttacaacccataagtgagcactagtccaagctcgatggaaattgactaatgctgatacaatgcttaatgaccagaatgcaagagatgtcattggattatcatttccttgtggagcatgacgtttgttcctcaagctatgccttctttagtttcaatggcacatctggtgagtggagaatatgagcattatatga

SEQ ID NO: 28372 - DNA, 423 bp, Glycine max
  unsure (1)..(423): unsure at all n locations
  Clone ID: LIB3051-053-Q1-K2-H1
cccacgcgtccgacgtcgcaacgcaaagcaaattgttgtccatttttgaaacagagaaacaaaagggaaaaaaaaaactcttccaaagtagaggcagagaatctgaaagctagggtttgggatgccgaagaacaagggaaagggaggaaagaaccggaagcgcggtaagaacgaggcggacgacgagaagcgggagctggtattcaaggaggacggacaggaatacgcgcaggttctccgaatgctcggaaacggtcgctgcgaagcgatgtgcatcgacggcaccaagcgcctctgccacatccgcggcaagatgcacaagaaggtctggatcgccgncggcgacatcatcctcgtcggccttcgcgactaccaggacgacaagggctgacgtcatcctcaagtacatgcccgatgaggccc

SEQ ID NO: 28373 - DNA, 409 bp, Glycine max
  unsure (1)..(409): unsure at all n locations
  Clone ID: LIB3051-054-Q1-K2-D12
cccacgcgtccgatttaaacaaaaaaactttttactcaattgaatcagaggtctctaaagaagaaaaaaagtgaaaagaaaatacaatcatatgatcaccgcccacgcgtccgcttggtttgggcaacatcaaagcatgatgtatatcttgtttcgagttactcaattatacactggtcgtctttaaattccaagagatctgaaatcctaaatgtatcagggcatgtagctccgtgtgagaaacatcctggaagccttttggaaggatttactcagacacagattagtacactggctgtgcgggataagttggtgattgccgggggttttcaaggagaacttatttgccagtatgtagatcgacctgtgttagnctttgttctagaactacttatgatgacaatgcaat

SEQ ID NO: 28374 - DNA, 441 bp, Glycine max
  Clone ID: LIB3051-054-Q1-K2-F9
cccacgcgtccgcccacgcgtccgacgcgaatgagaaggttcacgtggttcacgccgtagcggcgccatttgctttcgttcctgaccttagaatcgctcgtggataaaggagaatcaacattcagcaaagtctcgtcgtctcgccaatcgtttttgctcgctcgagctttggtcaattgtggtttcgtcacgaaaacgcaggagtctctgattccgagagtaccgttaagatatcgttattttcatgccacagcattttcttcgtcagctgaccgagactactatcgaactcttggtgttcctgaaaatgccagtcaggacgagataaagaaggcatttcactcgcttgctaaaaagtaccatccagatgcaaataagaataatccatctgctaagaggaaatttcaagatttaagagaagcttacgagacattgagagac

SEQ ID NO: 28375 - DNA, 381 bp, Glycine max
  Clone ID: LIB3051-054-Q1-K2-G11
ggcaccgcgtacacaacgcacgcggaagaggatgaggcttatcgaggaagatagcgatggtgacgagaatgaagaagagaaacaacaagaggtgccggaactgcctcagcctgcggaggacgctaagcctcttggcgaacccgttagggtttcgggaaaaggaagaggaaggaagaggcactatgattccttcgagttcgatggcatccaatatattctcgaggatcctgttcttcttgtacccgaggagaaaggccagaagccatatggtgcaattattaaggacattacgcagtctatcagtggcaacgtgaaagtgacggggcagtggttttatcgtcccgaagaaaccgagaaaaaaggtggtggaaactggccatc

SEQ ID NO: 28376 - DNA, 261 bp, Glycine max
  unsure (1)..(261): unsure at all n locations
  Clone ID: LIB3051-054-Q1-K2-H7
ggagaagcgacggaaagagcaagaggagaggggnnncaaacaggangangagaacaaggagancaagaggaagaacgagaacgagccggaccaaacccaagacgcacacagaggaagagaagacagaggagaaacagagggggaccaaaagcgggaagaggaacaggagaggggagnacgngacaaagagaggaagaagagactgcgcgagaaaaacaaaggaagccccaaacgagaaggaacggaaggaaaaaacggcga

SEQ ID NO: 28377 - DNA, 251 bp, Glycine max
  Clone ID: LIB3051-055-Q1-K1-A4
aaaaaaaaaaaaaacaaacaaaaaaaaaaaatgaaccacaacaaaaaacatcaaaagaaaataaacaaaaacaaaaacaaaaaaaacccaaaaaaataaaaaaaaataaaaaaaaaaataaaacaaacacaaaaataacataaaaaaaaaaaaaaaaaaaaccaacaaaaacaaaaaaaaaaacaaaaacaaaaaaaaaaaaaaagaataaacaaaaaaaaaaaaaacaaaaaaaaacaaaaaaacaaaaa

SEQ ID NO: 28378 - DNA, 276 bp, Glycine max
  Clone ID: LIB3051-055-Q1-K1-A6
taagccatacccaaaaacacactcaatgtaaatttcaaaattagagaataacctcaatcacattgcctcatatcgtggtcaacataaaattctgccactaaaacacacatcaattcatctacgacaacctctacttatgctacgcaatcaatcctgtcaaacaccatgatccgaaattacagcgtgtctacgctaaaccaattctgcagaactgcatagcacatgaaaatgaatgccttccccagagtcagtaccatgactaaagaagaacaacca

SEQ ID NO: 28379 - DNA, 237 bp, Glycine max
  unsure (1)..(237): unsure at all n locations
  Clone ID: LIB3051-055-Q1-K1-C7
acgaaaaaaagaaaagaaaaggaaaacagcacacaggaaaagaggcaagccaaagaaggnacgaggcaaggccaaaaaagcagggagaaaaacacccgcaacaggaaaggaaacgaacccaacaaagacaaagcagcacaaaaaccacaaaagacagagaaggaaaaaaaacaaaaaagaaaaacaagcagaaaccacaacacaaagaaagcaacagacccaacagaaaaaaaaaga

SEQ ID NO: 28380 - DNA, 220 bp, Glycine max
  Clone ID: LIB3051-056-Q1-K1-D12
cgcacgcgaccgcttcaacagcagcggtgaccacccaaccaactagctgcatagaagtcggcttcaagaaagcaacggcaaccacaaccaggcggccagctacctgtagcctacccccagcaatatctaccatacaaccaactggcagcattgaacgctcctgcataaatacagcggcaagcaactactaccattcagccagctagctggcgcgagccct

SEQ ID NO: 28381 - DNA, 408 bp, Glycine max
  Clone ID: LIB3051-056-Q1-K1-E3
ttgatattgatgatattgatgctgctggattaacaagaaaacaatgggagggccacacagataagacattgcatcagctacttgttgaaatggatgggtttgagcagaatgagggaataatattaatggctgcaacaaacttgcctgatattcttgacccatctttaacgaggcctggcatatttgatcggcatattgttgtaccaaatccagatgtgcgatgtcggcaagaaatattggaactctatcgtcaagataaacctatagctgatgatgtagatgtcaaaacatttgctcgtggtaccccaggggctaatggagcgtgaactgcgaatttcgtgaatgttgcatgccttaaagctggcactgaaggtgcagagaatgttacagctgcacaattggagtttg

SEQ ID NO: 28382 - DNA, 126 bp, Glycine max
  Clone ID: LIB3051-056-Q1-K1-G10
tacaagcggcggctgtggctgccagacaccacctgttcatctaccgcctccgatctatatgccgactccgatctatctgccgcctcagcaacaaaccacagccatggcaataccccactcaaccac

SEQ ID NO: 28383 - DNA, 294 bp, Glycine max
  Clone ID: LIB3051-057-Q1-K1-A10
aaaaacaaaaacaaaacaacaaaaacaaaaaaaaaaccacaaaaccaaacaaaaaaaaacaaaaaaacaaacaaaaaaaaaacacaaaaacaccaaacacaaaaaaacaaaaaaaaaaaaaaaaaaaaaaaaaacaaacaaaaacaaaaaaaaaaaaaaaaaaacaaacaaacaaaaacaaaaaaaaccaaaaaacaaaaacaaaaacaaaaaaaaacacaaacaaaaaaaaaacaaaaaaacaaaaaccacgaaaaaaacaaacacaccaaacaaacaaaaacaaaaaaaaaa

SEQ ID NO: 28384 - DNA, 176 bp, Glycine max
  unsure (1)..(176): unsure at all n locations
  Clone ID: LIB3051-057-Q1-K1-E11
tgatgtgctcatcttcgcctgaccctgagaattcgatcatccaaggcacattagcgtggcgttcnaatcctgagtgaaccggcgtttgaaagcaaacttatcctcaggaggatagatggggcgattcatgtgagatccagtgtacatcctactttgctcttcactcgggggatccg

SEQ ID NO: 28385 - DNA, 390 bp, Glycine max
  unsure (1)..(390): unsure at all n locations
  Clone ID: LIB3051-058-Q1-K1-C3
cgacccactcgtccgtggaggttcacgacttcacctctcactttaattaccccaccagcgaccaaatngacaggacgggtttcaaagaagnncaaacagccgattccaaaaccgccacaaccagctgcaaatcgcccccaggaccaaggacactaccgctcataggaaacatgcaccagttagttggctcactgccggttcatcactgcttaaaaaatttggcagataattatgggccgctaatgcatctaaaactaggagaggtatctatcatcataggcacgtcacacgaaatggcacaggagattctgaagacgcgcgatctcaacctctctgataagccaaaccttggatcatcttaaatatgttacttacaacggcagctcacat

SEQ ID NO: 28386 - DNA, 242 bp, Glycine max
  Clone ID: LIB3051-058-Q1-K1-G7
ggaacaaccacaccacaataaccgcaggagctagagggccacagcagcaggaggaacatcaaccagtggagaagcatgcaaatatagatagggaacgtatcccagaacgcgtagaccatgccaagggcgccagagcaaagggaatacaagaggtcacccatgacatatcacacctgacaagtgcagaaaaacaacgagccccagaagagcagacaccagaaaaagaacaaaccccaacagac

SEQ ID NO: 28387 - DNA, 291 bp, Glycine max
  Clone ID: LIB3051-058-Q1-K2-A5
cccacgcgtccgcccacgcgtccgaaaaaaaaaaaaaaaaaaaaaaaaaaaaaaaaagaaaaaaaaaaaaaaaaaaaaaaaaaaaaaaaaaaaaaaaaaaaaaaaaaaaaaaaaaaaaaaaaaaaaaaaaaaaaaaaaaaaaaaaaaaaaaaaaaaaaaaaaaaaaaaaataaaaaaaaaaaaaaaaaaaaaaaaaaaaaaaaaacgaaagagaaaaaaaactaaaacaaatgtaaaaattatttaaaacccaaaataaatgtaaataaaaagattttaaaaaaattaaaa

SEQ ID NO: 28388 - DNA, 168 bp, Glycine max
  Clone ID: LIB3051-058-Q1-K2-B1
aaaaaaaaaaaaaaaaaaaaaaaaaaataaaaaaaaaaaaaaaaaaaaaaaaaaaaagagaggataaaaaaaaaaaaaaaaaaaaaaaaaaaaaaaaaaaaaaaaaaaaaaaaaaaaaaaaaaaaaaaaaaaaagtaattacttaattatattattcataaaaaataa

SEQ ID NO: 28389 - DNA, 134 bp, Glycine max
  Clone ID: LIB3051-058-Q1-K2-B2
aaaaaaaaaaaaaaaaaaaaataattaaaataaaataaaaaaaaataaaaaaaagattttttaaaaaaaaaataacaaaaaaaaaaataaaataaaaaaaactaaaaataaaaaaaaaatacaaactatataat

SEQ ID NO: 28390 - DNA, 409 bp, Glycine max
  Clone ID: LIB3051-058-Q1-K2-B3
acaatttcattttcattacaactctctctctctctctcagcagcagaaacacaatacgcttgtgcaattgtgccaaagggcaatgaactatattcagaccaaatgcgtggtcaagcgcaaaggcaaagaaaccggtgaaagtgaaaccttgtgttttacaaagtccaaggataacaacaataacaacatgtgcgaccgccactgcggaaaacgctaccctctgttgtcgttttgggagctgccggaattcatgaaggacaacgaatacattcttcgttattacagagccaattggcctttcaagcaagctctctttagcctctttcgttggcataacgaaaccttaaatgtttggacgcatttaattgggtttttactctttctcggattgaccctcgcgaatttgatg

SEQ ID NO: 28391 - DNA, 371 bp, Glycine max
  Clone ID: LIB3051-058-Q1-K2-B9
tgatattcctgccaagcgcctgtactgcttcttctcttctctttactctgtgctggttcgtggaggccgagctgtcctgcagttgtaccctgagaattcagagcagttggagctgatcaccacccaggccaccagggccggcttcactggtggtgtggtggtggactaccccaacagtgccaaagccaagaagttctacctgtgtttgttttctggaccttcaacctctctaccagagggcctgagcgaagataccgaggaggagaagcctgccgagtccacgttcacggctgataggatcccgtacaggatagcaagacggggtgtggtgaggaagagccgagaatgggtcctggagaagaaggcacgcc

SEQ ID NO: 28392 - DNA, 373 bp, Glycine max
  Clone ID: LIB3051-058-Q1-K2-C10
ggcgggcctctcgcggctggacacctccgtcatctttgaagccttggccacaggctgcaccagcaccacggcctacatgagcatccacaacatgtgtgtctggattatcgaccgcttcgggagcgaggagcagcggcaccggctgtgcccgcccctctgcaccatggagaagttcgcctcctactgcctcacagagccagggagtgggagcgacgctgcctccctcatgacctctgccgtgcgacaacacgatcattacatcctcaatggctccaaggccttcatcagtggtggcggcgaagctgacatctatgtagtcatgtgccgcacaggagggccaggccccagaggcatctcctgcgtagtggtggag

SEQ ID NO: 28393 - DNA, 314 bp, Glycine max
  Clone ID: LIB3051-058-Q1-K2-C11
ggcggatgaccgcagccctcgctgctgcccgtgccgctgcgaccatggcctctggcagcagcggcctcgccgccgcccgcctcctgtcccgcgccttcctcttgcaacagaatggaattcggcattgctcttatacaacttccaggaagcatctctatgttgatagaaatacgaagattatttgccagggtttcactggtaagcagggcacctttcatagccagcaagcactggaatatggcaccaaactagttggaagaaccactccagggaaaggaggaaagacgcacctgggcttaccagtctttaacact

SEQ ID NO: 28394 - DNA, 379 bp, Glycine max
  Clone ID: LIB3051-058-Q1-K2-C12
gtgtctactctggcctgggtttagcagtcgtgcgaggaggttgtggcgtctgctgcttccaggcgatttgaggtgagggagccaggtggaggaatccggagtcggggaaagggaacccctgaagtctcgattcagttgcctcccagtcctcgctttgtgttgctccagccaggatgatcgaggttgtttgcaacgaccgtctgggaaagaaggtgcgcgttaagtgcaatacggatgacaccatcggggaccttaagaagctgatcgcagcccaaactggcacccgttggaacaagatcgtattgaagaagtggtacacgatttttaaggaccatgtgtctctgggggactatgaaatccacgatgggatgaacctgga

SEQ ID NO: 28395 - DNA, 425 bp, Glycine max
  Clone ID: LIB3051-058-Q1-K2-D1
tcccactcgtccgaaaaaaaaaaaaattaaaaaaaaaaaaaaaaaaaaaaaaaaaaaagaaaaattaaaaaaattaaaaaataaaaaaaaaaaaaaaaaataaattcaaaattttatattttttaaaaatttaaattaatttaattatacttacactaatttttaaaaatttttatattgttaaatccttcttttttatccattttaattattatttcatcttataccctttttcttaatcttttttatttacttttattcatactactttttctctttttaacattttttcaatttttatttattattttactttctttataattttcacatttatttattatttttttttaattaccttttttttccctataattttttaatttctattttttatttttttttttttttttttttaatttttt

SEQ ID NO: 28396 - DNA, 331 bp, Glycine max
  Clone ID: LIB3051-058-Q1-K2-D11
cccacgcgtccgaggaggagcgggacttcctgcggtgccagctggacaagttcatgtcctctgcccgcctggacgcagacgaccactgccgggggaagcccgggcctcggcgggccgagggggacggccgaggggggaccgtgggcgaggcctcagaccccgagtcagctgcctcctacctcagcggagcatctgaagaaggcagcaccgtggagaggaagaggcagaagcagaaaggaggcccaggccggcagcgcttcgggaagcccaaggcccgttagaggcagcggttgaaggacgcatatggggtcctctgccgatacaagaagat

SEQ ID NO: 28397 - DNA, 390 bp, Glycine max
  Clone ID: LIB3051-058-Q1-K2-D12
cggacgcgtggggagatggtggaggacagagagcctagcttgctgcggtccatggggttacaaagagtgggacacaagttagaaactgaacaacaagaagtagatataacttatcttcgaacataacaccaactggtaaaaaaaaatacttgaataaagcaactagtaagatcccctggagaagggcatggcagcccgctccactattcttgcctggagaatcccacggacagaggagcctggcgggctacagtccactgtgtcacagggagtcagacactactgacatgacttagcatgcacacatgtacaaactaggaatagtcaatctagagtcatttgtataatgttctatctagttgtacatgtcaactcatacagaagcttttt

SEQ ID NO: 28398 - DNA, 389 bp, Glycine max
  Clone ID: LIB3051-058-Q1-K2-D4
tgcaaccttacaatgactcaaatctgtggtctgttggaaagggatgagtaaagatgtttgagcttttgttcagaaatgcagtgtatgtcaaaagtgtaaatatgagaccaaggcttctcctggattgctgcaaccattgcctattccggatctgatttggcagcatattaccatggattttatagaaggcatgcctagttcctttggtaagtaggtgatttttgtagtagttgataggttgagcaaggcagcccactttatggctctttctcatccttattctgctgctgatgttgctcaatccttccttgatcatgtattcaagttgcatggattttcagattctatcaccagtgacagagattcaatatttctcaatcagttttggc

SEQ ID NO: 28399 - DNA, 375 bp, Glycine max
  Clone ID: LIB3051-058-Q1-K2-E10
tgccgaagtgctggaatcaaggtcatcatggtcaccggagaccatcccatcactgccaaagccattgccaaaggtgtggggatcatctcagaaggtaatgagactgtagaagacattgctgcccgcctcaacatcccagtgagccaggtgaaccccagggatgcccgggcctgcgtggtacatggaagtgatctgaaggacatgactcccgagcagctggatgacatcttgaagtaccacacagagattgtgttcgccaggacctctccgcagcagaagctcatcattgtggaaggctgccagagacagggtgccatcgtggctgtaactggagacggtgtcaatgactccccggctttgaagaaggcagacatt

SEQ ID NO: 28400 - DNA, 415 bp, Glycine max
  Clone ID: LIB3051-058-Q1-K2-E11
gtggaaatctgtattgcaacacctggaagactgatagactttttagaatgtgggagaaccaatctaagaagaaccacctaccttgtccttgatgaagcagatagaatgcttgatatggggtttgaaccccaaataaggaagattgtggaccagatcagacctgacaggcaaaccctaatgtggagtgctacttggccaaaagaagtaagacagcttgctgaagatttcctgaaagactatattcatataaacattggtgcactagaactgagtgcaaatcacaacattcttcagattgtggatgtgtgtcatgacgtagaaaaggatgaaaagcttattcgtctaatggaagagatcatgagtgaaaaggagaacaaaaccatttgtttttgtgaaaccaaaagaagatgtgatg

SEQ ID NO: 28401 - DNA, 320 bp, Glycine max
  Clone ID: LIB3051-058-Q1-K2-E12
gccagtgtcattctctttggaaccaacaatagcagctccatttctggggtctgggtctttcgaggccaggagcttgcttttccgctgagtccagattggcaggtggactacgagtcatacacatggcggaaactggatcccggcagcgaggagacccagacgttggttcgagaatacttctgctgggaaggggccttccagcatgtgggcaaagccttcaatcagggcaagatcttcaagtgaatacctcttgccatcgcccagctgcctgcacctgcccttcggggagaatgggggtcattaaaggaaactgaacattg

SEQ ID NO: 28402 - DNA, 211 bp, Glycine max
  Clone ID: LIB3051-058-Q1-K2-F1
aaaaaaaaaaaaaaaaaaaaaaaaaaattaaaaaaaaaaaaaaaaaaaaaaaaaaaaaggaggattaattaaaaatataccaaaacaaaaaaaaacaaacatacaaaaaaaaaagcccccccatttataaacttcaatcttaataacccccttcatcctaacaaatacttttcttaaaatcccccaaatttaaataacatacccgtctttt

SEQ ID NO: 28403 - DNA, 402 bp, Glycine max
  unsure (1)..(402): unsure at all n locations
  Clone ID: LIB3051-058-Q1-K2-F12
cggacgcgtgggctcgtgcacggaaaatccagcgtttcttgtctcagccattccaggtggctgaggtctttactggtcatttggggaagctggtacccctcaaggagaccatcaaaggattccagcagattttggcaggtgaatatgaccatctcccagaacaggccttctatatggtgggacccattgaagaagctgtggcaaaagctgataagttggctgaagagcactcatgagggggtccttttggcaaattaagcactcatcctccatggtgtccctctcctcgcccctaatccggaaatcgcagttttctctgtaggccacgtgagggccttgattgaagacattgtgttctgtctgaagaatatttaaggtttccaatannatgtatatccctca

SEQ ID NO: 28404 - DNA, 404 bp, Glycine max
  Clone ID: LIB3051-058-Q1-K2-H10
gccgggttgagaggagcgtggccttctcctctccccgccatggcgtgtgctcgtccactgatatcagtgtactccgaaaagggggagtcctctggcaaaaatgtcactttgcctgctgtgttcaaggctcccattcgacccgatattgttaactttgttcacaccaacttgcgcaaaaacaacagacagccctatgctgtcagtgaattagcaggtcatcaaaccagtgctgagtcttggggtaccggcagagctgtggctcgaattcccagggttcgaggtggcgggactcaccgttccggtcagggcgcttttggaaacatgtgtcgtgggggccgcatgtttgcgccaactaagacctggcgacgttggcaccgcagagtgaatacgacgcagaagcgata

SEQ ID NO: 28405 - DNA, 388 bp, Glycine max
  Clone ID: LIB3051-058-Q1-K2-H11
gtcgcgcagggactggagcaggggaagccggtgctgcccgtgcggagacagcgagagctcgtatcgcggaggcggtgtgcgcccgactgttaccatgagcgatcaggctctgatcttgctgaaagacttcttgtccggcggcatggccgctgctcatctccaagactgctgtcgcgcccatcgagagggtcaaactgctgctgcaggtccagcatgccatcaaacaaatcattgctgataagcaatacacagggatcattgattgcgtggtgagaatccccaaggagcaagtctctgtctccttctggacgcgtaacctgaccaacgtgatccgttacttacgcacgcaagctctcaaattcgccttcaatgacaagtacaagcagat

SEQ ID NO: 28406 - DNA, 401 bp, Glycine max
  Clone ID: LIB3051-058-Q1-K2-H9
gctggagaaggagaaaagtgccccggatcctttcaggactcttggtctttggggagcgacccaaatcgactgagggaagagggaggaaaattccctggatccctgcagggttaatttattcaaaaaggaaatcgaaaaatactcaacatgcaaaaatcttgtggagaaaatgaaagaaaaccacagaacatgccaaaggctgaggaagaccgccctttggaagctgtaccacaggaggcagaaggaaatcctcaaccttctgaagaaggtgtaagccaggaagcagaaggaaaccttagaggagggctgactcagcctggtcagggatataaagaggactctcctgttaggcatttggaccctgaagaaatgataagaggagcagatgagttggaaaggct

SEQ ID NO: 28407 - DNA, 428 bp, Glycine max
  unsure (1)..(428): unsure at all n locations
  Clone ID: LIB3051-059-Q1-K2-C2
ataaatttcaacatttggttatacggatcaatatttacatgaaatttaaccttgaatggggatgcttatagttgatatatagtagtatgtgttgagatatcattagagatgtaggaagaatgcataatgatataacatgaactggttctgattttgtcattgatcatgaattgatgaaattattaatattcacttgtttggtgcctagtaatatctcatttgccctttaaagtagatggaacttttaaatttatgctaaacaatatatttgatctctgtatgtaataactgttttagaatgagtttcattcaatgtagtaaattgacacatttattgtgattattgcaaacctatgttgcaaatgtatctccatttgatatatatacatttcattggtttttttaaaanaaattgtatgtcactatgt

SEQ ID NO: 28408 - DNA, 251 bp, Glycine max
  Clone ID: LIB3051-059-Q1-K2-C3
aaaaaaaaaacataaaaaaaaacaaaaaaatatctacataaaaaaaaaaaaccaaaaagaggaagggctaacatacaactatataactctgatttaagatctcctaaattctattaacttgaacgcataatgactatcacattaactggtaaaaccttcgtgttacaacactaaatcacctagcaactcatactcatttcgccagttcctattatatctaaaattcccctaccaatcagctttatcaacaa

SEQ ID NO: 28409 - DNA, 430 bp, Glycine max
  Clone ID: LIB3051-059-Q1-K2-D11
caaaaatgtaaaaaaaaattcattattttttaccccatttttaaagaactaaaaaaactaaacaattttaatttttcactttttggggctctttgacggtagaaaaagaaaaaaaggaaactaaaaaaaaataaaagaatatagaatataataatgaatagaaatcaaatagaaaaaagagataagataaaaaaataagatattactattatatttatattttaaattttctattttatcatttttattttattcgtttgttttctcgattgtagttttttttttcattgtatttattccattacagtggtgatcataaatgaatgttttacctctttgtgattcacctacaggtcttgccattcggttctgttccactaaaaacctatcttcctgatggagatgttgacttgacaactctcattcatga

SEQ ID NO: 28410 - DNA, 281 bp, Glycine max
  Clone ID: LIB3051-059-Q1-K2-E5
cctatacatccgaaaaaaaaaaaataaaaaaaaaaaaaaaaaaaaaaaaaaaaaagaaaagaaaaaaaaaaaaaaaaaaaaaaaaaaaaaaaaaaaaaaaaaaaaaaaaaaaaaaaaaaaaaaaaaaaaaaaaaataaaaaaaaaaaaaaaaaataaaaaaaacaaggccattaatttaggggcaagtcttaaagcttctgcctaatttacaccttaaaatttcccgagactccttttatgactgcatgtatacagtgacatgaattgacttttaaaacca

SEQ ID NO: 28411 - DNA, 195 bp, Glycine max
  Clone ID: LIB3051-059-Q1-K2-H12
tctaaaaaaaaaaaaaaaattaaaaataagattttacataaaatttattaaaaaaaaggtccatgtaatattataaatttaagtttaattatcaaaaatttacaagaattaaaaattaatattaaatatatataaaattatttaaaaaaattttaattttaaaaaaacttcaattaaaaaaaaccaaattttaaa

SEQ ID NO: 28412 - DNA, 373 bp, Glycine max
  Clone ID: LIB3051-060-Q1-K1-C10
gtccttggtgtttgagtgtgttaggactgtgctcactagcttgagtgattatgagtctgctggtaagggcgccgttgagaaggttagggaattgttggtcgatcaggatcccaatcttagatatcttggcctgcaggcgctttcggttgccacacccgagcacttgtgggcggtgattgagaataaggaagcggtggttaagtcgttgagtgatgatgattcgaatatcaagatcgagtcactgcgattggtgatggccatggtgtctgagagccatgtggcggatatctccagggtgttgctcaattatgcgtttgaagtctgaacccggatttttctaatcagaatttggggttcattttggacaacgtgt

SEQ ID NO: 28413 - DNA, 238 bp, Glycine max
  Clone ID: LIB3051-060-Q1-K1-E11
actcccactcgtcctaaaaaaaaaaaaaaaaagaattaaaaaaaaaaaaaaaaaataaaaaaaaaaaaaaaaattaaaaaaaaaaaaaaaaaaaaaaaaaaaaaaaaaaaacaaacatataaaaaaaatccatacttaaattcacatacatacaacaaaaaaaaatattctattatattacctaatttaaattaattacccctctttttacaactttactactttaaaaacctttttt

SEQ ID NO: 28414 - DNA, 397 bp, Glycine max
  Clone ID: LIB3051-060-Q1-K1-E4
gcacacacatacgttcaagatcacaactggtccttcaccttttgcttcctaatcttaattgcatcatccatcatacagccattattcatcatggcgtctcctaataaaatcactctgaatagctcaaactcacatgctttctacttctatcattcaatagcactctaatcccagacaatctagcacattatccagcactactacaccaacagcaacatccctctgcccaacactacgagcaataccctttccaacgttatcacttactacaagaatcacatttagaccaataatccccattactaaccctactaggaccatctcatatcctctgactcttaattcatcataatctaccataccacactctctcatctcatccatactcctaactact

SEQ ID NO: 28415 - DNA, 430 bp, Glycine max
  Clone ID: LIB3051-060-Q1-K1-E5
cacacacaaacgttcaggatcacaccttttcctgcaactatgggttgcaaatcttaattggatcatgcatcctacatccattattcatcatgtacgctcttcaataataaaactgctgaatagctcagacggacaggcttgctactggtatgaggcagtggagctctaacacaagacaatctagcacattatccaggactactgcaccaacagcaacatgcttctgtcgtacactacgagcaatacactgtggaaggttattacttactgcacgaatcacatttaggccgatgctcccgatgacagaccctacgcggacgatctctatgcctgggactctgaattcatcaaggtcgaccatgctcacgctcttggatctcatcctggctgctaactacttgaacactaagatcctagctgaccttacatg

SEQ ID NO: 28416 - DNA, 428 bp, Glycine max
  Clone ID: LIB3051-060-Q1-K1-E7
tcccactcttcctataaaaaaaaaaaaaaattaaaaaaaaaaaagaaaaataaaaataaaggaaaaatataaaaaaaaaaaaaaaaaaataaaaaaaaataaaaaaaaatatataattattttaatttattttaattaattttatttttattaatattttaattttttaaaatttatttaactttctttcttattcttatttttgtttatttcaatatttcttttttttatttctttttttttttcccaaattcttttctttttttctattttttctttatcttgattttaattatcaattttctctctaatttttttccttttcttacatttttctattttattttcttttttatctctacttttttcttttccttttttttttttactttttttttcttccttaactttattttttcatttttctt

SEQ ID NO: 28417 - DNA, 230 bp, Glycine max
  Clone ID: LIB3051-060-Q1-K1-F10
gcccactcttcctatttagcatctatacttcttcctttttaatgttataatgtctacgttacaaacaatggtagctacttattaatattttaaactttttatcatcttattaaccccatttttattcactgtccacatatcccttaattttaatataatttaatacaaatttttataataaaattttgtcaacaatattcatttacttctcaaatacaacctctttcaca

SEQ ID NO: 28418 - DNA, 436 bp, Glycine max
  Clone ID: LIB3051-060-Q1-K1-F8
ctgcaaatgagctgaaaatgatgtatgtcaacagaacacctaggtcaaacaaagcaattgatattgtttctagtgcttacaaggctactttaacttggaataatatgcgcactctccaggaatgtcgtgaagcctgtggaggacaaggagttaaatctgaaaatcgtgttggcaatttcatgggtgaatttgatgtgcattcgacatttgagggggacaacaatgttctaatgcagcagattagcaaggcactctttgcagaatatgtagcaagtcagaagaaaaagaaaccattcagcggtttgggattagaacacatgaacaaacctttgcctgttatcccatctcagctaacaagttcctacattaggaacagtgaatttcagattgatctgttccacctaagagagcgagacctattgagacgttttgctga

SEQ ID NO: 28419 - DNA, 306 bp, Glycine max
  Clone ID: LIB3051-060-Q1-K1-G9
atttccttaacaaaaaaacaaaaagtctagtatttattaaaaaactacaacaataacaaataagagctacatacaaaattctgggcaccaaaactcaacttcaacaactactaccgctacaccaccaaagcgcccaccgtttaggctcacaagatcgtctacctcttcatcaagaatcctgcccagaatcccaagccctctgctgtgtcgtcctcttctccagacatcaaccaccaactctccaaatactacggtcctgacaaaaggatctacctgccagataatctcttttaccgctctgaggta

SEQ ID NO: 28420 - DNA, 313 bp, Glycine max
  Clone ID: LIB3051-061-Q1-K1-A5
ttggaacacgcgtgcggccttgcgtccgcaaacacctgttggagtcattcactgttccgagaatccaaactcatgtgttcataatgcccttgtactaagaattgcatctcacaacaaacttttggatcagcttagtcatgatgctctatatctaccaatttatcaattcacaccattgtgccgcattctttacaaggcaccttcttgtgtccaatggggagaacatgcactgccactatctccatttcatctgttcttgaatgtaacttgaaccccaatactgacgaactgagtgatatcaaatatgtgaacc

SEQ ID NO: 28421 - DNA, 403 bp, Glycine max
  unsure (1)..(403): unsure at all n locations
  Clone ID: LIB3051-061-Q1-K1-B1
cgggtcgaggcacgcgntgcgcccaacctagttgggagaagactgttgactgctacagtcctaggcaagggttgatgccagcaagcttgagggttagaactgtgcctcttgacggtagcaatgaagcatttgaggaagttttggatcctgattttggtgaatcagctattggtcgtgttgcgcctgttgattcaggattgtggtggattatattgttgagagtttatgggaaattaactggtgactatgctttgcaagagagagtggatgtccaaacaggcataagactgatccttaagttgtgtctgactgatggatttgacatgtttccttctctattagtcactgatggttcctgcatgattgatagaaggatgggcattcacggtcaccctcttgagat

SEQ ID NO: 28422 - DNA, 307 bp, Glycine max
  Clone ID: LIB3051-061-Q1-K1-E10
ttactcttgcttggtatttcgacgtctagatcttcaggatatagcgtctcttatggaggaccggtcaaactccaaggaagctctatcaattgcgtcgcgctctcgccttacccttgactgggtgccctaattgacagcatacgatatcgtaccttttctcgaccttgttctcactccaggctatgaaacacacgccacattggctgcgtatcttgccaacgaggatgaacatgagatggaagtagacactctaacatctgctattcaaaccccagtcaaacactttatgcctgagcaagaaatatac

SEQ ID NO: 28423 - DNA, 353 bp, Glycine max
  Clone ID: LIB3051-061-Q1-K1-G11
gcagcttctaatgatatttcactaagtggaatgattcttccagctggtgtgtatttgtggcaaataccacattttatggccctagcctatttgtgtcgtgatgactatgctgctggagggtttaagatgtactctcttgctgatgcatctgggcatagaacagcattggtggctttaaggaactctatatatctaatccctttggggttcttggcttatgattggggtttgacttctggatggttttgtcttgagtccgctgcacttacacttgcaataagcgctgcagcattttcattctatagaaaccgtaccaaagaaaaggcaaggagaatgttccatgccagtcttct

SEQ ID NO: 28424 - DNA, 385 bp, Glycine max
  Clone ID: LIB3051-061-Q1-K1-H9
cacacacacagctagcagatattacatacacgtgaatcactaattaagccatggaggagaaatcaatagctgggttgcgcttcctcttccttgttctctttgttgctcgtaagctactacttttaataagaagttgtggtgcaaactgaggcaaagacttgcgagaacctggctgatacatacaggggtccatgcttcaccactggcagctgcgatgatcactgcaagaacaaagagcacttgctcagaggcagatgcaaggacgattttcgctgttggtgcaccaaaaactgttaaatggatccattcactccaacgtgaagaagatgcatgcagcgctattttataaaaaataaaactactatatactatatataataagact

SEQ ID NO: 28425 - DNA, 243 bp, Glycine max
  Clone ID: LIB3051-062-Q1-K1-A9
tctttctcccactctttctaaaaaaaaaaaaaaataaaaaaaaaaaaaaaaaaaaaaaaaaaaaatgtaaaaaataaaaaaattaaataaacatacatacaccttcatataatcttatatactataatacttataacatttaactaaccattatttttcttctttttatactctaaaatcctttgatttacccaacttattcaactttttatcccatccaaatttttccattttcctttttat

SEQ ID NO: 28426 - DNA, 408 bp, Glycine max
  Clone ID: LIB3051-062-Q1-K1-B4
accaaacgtccaaggcgtaaatagggacaaagttggcagacgatatcacgatatatggggcacatgatacaggtaccagcggatgtacacatgtctagagctgcactaaaaggatgggcgagcccatgctcaaatggaaaacaagcgctgaaacttactaaaagctgttggtacacacgtatgtatagccattaatggcaaaagaagtggtagctccattagcaagatgctctgcataatgctcaacgttatgacagaatgccacaggaagctgaacctcaggctattgaagtgtctaaacgctacgcacaagtaacagaaatgccacccagtgcacagaatactatgagattataagcacctggagctaagctacaagatctgtatagccacatgaccatactgggg

SEQ ID NO: 28427 - DNA, 371 bp, Glycine max
  Clone ID: LIB3051-062-Q1-K1-B6
aaaaaaaaaaaaaaaaaaaaataaaaaaaaaaaaaaaaaaaaaaaaaaaaaagggaaaggaaaaaaaaaaaaaaaaaaaaaataaaaaaaaaaaaaaaaaaaaaaaaaaaaaaaaaaaaagggcgtatctttttaaagtacccaattttacttccccttgaatccaaagctttaccttttttataagccctcctaatttcaatttattggccatttttttaaaaattctttactggaaaaaccctttttttaccaaatttaatagctttgaaaaacatcaccttttgcccagcttgattatttaataaaaggcccgaaacatcggccctttcaaacatttgcacaccctgaatgccaaatggaactcacct

SEQ ID NO: 28428 - DNA, 397 bp, Glycine max
  Clone ID: LIB3051-062-Q1-K1-C4
attctagcgatgttgtaaccgctggaaaacatggaaaacgtactctagttaaaattgtggctgcgtcttctgctgccctggctcttctgctagttgttgtgacagttgttttctttacaaggaagaatgtggtgacaaggagaagagaaagaagacagtttggcgctcttctagccacagtgaataagtccaagctaaatatgccttacgaggttcttgaaaaagcaacaaattacttcaatgaggccaacagccttgaccaaggggaaccaggttctgtttataagggagttatcccatatggaaacactgtggccataaaagggcttatctatcacacaacacagtgcacagaatatttttactgtggggtcaattagctcaggggtttatatca

SEQ ID NO: 28429 - DNA, 98 bp, Glycine max
  Clone ID: LIB3051-062-Q1-K1-D8
aaaaaaaaaaaaaaaaaaaaaaaagattaaaaaaaaaaaaaaaaaaaaaaaaaaaaaagaaaaaataaaaaaaaacaaaataagggctcccgttcttc

SEQ ID NO: 28430 - DNA, 246 bp, Glycine max
  Clone ID: LIB3051-062-Q1-K1-E5
gactagttctagaaaaaaaaaaaaaaataaaaaaaaaaaaaaaaaaaaaaaaagaaaggaaaaaaaaaaaaaaaaaaaaaaaaaaaaaaaaaaaaaaaaaaaaaaaaaaaaaaagggaaaaaattttagaggtttcaatattaccaaggcttacttacaaattattgcaatttatatattgtaatataaattaaattaaatgcaattaatttgcacaacgttttaaactggaaaaacctgtaaaaa

SEQ ID NO: 28431 - DNA, 434 bp, Glycine max
  Clone ID: LIB3051-062-Q1-K1-F4
cacggctgagggatggtgaaacccctaatgctgtaccatcacatgcaaaattacatggactgcttcttgaggagcgtattgagaatggttatagtaatcctgcacgcctagtgaagttgaagaaaagacaattgaatggaccagcagttgaaacaagagctgggaagagttacatggagaaatttctggaaactccttcacctgatcataaaatggtttgtgaaacttcaatctttccattgcctgtgaaacagacatcagatgatgctagcgaggctgggattaaaattcttgaaatcagcagcattagtcctgtgaaaaagtcattgggaaataaaaacacctattcatcccctgatgagaaggaattagaactaaaaccattttcacaaatggatggtgggacaaatggagatcttgtgaaggtgaaagaa

SEQ ID NO: 28432 - DNA, 347 bp, Glycine max
  Clone ID: LIB3051-062-Q1-K1-G10
aaaaaaaaacataaacaaaaaaggataaaaaaaaaaaaacaaataaaagcatatgggggatatgaatacaatggatataaaaaatggacaacttaatgttgctcgatgcacttggtgactgacacatgagaacgaatgaaaagcagagacggtggaccactgactgcagatccagaacttatgactacaaaactgactgccgatgacgaatttctcatcattgattgcgatgggatttggtatgtatttcggagccaaaatgcactggattttgctcggctcatgcttcacgagcataacgatccatccatgtgtagccaggatctggttgacgaggctttaaagag

SEQ ID NO: 28433 - DNA, 420 bp, Glycine max
  Clone ID: LIB3051-062-Q1-K1-G7
cggacgcgtgggtattattcgtgatccaatctctgcatttaatgtctcagctgatggggagtttcttgcgtgacctcaagggtgcattttgacaagaacttatttcttctgttttggtgggttgacatgcagtggaacaccttcaggagacattgtagttgtaaattcaacaaatatgcagattcacacaatgataaaaaaggctcaccttggcatagtaactgctttagcattctcccctgattcaagggcggtggcttctgtatccatggattcaagtgcgagggtaacaataattgaagagaagaagactaatgggcttagcttgtggattgcattatttatcatcctacttgcagtagccgcttacttcctgaggcaagaaattgaaaagtgaaggttccaagattttgcttattg

SEQ ID NO: 28434 - DNA, 366 bp, Glycine max
  Clone ID: LIB3051-062-Q1-K1-G9
gtcaagagatcataaaccaggttgcaacaaagaaaagaagcgtatcgaggcatctggggggtatgtctacgatggatatctcaatggacaacttaatgttgctcgtgcacttggtgactggcacatggaaggaatgaagagcaaagacggtggaccactgactgcagaaccagaacttatgactacaaaactgactgccgaggacgaatttctcatcattggttgtgatgggatttgggatgtatttcggagccaaaatgcagtggattttgctcggcgcatgcttcaggagcataacgatccagccatgtgtagtaaggatctggttgacgaagctttaaagagaaaaagtggagacaatttggc

SEQ ID NO: 28435 - DNA, 456 bp, Glycine max
  unsure (1)..(456): unsure at all n locations
  Clone ID: LIB3051-062-Q1-K1-H4
gattcccggtcgacccgggcgttccacacgcgtgcgccacgcgtccgagatactatactaataaantattgttgacagatcaagagtggttttgtatctcgaggcttgttattttcattggcaatacttgtggttactttgaagattttgggaagacagaaagtaatatgaaagtgaaatcaactgtttttctgtcccccaagtttgaacttggaccaggatcagctaccataaggcattattatgacattgagtttccaagaggtcacgttgcactcaaaaatttcagtggtgaagtagttgatgaagcaaggaaccctgtgcctcttcatgaaacttatctccaccactggattggtgtgagatatactatcaacaacgtaaagatgtgacacacacaatgtatgatgattgcctttgacacttaaccactctgattatattttggttaggaac

SEQ ID NO: 28436 - DNA, 191 bp, Glycine max
  unsure (1)..(191): unsure at all n locations
  Clone ID: LIB3051-062-Q1-K1-H8
caatccacagcattattcataatttttatatccacattccatgatgaaaccaagtcccttttaacagctggtagcctttacaaaactctanttacatattcctacaactacatcccaaatgctatcaaaaccttcaagagtgttgaaaacctctatatgaacaagacccctcgaaccatcaagaacatcac

SEQ ID NO: 28437 - DNA, 253 bp, Glycine max
  Clone ID: LIB3051-062-Q1-K1-H9
aagttatatataatcgttcttcatctctttcacggattaaaaaaaaaaaaaaaaaaaagaaaaaaaaaaaaaaaaaaaaaaaaaaaaaaaaaaaaaaaaaaaaaaaaaaaaaaaaaaaaaaaaaaaaaaaatacaaaaaaaaaaaaaaaaaaaaaaaaacaaaaaacaaaaaaaataacaaaaacaaaaaatctaaactcaaaaaccataactaaaattaaacagaactccaaaaaaactacatttaacaaaa

SEQ ID NO: 28438 - DNA, 365 bp, Glycine max
  Clone ID: LIB3051-063-Q1-K1-B4
tttcagcttatctttacttcaaaaggcaattgatttttcttcatgatgccgagtgttaagcctgatgcatttgacaaagactcagaaccatttgttgaagttgatccatcaagaagatatggaagatacagtgaactattacgatatggcgctgtgaaaaaggtgtgtagggcatttgatcaagaagagggaatagaggtggcatggaaccaaatgaaactgaggaacttgagttatgacccttccatggaggataggctctactatgaagtgaaggttgtaagaagcttgaccaacgaaaacatcatttccctttacagcgcttggagggaggagaaacacgacaccttgaacttcattactga

SEQ ID NO: 28439 - DNA, 306 bp, Glycine max
  Clone ID: LIB3051-063-Q1-K1-B8
aaaaaaaaaaaaaaaaaaaaaaaaaaaaaaaaaaaaaaaaaaaaaaaaaaaaaagggaaaagggtataaataaaaaaaagataaaaaaaacataaatacaaaaaaaataaaataaaatatggtctcaccttttataaattcaatgttcagttcctttacaatgccatgacttagattacctttagggtacccaaatttaaatcaattgtaccacattttaacaatatccagattggaaaaaccctaacattccctaacttattgacttttcaaaaaattcccctttctcaatgtggaatattaccc

SEQ ID NO: 28440 - DNA, 298 bp, Glycine max
  Clone ID: LIB3051-063-Q1-K1-C11
cagaggcgaatctcgtggtgaaccgatgatacggatgcacgaggaaggtcggactcagagtacttcatggccgatgcggacagatcttattaggggagctccattactccgaccgacactactgaagatactactacgcacgcggcaggagagaagtgatggtgagggagaatccggagactagagccgaaactaacgctaacggctgtcataatacttggcataaggaagatacctgaacggatcagaatctcgaaacgacgtggtgaacggtcgagctttcgagggatcggtgtca

SEQ ID NO: 28441 - DNA, 447 bp, Glycine max
  Clone ID: LIB3051-063-Q1-K1-D1
gcgctacctactaatattccaggaagcaacactaaaacagttatcgaaaatgagttaaaggcagtcagttctgttgccacacagaatactgaattaccttcagcgagagcttggaaacctgctcctggtttcaaggcaaaatctctcttagaaattcaactggaagaacaaaaaaagtcactgacagaaaagcttgtatctgaggttgctactcctgtcaattccatgagctcaacaactccctgggttggagttgtcgccaatccagactctatgaaggtgtcaaatgatggccacagagaagcagaaaatactgaatatctggctaaagctgaaaaatctcaaaatagtaaaagcaagaaaagcccattacatgatctattggcagaagatcttgtaccaaaatctagtgaaagagatggcaaggttcctgacagtatgctcccc

SEQ ID NO: 28442 - DNA, 407 bp, Glycine max
  Clone ID: LIB3051-063-Q1-K1-E12
gcgtgacattacctccacgatgtgtgcagttaaagccggcaaagatgtccgcgcttatgctgatcactcttgaggctttgctgatgccaccacctctagttatgaaccaaaacctgtcaaacacatcagggtggccataatgcatttgaactttgagagggtttgccaaaaccctctgccccaatgtgacaaaactcgtttcttgacctgacatgaaccatacaagagaggaaacagaaccggtaaaaatgtgttccctcactccaagcccaattgtctccacggaaaccaacctgctatgatccacagatgcagtatattatcacataccatgaccaattattctaaaaatatattagaacatacaaaatataattaaaattaagaacatattttttgggcattac

SEQ ID NO: 28443 - DNA, 366 bp, Glycine max
  Clone ID: LIB3051-063-Q1-K1-E9
ctcacgcgtacgatgaatttcaccactcttataaattctgagaatgaattggtatgagcgaagcattagcctttttctgtgtcgacactggtttcgatcccacacccactaactcatacgcttgatcctttgaatgctcttgcgtacttctttcactacctaattactaactcacactcacacaacgggtgatatcaatgtcgactactgctatgaagaggctcatgagagatttcaagaagctgcatcaagacccgactgcaggaatcagcggtgcacctcaagatatcaacataatgctgaggaacgctgccatatatggtccttatgatactcgatgggatggaagcacgtttaagttgactg

SEQ ID NO: 28444 - DNA, 418 bp, Glycine max
  Clone ID: LIB3051-063-Q1-K1-F2
tcgcccacgcgtccgctggctcctcatcggaataggactcgctggcgcggtcgttgttgtgggcgagacccggcggcggcgacaccggaaccttcccaaagaggacttcggtgcattcgttgagcgtatcgaacttctccccattcctcagcccaaccaaacgcaaacgctctctgctcttaccttcgccatcaaagacatattcgatgtgaaagggtatgtgacggggttcggaaaccctcagtggaagaagacgcacggcgaggccgggaagactgcgattgtcatcaccgctctcctcagcgacggtgccacttgtgttggcaagactgttatggatgaattctcttttgggatttctggtgagaacaagttttatggaacaccaaccaatcctcaaatgccatcttctatccct

SEQ ID NO: 28445 - DNA, 429 bp, Glycine max
  Clone ID: LIB3051-063-Q1-K1-G5
ttcacgcgttcgagtacattaagtgtagtcatgctacattatagaaatagatctgttagggtatgagtgactgtgagctatattatctgttgtagcacaaaacatttagtatcatgagtaacccatattacaatttaatatttgtgcgggattcgctacttttgcagttcatccagaaagttggaatcccatgtggtctggatcaagcatattaacagggcttgtatcattcatgatggacaacaattcaaccactggcagtgtaaacaccaccactgctgagaagcatcgtttagcaaaatcttccctttctttcaactgtaagaatgctacattcaggaagatgttacctgagtatgttgagaagtacaacctgcaacagctttctgagcaggctggttcagagagggtctcatcggatacgtcttc

SEQ ID NO: 28446 - DNA, 434 bp, Glycine max
  Clone ID: LIB3051-063-Q1-K1-H1
cataaaacaaatcattttagttctggtaaaattaatttattttgtatttcatccttaaaaatactatcattttttcattatttaaaatattttttttacaatttaaaacactatctaaagttctttaaatatgaaaaataaaacaaatacatttcactagtactaaaatgaaaaatataaatttgtaaaacaaaaatttaaaaacactaaattgtatgaaaaaaaatatatttaaacatgttatttaaattaaatttcctctactttccagatacaaggaaaaagaaaagacattttgatcatgaacggtggagggacaaatttgattccatcacattttacaaacggatgcccataaaatatcttatccttctttttggttacacaaaatatcttatccttctgccaaaagttattatccccaaaaaagaaat

SEQ ID NO: 28447 - DNA, 243 bp, Glycine max
  Clone ID: LIB3051-063-Q1-K1-H5
tcgaaaaaaaaaaaaaaaaaaaaaaaaaaagaaataaaaaaaaaaaaaaaaaaaaaaagataaaggggacaccttcctataatacggttacctaccttaccaactcttgcatgctaacactactctcttgtatatcctcacctaaattaattcaactgcccgtctctatacaacttctggacagtcaattcccttaccttacccaacttattcccctttcatgacatcctccttttcccagct

SEQ ID NO: 28448 - DNA, 439 bp, Glycine max
  Clone ID: LIB3051-063-Q1-K1-H7
ctctccgacgtacatttccatctttttagggtttcatttcatggactccgattcctggatgtccacgcgcctctcttcctcttcacgccgccaccattatcgatctgatctgtacgcggaggagagtgaagggaacgatgatttcagggcggagtttctatgccctttctgcgccgaggattacgacgtcgtttccctctgttgccacattgacgaccaccaccctatccaagccaaaaacggggtgtgtcccatttgtgggaagaaggtgggagtggatctcgttggacattttactacacaacatgggaacttcttgaggatatcctttttgcaagttgaacttacgtgcagcgcaaaaggagggtcaggaaaggaggctctgcttcaacaatttctatattgagaaaagagttacaagaaggagccttgcagtccc

SEQ ID NO: 28449 - DNA, 349 bp, Glycine max
  Clone ID: LIB3051-064-Q1-K1-B1
gcagcgatggcgccaccgtcgccaccgtcactttccacggccgcttcgatatcctctcgatgtccgcgaccttcctccaccacgcctccccggcggcgatcccgaacgccttcgccgtgtccctttccggaccgcaggggcagatcgtcggcggattcgtcgccggcaggctcctcgcggccggcacggtgttcgtgattgccgcgtcgttcaacaatccgtcgtatcaccggctttcgtcggaggaggaggcgcagaacaactctggcggcggcgcaggagacgcgcagtctccgccggtttccggtggcggcgtggagagcggacacgttccggctgagtcgtttat

SEQ ID NO: 28450 - DNA, 392 bp, Glycine max
  Clone ID: LIB3051-064-Q1-K1-B10
acccacgcgtggacgcacgcgtccgaccgaatactttacttcacaaaaattagatccatgaaaacgtgttctgtgatgctatgcctgtaaacgtatcgaagtcttactggggccacagcataacaatgtggcacacactcttgtggagcgtaatgcccaaatatatcatgttccagcaaatttgggctgtgatatgacacacatatctactgactagaaagttgccatatccaatagctgatcgcaacaccctaaacatctacttcaacaacacctaaatctggtggagatattagcatactcattatcttttttctctacagatcaaatgctttaataccgatacgattgcccgtagtctagtcatggattctacagatatgatgcttaca

SEQ ID NO: 28451 - DNA, 397 bp, Glycine max
  Clone ID: LIB3051-064-Q1-K1-B5
agcagagggatgatggttcagtgcaacaacactaataacaacgtgtgcagctgcaagcgctctccctcggccaccttagaccttctaatcctcctcctggtcctcttctccggcgccttcctactctactcctacctctgctacatcttcaactccctctccctcctcctcccctgcctccccctctcctacctcctccccttcctcctattcttctccctctccctcgccgccttcttctgcggctcccgatcccgccgctgccagcgccagggatgcacgggcctcaagaaggccatggagttcgatttgcagattcaacgcttcggcttcttctacgacgaaatcgattaacttccctggaaaggccgcactgaggccaaccccgattacgact

SEQ ID NO: 28452 - DNA, 290 bp, Glycine max
  Clone ID: LIB3051-064-Q1-K1-B8
ctcacgcgttcgcagaattacccaaattgtgctctttggtgtcttttttaactgacatgcgaaactgaatggttcttaactctcattaacctgctattggaaccaaaatcctcaaaacggaattgcctgcataatctcctcctaaatcatttgggcattaaccattccgaacctgccttgaattggccaatcctaccctggtttaattgggaaactttaaacttggaattcacattgttgaatgacttgaccttaaggcattacctgatccaggtttctttcacctgttg

SEQ ID NO: 28453 - DNA, 435 bp, Glycine max
  Clone ID: LIB3051-064-Q1-K1-C11
cgttcattttatctttgagtccattgattttttcccaagttgggttgtataatcggatgagtttgctgtgtgtgatgatcatgggatgcttgtgcttacctcactttcttcttccggtgtttgtatttgctaatagctccaatgggtactattgttgaagcacatgacacatataccaagatcctaggaagatggccagccttttactatggcatggggcacatgctcaatgacatatctgctgcttgtcggttcacctatttattattgttcttgacagatattggactttcacctaggaatgcagctgctgtgatgctatcaggtcaagtggctgatggatatgccaccatacttgttggcgaactgatcgacaagttcggacacttcaagatatagcacggtgctggatctttattggtcgcaatatcattt

SEQ ID NO: 28454 - DNA, 292 bp, Glycine max
  Clone ID: LIB3051-064-Q1-K1-D11
gatagattaaaattgctgcgaaagagaaatacatttcacagtcattttgtcatataaatgggtatacaagctcaattctaaagacctggtgacacattaagcaccaatggcaggagtttaacctgatgagcactacaaacaagatcaagatcacgtttctgaagaaattgagagatcttatcatcaccacatgtgcatgaaactcctctgtcattcattccgcatccttgaatatctttgctcggcttaaaccacataacaacacacagcagatacgcttctgaaacatctg

SEQ ID NO: 28455 - DNA, 423 bp, Glycine max
  Clone ID: LIB3051-064-Q1-K1-E10
ggaaaattcacaaaaaaatatggggacttaaccagggtagatgctcgtctagatatatgggcagcttcagggtttgcaaagaagattctgaatggttccagtagttcaactgctgatgttagcaaacaaccatcagcctcaccccggctaaatttaatctttcaacagcaggttgcagggccagttgattttcgagctgattcccggattgcccttgagtctttcgccaggaaaaacggtgtgtcagtagaggattttatttgcagcctgagttactccttgaaggatcttcagtctggaaagatcgttgcttggtattctccataaagaaaagagggaatggttgaatttcgcatgtatgagttatagcagaatgcaacaaccctcacatttttgtaacttacgcttagagatcttacaatg

SEQ ID NO: 28456 - DNA, 274 bp, Glycine max
  Clone ID: LIB3051-064-Q1-K1-F10
ttgtaactataccaattttacatatttttacctttctcttgaatcctgtaataatatgcactttttcaccaactggactcacaactgaaatcaaatctgtggaaatccaccatgaatcttttacccagccacatcctgatgacaattttgaatacaatgttaaaaatgtttctgtcaaagatttaaaccctggtaatttttcctaaaactcaaaggataaccctccaaaagaggctcttaactttacaccccaagtaatcatcataaaccaccc

SEQ ID NO: 28457 - DNA, 288 bp, Glycine max
  Clone ID: LIB3051-064-Q1-K1-G11
ggcgaacaccgcctccgtaactaccgctccgtcaccaccgtccactccttcgacgacgacaacgcctccggcgacggcaagatctacaccgtcgtcctcgaatcctacgttgtcgacgtccccgacggcaacaccgaagaggacacgcgtctcttcgccgacaccgtcgtcaagctcaacctgcagaagctcgcgtccgtcaccgaaggaaccaacggcgacggtgacggtaagccacactcgcggtgaggaagcaagcaagcctcaataaaaaaatatatatatatt

SEQ ID NO: 28458 - DNA, 279 bp, Glycine max
  Clone ID: LIB3051-064-Q1-K1-G12
gccacgcgtccgaccactcgtccgcccactcgtccgaaaaaaaaaaaaaaaaaaaaaaagaggaaaaaaaagagaaaaaaaaaaaaaaaaaaataaaaaaataaaaaaaaaaaaaaaaaaaacaaaaaaaaaaaaagtcaatgaggttcaaactactcatattccctaacccatcattaacaattcatttagcgctgatcagtctcacagcttatagattgaataaaggcataatgattaacctaaaaaaaagggaaactcactataattagacaactt

SEQ ID NO: 28459 - DNA, 220 bp, Glycine max
  Clone ID: LIB3051-064-Q1-K1-G6
cgcctgctgtcacgcttcgggggacgcgtccgtaaacacgatgatagtaacgtatatactattgccatatgactcttgactctttgaggttgatcctttatacgtttatcagacagctttaacttgacaatcacttcttgtaacaaaaaattcctttaatgaagggttaacgggatcaacggtcaacaacgtatatatagaagcagcagtgatagctact

SEQ ID NO: 28460 - DNA, 345 bp, Glycine max
  Clone ID: LIB3051-065-Q1-K1-B10
cccacgcgtccgaaaaaaaaaaaaaagagatataaaaaaataaaaaaaaagaaaaaaaaagagaaataataaaaaagaaactagaaaaaaaaaaactaaaaaaacaataaataataaacaagtgttccatcgttttaatggtcccaagtttccttatacttccttattactttttaattttttttttgtgtcacctttttaaaattcattgcctttccttttaaaacatcattcctgtaaatacctttgattctccaaacttattcacctttcaaaccatccccttttttcaaatttccttattacctaaattgccctgcccaatagactttcccaacattttcc

SEQ ID NO: 28461 - DNA, 424 bp, Glycine max
  Clone ID: LIB3051-065-Q1-K1-B8
gtggctgtttgtggtatggttggttcagggaaatcaagttttcttttgtgcatccttggagagattcctaaaatttctggtgaagttagagtgtgtggctcttctgcatatgtctcccaatcagcatggatacaatcaggaactatagaagaaaatatcctctttggaagcccaatggacaaagcaaagtacaagaatgttcttcatgcttgttcactgaaaaaggacctagaacttttctcacatggtgatcttacaattattggggatagaggtataaacctgagtggtggccagaagcagcgggttcagctggctcgggcactctaccaagatgctgatatttatcttcttgatgatcccttcagtgcagttgatgctcacactggatcagacttgtttagggagtatatattgacagcac

SEQ ID NO: 28462 - DNA, 340 bp, Glycine max
  Clone ID: LIB3051-065-Q1-K1-D10
cccacgcgtccgcccacgcgtccgcccactcgtccgaaaaaaaaaaaaggaaaaaaaaagagaaaaaaaaaaaggaaaaaaaaaaaaaaaaaaaaaaaaaaaaaaaaaaaaaaaaaaaaaaaaaaaaaaaaaaaaaaaaaaaaaaaaaaaaaagaaaaaaaaaaaaaaaaaaaaaaaaaaaaaaaggggaccctttataggagacaaaaccttactaccaaggaattaaaaataataaacatttacaataagagtaacaaaaattaaataaagtggcagaagttaaaaaaccgataagcctgaaaaaaccgggggatacccagattaattaatttgaaac

SEQ ID NO: 28463 - DNA, 426 bp, Glycine max
  Clone ID: LIB3051-065-Q1-K1-E1
ccattattaattccgttagcaaaacttcaaaccccatcttcttctctagagaaagattgatctctggcataggcgcaaataaccagatataatggcggtatcggtgaaagtcagcaacatctcttcaactgcaaccgagcaagatttgagggaatttcttgcgtttccgggaaaaatcgaatatattgaaatgcaaagtgataagggaaattcccaagttgcgtatgttaccttcagtaatccagagggggcagaaactgcagttcttctctcgggggcggtggtgtgtggacagtctctaaccatagctttggctccggatcatgctctgcctgcctctgctgcatctgcaacacagactagtaatgctgagagtggcgaatctggtttgagaaaggcagaggatgttgtaaccggcttgctagc

SEQ ID NO: 28464 - DNA, 435 bp, Glycine max
  Clone ID: LIB3051-065-Q1-K1-E3
agaggaggaaaaggatgacaaaattgatgtatagaaggtcaaggtgaaagaagatgatggggaagatgaagggaggaaggagaagaagaaaaaggaaaagaaggacaaagatgaagaaacagacacattaaagggaaaggaaaaaaatggtgatggtgaagagaagaaggaaaagaaagagaatgagaagaaaaaggaaaagaaggacaaagatgaagaaacagacacattaaaggaaaagggaaaaaatgacgaaggcgaggatgctgaagagaagaaagaaaagaagaaaaaggaaaagaatgacaaggatgacaaaactgatgtatagaaggtcaaggggaaagaagacaaagagaaaaaacaaaagataaagaaggaaaaagatgacaaaattgatgtagagaaggtcaaggggaaagaagatgatgggga

SEQ ID NO: 28465 - DNA, 436 bp, Glycine max
  Clone ID: LIB3051-065-Q1-K1-G7
cccacgcgtccgctttaattttttttttatttcattcgataatattaattatattcctgttgagtgaatactgtcttattccttggtttttgttctccatttgaaaattgctacctaaaccagcctatcgaaatctgaatattttcctaaactgaatttctctgtccttttttgttaacctatgaattaggccgtatttttgttaaaaaagaaaaccaattccccggggtttattataattttgtgccaagtttgtttcgaagagggtgtgttcttgttggagaatgcatattgagggtggtgggggagaacaatggcgaatctggtaccgggggtgcttctgaagcttctgcagcacatgaacacggatgtgaaggttggtggtgagcacaggtcttcgcttttgcaagttgtgagcattgttccggcacttgca

SEQ ID NO: 28466 - DNA, 438 bp, Glycine max
  Clone ID: LIB3051-065-Q1-K1-H4
cccacgcgtccgcagaaacatgcgattgattggggtatagagtgcatgttgcgctactccaaccgctccatattgagcctcatggaaactcaacctatggtggaactcgtgtacacgttggatgtaaagggttcagtggaacaattcaacgaggcgctgcagagcttgatgaggaatctaacacgcacagctgcatcaggtgactctcgtctcaagtatgctacggctagcacacctgctccgagttttcaaaccatatttggttatacgcagtgcacccctgatttgtcatcggaagattgcaccaagtgcttggaagaagctatttcaaaaattccagagtgttgtagtggcaaggctggtggcaatgttttaaaacccagttgtagaattagatttgacccctacgtcttctatggaccaacattaaaattagac

SEQ ID NO: 28467 - DNA, 399 bp, Glycine max
  Clone ID: LIB3051-066-Q1-K1-A7
aaaaaaaaaaaaaaaaaaaaaaaaaaaaaaaataaaaaaaaaaaaaaaaaaaaataaaaaaaagaaaaaataaaaaaaaatgaaatcaaaaaacaaaaatattatattatattacaataaacttaattaactgtccttatcttcaaattttacttactgtaattcccctacccttacctaatttaatcccctttaaaaacatctaacttttaccaaatcacgttttatccaattggtccactcctatcgaatttcccttcacttaaatatactgaatttcaaattggaccctccctttaacgattcattaaacttgttgtgtattgttttttaactcaacttaaccttttcacttgccatagccctaacgtccacttcttttatttcacttatttcctt

SEQ ID NO: 28468 - DNA, 278 bp, Glycine max
  Clone ID: LIB3051-066-Q1-K1-B1
acgcccacgcgtccgcccacgcgtccgaaaaaaaaaaaaaaaaaaaaaaaaaaaaaaaaaaaaaagaaaaaaaaaaaaaaaaaaaaaaaaaaaaaaaaaaaaaaaaaaaaaaaaaaaaaaaaaaaaaaaaaaaaaaaaaaaaaaaaaaaaaaaaaaaaaggggcttaagtttaatagaatctaaatttaaatacacttgatttaaatgtaaaaacctttttataaatcacctaaattgaattaaatggcacgtcttttaaaacgttttaattgaaaaa

SEQ ID NO: 28469 - DNA, 453 bp, Glycine max
  unsure (1)..(453): unsure at all n locations
  Clone ID: LIB3051-066-Q1-K1-D12
gaatgaacttggtgttgtttctgcagaaagcattgctggtgcaactatggttccagtaagttggacagagatgcagtgcccgttaactggtcaaattgagcaaagaaaggttgcaaaggctgcaagctgactagaatacttcatcgagctggaatctgttctgttttgtagaaatagactaacatgcgttgttgttagggtgagaaattatagccagtttgtattttacattgcaagttggcctacttataaagtatcacanacctgngatttcaattcactcgtgctatgagcaggattttatttactttntattgtattttttcaatttaaagctattgattactggcattttaagacatggttcaattttcaactttgaaaaaaaaaaaattaaataacaaaaaaaactaaatataaaaaacataaaacaaataataactaaaaaattaa

SEQ ID NO: 28470 - DNA, 252 bp, Glycine max
  Clone ID: LIB3051-066-Q1-K1-E5
aaaaaaaaaaaaaaaaaaaaaaaaaaaaaaaaaaaaaaaaaaaaaaaaaaaaaaaaaaaaaaaagaaaaaaaaaaaaaaaaaaaaaaaaaaaaaaaaaaaaaaaaaaaaaaaaaaaaaaaaaaaaaaaaaaaaataaaaaaaatagacactcttatataaacttattaacttaactataactaaaaatgctatcaattaaattggaagagaccatactaaataaactaattgtagttaataccgatatatca

SEQ ID NO: 28471 - DNA, 450 bp, Glycine max
  Clone ID: LIB3051-066-Q1-K1-F2
cccacgcgtccgcccacgcgtccgggtgaacctagttttcctatgcgacaaagcctttctggtggtgctcttgatacgatggccagaaaacctgcagatccagaagaggagctcagatggatgtctcaagaagtgcgtggttatgttgaagctgttcttaacagcctcgctgcaaatgttccaaaagcagttgttctttgccaagtagagaaagccaaagaagacatgctcaaccagctatacagttccatcaggggatcaacacaaagacactttgggcatacaagtaggcaaaacttgggaaggtgcataatgtatttgggtggagcaatgggcttgcatatttaatgatggtccttgcattttcaacttggtcttggataggattatatttttggtggctctgatggtttggctattgctacttcaagggagttgccatttctgata

SEQ ID NO: 28472 - DNA, 311 bp, Glycine max
  Clone ID: LIB3051-066-Q1-K1-F5
atgtctgattcatacattatatatattctgaaatactctacccgttaggggaaagagattgcgtgtaagtgagtgagtgttgctggtaaaggcgacggtcctgctatcctaatcgatttgggaacaacgaaatcttgactaggtgtgtgaccacactatcgatgctaaattataccctaggatcaggctagcagaactaagccatactacctgcgtatcatggactcaaaacaactgatcgatgatctgccgagaaatcacgaccatatcaaccgttgactcccagatgatgatgctaagcacttgatgga

SEQ ID NO: 28473 - DNA, 377 bp, Glycine max
  unsure (1)..(377): unsure at all n locations
  Clone ID: LIB3051-066-Q1-K1-G1
ggtggcttcaaggtccaggttatggctgatgcgagtaaatcagacttggatgaggctgaatggtccgaattccattctaatgtgaagcgtggggacatagttggtatcactgggtttccaggcaaaagtaagaagggtgaacttagtattttccccaagacttttgtgttgctgtctcattgtttgcatatgatgccaaggcaaaagtctgctgctgctgcggataatgcanatttgaagaaaaatccatgggtaccaggaagtaccaggaatcctgaaccatatattttgaaggatcaggaaactaggtttcggttacgccattgggatttgatgctaaatccaaaggttcaggaattttttagaacccggcttaa

SEQ ID NO: 28474 - DNA, 386 bp, Glycine max
  Clone ID: LIB3051-066-Q1-K1-H6
gcgtacgctttcgaaagaaacgggtggtggctgcttcgaaagcttaataatatgtttatatccagatcgtgatggtttcctcagcagcaaactaacaaattactcatatcatataataagatcgaccgttctctctcataagccaaacgtctagatgaacttgtttctcaatctatctccctaatttccgatcatcgactaggttactcaacgacatccgatgtatctgtaatacttgcattggctaatacaatgctaaagaatccaatcctatgaagtgtataagataagccatatacaacaaatggttaaaaagcctacataacttatttggacctaaacctcttgacaaggtactatttgcccatttaccacaccccaaaaat

SEQ ID NO: 28475 - DNA, 344 bp, Glycine max
  Clone ID: LIB3051-067-Q1-K1-A3
aacagatcttagcattccattctgagacacgcttctctacagagctcttactgctatatctggggcgtgttcccttcattatcggaatgttaatcgttgccatctaattcgatatgctggagtgatcgccattgcaaggtggtaccctaaactatgatatttgactctgagtctcttgcacaacttctgtgatatagctcatggctgaattggcagaacactgctcattgttgacagaaatagtactttcacactgtcgaccaactacacatgctgtactaacacatcttgtaaaacgctgctgcacagaacttgagtcatgccacatggtatattgctctgga

SEQ ID NO: 28476 - DNA, 289 bp, Glycine max
  Clone ID: LIB3051-067-Q1-K1-A6
tcccacgcgtcctcccactcgtccgtccactcgttctaaaaaaaaaaaaaaataaaaaaagaaagaataaataaaaaaaaaagaaaaaaataaaaaaaaaaaataaaaaaaattaaaatataaaaaaaaaaaaataataatctaaataataatatttatacatttacacatcttacagtttatttatatacttatatattcaacatatctctctttatctaatataaactgcattttaccaattcttcattataaatcctctgatgtactaatctattctctacttata

SEQ ID NO: 28477 - DNA, 404 bp, Glycine max
  Clone ID: LIB3051-067-Q1-K1-B1
cccacgcgtccggtcttaaaagccacgcgaatgagcttaagcttaacctccatatttagctgggtgcgtgaataaaaccatgaggcataacctaatatggcttactattttttcctctttcgtcctcgttcctctcgtgatcttgaattcattcaacacctttcccaaattaagctatagccaataaaacaaaatagtataataattttcattaatgatgagcagcggtagtggtagtggcagcagtagtggtagcccttgtggtgcttgcaagttcttgaggaggaagtgtattccgggttgtatatttgctccgtactttgattcagagcaaggtacaagccattttgcggcggtgcacaaagtttttggggccagcaatgtgtccaagcttctccttagca

SEQ ID NO: 28478 - DNA, 428 bp, Glycine max
  Clone ID: LIB3051-067-Q1-K1-B7
aatgataatactctcttttttaaagatcacgttgttgataatcaaatgattattgaagatagggtaacattttagagaaaatattactttatgcgttttatttgcatgcatatagtctttgattttgttttaattttcaatatctcttatatatcattcaattattgcattaatgtgtagaagaagttgtggtgcaaactgaggcaaagacttgcgagaacctggctgatacatacaggggtccatgcttcaccactggcagctgcgatgatcactgcaagaacaaagagcacttgctcagaggcagatgcatggacgattttcgctgttggtgcaccaaaaactgttaaatggatccattcactccaacgtgaagaagatgcatgcagcgctatattataaataatgaaactactatatactatata

SEQ ID NO: 28479 - DNA, 302 bp, Glycine max
  Clone ID: LIB3051-067-Q1-K1-C4
acgcttaatattcttgcatatacattaaaaactatattgacttaactgataagttcacattcaagggcgacttctccaactctgtaactgctgctacatctttacagatgcttagcttcatataccaacatcattatcccactggctataacttgctttacaattgttataaacgtaatgggaaatgttggacctagaacaatcaagaatataacatgaagagaggactcataaactaagtttgtactacacagtatataaccatcagcttaagcaaactagaattttatctacagcataca

SEQ ID NO: 28480 - DNA, 444 bp, Glycine max
  Clone ID: LIB3051-067-Q1-K1-C5
acaataatgaattgtgaaacaaaaaaatgcaaataaatcattaaaaatagtataaaataggaggtataaagtaagattatatgcctaattgactgttttgaaatgttaaagtagtaggtgataaagcaaagaaatcataaaaaataaaataaaataaaaaatattgaataagattatatatatgattaactattatgtaatgctaaaagtagtaggtgataaagcaaagaaatcataaaaaataaaataaaataaaagatatagaataagatgatatatatgattaactattatgtaatgctaaaagtagtaggtgattcttagtcttgaatttctatctcttgtcaaattcattgaatgtaatgcatcgttataagaactttctcctcttatttgcacataaaagtttcaataattgtaagttaacataatggtacagtattt

SEQ ID NO: 28481 - DNA, 379 bp, Glycine max
  Clone ID: LIB3051-067-Q1-K1-D3
cccacgcgtccgcgctctgataacatcaggactagtatttccgctcagatgaccaaacagtaggctgggtgattctaccaagagaggcagacatacttataatgatcatgccaatgacattgctcagaataccaaagactactccagtgacacatcttcatagaaccaacgaaaaacttcaatacattacatctgaagctgatcaatacagtacagataaagctcgagaaataaaggatgcaccatcacataatgcaagtcacatacctaatgctatacatcaaaaatcacattacttgataaagacattattaaaacatcaccttaattccgatctttgaaaatctatatgtttgaatcacttactaccttttaatta

SEQ ID NO: 28482 - DNA, 432 bp, Glycine max
  Clone ID: LIB3051-067-Q1-K1-E10
tctaaaaaaaaaaaaaaaaaaaaaaaaaaaaaaaaaataacaataaaaaaaaaaactaacttaaacacgaaagcgtaaaaaataaaaaaattttctataaataaatactatataaaaataactatcaaacataaatacaacttcataacaaactaaaacccttcctttacccaaatttatagcctttcactacattcacctatcttcagcttaagatacctcatattgccccgcacttatacccctttcctacatttaaacctactaaatatacttttgaacacctcatttctcatcccattatacccgaatgcatttattcactaactcacttttaacaatccaattaccagcgtctatatcctccgatctcattcctttcttccctttctttttcaacacgttactcgtcttttcccgtaaatccctaat

SEQ ID NO: 28483 - DNA, 342 bp, Glycine max
  Clone ID: LIB3051-067-Q1-K1-E4
cccacgcgtcctaaaaaaaaaacaaaaataatataataaaactaaaaaacaaaaaacaataaagataagaaataaaaaaaaaggttgtaaatataataaaacaaatacatttaaaataaaaaatcaaagattgcacttactaaaaaaagatatcgaatataaatacacataacattacttgatgaacaagattcctcttctgttacaaatgaaccctgttcacaagaagattccccttctcatccacaatttcaaacccatttccaaatccctcattgctgatcactacattgtaccacgtttggaatgacagaaatcccttgctgccttcaaacccttacc

SEQ ID NO: 28484 - DNA, 422 bp, Glycine max
  Clone ID: LIB3051-067-Q1-K1-F3
tgacatgcatgctgactactctggccaaggatttgatcagcttttagatgttattaacaagagaaagcataatcccaatgatcgaaggatcattctctcagcgtggaatccatctgatcttaaattgatggcacttccaccctgccacatgtttgcacaggtccgcagctatatttgggtttctctttggaagagctctctctttttctctcatgaagttttgtcaacttccttttattgttttttccctgtagttctatgtagctaatggggagctatcatgtcaaatgtatcagcgatctgccgacatgggcctgggtgtcccatttaatattgcatcttatgcactcctgacatgcatgatcgctcatgtttgtgaccttgttcaggtgattttatccatgtaatgggggatcacatgt

SEQ ID NO: 28485 - DNA, 366 bp, Glycine max
  Clone ID: LIB3051-067-Q1-K1-F7
gtacaaccactggggtgtcagctcacgatagggcaacaacagtcttggcccttgcgtctagagattctactccaggcgatttcaaccggccaggccatattttcccactaaaatacagggaaggtggtgtcttgaagagagctggacatacagaagcttctgctgatcttgctgtacttgctggcttggatccagtggcagttctgtgtgagattgtagatgatgatggttccatggctagactgccaaagcttcgccagtttgcagagcgtgaaaatttaaaaattgtatctattgctgacttaataaggtatgcagttacaattcatggaccatgtaataaaattcattgcatgcatatttatg

SEQ ID NO: 28486 - DNA, 408 bp, Glycine max
  Clone ID: LIB3051-067-Q1-K1-H12
cccacgcgtccgtttgtgttcttttattagtgccaacaaatattggttatcattaatcctatggtgcgttcctctttaattgttggtatcagcttatttttcccttctccatgctccaagcactcaatcttgtaatcttgacggcatgcatttccattattgaaagcatatagttgtgccttttcattaattgctattgcgggatatactctggctgtgatgcaagccctttcctatcctacaaaactcttcactactgagcgatcaatcaaagagtaacccaatatatgattaatgataaccaatatttgcgttcttttattaatgccaacaaactttattattactgtactactatcaccatagtgcttgtcattcacgttaaaagcaataattctatcagaaaat

SEQ ID NO: 28487 - DNA, 367 bp, Glycine max
  Clone ID: LIB3051-067-Q1-K1-H2
acgcacatatgcgaatgccgggctggtggatgaagcaatctctctgtataagagtattcctcggtttaggtgtgtgaattggacagaatccttcaacaccatgttgcagataatggtcaaggagaaccggcttgaaattgcacaccggctttttgtggagagctcttgtggttaggaagtgaggtctctggttcgagcattgaactggcttatgtatgctctttgtcaaaagagtcgctctgatctggcattgcaattattccaagagatggattatcaaagttgctaccctaatagggatagatatgcaattttgatgaagggactgtgccaagacaggatgttgcatgaggccacccatttgttg

SEQ ID NO: 28488 - DNA, 414 bp, Glycine max
  Clone ID: LIB3051-067-Q1-K1-H3
cacagatatgaaaccggggaccatgttggtgtttactgtgagaatttgtctgaagctgtggaagaggcgataaggttaataggtttgtcaccagatacctatttctcaatccatactgatgatgaggatggaaaaccacttggtggaagctccttgccacctacattcccaccctgtactctaagaaaagcacttgcacaatatgcggatgttttgagttcacccaaaaagtctgccttgcttgccttagctgctgatgcatctgatccatctgaagctgatcgactaagacatcttgcctcacctgctggaaaggtttaatattttattattttatatcaagggaattttaagtaactttttctacttatttttctcattcgtatgctactcttgtgtgcctttgtaggatga

SEQ ID NO: 28489 - DNA, 413 bp, Glycine max
  unsure (1)..(413): unsure at all n locations
  Clone ID: LIB3051-068-Q1-K1-A3
attacgtcagattgtggagcagtctctatcattcacgatgagcaaggttatgcaaaaactgcagaggacgctatagccgatgtctttagggcagggatggatgtggagtgtggtgattacataaccaagcatggaaaatcagcagtgtcccagaaaaaactgcccatatctcaaatcgatcgtgcccttcaaaacctcttctccattagaataagactaggcctattagatggaaaccccaccaagcttccatttggcacaattggtcccgatcaagtgtgctccaaacaaagcctncaactagccctcgaggcaacaggggatggcataatccttctaaagaacacaaactcacttcctccaacttccaaaaacaaaccccactattgccttaataggccccaatgccaatg

SEQ ID NO: 28490 - DNA, 311 bp, Glycine max
  Clone ID: LIB3051-068-Q1-K1-C7
tacgactcctgaatataaattgcgtttgttgatgatttatgcatctgtctgtcctgaaaggtttgattgtgataaagcttcaaaactaatgcatttgtcaaaactatcacctgatgacatgaaagttatcagtaatatgcaacacctgccggtatcattaatctgaaatcatctgctacttgttggtactcactcaagttcagtaatccatagaccaaacaagcaactcgcaaatatcttactgaataagaataaacatggcaattatctcgattttatcccatgttaaaagatctcattgaaaatttaat

SEQ ID NO: 28491 - DNA, 469 bp, Glycine max
  Clone ID: LIB3051-068-Q1-K1-D5
aaatacagaattttcttgaccaagctgttggtgctagttgtgagggattaagtattaaagcattaaatgaggatgctacatatgaaccttccaagcgatcactcaactggctaaaactgaagaaagattatatggacagtataggggactcactagatttggtacctattgctgctttccacggtcgtgggaaacgtacaggagtttatggtgccttcctccttgcttgctatgacaatgataatgaagaatttcaaagtatttgcaagataggaacgggattctctgaagctgtgcttgaagaacgttcttctagtcttcgttctaaagtgattcccaaaccaaaggcatactatagatttggagaaacaataaatcctgatgtctggtttgaagccagtgaggtgtgggaggtgaaagctgccgacctgaccattaaccctgttcaccgtgctgcagtgggcatagt

SEQ ID NO: 28492 - DNA, 320 bp, Glycine max
  Clone ID: LIB3051-068-Q1-K1-E8
aatgtctataaaaaaaataacttctcggttcttctaaaactcaatactaatgttaaaatagcgatcctcatgaaaaacaactgatgataacaaatctctttctaactgtaagcccttcttcttcacctgcaacaactgatcataccaaccaacctaatattcatgtctatcctaattgctctgccatgcactattatctaccaagaattatcattataccatactgcaactcaactgaaactacatgtcattctccacacccatacatgttattaccaccacatcctattatactaccttattggccaccttatgcaaca

SEQ ID NO: 28493 - DNA, 122 bp, Glycine max
  Clone ID: LIB3051-068-Q1-K1-G1
aaaaaaaaaaaaaaaaaaaaaaaaaaaaaaataaaaaaaaaaaaaaaaaaaaaaaattataagaaaaattaggaaaaaaaaaaaagaaaaaaaaaaaaaaaaaattggtgtggcctttttaa

SEQ ID NO: 28494 - DNA, 337 bp, Glycine max
  unsure (1)..(337): unsure at all n locations
  Clone ID: LIB3051-068-Q1-K1-G6
cccacgcgtccgcgcactcgtgcacagcatccttcgctttaaactgtttgtgtgtctatgggctatctgcgaaccgaacatgtcatcgacaaagggttctacaagctcaacgagaactccagcatacattcactaagcttgtcaacctgctattctcgtattangctatgcgaataatcactggtggtcttcatcatggtgggataccacctatattatcgagctcaaactatagagatcgatacgacattgcctaccattgaataatctgttagactgggaatacaataacataagattactgattgacattaagctggtcaatactgaacatgct

SEQ ID NO: 28495 - DNA, 278 bp, Glycine max
  Clone ID: LIB3051-069-Q1-K1-B4
ttcagtacaccaagatcctgtcgttgcaacatcaccaacccggcatgcaatttcagcacacgaagtgatgtatgagctgctcggatgttccctcgaggaggcaacatttggttcggtgcttgcttcacgagcaattagagcagctcattgtctgacttcaattcatttctcacctacatctgagcacatactacttgcgtatggtcagcgccatggttctcttcttaaaagtattgacattgatggagaaacaacttttcctttatgtacaatggtaa

SEQ ID NO: 28496 - DNA, 290 bp, Glycine max
  Clone ID: LIB3051-069-Q1-K1-C7
ctctctgtgtatttccctacctctcccttcaagatgcatatcttcatcaataccctgaccggcaataccatcagccttgatgtggaaagctatgacaccatctacaacgtctaagccaagatccatgacaaggaaggaatcctccctgaccagcaacgtctcattttctcctgaaagcaacttgatgactgacatacccttgctgactacaacattcagaacgagagtactcttcacctcgtcctacgtctacgtcgtggcatgcagatctctcctaaaacactcaccgt

SEQ ID NO: 28497 - DNA, 384 bp, Glycine max
  unsure (1)..(384): unsure at all n locations
  Clone ID: LIB3051-069-Q1-K1-C8
cccacgcgtccggagagggaagacggttgtggggattcgatgggggccaccgttcactcgccgctagtcacttatgcttccgtcatatctctgcttacactctgtcctccgtttgtcatacttctgtaagtaataatctcatttactctctctctgatctgaaatctgaatgattgaattgcgttgcagatggtacaccatgactcttgctgacggatctgtttccgagacattccattatttaaggcagaatgggttgcaaggtttgctacatatatggcccacccccactcccaccgnctgcaaaatcattgcagtctatgctgcatttgaagcaacacttcagcttcttcttcccgggaaaaccgtttacggccctatttc

SEQ ID NO: 28498 - DNA, 421 bp, Glycine max
  Clone ID: LIB3051-069-Q1-K1-D11
acgggcaaaggctagattcttgtatggagagtccatgggaggagcagtgagccttctttggataggaaggacccttcattctgggacggtgcagttctcgccgcacccatgtgtaaggtatgaactactaataataataaaatttttcaacaatattgttagtctaagaaaatgaatcatactaatggaatacaaataattcgagtaactctataaattgcattaattgaataggcactttttcctacgtaaaaattaaacatggcttattcaaatgttgaaacactaagccagatatcatagaaggtgaagccacacccggaggtggtcaacatattacctaaggtcgaggatttaatcccaaaggggaacatagtcccaacaaaggatgtcatcaattaagccttaaaagaccctgcta

SEQ ID NO: 28499 - DNA, 425 bp, Glycine max
  Clone ID: LIB3051-069-Q1-K1-D12
acttaacctcaatttccaggtaggcgtacgcatgcaaattaataatatcgaccaaaatgatgatttctttactaacatatggattaagaatgtcgagtttctcaaaacttcgtactgtcaatcctttttatactatgctgagacctgtaatatattttcattctaaggtatccattgcaacttctttactgcgagcaatagctaccaaatgcattcccaaagccatgttttaacatatcactgacaaagcaatcaatacaattatactcacccaacatgaagcaagacgtcttgctcacaattctattggaacaaaccataatctatattgtattatctgccaatgaactcctattgctgctaaagtacttaagtcaatgcggatcaaccttcaagattcaccaatcgaactataaaaaataatt

SEQ ID NO: 28500 - DNA, 363 bp, Glycine max
  Clone ID: LIB3051-069-Q1-K1-D5
agaatatattgagtatcttattgacacttaaagatgtgagggatgatcatggaaacgagcggactgataccgagattgaaggactacttctgaacatgtttacagcaggaactgacacatcatcaagcaccacataatgggccattgcagaactaataaaaaacccacaaattttggccaaactccaacaagagttggacaccgatatgggtcgagataacagtttcaaagaagaggacttggcccacctgccatacttacaagctgttatcaacgaaacctttaaactctacccatcaacctctatttctgtgccacgtgctgattccgatagtagtgagatatttagctaccacatcccaa

SEQ ID NO: 28501 - DNA, 244 bp, Glycine max
  Clone ID: LIB3051-069-Q1-K1-E8
atcacatcttatgcaatctattacattaatatttatatatatactattaaaattgggagaggttacaaatactggtggaggtgtttaaacaatattataattaatatttatattaacaaatatttacaaatgtattaaatactaatgacgaattattaattctactatataatattatatttaatatataatattttaaaaaataatatgcttcaatataatatttataaaacattaaattaat

SEQ ID NO: 28502 - DNA, 384 bp, Glycine max
  Clone ID: LIB3051-069-Q1-K1-G2
acgtttagtttcaacatcccatttatcgttgattctagtcaatcagactagaattacgatcaggtatgcaaatcacattctagtgtaacagagtgtggacatcataggtatcactgctttattcaggcacaagtacacaacggtgaacttagtattttccccaagactttcgtgtatctttctcattgtttgcatatgatgccaaagtacaagtctgactgcgctacagttaatgcacatctgaagaaaaattcatggttaccaagaagtaccattaatcctaacacatatattttgaaagatcatgcaactaggtatcggttacgccatctagattagatgcttaatccacatgatcaaaaaatatttaagacccggtctaaa

SEQ ID NO: 28503 - DNA, 413 bp, Glycine max
  Clone ID: LIB3051-069-Q1-K1-G9
agcagcttgaggatggacgtacacttgcttattacaacattcaaaaggagtccactctgcacttgttactccgtctgcgtgcgtcgaatacaaatctttgttaagaccttgaacctacagacaatcaccctttatgtccagagctctctacaccatcgacaatattcatgctaaaattcaccacatacatggtatcccaccacaccaacaactgcttatatttgcatcaaaacacctagatcatatccttacattacatgattacaatatacacatcgaatctaccctccacttggagctccgtcttaatcatgagctgcaaatatctatcaacaccttgcctcatcagacatttactcttgacatcgccatttctaaccccacttacattgagacatctaatattcaacaca

SEQ ID NO: 28504 - DNA, 404 bp, Glycine max
  Clone ID: LIB3051-069-Q1-K1-H5
gtttttcttcacagaagcaccttctagcatgaggtctttggccacatcactctcttgggccgctttggctgtagggtattaccttagttcagcaattgtgtcaattgtaaatagtgtcactggcaacacctcacatagaccatggctctctgggacaaaccttaaccactaccacctagagaggttttactggctcatgtgtgtgctgagtgcgttgaatttcttgcattacttgttttgggctatcagatacaagtatagagggacaggaactacaaacaactgaaaatgaagaaaaattacccaaagggaagttttcaaaatgggatatagataaagccttatgtttaattaccaagggcattaatcaaaatatatattttcgagccataatattatgcttc

SEQ ID NO: 28505 - DNA, 401 bp, Glycine max
  Clone ID: LIB3051-069-Q1-K1-H8
cggatattgcctatgtttcatttcttgaaaggttccaaattgtcttctctgaaatttttgagcacgacatcacagcaggaagacccaaactagccacatggattcaggaggggaataagatcgatggttataagcagacaaaagttgacagggaggaatatctggaagctttcaagaaaaagtttttggcttgggcctgatgagtggcagtgggctggcttgttgctgtgggctggcttgctgttgtgggctacttttctgatagaatgctttttcagtttaaaaatgatgtgttctatttgcttgttactttgacttctcattaatgcttttgtatgggaacatccaaatgtatagtcccgcaatctataataaataagttgaagacaagtttgacttgg

SEQ ID NO: 28506 - DNA, 310 bp, Glycine max
  Clone ID: LIB3051-070-Q1-K1-A1
cccgggcgtgcgactacgcgtccgattttttgactttcttgggcagatcacagactcgggcaggagatactctaaactgcgaaaaaaccactgcgatcaatggcaacgatcaagggcgacaaagctcggcagatcttcgacagccgaggaaatccaaccgtggacgttgacggtactctcatcgatggaagtcttacacagagacagcagtgcgctagcggagcgttaacaggtgtgatatgaggcttcggaattaatggatcgacgctcatactacgctcggaaaggtgctctcaatgctgaggagaat

SEQ ID NO: 28507 - DNA, 465 bp, Glycine max
  Clone ID: LIB3051-070-Q1-K1-A8
aagaaattcaactctctccaaacatgcctctgatagacacagaaaactttccatggcggggctttaataagatcttctttgaccatcttgtgcaagagatgaaaactttggagttaggagagtggtggctttgcaacactacttatgatcttgagcctggagcattttccgtatcaccaaagttcctacccattggcccattgatggaaagtgacaacagcaaaagtgcattttgggaagaagatacaacttgcttagagtggttagatcaacaaccacctcaatctgtcatatatgtttcctttggcagtttggcagtaatggatccaaaccaatttaaagaattagctcttgcacttgatctccttgacaagcctttcatttgggttgtacgtccatgtaatgacaacaaggaaaatgttaatgcatacgcacatgatttccatggaaagcaaggtaaaatag

SEQ ID NO: 28508 - DNA, 321 bp, Glycine max
  Clone ID: LIB3051-070-Q1-K1-B9
actcttgcgtatgtacctcacattgtgttcatatctttacgtcgactcctaaccacccagaacaggatccattcgttctgcaccatattcaaaaagttattaagccaaatcgatatataccgttacgagactatccaactgcagaccttcctcatgaaaggttctataacaactaacaaacgatcagtcataacttttatcacagaagttatggaactcttgcttactatacatcaactgagacctcgacatatatattcaaacaacttacttactatgttcacacacatcatgtatactgcaaacaagttgataaccctt

SEQ ID NO: 28509 - DNA, 146 bp, Glycine max
  Clone ID: LIB3051-070-Q1-K1-C10
acgcggactcgtgggctgacgcttgggcttacgctttggcggacacgtgggaaaaaaaagaaaaagtaaaaaaaaaaggaaaaaaaaaaaaaaaaatataaaaaaaataaaaaaaaaaaaataaaaaaaaaaaataaaaaaaataa

SEQ ID NO: 28510 - DNA, 445 bp, Glycine max
  Clone ID: LIB3051-070-Q1-K1-F2
cccacgcgtccgcccacgcgtccgcccacgcgtccgaagaaagaaatgactgggttggggattggtgtggcaagcatgaaagctggggagcgtgcgttggtgcgtgtgggctgggaattaggatatggagaggaaggaagcttctcttttccaaatgttccacccaaggcagatttagtttatgaagttgagctcattggctttgatgaaacaaaagaagtaagttgccattaaattatggatggctgtggacttggttagatgcttatagcacctgatttcacaggggaaagctcgcagtgatatgactgtggaggaaagaattggtgcagcagaccggagaaagatggatggaaatgctttgtatcaggaagaaaaactagaggaggctatgcaacagccattgcatatatgggagatgacttcatgttccagttgtttggga

SEQ ID NO: 28511 - DNA, 214 bp, Glycine max
  Clone ID: LIB3051-070-Q1-K1-G11
acggatttgtcgtacaggatggtcttaatgtcgtatctttattccttgtctataaaattggatatgtattcaaaaaaaaaaaaaaaaaaaaaaaaaaaaaaaaaaaaaaaaaaaaaaaaaaaaaaaaaaaaaaaaaaaaaaaaaaaaaaaaaaaaaaaaaaaaaaaaaaaaaatatatagacaaataacaaaaaagacaaaaataaattaaaaa

SEQ ID NO: 28512 - DNA, 211 bp, Glycine max
  Clone ID: LIB3051-070-Q1-K1-H3
attcacgcgttcgattcttgcataattgatatggagacatgataatggatgactcaaatgcgagtgtggcacattgtccacaggtaattgtgtaaaaaatcgttaatatattgatgaatgccaagagaatatggcttgtcagtgcccttaatgttgcttcaataatacctttagcttctacgactgcacatctaatctacatcttcacctt

SEQ ID NO: 28513 - DNA, 377 bp, Glycine max
  Clone ID: LIB3051-071-Q1-K1-B3
gaaattctgggactttgaaactgcaagcaggctagatagctggatagtgcattccggcaacggctgctaacatagccacttgtgcacctgctaaaagggggaacgccaaaggcactgctcaagtgatcgctcaatgactgacggactgtgatccggtcctcacatagtacacaactctgaagaacgaggcggatatgcaccacacacagcttgacttgcagacaacacatctgcataacacactggaaaatcatgctgcgacgccttggtacataggacatcccttttatacccatcagacatatgctatgcccagtcatctaaccttacaaggcacggaccatgtcaccgaaggagacattggctcacatactatt

SEQ ID NO: 28514 - DNA, 340 bp, Glycine max
  Clone ID: LIB3051-071-Q1-K1-B4
ttctgatctggacgtaacctttctctttccttgggcaatatctctcaacaagactgatctgtgtggattttggcctatgatggcctcattatcgattgtgacgatcggattcatctatgaacggaacaggcatgctttgtattgagagtaatcactaccgatcggcgcccaactgtgacgaaggaccctgaaagagcgatgcctacattgcatcaatggattcgccatggatgaccacatacacagctcacagaccgtactctagctctgcatcaatgtcctcagaagcatggagtactcctgcatcttataacgagcacaccgtataagcctaattcat

SEQ ID NO: 28515 - DNA, 466 bp, Glycine max
  Clone ID: LIB3051-071-Q1-K1-B5
gtgcatcaccccaaaagggatgtgggacattatagtgaagcataagagtacgagttgggtcaactaaatgaagatttttcctttcagcaacacgattttgttgtggtgtttgggcacataaggtctcatgaagaattccttgcgaggttagaaaagaacgaaattgggaggacaaatattcatgggcattattagtgcgcaaagtcttaatggaaacaacaaattgattttgaaattcatgtgcaaaatcttgaaaaatgaaaaacacaccagaacgtcttttcattaagaaaacccaatacatttgaaaaaatcatcaataaaggtaacaaaatagaaataacccaaggttgaatagacacgactaggaccccaaatataggagtgaactaaagcaaaaggtgacacaacacatttattgacatgatgactatcagtatgacggacatgtttgcctaattgacac

SEQ ID NO: 28516 - DNA, 383 bp, Glycine max
  Clone ID: LIB3051-071-Q1-K1-C11
ctgaaacttcagaagcggctcgccgctagctttctcaagtgcggtagaggcaaacttcggcgtgaccgtaacgaggccaatgaaacctccatggataattctccactaaacatagagcaattggctaaagatggcttcattatcaggaagccaactaagattcattccccttcccaaactcgcaaaatgaaggaagccaacaggaagggacgtcactctggttatggtaagcgtaacggtacaagatatgctacgctccccaccaaaatcctttggatgaggatgatgcgtgtcctcatacaattgctacacaagtacagggaatcatagaagattgacaaacatatgtaccatgatatgtacatcaaggtaaagggtaatgt

SEQ ID NO: 28517 - DNA, 448 bp, Glycine max
  Clone ID: LIB3051-071-Q1-K1-D3
gccacacctccgggtaggcgcacgatacgccttggtttgcgtgcgtggcacagaataattaggagcgtctataacaagcatggcacacacactatacgaccttatgtctgcctataggttggagaaacttgatgagtacattatctcacgcatgtacatcaacgggtaccaagctgcaaaggatgatcttactgcatatgcaaccttgccaactgctacatcagatgaatatggaaatgtgtgcacgtggtacaagcacatcgatgctctgctgagacatctctagtgatcatggctagggatctggtggtatagttgagggatccctgggtgcagaacctgacacaactccgacagctgctgacactaaggctggtatagctgaagatgacgatgatgacgatgtcgatttgattagtgaatagacttatgaagacatgaacgcaac

SEQ ID NO: 28518 - DNA, 326 bp, Glycine max
  Clone ID: LIB3051-071-Q1-K1-D9
ctagcaccatttccaaacaatacccatcaatgtctttatccctcatcgatcatatattcattgatctgtatacaaaatcctcagaaactactactctctgccatgaccatggaatacataaccttataactcatcatcatatacgcaaaggacatcaacaatggtaatcttttatccaaaatggacgtatactccgacgttttgctctgcatgaaccctcttcacactcatgactccaccactcacatccacaaagactccagctgcaaccctacgtagcactaccccgtgaaactatccttcaacgaatcgctatctatggaaaa

SEQ ID NO: 28519 - DNA, 325 bp, Glycine max
  Clone ID: LIB3051-071-Q1-K1-E9
cccactcttccgtccacgcgttcggcaagatctctattgactctaaggatgtcgatgtgacggaatggaaaggggacattctggcagtgggcgttacggagaaagatttgtctagagatactaactcgaacttcgagaatgcgattctgagaaagatcgactcactgttggatggtttattaactgaatcctcttatgaagaggatttctctggcaaagttggtcagtcaactgatcttagaattacatgacttggatcaaagaaggttgtattgattggtcttggtcaatcaccttgcactccttcaccctttaagggtcttgt

SEQ ID NO: 28520 - DNA, 351 bp, Glycine max
  Clone ID: LIB3051-071-Q1-K1-F5
cccacgcgtccgcccacgcgtccgatgcaagcaaggttggtgctactgtgaccaagttggggggctcaaatgtcacccatgtaattgcagcaactgatgcacatggagcatgctccaagacgttgaaagttctgatggcaattctaaatggacgatgggttctaaaaatggattggataaaaacatgcatgccagagataaatcctgtagaagaagaaccctatgaaattaatcttgacaatcaaaggtgtcaaagtggcccaaaagcttgcagacttaaggcattggccaatgagcccaaactattcagtggcttaaaggtttatttttctggagaatacgtgtcaactt

SEQ ID NO: 28521 - DNA, 470 bp, Glycine max
  Clone ID: LIB3051-071-Q1-K1-G7
cccacgcgtccgcccacgcgtccggtggaaaattaatgaaggtcaagcacaagtacaggatggcaacaaatttaacaatatctgagaaaagaagatgctcttccttggtactcctggaagggaggcccaaagattctccaaaagcagagaagactggtgtccacatcctttcaaaatccgaaattgatgcagagctatcaaaaatgaagggtgtgacacctcaagaggcggcagcggcagctgcgaaagcagttgcagaggcagaagctgccattgccgaggctgaggcagcagctagggaggcagatgctgcagaagctgaggcagaggctgcacgagtgtttgcgaaagcagcaatgaaggcactaaaatgcaagacacttcgtgtttgatggtgttagcttctgcattgcttacatgaggagtatatttggcttgagatcataattctgctgctagactttctgcat

SEQ ID NO: 28522 - DNA, 310 bp, Glycine max
  Clone ID: LIB3051-071-Q1-K1-H8
ggatcatgctagttaatatatgaaactgctttgaaagtatacagagcgaagcttttgggctggactaccctacatgtgttcaggtgcgtctgatatgctagagactatgctcatctgttatccatacaggcgacttacacattgtgacgcgttgagccaatcatacatggcacctgtccatgacaccaatgtgtaacctgtctgcaccagacctttgattaattactttcagcatccataattcactgattaagacattacggtactcatctcgagagaatatgaccagcccaatcctgtaccaccagtc

SEQ ID NO: 28523 - DNA, 308 bp, Glycine max
  Clone ID: LIB3051-072-Q1-K1-F11
ttgactcttcctctgttccgcttctctttcaatccagccctcattcctaatccttcaatccaaccacctcatccttacactcacatatacacatatcttaacccctatcgtccctcctattgcttcaaaactcatcctcaaagaactcaaagactttcataaagacccaccaacttttttcaacgcttgtccattttctgaagacattttccattttccatcaacaattaattatccttcttatattccttattcttgaagtttattcctaatcactatttactttccttccgattatccttttaaac

SEQ ID NO: 28524 - DNA, 399 bp, Glycine max
  Clone ID: LIB3051-072-Q1-K1-F3
cacttacgtcctctcaaacgtcctctacttcttacattacaaactcctgatcttaataaaacagccacgtttaaaatcctggtatagcaaatcaccttcccaaagtcatcaaataattcaaacccaatataactcttaaaccatctaccccaaatcctgttcaatcaaaataaaatcaacctgtcaatatgaattatattaaaaataattcacttaacaatacttctactccttcaacacattatacttcttaatttactaaataaatgtcttttaaaattccttaaatttctactttaaacatacttttaaatttcttcttccatatataatacaataactcttttattaatataatttattttttttttcctttatcaatatttatttcttcatttt

SEQ ID NO: 28525 - DNA, 189 bp, Glycine max
  Clone ID: LIB3051-073-Q1-K1-E4
gggggggggggggggggggggggggggggggggggggggggggggggggggggggggggggggggggggggggggggggaggggggggggggggggggggggggggggggggggggggggggggggggggggggggggggggggggggggggggggggggggggggggggggggggggggagggggggg

SEQ ID NO: 28526 - DNA, 355 bp, Glycine max
  Clone ID: LIB3051-073-Q1-K1-F11
tctctttcaatccatgcctgattcctaatcctccaatccaaccacctcatcctcacactcacatatacacatatcttaactcatatcatccctcctatggcttcaaatctcatcctcaatgatctcaatgactttcacaaatacccaccaacttctttcatctcttgtccagtatcttattacatgttccattttcaatcaacaataattattcctgcttataatccttattctttatctgtattcctaatcactattcacttcccttcccattatcctttcaaaccttctaatgttacctttattactaatgtgtttcaccctaacatcaatatcaattgtaacatttttcttt

SEQ ID NO: 28527 - DNA, 417 bp, Glycine max
  unsure (1)..(417): unsure at all n locations
  Clone ID: LIB3051-073-Q1-K1-H9
tggtaaatcatttacaagcaaagtattgaaactaagaaaataggaaaactattaagatcatgggatattaggaaatattgaaactaagaaaataggaaatattaataactattaagatcataagattccatcattcactagcttaattatttatactaataactattaagatcataagatattaggaaatattgaaactaagaaaataggaaaactagttctacgagataatctctaacattccctaaaatattctatgacaaaatctaaacattattggatactgtaaataattntaagatactactataatataaaaatgtataaaatgcnaagcgatgtccacataggcagattcacatnattgcattaactttcaagaaattcgaatggatatggggtggtgtttaatctaca

SEQ ID NO: 28528 - DNA, 150 bp, Glycine max
  Clone ID: LIB3051-074-Q1-K1-B6
gccttggtcagcgttgagccaagctctacgaatctggcgcacgtattgccaaatggcgtgcagggctgaagaatgggcccaacgagccatttgaactgtctatccatgaaaacggctattgcttgggttgatacgctgtcatatgccatg

SEQ ID NO: 28529 - DNA, 427 bp, Glycine max
  Clone ID: LIB3051-074-Q1-K1-C1
cccacgcgtccgcccacgcgtccgcagtttctgcagcctggatcaacaaatcggtacacacatgcaatgatgtggaaaggagggaaggattggatcttggaatttccggataggagtcagtgggctcttttcaaggagatgcatgaggaatgctacaaccgtaacatccgttctgcttcagttagaaacatacctattcctggtgttcatttgatagaagaaaatgatgataatggatctgaggaaacttttattcggagctgtatgtactttcaacaagttgaagcagatgctgagatggctttggatccatgccgtgttctgtatgacatggatagtgaggatgagcagtggatttcaaatgctcaaaattctcgtaaagacaacagtgaattttcttggatctctgaggagatgtttgagaaga

SEQ ID NO: 28530 - DNA, 307 bp, Glycine max
  Clone ID: LIB3051-074-Q1-K1-C5
ataaatatgtttaattgaaattcaattttatatactgcactgcaatgtcttccacatcgctaggagttgcaatgacatcggccatgacatctgcactatccataccaatatactatgcattactcgatcataatctaccatcaatgcactaacttgtggactacaatctaacaaattccatatcttcaatgcgtatatactatccagattaacaaacactttacgcccttatagattcactcttccattatattctcaacgtttctaacgaaacccattcatcaatgacagacccctttgctgctac

SEQ ID NO: 28531 - DNA, 363 bp, Glycine max
  Clone ID: LIB3051-074-Q1-K1-D7
acgcttaaacaataatcataatgggactgagtaagtatttgaatatcttcttctaaacaaaggtattctaaaaaaatatattagaaaattaattatttataataaatccatatttataaatatatcattataaatgaaagaaatcaacatattagattatactataaatcatgaaataaatatctgtataaatctcaccatggaataaatatcttgaaatatgtagtataattgataaactattatttttcctcttacggagcaagttgatccgtgagaggaacaataagcctgggcacttttgccatgtctgtagaaagctgggtgcacctagcgacagtctccaaacaaagcaatgatgac

SEQ ID NO: 28532 - DNA, 216 bp, Glycine max
  Clone ID: LIB3051-074-Q1-K1-E9
gttttattgtgccaatttctagagatgatataattatattatgatcgcgcgtgctggtaatgcgtgggttaaaaaaaaaaaaaaaaaaaaaaaaaaaaaaaaaaaaaaaaaaaaaaaaaaaaaaaaaaaaaaaaaaaaaaaaaaaaaaaaaaaaaaaaaaaaaaaaaaaaaaaaaaaaaaaaaaacaaaaaaaaaaaaaaaataaacggacaaaaa

SEQ ID NO: 28533 - DNA, 356 bp, Glycine max
  Clone ID: LIB3051-074-Q1-K1-F8
cggactcgtacgcccacgcgtactgttacgcttccgaaaaaaaaaaaaaaaaaaaaatggaaaggttaaaaaaactaatatgaaaatgaatatattaaaaaatcaaattatttttaaattaattaattttatacattataattgaatatcataataatctaaaattttatacatgtcaatattgatcaacaaatattaaacgtattgacacactgtattaattacaactactatttattccactatatcatattgttaaaatgtattaattattgacatttagctatattaaaaaccaaacttatcatagaacaaatggtttaatgtttttttcaatgttttaacactattgacac

SEQ ID NO: 28534 - DNA, 243 bp, Glycine max
  Clone ID: LIB3051-074-Q1-K1-G9
gattgagctagtgtccagggttagtttcaaacattaattatttcgatgttgactaggctagtgggcatattgtaatcaagagtgttgatgctgaattagctgatgaggccgggaaatcagtgccacttcatgaatattatcttgacaattgggctatagtaagaaaccatcaatcccaaaatgtgtcacagattaatgaaacagatcatattgttatagtgagaagcagtggcttttgccaag

SEQ ID NO: 28535 - DNA, 333 bp, Glycine max
  Clone ID: LIB3051-075-Q1-K1-A3
aaaaaaaaaaaaaaaaaaaaagaaaaaaaaaaatttaaaaaaaaacagagaaaacaaaaaaaaatgaagatacaggaaaaattaaataaggacaaaaaaaaaaaaaataaaaataaaaggggttgccgcaacaaaggtccaaattttacgtacccgattatgcaactctttatctattcataagggtccctaaatttcaataaactggcctacttttaacaacgtcacaactggaaaacccctgtatgctcccaactaaatatccttgcagaacatcacctttttccaaactgtcttaaaatccaataggcccgtaccgatcgccattcctaa

SEQ ID NO: 28536 - DNA, 391 bp, Glycine max
  Clone ID: LIB3051-075-Q1-K1-C3
cgaagactaatagggtttgtaaggcttatacggttagtagggattgttatttgtttagctggggttttacttctgatgatgatggtgagggtgaggaagatggtggtgagggtttggaaccttcctcgccggggacgccagagagggatgtggaagagaattttgagcttagtgagaatgatggtgtgaagaaaatgaagaaaattagtgagaatgatggtgtgaagaaaagaaagaaaattgatattgaggatggtgatgagggttacttgagtagagggaagtgggagttattgaggaaggatgggtttatgcagggatgggcgaaggtgacggcgtgtgattatcatagagggctggatatggtggttgttgaattttctaatggtgt

SEQ ID NO: 28537 - DNA, 280 bp, Glycine max
  Clone ID: LIB3051-075-Q1-K1-D7
cccacgcgtccgaaaaaaaaaaaaaaaaaaaataaaaaaaaaaaaaaaaaaaaaaaaaaaaaaaaggaaaaaaaaaaaaaaaaaaaaaaaaaaaaaaaaaaaaaaaaaaaaaaaaaaaaaaaaaaaaaaaaaaaaattaaactaaaataaaaaaaaataataaaaaaaaaaaaaaaaataaaaaatgtaagggtggatgataaaatgaattaactaatatttttataaaaagaatcttataaacattaaacttttgatgtacgaagaatcataatatact

SEQ ID NO: 28538 - DNA, 162 bp, Glycine max
  Clone ID: LIB3051-075-Q1-K1-E6
acgaaaaaaaaaaaaaaaaaaaaaaaaataaaaaattaaaaaaaaaaaaaaaaaaaaaaaagaaaaaagaaaaaaaaaaaaaagggaaaaagaaaaaaaaaaaaaaaaaaaaaaaaaaaaaaaaaataaaaaaaatataaaatttataaaaaatattatgat

SEQ ID NO: 28539 - DNA, 382 bp, Glycine max
  unsure (1)..(382): unsure at all n locations
  Clone ID: LIB3051-075-Q1-K1-F4
ccttctcttattctgctgctcatgctcttcctttcttctttgctggaaccacctactcaaccgggaccaatcttaatccacctgtcttttgccaacttcaatccaggccaaaaaaaccgctgccaaaaaggtgttccccctttctagaaaggtcattactctctggtaatggtggtgtggcctcaaaccagtggaaagctgttcctgatatttggagatcttctgctgagaagtatggtgattaaatagcattagtagatccgtatcatgatcctncttcaactatgacatataaacagttggaggatgcaatattggactttgctgaaggattgagagttattggagtaagacccaatgagaagcttgcgctttttgctga

SEQ ID NO: 28540 - DNA, 170 bp, Glycine max
  Clone ID: LIB3051-075-Q1-K1-H11
tcccgttctacccactcgtcctaaaaaaaaaaaaaaaaaaaaaaaaaaaaaaatttaaaaaataaaaaaaaaaaaaaaaaaaaaaagaaaaaattaaaaaaaaaaaaaataaaaaaaatataaaaataaaaaaaaataatttaaaataaaaaaaattaaatttttaatat

SEQ ID NO: 28541 - DNA, 261 bp, Glycine max
  Clone ID: LIB3051-075-Q1-K1-H5
acgcttaattgatcaagaagtcgtggatttaactgatgctaatacttacgtgaaccttggtgatacgtgcaggtgtacatgcggtaacactagtagaagctatgatcactgcttgaacatagagcattcgctaataggcagatgcaggtactatcatcgatgttattgcacatatatacattgattcaatacattcagtataattagaatcaaatacatgcagagatgtttgataaaaaatgtgtctactgtatactatat

SEQ ID NO: 28542 - DNA, 391 bp, Glycine max
  Clone ID: LIB3051-077-Q1-K1-B6
attgtatactgttatttccatcatcaatcacatctgcttgcccaattctgtgtagttcgttgagggaatctcacctttggtacttgccgtgcatcatataccctcaagtactgaactgctgataagttacatatagactgctcaaagcactattactcgtcagatggctctcaaagatcattacctatacacttgtacatgtcctacctgttctaaagtgggtcactataatgatatccaacaaagtgcaattctaaatggatacaaatgcaaaactgaaaaatgctttggtttcttgcttagtaaaactgatgggaaaggattccaatgcacaggttgtggactaattacgcacacggaggatataactacaattacacctgaacttaaa

SEQ ID NO: 28543 - DNA, 280 bp, Glycine max
  Clone ID: LIB3051-077-Q1-K1-C1
aaaaaaaaaaaaaaaaaaaaaaaaaaaaaaaaaaaaaaaaaaaaaaaaaaaaaaaaaaaaaaaagaaaaaaaaaaaaaaaaaaaaaaaaaaaaaaaaaaaaaaaaaaaaaaaaaaaaaaaaaaaaaaaaaaaaaaaaaaaaaaaaaaaaaaaaaaaaaaaaaaaaaaaaaaaaaaaacaaattaaagaaccaaaaaaaatctaaaatgaaaaacataacaaaaataaaaaaaagagataataacataataaaccaagaaaaaaacacacttaccaaaaat

SEQ ID NO: 28544 - DNA, 332 bp, Glycine max
  Clone ID: LIB3051-077-Q1-K1-D4
tcttcctcttactcttaggaaaaaaaaaaataaaaactattactatataaaaaaataactataatatatacgtataagtcataaattaaactacagaaacataacataataaaaaaaatcaataatatcataaataatgcctcatacaaaacacaatcaaaccttccatataaaatatcaatatattaaacatattcaatccatacttaatattaatcatattctcttcatatactatgacaaacctattcaagaattgtaacataaatcatcatatcaatataaacacactcagattatacccattctaaataattcatcttaccttcccc

SEQ ID NO: 28545 - DNA, 291 bp, Glycine max
  Clone ID: LIB3051-077-Q1-K1-D6
aaaaaaaaaaaaaaaaaaaaaaaaaaaaaaaaaaaaaaaaaaaaaaaaaaaaaaaaaaaaggaaagaaaaaaaaaaaaaaaaaaaaaaaaaaaaaaaaaaaaaaaaaaaaaaaaaaaaaaaaaaaaaaaaaagaataaaaataaaaaaaaaataagcactaattacataaaattgaaaatcataaattattacaaaataaacatataattaaaattaattacagtaaattaaaaaactttaataaaaaaaaaaccctgaagtacaaaaataaattactttgagacaaatta

SEQ ID NO: 28546 - DNA, 348 bp, Glycine max
  Clone ID: LIB3051-077-Q1-K1-E7
ggaaaaactgttttctgaaggtgaagttagaaattggtgttttcaagttttccaaggccttgggtacatgcaccagcgtggatacttccatcgcgacctgaagcctgaaaacttgctggttaccaaggattttatcaaaatcgctgattttggcctagcccgagagatcagttcacaaccaccctacactgagtatcgtgctcctgaggtgctgcttcagtcttatctgtatacctctaaagtgacatgtgggcaatgggtgctataatggctgagcttttctctcttcgtgcttttttcccaggtgccaatgaaagctgatgagatttacaaaatatgtggtgtgat

SEQ ID NO: 28547 - DNA, 456 bp, Glycine max
  unsure (1)..(456): unsure at all n locations
  Clone ID: LIB3051-077-Q1-K1-E8
agttcaacgagtttgcaaccacacacaaaaaccatacccttcccgatgtcattgccgtcgccggtgtccacggtggtctccgcagccgcgccgtacgaccgcgccaaagcggtgaaagagttcgacgaaaccaaggtcggagtcaaaggtttgatcgattcgggaatcagaaccatcccccctttcttcgtccacccgcccgaaaccctagcggacctcaagcggggtgccgaacccggatctgtgcaggagatccccacggtggcgtggtggagaaggtccggctggcggcgagcaccgtggggttcttccaggtggtcaaccacggcatcccggaggaactcctncggcggacactggcggcggtgaaggcattccacgagcagcccgcggaggagagggctcgggtgtaccgtaaggatatagggaagggcgtgtcgtatatttctaacgtgg

SEQ ID NO: 28548 - DNA, 324 bp, Glycine max
  Clone ID: LIB3051-077-Q1-K1-H11
ctaaagtctcattttttatcgacaattacttatgcaggaaataagatatctgtatcacgagtagtcttgattgttgtccctgttgatgtatcgataattctcttgttatgtgtctgctatttcatattgaaaagatcaaggaagaaatacaacactcttctaagggaaaattacggggaagaaagtgccactttagagtcgttacaatttggtatggtcacaattgaagctgccacaaacatgttttcctatgaaaagagaataggtgaaggaggattcggagtggtctataaaggtgttctccctgatggacgagaaatagct

SEQ ID NO: 28549 - DNA, 285 bp, Glycine max
  Clone ID: LIB3051-078-Q1-K1-A12
tctccgcccactcgtacggtttttacttaaatcttctatatccttctactattctacgtgacgggtatattcactatggaagatgacgtggctctgctagatttctggcctaatacatttgggatgaacgtcaggaatgctcttgctgaaaatggtatcaaatataagtccaaataagacgacttgcataacaagatccctttgctcctcaaaatataaccctgttcacaagataatccctgttctcatacacaatggcaaacccattagtgaatctctcgttgc

SEQ ID NO: 28550 - DNA, 221 bp, Glycine max
  Clone ID: LIB3051-078-Q1-K1-B9
attccctgctctacccactcttcctaaaaaaaaaaataaaaaaaaaaaaaaattaaaatttaaaaaaaaaaaaaaaaaaaaacaagcaaaatgttaaataaaaaaaaacaaaaaacaaaacaaaaacaaaacaaaaacaactaatacaaaaacaaaaatcccttcatatccccacacttcaacacctcctaaacccataattcaaccttttcttcatccac

SEQ ID NO: 28551 - DNA, 441 bp, Glycine max
  unsure (1)..(441): unsure at all n locations
  Clone ID: LIB3051-078-Q1-K1-D8
tattacccccctcttcatagagtgaatgggtgatttgtagagtctttgagaagagtcggtgtgggaagaaaatgcatgttccaaagtgtgggaggttcaacaacccctttggagaggaaccatcatcaggtgcttctctattgcctcctttgatggattcttctccatacaacagtgaaacaagaaccaccactgctggggagttgtctcaggtgacatgcttctctgatccaaatcaaactgaggatcagaacaacacacatgatgacattgttgatagcatggaaactcctattttgaacttctcacccttttcaaggcctgatgatgcatccactttggccaaagcaacccttttctcagccctaaaccaatcagcacagattgcacaccaaattggggaatcacagntcccagattattggtatgcgcctcaagaac

SEQ ID NO: 28552 - DNA, 434 bp, Glycine max
  Clone ID: LIB3051-078-Q1-K1-E6
cccacgcgtccggccctcgctccgattcctaggaacagggttttcagttttcactgtggcattaagtttccgagctcaattcagcttccgattcgccgcgcgcaaaacgacttcgtttttggattttggcgtcgcgtcctattcagaagctatatactataagatgagacgaatgaagaaagatattgaagatgaggtgcttcccaatgatatgagtggggcacagttgaatgatgagagttatgaaggaagtgctggcattgttctgaagaaggggccatggacatcaactgaagatgatattttggtggattatgtcaagaagcatggggaggggaactggaatgctgttcagaagcacaccgggcttgttcggtgcggaaaaaggtgtcggctgcggtgggccaatcacctaaagccaaatttaaagaaag

SEQ ID NO: 28553 - DNA, 327 bp, Glycine max
  Clone ID: LIB3051-078-Q1-K1-E9
gctggggatgtttattggttaatatttgggtatgatatacttttgtcattttgtaagttcataactttagaagccttcaactgaaatcctatatgaagtttacttgcttgatttgaaatatagtggaaactcctactttttgtgttcatgtatccagtttgatgctgcaaagataaggaagcttagaccaagctttaaagaagttgggggttctgtgactgctggcaatgcttctagcataagtgatggtgctgctgcattagtgctagtgagtgaagagaaggcacgtgagcttggattgcatgtaattgcaaagattaaaggata

SEQ ID NO: 28554 - DNA, 371 bp, Glycine max
  Clone ID: LIB3051-078-Q1-K1-F5
gccactcatccgctccttcatacttttcctcccttaagattctactctatcactcgcatcacacacactcgtacactctcatactctctctctctctctctctactacctatcaacaccaagccatcctaccctaatctctcaatgctaaaactcgcaacctcctccatcctcaccatcacctccctccaccttctctcctccaacatgccacactacccattccatgacattcctccttctctaacacacttgactaaactcatctccaacatctaccccccgaatactccacttacacacattaatcctatatcacccactccctcaactctccctttcattctcacaacccactacattcacccctac

SEQ ID NO: 28555 - DNA, 317 bp, Glycine max
  Clone ID: LIB3051-078-Q1-K1-G10
caagattcaacaaggacgtagagaaagctcatacctatatactactaaacaaccggaaggaagcaaactagtctactgggaactggaagaaaaacctccagcaagcaacttgcaaccaacactacacttaactatacaccatcaactgtgtgtgagaacaaccctcatcggtatcaccatggaactgatgctactacgaaaattaggaaataccagatcagcactcatctactaatcaagaatcttacttcacagacgtcaattctaaaaatatcccaacataccatgactgctctgcgagcacatatacttactaa

SEQ ID NO: 28556 - DNA, 359 bp, Glycine max
  Clone ID: LIB3051-078-Q1-K1-G11
tgattcccagcgaaggaagaagcgttaccaccgtcacacagctaaccagattcagaggcgggaatcgatgttcaaggagtgtccgcacccagatgagaagcagagattgcagttgagtacggagttaggcttggcgcctagacagatcaaattttggttccagaacaggaggacccagatgaaggctcagcatgagagagctgataattgtgcactccgggcagagaatgataagatacgtcgtgagaacatagccataatggaagccttgaaaaatgttatctgcccctcttgtggtggtcctcctatgaatgatgattgctattatgatgaacagaagttgagattggagaatgccc

SEQ ID NO: 28557 - DNA, 366 bp, Glycine max
  Clone ID: LIB3051-078-Q1-K1-H12
tatgcgctcaatcaactaatgggtcgtctcggtggccatcacacattctacttcgtttgatgtatatgtgtcgggggaaggccctcatcatcatttggaacattgaccatgtctactcttatacacccactaccactggttacacccttttacaatctctttggcatacccttaccttttaactataaataagctatccatgttcataaatgttacatgctgcatgtgcagtatccctggttccaagtctaactctacgatgaactttactgattaaccaccatctatattgaacgcttctatatgacatcttctcccattcatgattcagcaaatgcagcatgcctacattgaattttaatttac

SEQ ID NO: 28558 - DNA, 463 bp, Glycine max
  unsure (1)..(463): unsure at all n locations
  Clone ID: LIB3051-079-Q1-K1-A2
tcgattttaattactcttttaattcttactatataaaaatattagtctacaaattagttatgaaggtatcaattacttcttttattacgaaattattttatngataaacttagtgtatgaattattctgttaatatatttcatagtctaattataatctgataatactgactcatatttntgatgccaaaagagcttaaattaacattacaaatataaagggatagaaacttaaaaatatcaatgttcaatactatanggagattaaaaaaaaatanaaatacattagactaaagaaaactgacttttacaaattataagaagattaaaaaacaattgaaaatataacattatgcgaaattaacaaaaggtaaaaatgggagaaacctattgtggaagtaatttatactttagacaagttaaattcttattttattacatgtaacggatatttgatgcttgtg

SEQ ID NO: 28559 - DNA, 276 bp, Glycine max
  Clone ID: LIB3051-079-Q1-K1-H9
acggaagcagaaaccaatcacatactgaatcactaaaatgtcaaatttgccccaatcactggtcagggggcacagactgtcgggccgtgtagcagctccaacgccttcttacactggcttcccacgagcaaactgctctatagcgtcacctaatctcaattaactggccgtcgatcaacaacgtgctcgacctgaaaaaccctgaacttacccaaatcaatctccttgaactatataccaatatggacatatttcaaaatatcgataaggccctat

SEQ ID NO: 28560 - DNA, 441 bp, Glycine max
  Clone ID: LIB3051-080-Q1-K1-B6
cccacgcgtccgcccacgcgtccggacgccaatgcatccattcgggaaagtgaagggtgcagggtttgagtacatgacaccgcggaggtcaaacttggcgaacatggggcatgtggtgataacggagtctgagctggggccgtcgccatcggatgtggcggcggcgatcgcgaggaagccggtgatcgacgagggggagaattcaacggtgggagggtggagcttggacgcggagagcgtggaggggctgcagtcgaagctggagaggtggcggacggacttgccgccggtggtcgatcgctgctaggtctctagctacccaacgacgagcaccaccaagacgagccggcactcgcggaggcacaccgacggcgggagtactgggagtggcttgttctcatgctgtagtaacatatgtggtgttgaatgctacgttggttg

SEQ ID NO: 28561 - DNA, 478 bp, Glycine max
  Clone ID: LIB3051-080-Q1-K1-C12
cccacgcgttcgcccacgcgttcgcccacgcgtccgtataaatccaggttctgcaaccggtgcgctacagcagcatcacttatgatgtgaacccaagttttgtccttatggacatcgatggtctgcgagttgtggtttatgtatacgaacttattgatggagaggttaaggttgacaagattgattttaagaaatcatccacaagccactctgctcattaaacactgggattttggtctactctcttttctctttctcttatttggctgtttagttttctttttactccttcaaacttttcaagggtactgtttttagttgtattttgctttgtatgtacacttgtatttggccatatcataggattcttaggatttggttaatatgtgatctgcgccaaacgtaacgactgattgatcagcaatggctgtgtattactactccttttacaagttgcccagagatgatatgcaaccat

SEQ ID NO: 28562 - DNA, 469 bp, Glycine max
  Clone ID: LIB3051-080-Q1-K1-C3
cgccatctccggcggaagccgcaaccgcaatcggcatctcggcgagaaccgcttctacagtgggccgccggtgaggaaacacagagagaagcaggaacagcagcggtcgtcactgtcgagagcttcctcggagaataggcccggttcctcttccgattgttcaatttcttcgcgcgccacatcggacatgtccaatttggatcggttgttggagcacatcacgccccttgttcccgcccaatattttcccaagacgaactcgaggaggtggaaatcgagggaagcggaattgcatccttactttgagcttggggacttgtgggagtcttttaaggaatggagtgcttatggggcaagtgttcctatagtgttgcatgggaatgaatcctggactcaatattataacgtcttcttgtctgccattcagctatatatcgatccgtacaagcccttcacacgacttaggaaa

SEQ ID NO: 28563 - DNA, 430 bp, Glycine max
  unsure (1)..(430): unsure at all n locations
  Clone ID: LIB3051-080-Q1-K1-D4
cgaaggctccctcgccggaagacgtctccgtcgagaaactccgggatgttctcgccgaactggatagggagcggcaagcgcgcatcgccgcggagaatacgaagtcggaattgcaggtttcgttcaacagattgaaggcgctagcacacgaggcaataaagaagcgcgatgagttcggtcgccagcgagacgacgccgttcgggagaaggaggagacggcgaagcaattagaagaaaccgcgaaggaacgcgacgcgctgcgatcggagattgggaattcgagccacatgctggtcacgggtatggagaaaatctcggcgaatgtcagcagcttcgccggcaacgcgctgccgctgccgcggtcacagaaatacatatagacttgtatataaaaaaaaaaaaatnttttattaaaaaaaaaaaggggggc

SEQ ID NO: 28564 - DNA, 343 bp, Glycine max
  Clone ID: LIB3051-080-Q1-K1-E8
tagaaaaaaaaaaaaaaaaaaaaaaaaaaaaaatataaaaaaaaaaaaaaaaaaaaaaaaaaaaaggaaaaataaaaaaattataaaaaataaaaaatttaaataaaaataattacataatttttatttttttttatattatattaaatttaattaacttttattatttttttttaactttatttattttttaaattttttttttttcctttttaatcgcctttatttttattctcttttctttacctttcttatattcttttattcccatacccttttcccttattaactttttctcatatttaatttttatttttaccttccctttatcttttcattaatt

SEQ ID NO: 28565 - DNA, 374 bp, Glycine max
  Clone ID: LIB3051-080-Q1-K1-G10
acgcgtgcgctaaagttacacttgcggttaaacagttgaaagcccaacaccgcttgatggtgagtggggcacctatacagaatagcagtgtggatttgtgggccctttttgattttctgatgcctggatgtcttggaactgagagacagttgcaaggcgcatatggaaaaccacttttagctgcaagagatccaaaatgttctgctagggatgctgaagcatgagcacttgctatggatgcattgcatatgcaggtaatgcctttactccttcgtatgacaaaggatgaagtcttgtctgaactgggcgggaaaataattgaagacagatacttgtgatttgagccctgtacaatttaaactttatgaacaaat

SEQ ID NO: 28566 - DNA, 126 bp, Glycine max
  Clone ID: LIB3051-080-Q1-K1-G6
cccacgcgtccggtatggtcatatatgactgctataattctctaccataaccgggcgtgccgagagcattgaaagcacctgatgcaggtcacccaaatggaacaactggccacatgcaccacaact

SEQ ID NO: 28567 - DNA, 450 bp, Glycine max
  Clone ID: LIB3051-081-Q1-K1-A5
gttcatgccaaaggtggtatattcttctgtcagattgttcatactggaagggcgttcgatcgagatcttaagcccgatggacaaaccttaatatcatcaaccaacaagccatttacacataatgccaccgaaccaacggcactaaggacggctgaaattcctgatatcgtcaatgaattcagacttgcagcaaggaatgctattgaagcagggtttgatggagttgagatccatggggcacatggttttctaattgatcaatttttgaaagaccaagttaacgacagaacagacaaatacggtggatcattggagaatcgttgtcgttttgcattagaagttgttgaagctgttgttgaggagataggggcagatagagttggaatgagactttcacccttttcagacttcaatgaatgtagtgactcaaatcctcaagcattaggtctc

SEQ ID NO: 28568 - DNA, 435 bp, Glycine max
  Clone ID: LIB3051-081-Q1-K1-D5
accagacgttcgagcacgcaccataatcagcattgcatatagactaccatcaggggtggacggacatacaatgatggaagcaaatgcactgcggctcatgctactcgatacaccgccctacttgctgaagcggccatctttatccgaaacgctattgcatgagtctgcagtccggaacacgggcctataaaagagggccatgcatccatctatatcatcaattcacacgatgacagagaacccaacttaggcctagccatattagaaagcattgatcatgcaagcgccacatgcaacgacaacggcattgtacttgctagaggggcagacaccatccagaatatcagatgctagtacaagtgaagagcgagcacacatggagaatcggctgtctaactacactgtggcttacgaagctctaggatacgctcaacc

SEQ ID NO: 28569 - DNA, 430 bp, Glycine max
  Clone ID: LIB3051-081-Q1-K1-G3
aacttaactaataaggattggccaaatggcctgggtaattatggagtccctgggaaaaggatgaaacctttttctacctaactcaaccgaggcactaggagtggaaattttgaaatcccgtggattcttcactcagtcatactggtactggataggtgttggggctttgattggatatacattacttttcaactttggctacatccttgctctcacatacttaaatccacttgggaaacatcaagctgttatatcagaggaacctcaaatcaatgaccagagtggtgatagtaaaaagggaactaatgtgttgaagaacatacaacgtagcttctctcagcactcaaatagagtgagaaatggcaaaagtttaagtgggagcacctctcccgagacaaaccataacaggacaagaggaatgattcttcct

SEQ ID NO: 28570 - DNA, 289 bp, Glycine max
  Clone ID: LIB3051-081-Q1-K1-G6
aaaaaaaaaaaaaaaaaaaaaaaaaaaaaaaaataaaaaaaaaaaaaaaaaaaaaaaaaaaaaggaaaaaaataaaaagaaatcctatataaaaaaatacaaagcttaattacacttacatacctcaacataaactcattctataatataacctaatttaaattatctaatcctcatttaaaaacattttaactatcaaaacatagacataacagagctaaatgccatcgcaataaattatcgttatgtcagttatcctaatactcaacaggcccatacgcaatattct

SEQ ID NO: 28571 - DNA, 389 bp, Glycine max
  Clone ID: LIB3051-081-Q1-K1-H5
gtttagtgtgattgagttaaagttgctgaagacaatgagttggacaataatgcaattggaacaatctggaaatccttctatagatattcactgctatgttgatgatgccaataaaattccttaatttacaacaaaaaaaaaaaaaaaaaaaaaaaaaaaaaaaaaaaaaaaaaaaaaaaaaaaaaaaaaaaaaaaaaaaaagggggaacaatttaaaggaagccaaaatttaaaaaacaaagaatacaaaaaaataaaacttaaaataaaagagggcgggccctttttgagggcccccgttttttaaccattcctggcggggaaaaacctttttttacccgccccaaaaacccatttcacggagccgcctttaacaagctggggtttgg

SEQ ID NO: 28572 - DNA, 441 bp, Glycine max
  Clone ID: LIB3051-082-Q1-K1-B12
tcgagcagggacaattacaacatctgaaccattgcaaccagtgcaactagtttacgaaacggataccgttgactacttgaactacttgtgttacattggacttaactcaaccacgataaaggtcatctctggaactgctcctgacaatttccattgccccaaggattcgagctctgatctcatatccagcatcaattacacttccatagcagtaaacttcactggcaaagcaaacgtggtcgtgagtagaaccatcacaaacgttggcgaagaagatgaaaccgtgtacttccctgttgttgaagctcctagtgaagtaattgtcacacgatttccatacaatcttgagtttacgagaagtattataaaataagctaccaaggtactttcacaccaaaggcctccttaaagaaacatacgtttggatctatcacttggaat

SEQ ID NO: 28573 - DNA, 450 bp, Glycine max
  Clone ID: LIB3051-082-Q1-K1-B2
cccacgcgtccgcccacgcgtccgcttgacaaatccacatcattgtgtctatttttcgaggttgtgaggaaggaaactcctgatgcaacaatgcagtccacaagcaatcaattttacttccaatttttgacgtattatcagaataacagtgggcaaatgagattacgggttacgaccctttcacgtagatgggttgctggaccagaaagtatacaggacttgattgctggatttgaccaagaagcagctgctatagtcatggcacgccaagtctcttttaaaatggaaacagaggctgaattcgatcctatcagatggttggacaaggcattgataaatttgtgttctcggtttggggaatttcaaaaagacactccatcttctttcagtttgtctcccaggttgtcaatattccctcaatttatgtttcatttacgacgctctcaaatt

SEQ ID NO: 28574 - DNA, 308 bp, Glycine max
  Clone ID: LIB3051-082-Q1-K1-B5
cccactcgtccgaaaaaaaaaaaataaaaaaaaaaaaaaaaaaaaaaaaaaaaaagagaaaagaaaaaaaaaaaaaaaaagaaaaaaaaaaaaaaaaaaaaaaaaataaaaaaaaaaaaatataaaaaaaaaaaaaaaaaaaaaaaaaaaaaaaaaaaaaggaatcttttaatatgaatcaaattttactataacctttaataaaaatttaaattttttaaaaattttaactaaaataaaataaattgatctttttttaaaaaatttaatatttgaaaaaactttaacttaacaaaataaaatttttt

SEQ ID NO: 28575 - DNA, 416 bp, Glycine max
  Clone ID: LIB3051-082-Q1-K1-D2
cccacgcgtacgttcttcttcttcttcttcttgttcttcttctctctggaattttccgtgactggtgtctgcatcgatggcggcgatcagtctccggaaggggaacacgctgctgccgtcggaggtgaaccgcgtgctgtacgttctgaaccttcccttcaacatcacgagcgaggagatgtacgacatcttccgcaagtactgcgccattcggcagatccgcatcggcaccaacaaggacactcgcggaacggccttcatcgtctacgaggacatctacgacgccaaaaccgacgtcgaccacctatacggcttcaacgtcgtcaaccgctacctcatcgatctctactaccagcatgcgaggatgagcatgaagttccatcagaagaagaacgtggacgagatcgcgcgcatgc

SEQ ID NO: 28576 - DNA, 371 bp, Glycine max
  Clone ID: LIB3051-082-Q1-K1-D9
taaaaaggcttcatttacttcttactgtcaaggagtcggctatggatgttccatccaggttcgatgctatgaggcgtatctctttcttctctaattcattgcttatggatatgccacctgctcccaaagttctgaatatgatgtccttctctgtcttgacaccttactttaacgaacctgttcttttctccctaagtcatctgcgagagccaaatgaatatggagtctctatactcttttacttgcacaagatatttccaagataatggaaaaactttgttcaacggtttgataatataagtgaagagaaactcatagtatacaatgaagaagaacttcctttatgggcatcatacagaggccagacattt

SEQ ID NO: 28577 - DNA, 414 bp, Glycine max
  Clone ID: LIB3051-082-Q1-K1-E1
cccacgcgtccggtggatacatggctggtatattgtgtgccactgtctctcatcccgctgataagctcgtctctttcctgaacaattccaaaggggcaacggttggtgatgctgtaaagaagcttggattatggggtctgtttacccgtggtcttcctcttcgtattcttatggttggaactctcactggagcacaatggggaatatatgattcattcaaagtttttgtggggctgccaaccactggtggtgttgctcctgctgctgttcttgctcccgcttctgctgcttagcttgcaaaagtgtaaaatctccaatggattagcatgataacacttcgataattgtgtttcataaacacataaaaccaacgaatgtatggaccataaatattcagagaacttctgaagttga

SEQ ID NO: 28578 - DNA, 454 bp, Glycine max
  Clone ID: LIB3051-082-Q1-K1-F4
ggaatgtggaagaggacatttgaaaatttggtgacataaatacttctaacatgctagggtgtaggatttaaattaagtttcttgaattctgtgtgcaggttttggctcattgggtctcatgacttctgtgctgttatcttctgatggcaagacattagaagctgaggcagctcatggaactgtaactcgacattttcggtttcatcagaagggacaagaaactagtacaaacagtattgcttccatatttgcatggacaagaggactggaacatagagcgaagctggataataatgaaaaattacgggattttactcaaaatttggaggctgcatgtgttgagacagtggaatcaggaaagatgactaaagatcttgcaattctgattcatggacctaaggtatcaagggaattttacttgaacacggaggaatttattgatgctgtggcacat

SEQ ID NO: 28579 - DNA, 451 bp, Glycine max
  Clone ID: LIB3051-082-Q1-K1-F7
atggttatggcggtcccttgtatgcaggaactggttgctttcacaagagagaggctctgggtgggatgaaattcagtgatcaatattgcaatgactggaatagtgaagatgatcagtttaaagaagcaaacctgcaagaactagaacaacaatcaaaggttcttgcaagctgcaactatgaggaaaacacactatggggaaaagagatgggtttaaaatatgggtgtccagtggaggatgtgataacaggattgtctatacagtgccaagggtggaaatcagtgtactacaacccaccaaggaaggctttcttaggtttagctccaactaccttgcctcaaacacttgttcagcacaagagatggtctgaaggagacttgcaaattttgctttctaaatacagccctgcatggtatggttttggaaggatcaattttgggctccaaatggg

SEQ ID NO: 28580 - DNA, 379 bp, Glycine max
  Clone ID: LIB3051-082-Q1-K1-H3
gtcaaaattacatttaccattattttcaaatattaattttctaattaatcattattcttaattcatacaattcttccaatcccttacattaaaaaaacatataaattcaaatccaatattatatatctttcttctttccttttaaacctataattctaatacattcttaatttactttcctaccctttactttttaactttttataaaataatacattttattctttatattaattaactcatactctctaacaataactaactaacttattaatatttatatttatttttaatattttcaacttaacattattttatatcactttttactaaacctctaatttcatatatatttattttttataatactttattctaa

SEQ ID NO: 28581 - DNA, 402 bp, Glycine max
  Clone ID: LIB3051-082-Q1-K1-H4
aattttaaaaaattacttttgaagaataacattaattattacaagtgttaccaacaacggtttaaaaacaatgtatgtatttgggggaaaaatatatcttttgaaataattaatatttttaatgaaatatgaatttcttttgtctctattttttgtaatatctttatttttaaaaataaatctagatatttaatattataatacttgatagaacttaaaatctttcaagattaatataatatttttttaatccatctccttccaaagttttcaattattcaatcaatacaattttaaaactatagtcctactaataaaaataataatatataatatcatataataattcaaattaataacaaataatagtatatttttaaaaagtgtgaaatttatttgggg

SEQ ID NO: 28582 - DNA, 363 bp, Glycine max
  Clone ID: LIB3051-083-Q1-K1-A6
cccacgcgtccgcccacgcgtccgaaaaaaaaaaaaaaaaaaaaaaaaaaaaaaaaaaaaaaggaaaaaaaaaaaaaaaaaaaaaaaaaaaaaaaaaaaaaaaaaaaaaaaaaaaaaaaaaaaaaaaaaaaaaaaaaaaaaaaaaaaaaaaataaataaaaaggaaagaatataaaaaacaaaaaagagggaaaaaaaaagaaatataacaaatgaaaataaaatgaaaaacaaaagtcgtataacgaaaaaggagataatagaaaaaacccgggcaaagatcactttatacaatttgggcacactaaatatggaaaaggagacgcacagtgtaagggggcttaaagcgaagggattgcagaa

SEQ ID NO: 28583 - DNA, 468 bp, Glycine max
  unsure (1)..(468): unsure at all n locations
  Clone ID: LIB3051-083-Q1-K1-A7
gaatttaatgggttggtgttgatttctttctgcaggagtcaagcaagagcatacagattgaagcatttcatgttttcaagctatttgctgccaaccaacataagccagctgatatcgtcagtatatttgttgcgaacaaaagtaagatgctgagactattggaagagcatgatcagagggaaaagaaaaagagtggccattgccgtgggaggcgaaaaactcatcaaagagcaaagtcacccgtgaacgtggtttctcacaccccagtaattccagattttcttttgtagcattaaaggaagctggttagagggaagcatcgagttaagttctccattctttttcggaaaatctgaagttttggctttcactcccccctcgtatgtcgggtgaatccatgactngctattatattatgttcaatcccgggatggagatgattcagatggtcgattgtagatgcttctt

SEQ ID NO: 28584 - DNA, 331 bp, Glycine max
  Clone ID: LIB3051-083-Q1-K1-B6
aaattagccatcattagaccttttctaaaaaaaaaaaaaaaaaaaaaaaaaaaaaaaaaaaaggaaaaaaaaaaaaaaaaaaaaaaaaaaaaaaaaaaaaaaaaaaaaaaaaaaaaaaaaaaaaaaaaaaaaaaaaaaaaaaaaacaaaaaaaaaaaagaaaaaaaaaaaaaaaaaaaataggggaagtggatatagaagaataaggtgtacgtcgcggaggtgaaaaccatagagtttattaaaggattacgcaatgtatataaagggggccgaggttaaaaaagtagctaactagtaaaacctatgggatccccatagtaaaatactga

SEQ ID NO: 28585 - DNA, 377 bp, Glycine max
  Clone ID: LIB3051-083-Q1-K1-C1
aaaaaaaaaaaaaaaaaaaaaaaaaaaaaaaaaaaaaaaaaaaaaaaaaaaaaaaaaaaaaaagaaaaaaaaaaaaaaaaaaaaaaaaaaaaaaaaaaaaaaaaaaaaaaaaaaaaaaaaaaaaaaaaaaaaaaaaaaaaaaaaaaaacaaaaaaaaaaaaaaaaaaaaaaaaaaaaaaaaaaaaaaaaaaaaaaaaaccccaaaaattaaattaaatgaaccaaacttaaaaaacaaaacccctggaaaaacccattttttccccaaccaaaaaacctataaaaaaacacccttttaaaaaactaacataataccaaaaaagcccgatccaaaagcctttccaaaaatattcccaaactaaatggccaatgaaacc

SEQ ID NO: 28586 - DNA, 274 bp, Glycine max
  Clone ID: LIB3051-083-Q1-K1-D3
tcgcacgtgcattagcccacgctatcggttggatcatacagcaatggccaacaggtttaattctaaggcccttgttaacaagtatcatccggtagacattcttcactcgtgatgccgctctcggttatcatgactacctcaacaccgacgacgtgcactacaatgacagccgatcctacgaccacagctccgtcattgatcgccacttctaacgctgtatacctataactgcactccgggacgatctattctcatatcgcgtggatccacatgc

SEQ ID NO: 28587 - DNA, 472 bp, Glycine max
  Clone ID: LIB3051-083-Q1-K1-E4
tgtagcagtactaagctcaggtggaaggagaagcatgttgaaactggcgcatcgcatgacggacaatatgtgttacagtgtgtgtgcctgcacagtgcacaagtggaacaagctgaacgccaggcacgtcgcagaagacgtgagggtgatcaccaggaagagtgcggacgacactgtcgagcacgccggcatcgtgctaagcactgtcacctgagcgtggattcccgtctcgttgcacatgctgtttgacttgctccgcgactagctgctccaaaaccagtgggatatcctgtgcaacagtggacccatgcatgagatggctcacattgcagatggacatgaccatgctcactgcgactccctccgtagagccagtgctataaacgcgaaccagaacaccatgctgatcttgcaggagacgttcaccgacacgtgcagctagcctgtggtgtacgctccggtggacattccg

SEQ ID NO: 28588 - DNA, 471 bp, Glycine max
  Clone ID: LIB3051-083-Q1-K1-F8
ggttgcctgaacagcctcaagcatatatgatttggaaatccattcaacaatggactgagaaatctgcttcaagagctggggttatattgcctgatcttacttctggggctgaaaatgtacctgtttgtcttgtgaatgatgttgataacgagaagggccctgcatatttcacttacatcccaactctcaagaatttgaggccaactgctcctgtggaatcttctactggatgcccttgtgttggtggatgtcaatctaaaaattttaactgcccttgcattcaaaagaatggaggctatcttccatattcttcagctttgctacttgcggacctaaaatctgtgatatatgagtgtggcccttcttgtcaatgtccttctaattgccgaaatcgggtttctcaaagtggcttgaaatttcgtttggaggttttcagaaccaagaataaaggttggggtcttagatcatggg

SEQ ID NO: 28589 - DNA, 141 bp, Glycine max
  Clone ID: LIB3051-083-Q1-K1-G4
aggctacctaggcacctttagactaggaaggtcgtcataggcgacaaattgcttcggggagtggaaattgggcgttaatccgggaattcccgttttaggtcaactctttaaactgctgctaaatccactaacaggctgaaa

SEQ ID NO: 28590 - DNA, 471 bp, Glycine max
  Clone ID: LIB3051-083-Q1-K1-H7
gtttgagtcaaacagcacagaggataggtatctctcaccaaagcttgggaaaataacaacaggaagctttccagcattttctggtctttttgctatcttaatggcagctgcagctgcagctccagatgatattccaacaaataggccttcttgaagtgcaagaagctttgcagtttctattgcttcatcacttgatatttgaactacttcatctacaaggctaacttccaatactccagggacaaaaccagcaccaatcccttgaatcttgtgtggaccaggttttcctccagagagtactggactttcaactggttccacaccatagagctttatattaggattcttctctttaagaaatttccctgcacctgttatggtaccaccagtgcctataccactaacaagtgcatcaactttccctcttgtgccttaccatatctctggaccagtggtttcataatgtacctt

SEQ ID NO: 28591 - DNA, 415 bp, Glycine max
  Clone ID: LIB3051-084-Q1-K1-A8
caacaatattcaatctcatacacagaaaaatgggtgctttggatcacatctctgagctctttgactgctcccacgccagctccaagctcaagaagaaacgcaaacaattccagacggtggaggtggaagtgaagatggactgcgaagggtgtgaaagaaaggtgaagaaatcggtggaaggggtgacagaagtggaggtggatcgacagggtagcaaggtgagtgtttcggggtacgtggaaccctcaaaggtggtttcacgcatcgctcaccggaccggccttacgtgaaatcgttatgtgaatctgatgtgaacaccacaccacaccacaccttatcctgtcttattggttagtttctctttccctttggtgttctttttcttggatcatatcgtagtaaccaaaaagaaaaa

SEQ ID NO: 28592 - DNA, 288 bp, Glycine max
  Clone ID: LIB3051-084-Q1-K1-B9
gcgcccacgcgtccgcccacgcgtccgggaaatgcttccacccattcctgtatctagtgcggcttgcactcggggctttgaagccatgtctgccacaagagagtcatttgcatcacttcaaaaactgagagttggccattttgattcccctctacctagaacaccagcctgagatccttcccaaaaagtaccaagagtttctgattgtctaacaccacctgcatggaaaactgaaacaaacttttatgacttacgcatcaaaaaccaatgaaagcaacatttagatca

SEQ ID NO: 28593 - DNA, 237 bp, Glycine max
  Clone ID: LIB3051-084-Q1-K1-D12
attttatataaaaaaaaaaaattaaaatataaaaaaaaacatataaaaaaaagagaaaggatatattaaacgataaaaaataaaatcaactaaaacaatttatccttcttctattttacaaatccctagttacatataccgactacttcatcccaaaagctcttgattccttcaatattgtttaaatcatttaagcaaatggtctcccatgaaccatcattaagatcactttccttc

SEQ ID NO: 28594 - DNA, 426 bp, Glycine max
  Clone ID: LIB3051-084-Q1-K1-E4
tgatctggtaccttactattaggtctggtttaagtcgattatagtgctccatatatgcggtaatttattgtctttgactttgttatcttttattcacattcttgtatttccttttatgcaggaaaatgcagatatcaggggccactgatctagcttctaagggacagggtgcatcagatagcagtagtgtaaaggttaaaagtgaatttgatgatgcctttcaaccagatgtgaagattcgctgtctatgtggaagtagattggaaacagagaatttggtcaagtgtgatgatgcaagatgccatgtgtggcaacacatcagttgcgttattattccagagaaacctacttgaaagcatccactagtttctgataaaatttattgggaactctgtcggcttactcgtgcagattcattttgggttc

SEQ ID NO: 28595 - DNA, 187 bp, Glycine max
  Clone ID: LIB3051-084-Q1-K1-E6
acgaaaaaaaaaaaaaaaaaaaaaaaaaaaaaaaaaaaaaaaaaaaaaaaaaaaagggaaaaagaaaaaaaaaaaaaaaaagaaagaaaaaaaaaaaaaaaaaaaaaaaagaaaaaaaaaaaaaaaaaaaaaaaaagaaaaaaaaaaaaaaggggagtgggataaaacatggcaaaaccaaaaacaa

SEQ ID NO: 28596 - DNA, 430 bp, Glycine max
  Clone ID: LIB3051-084-Q1-K1-F8
tcgcccacgcgtccgctaaacctctctgctttcaagaatttagaatggcttgagggctcaagctgtggactacaagggactatcccatctgatattggtgcctatgggagcgtttatagggcacaattaccaagcggcaaaattgttgccgtgaaaaaactccaccgatttgaagcagaggtgccagcttttgatgagagtttcagaaatgaggtcaaagtattatcagaaataaagcatcgacatgttgtgaagctccatggattctgcttgcacagaagaatcatgtttttgatatatgagtacatggagagaggcagcttgttttcagtgttgtttgatgatgtggaagccatggaattggattggaaaaagagggttaacattgtgaaaggcactgcacatgctctggcctatctttatcatgact

SEQ ID NO: 28597 - DNA, 320 bp, Glycine max
  Clone ID: LIB3051-084-Q1-K1-G3
cggacgcgtggggtgctgctggagctgctgctggtgtagtggttcttctaatagttttggggtttgtgatgctgaggcgcagaaggaggcatgttgggaccggaacatcagtggagggctcattgatggcatttagctacagggatttgcaaaatgccacaaagaatttctcggataaacttggaggagggggctttggttctgtcttcaaaggaacattggctgattctagtatcatagcagtgaagaagcttgaaagcattagccaaggtgagaagcagtttagaacagaagtgagtacaattgggacagtttaacat

SEQ ID NO: 28598 - DNA, 255 bp, Glycine max
  Clone ID: LIB3051-084-Q1-K1-G8
aaaatttaaaaacttataataaattttactggtggcttaaatccatcaatattcataagtaaaaaaaaaaaaaaaaaaaaaaaaaaaaaaaaaaaaaaaaaaaaaaaaaaaaaaaaaaaaaaaaaaaaaaaaaaaaaaaaaaaaaaaaaaaaaaaaaaaaaacaaataaaaaaatccaatcattaaatcaaaatgcaacaaaaaaaaaaacaaataaaaaaactaagggaaatgaaactaacaggccaacgttta

SEQ ID NO: 28599 - DNA, 333 bp, Glycine max
  Clone ID: LIB3051-084-Q1-K1-H1
cccacgcgtccgttgacgcgtgggcaagcttcagtttgtcccctgcgtcttattacttggcggttgtgtggtgatatggttcaagctgggagttctgccatggatgtccgtgacagattaagaggattgtctgaacatgagagtatttgcggttctaggactgccccctgtgattcttgtgggcgttctgagatgtttaaggacatggacattcaccaggttgctggtcatcaaaaaggctaattctgatattttcatcttaacagcaacttgtgaaagattgcatctaggtaataaatcgaaaattaacagaaactggaggaaattgaaaga

SEQ ID NO: 28600 - DNA, 417 bp, Glycine max
  Clone ID: LIB3051-085-Q1-K1-B11
gccgacgcttttattcctcttcaaaatttcgacatctatccaagcgatagacactctggtctatggaactagtagcggagtgcgaacgaactctgtacccatacattactggatcctctgtacttcctatcaaatacaaagatggtattctaatgaccgctgacatgagatgttcctatggatctaccctgcggtataagactgtctagcgtatcaagcctattataaagcattctcttctaggtgctacctgtgaaataagttactatcatgaaatattccgctaccttgacgagcttatcctttatgacaacatgtacaacgatcgtaattcattagggccgaatgacgtgcataattatgtaacccgtgtcatgtataatacacataacaagttcaatccattgtccaattcac

SEQ ID NO: 28601 - DNA, 270 bp, Glycine max
  Clone ID: LIB3051-085-Q1-K1-B5
tcccacgcgtcctacaaaaacaaaaaataatatttaaaaaataatattaaatataggaaaaaatggtaaaattataaaataaaaataaaaaaaataaaaaataaattaataaaaaaaataataataaataaagggctcccttttttttgtatccatttttttattctctttctttctatttatcttttctttttttttatatcctaacttcaattctttttctatttttctaaaatttctcaatctgtaaatccttttctttcccctttt

SEQ ID NO: 28602 - DNA, 353 bp, Glycine max
  Clone ID: LIB3051-085-Q1-K1-B9
cacgtgctcacgattagacatgtgttgaaactgatggatatggacaactgaaagaacatcgggcctccggaccaaaacttccaggacgaagaatacgacggatactgcttccaatgactgtcaaacgaatctacaagactcaccccaacacgctctgacaccaacaatgggcccgatctgggcacacgcacccaaaatgtgctggaggatacatatactgctgatgtgatacagcgtctcatgaaagtcgcttttacgcagatcaatatgcctattcaacaaacagatgctgctgtaagagctgatggtcaagacgctgctggccggagtgcaatgcttgctgctgcacataa

SEQ ID NO: 28603 - DNA, 456 bp, Glycine max
  unsure (1)..(456): unsure at all n locations
  Clone ID: LIB3051-085-Q1-K1-D10
gagaacggggaaaccaacctcgatgatgttgaagctgtctttaaagattctgaagagcaccgtgtgagggagaagaaagaagagcagcctacagccatgaatgcatttgagttaatttccatgtccaaaggactgaaccttgaaaacttgtttgatacagagcagggatttaaaagggaaacaagattcacctcaaaatcccctgcggatgagataatcaacaagattgaggaagctgcaaaacctcttggctttgatgtgcagaagaaaaattacaagatgaggcttgcaaatgtgaaagctggaaggaagggaaaccttaatggtgccacagagatattccaagtggcaccttctcttcacatggctgaggtacggaaggcaaaaagagatacattggagttccataagttctacangaaactttcaacaagccttgatgatgttgtctggaaa

SEQ ID NO: 28604 - DNA, 395 bp, Glycine max
  Clone ID: LIB3051-085-Q1-K1-D9
gaatcgacggaccggtccactcgtccgcatggtatactgtactcatgctctcatccaatttaaatctaatctcattggcaccagaaatgatcatgtatacacggggcgtatactcttactgccaatatcaggagctcgtcaagcacaactattgaaatggcgacattaataccgctatagaattactctgaagtggcagctgccatatcgaaaattgacaacagtaaacatatacctgaaatcccagagcatctttcgaacgatgcacaaaatttgatgacgctatgctgacaaagagacccataagctcgaccgacagcccataagctactagaccacctattgattcgacatcaatcggcatcaaaagctgcaaatgtgagcataaccagaga

SEQ ID NO: 28605 - DNA, 302 bp, Glycine max
  Clone ID: LIB3051-085-Q1-K1-E5
gaccaaatgctttgtataccattgattggagttgtgcattccataccattcgagggatatacggtctatgccagatgctgtacagtcctaattttttgagccaccattatgactaggaatgagttgacgagattatggaccgttaggtcgctggccaccatttctctcttccaatcattgccgaaattgacttgtacaagttcgacccatgggttcttccaagtggagcgattttctgtgaaaacgagtgttactttttcagcctcagagacaggaaataccctaacgggtctcgaaccatc

SEQ ID NO: 28606 - DNA, 409 bp, Glycine max
  Clone ID: LIB3051-085-Q1-K1-F10
gttcatgttccagtgattttgtgactaggaatatattccatttaccaagtgacccttttatgttgatggctaagtttgccactttgctttggtactccttttggttcaaacattatgattctttcttttttaaacttttactatttgataacgtacagggtcccttgccgaaagagagagggcatcagattcaccatcaacggtcactcatacttcaacctagtcctaatttccaacgttggaggtgcaggtgatgttcacgcagtttccatcaaaggatcaagaacaaattggcaaccaatgaccagaaactggggtcagaactggcaaagcaacgcctatctcaacggacaaagcctctccttcatggtcaccactagcgacggacacaccgtggtctctaataatg

SEQ ID NO: 28607 - DNA, 394 bp, Glycine max
  Clone ID: LIB3051-085-Q1-K1-F2
gcggttggtcctaaatcagttggagtgtgtcttttaacttcagcttttgtgggcatggccttcacgattcaatgggtaagagagttcaccaggttgggattgaatagatcggtaggtggggttttagctctggctttctcaagggagctaagtcctgtggctacagccattgtggttgcagggcgcattggaagtgcttttgcagctgacttaggaactatgcacgtttctgagcaaactgatacattaagagttcttggttcagaccctgttgattatctggtgacaccaagagtgttagccacttgtattgcgttaccccttttgaccctgttgtgttctacattacggatggcatctaatgcccttcttgctgatgggtgttattgggtga

SEQ ID NO: 28608 - DNA, 477 bp, Glycine max
  Clone ID: LIB3051-085-Q1-K1-F8
cccacgcgtccggaagaatgttggtgcttcttactcatatggtgaaacatctatgcaggaataggcagcagaataacattcagtacaaaacagttggacaacgcagttggactgcaatatttcgatggaggaatattcgtaggacgaaatgttataccaatttttctggctgccagatatctgattggagttgtacttctatttgtgttattgatctacaaatggcgacggagacatttgtcaatatatgaaaatatcgaaaatttcttgctggatagcaatctaaatcccattagatacggatacaaagaaatcaagaaaatgactggaggtttcaaagtgaaattgggtcaagggggctttggctctgtatacaaaggaaaactccgaagtgggttagatgtagctgtcaagatattgaccaaatccaatgataatggacatgattttatcaatgaagtagctaccattggaaca

SEQ ID NO: 28609 - DNA, 338 bp, Glycine max
  Clone ID: LIB3051-085-Q1-K1-H11
gtctgcttatgaagtctctcgaagcatctttctttctctttctgcagaagctattcgtgttacttgtggcgaagtattcaacatgcaaagtgcatggttgatttggaaatccacgtccgcatcgcattcgacccgtttgccgatggcaagagaatcagatgcccactgagcaaaggagtatgtgcacatactaattcagcaaaggaatgtaaagaagagtcttataacagtgcaagggatgaagaaggagcatagcgtcatgaagatcctcgaggacctgatgaaggacttctactgcaactggactgtggtgcacgacaaggagcttgtcaagatta

SEQ ID NO: 28610 - DNA, 288 bp, Glycine max
  Clone ID: LIB3051-086-Q1-K1-A1
gttctgtagctctggtccctccaacttcacttaacttctccctctctatctttctctcaatacggaccaaaagattcattcattggtattattcatacaacaaatcaaaaaatgttacccaacaatccttccactattgatcccgacgcggtggcccggcaccacacccacgtggtgtccccgcagcagtgctgctccgccgtggtccacgagatcgccgccccggtctccaccgtctggtccgtcgtgcggcgcttcgacaacccgcaagcctacaagcacttcgtc

SEQ ID NO: 28611 - DNA, 361 bp, Glycine max
  Clone ID: LIB3051-086-Q1-K1-A3
gcgtgcgtataaaaggaaaataaagaaattagcgtcaaaatgccgggtgtgctcagcagctccatagtgtcgccgggggacgagctcgtggccgccggcagccgtacttcgtctgcgaatatgaccgcagctgaactgccgaagcaggtcgaggagaagaacccctacgacgagtcactggaagttcgagagcatgtccagctcgcttatacccagcacaacgagtctgcgattcagcccacatcctttgctgtcaacgatgactgcgcctgctcgtttgaggtagcccttgacagtttgggaacactgatacaacaatatggactgcacaagtcagtcaatgaagtattggtcgtcattg

SEQ ID NO: 28612 - DNA, 425 bp, Glycine max
  Clone ID: LIB3051-086-Q1-K1-A4
acggacattactaacggaggtctttatagatttaataaattaataaccagataactatatatagtgtggcacaaggcttttacttatatatctttagtttgaatgttataattctactccgctactaatgctttcctccagaaattttttggcggaaaaaaaaatttgcccaatttaagaagtgacgttgaataattaatatgttcattgatgccaccaagtacctttttacggattaaaccacctcctggaatatatgattccataattacctaaaaatttaatcatttttaattatatataaatattactctaaaatccaggcatggtattatgggtgaaaaatataaatatttttatagagataaataatatttaagcgagagttatatatatttgtaaataaaagagcacgagattttttc

SEQ ID NO: 28613 - DNA, 366 bp, Glycine max
  Clone ID: LIB3051-086-Q1-K1-A8
cggacgcgtccgcccacgcgtccggttcactgtaaaatattcttccttccctggtccagtcggaggttggcaaatgggtgttccccatggcatgggtatctcaatgcaatacaataatgtggtgcctgtgccaagttttccacagccatcaaagtcaaatataaaaaattaaaaaaaaaaaaacaaaaataaaaaaaaaaaaaaaaaaaaaaaaaaaaaatacaggacaaacgatctactggattagatgtatacatgacctgactgcaaatttaaagattgactattatataatcaaatctaactagactgtccgcatagtacaacggaaggactgtgaaaaccctggcgaatcgcaacttaatc

SEQ ID NO: 28614 - DNA, 350 bp, Glycine max
  Clone ID: LIB3051-086-Q1-K1-C10
acggtgtgacgatggtagatcttcaagccaccgaactttcaggcatgcatgccttatcgggaacaggtagctggcactgccccgtacacatttaaccatcggctctgcatatgcttactgtggtgaacttggcgagaggatcgtgactgctggtcgatacaacgaagatcacgcaagatattgcttgcagcagctaatatctggagtcagctactgacattcaatggtaattggtcataaagatcgaaaagcggcaaacactgtgctggatggaaattcgattcctagcttaaaatttgtgactttggttatcacaagtctgcgctactgcactctgaacctaaatcaac

SEQ ID NO: 28615 - DNA, 453 bp, Glycine max
  unsure (1)..(453): unsure at all n locations
  Clone ID: LIB3051-086-Q1-K1-D6
agcaaatcaggatctgctgcttcagtgcttcttcaccttttgtcttctagcctgtggaatttggcatggagacagagaacggtgacaccaggtccaaaaagatggaagagtatgaagtcatagagcaaattggaagaggagcttttggctctgccttcctcgttcttcacaagtccgagaaaaagaggtatgtgctgaaaaagattaggttggccaaacagacagagaagttcaaacgtacagcacaccaagagatgaacctgattgcaaaactgaataacccatatattgtggactacaaagatgcttgggtggagaaggaggaccacatatgcattataaccggctattgtgaaggaggtgacatggcagagaacatanagaaagcccgagggtcattttttcctgaggagaangtctgcaaatggctgactcagttgttgatagctgtgg

SEQ ID NO: 28616 - DNA, 295 bp, Glycine max
  Clone ID: LIB3051-086-Q1-K1-E11
cccacgcgttcgaccacgcgtccgcttgcggttcgggttttagcgcatcttcttgtagattggaggtagatgggtaaggaaaaggctcacatcagtattgtagttattgtccatgttgactctgggaagtccactaccactggccacctgatctacaagcttggacgcattgacaagcgtgttatagagagatttgagaaggaagctgctgagatgaacatgaagtcttacatgtatgactgtgtgcttgataagcttaaggcttatcgtgaatgaggaatcacatttgatattg

SEQ ID NO: 28617 - DNA, 246 bp, Glycine max
  Clone ID: LIB3051-086-Q1-K1-E5
cccacgcgtcctcccacgcatccgtaaaaaaattaaaaatacataaaataatatagaaaaaagtgtaaaaaaataaaaaagataataccaaaataaaatataactaactactaccctttacaaatcaactaattacaaataccataccacatcatccctaatgttgtctaagccttcacgagtgttgaaaaccttgaaagtaactgtacccctacaaccatcactaacatcactttcctttaacat

SEQ ID NO: 28618 - DNA, 399 bp, Glycine max
  Clone ID: LIB3051-086-Q1-K1-F10
gaaggcatcgcctctctctttggagcaattcatctccattaccgctcctcttcttgacttgggaaaggaagctgagatttcaagctcgatcgccactggtgcgtccaggaatttggatactgctcaaaagaggggttctacaatcctcaacttgaagtgcgtcgatgtccagacagggcttatggggaagtctctgatcgagttccagtcaacaaaaggagatgttcttactgcacacaagtctggtactcatgatgttgttgttttaaaactcaacaaggctgatttaggttctcctgctcttggacaaggtgttgtttacaggttaaaggactcatcaataaccattgctcttgatgatataccggaagacggtttaaacaagtccctaagactgga

SEQ ID NO: 28619 - DNA, 295 bp, Glycine max
  Clone ID: LIB3051-086-Q1-K1-H12
atcaggatatattacattaagaaagctccccatatagacgcatatggcttgcgatcgcaaagtgaacagctgacgccctgtgccggattcagtgcactgcctgtgactaaacacatgtctctctggcagacaacaatcataagaccatattgataagaccatatcccaagtggatattgcctaccttcaagtcatttagctcatgactatcccttcaatccaccaaaagttgcttctcggactctagtgttccacccaaacattcaccgtgattgcactctatgtcttgacattc

SEQ ID NO: 28620 - DNA, 446 bp, Glycine max
  Clone ID: LIB3051-087-Q1-K1-A12
gcgaattgctaaatcttactgagtacaatgttcatatggccaaacttattgatggaggaaggaacagtatgtccaaagaagatatcttttatggttttacctttttctatattattataattatagttataattataatgaagcaacttctctggatgaatgtgcagaggctgcaatggaattttccatttcccttcttcaaactctggttgttgaggaacctaaagttatttcagaacttcacaatcttgttgatgctttggcaaagcttgctacaaagcctggatgccctgagtcattaccacagcttcttgaaatgatcaagaatcctggtgctatatcctctagtaatgctggaaaggaagataaggcaagacaatcaagagacattaaggtgcctggtctgttacctgcaaatagggaagagttcaacagcattgattcta

SEQ ID NO: 28621 - DNA, 204 bp, Glycine max
  Clone ID: LIB3051-087-Q1-K1-B2
cccacgcgttcgctaacggcttctgcaattgtctgcgtctatctctgaatatactctctcgaatggctgcccatactatcgcgcatgctacccttaaaggtccgaatgtcgttaatgagatcacacttggcataacacttggctcatctgctgatagtcagtccaagatgcaccactggaatgaccagacgaaaaccaggacct

SEQ ID NO: 28622 - DNA, 354 bp, Glycine max
  Clone ID: LIB3051-087-Q1-K1-D12
aaaaaataataaaaaaaagcaaaaaaaaattttaaattaaaaaataaaaaaaatataaatggggatagttaaaaacaacaatattatattccgtgaacaatctgaaatatcataacatctcttgtcaacatcactttccaagtgtcacctaggtcaaagtcattgtctcgcaatcatataacggaaattgaaagtattactcctagccttatctataataatttaagttcacttttttagctttttctccagtggacatcttacatatgtcgtataataggtttatcaattcataatttttcccgttcttactttatttttttgctttaccaactttatcactttttaatgcac

SEQ ID NO: 28623 - DNA, 439 bp, Glycine max
  Clone ID: LIB3051-087-Q1-K1-F10
cggacgcgtccgtccacgcgtccgcccactcgtccgaacctgccagttctgaagaatggagctacgctacatgttaaaaaatctcaggcgtctaaggagagagggttacaagggagcacaataagcagtcctagtgaaatggcacagggaatcagagcagggaaaatagctgaaggaaatgatgcacattctctttctcttcaagctgttgaaactagacagcaaacacaagtcatcaaagttgtaccacataaccggaaatcagcgacggaatcagcagctagaatttttcaatccattcaagaagagagaaaacaacatgatttagtctagtgctgtttatggaggtggagttatttgagttgattttgtacagtgcgtcaagtcctgtactttgttgttgtttggtaatatgtatcttgcttgtttattctactct

SEQ ID NO: 28624 - DNA, 394 bp, Glycine max
  Clone ID: LIB3051-087-Q1-K1-F3
gccacgcatccgttcatactgggtgtatgcacattcggggatcaaatcaactgccgagaggcatgggctactatatacaaggacctagttacagatgccgacagcgtgataccaaaggctcttgattccttcaagagtgtcgaaaacgtcaagggaaatggacgaccaagagccatcaagaagatcactttccttgaagatggataaaccaagtgtgtgctgcgcaagatttacagcatatatgaggctaactggggatacagctactacgcacttggtgatactgcattgccagacacagtggaaacaatcacattatactactaaacgcttgctggacccaatggatagtctgctgagaagctcactgtcacatacgaaacaagaaggagat

SEQ ID NO: 28625 - DNA, 455 bp, Glycine max
  unsure (1)..(455): unsure at all n locations
  Clone ID: LIB3051-087-Q1-K1-F8
cccacgcgtccggttctttcttgtgcttttcctagtggccagaaccatagctgcttctcgaagataaagaacatctgatgctattgaattgatctcccaaatcctaatttgcaggccacataatacagaaaatagttcacatcaagatgaacatcctacgctctttttggaacagtcccactggcctcaaaacaactcatttttggggtcctgccttcaactggagcccttgctttgccgcagcaatggacacaaagaaaccaccgganacaatatctgtcaatatgaccggagtgatgtgtgtttattcggcactgtgcatgatgtttgcttggatggtacgtccaagaaacccacatcttcttgtatgccatgtcttcaatgagacagtgcaatngtatcaactctcaggatggttcagagctcaaaggggccttgagcatgacaaaaaggat

SEQ ID NO: 28626 - DNA, 225 bp, Glycine max
  Clone ID: LIB3051-087-Q1-K1-G6
cccacgcgtccgctagattcagccacagattcggaggataagaacatagtcctaggagagggcccgtactaagcagactgatcctaagtccacatgaggaaaggctcctatgaagcatctcgctgccaatgctgcacgtaagtctgcactcaactactgactgtgttaagtagccacattgttcccgtcctgttaccgatgctctacttgagattagtaaatacc

SEQ ID NO: 28627 - DNA, 410 bp, Glycine max
  Clone ID: LIB3051-087-Q1-K1-H1
cccacgcgtccgatttttcttgacgatggcctcagcatgcacttcttcatctgttgcgttacatctgattaaacatcgtaataatgttatgagaaacagttactgacaaagatggctcaatacgcactcccaacacctgttgcataacatcatgcatttatttcatcagtaacaattgtatgaagccatgaaataatgctatgacaggcagacgaggacaaggatggccgtcttactttgactgagatgattgagaacccatatgtattttatagtgctattttcaacgatgatgaagatgatgacgacgattaccatgatgagttccggtaaattcatgttaggatacccagaaaaagttggcacaattctagtgacacggaatcagtatttgaggataatgacacgac

SEQ ID NO: 28628 - DNA, 433 bp, Glycine max
  Clone ID: LIB3051-087-Q1-K1-H10
cccacgcgtccgcccacgcgtccgatttagtgtggctcaagattgtggaaaaccaacaagaagaaaaagatataatcataattatatttcttgatcggtgctccgagtctggccgaggacaacagggaggcctgcatgagctcccccgacctctcctccctgtggctgtcaacgccgcaatccgccactccgggacccgacacgagcagagctccgccgcctccgccgccgcaatctcagtctcctctacaaaggcggttgcagacgctactagaaggagctagagaaagctggacctatgcaattttctgggagtcttctcacgacaacttctccggcgctacccttctccgttggggcgacggctattaccagggcgaagaagaggacaaagccaaaggcaaagctcccaaaacgacgacgtctgcagaac

SEQ ID NO: 28629 - DNA, 445 bp, Glycine max
  unsure (1)..(445): unsure at all n locations
  Clone ID: LIB3051-087-Q1-K1-H9
ctacaacattcactccctctctcttgtcttttcctctacgttcctgcattgctcgtctcgaacgctaaccatggccggcggaggtttcaccagcggcggcggcgccggagatttcgaggccaaaatcactcccatcgtcatcatttcatgtatcatggctgccaccggaggtctcatgttcggctacgacgtcggcgtttcagaaagacagtggaagagaaaggactggacagtaattactgcaaatacgacaaccaaggattacagcttttcacgtcgtctctgtatctggctggtttgacttcgacgttctttgcttcatacacgactcgtaggttgggaagaaggctgaccatgttgattgctggggtattcttcatctgtggagttgtccttaatgctgctgctcaagaccttgccatgctcatcgntggcagaatcttac

SEQ ID NO: 28630 - DNA, 310 bp, Glycine max
  Clone ID: LIB3051-088-Q1-K1-A1
cccacgcgtccgctgtaaagcgtgccaagaaggatttactaaacaagaacttagctgagttcaagaatgaaataaacaccttgtcgaaaattgagcacattaaccttgtaaggtggtatggatatttggagcatggacatgaaaagattattgttgttgaatatattagtaatggaactcttcgggaacatttagatggtattcggggagatggactagaaattggtgagcgtctagacatagcaattgacatagctcatgcaattacttaccttcatatgtacacagatcattcaattattcatagaga

SEQ ID NO: 28631 - DNA, 443 bp, Glycine max
  Clone ID: LIB3051-088-Q1-K1-A12
attgttactaccaccatcaccattactaccattgctgcaactctccgttagcagacttcaaggaatgggcaaagaggaaaatgatgaaaatgaaaagaaagatggagaagatggagacgaggatgaaaatgcacaagaggaggatgaagaagatattagtgatgatgattataatcagaatatagattttgatgacgatgaagatgattataatgatgtagatgacggggatgatgaacctacctattagatatcagtatggagaatgttcttctgctcatcccgtgacagctatacaagcatggactgttgctcctttaattttacagtttggaagttaaaattgttcgttagccttatttggcttttactttgtcactattttaacttgttcaattactaacggatgttttccttgtaaatgtttagattaaagaagtata

SEQ ID NO: 28632 - DNA, 208 bp, Glycine max
  Clone ID: LIB3051-088-Q1-K1-B11
ctgcgcgtgggaaaaaaaaaaaataaaaataaaaaaaaaaaaaaaaaaaataaaaagaacaataataaataaaacaaacatacaacttaaaaaaatcttttatacataaaaataacttcttttcaatttccgtcaatttacaacttctttaatcaaaactccatctcattacccaaatctttatgattgcattacatacctttttttt

SEQ ID NO: 28633 - DNA, 442 bp, Glycine max
  Clone ID: LIB3051-088-Q1-K1-B12
aaaatatatagcaagtatcctgctatgcagtagtcatcattttataattattttgtaaaaggtaattttcctcctttgcagtcattgctttgtgatcccaacccaaattctcctgcaaactctgaagcagctcgaatgtttagtgagaacaagcgtgagtacaatcgaagagtgagggaaattgtggagcagagttggacagcagattaagttcatccttatatgcatgggaagctttgaaggcatgaatttggttgcagtgatggcaactataagaatgattgtgcaaactcatcacatttatattctctgctgatatgaatgatagcatcatcttatctttaatttattatagcttctgcattgcatatgtcagctaatgtaaaatagaattatgcgtgtcaatttactttcgattgttgtcagacattcaacatgaaaa

SEQ ID NO: 28634 - DNA, 439 bp, Glycine max
  Clone ID: LIB3051-088-Q1-K1-B3
cccacgcgtccgatcatttcaactattgtgttcttcttggccaaataaagccaacccctggtgctgttttggtttgtctgagagagaaatgatggcattggagtgtagtagtttccacttcctaaatggggtttacatggtgctgtttttttgccttggcattgtccttgtaaattcggttaatgaagagggtttgagtcttttgaggttcaaagcttcccttcttgacccaaacaacaatctctataactgggattcttctgatttgactccttgcaattggactggtgtgtattgcacaggttcagtggtaacttctgtgaaactttaccaactcaatctgtctggtactttggctcctgccatctgtaatcttccaaagcttcttgagttgaatttgtcaaaaaatttcatctctggccccattcctgatggtttt

SEQ ID NO: 28635 - DNA, 444 bp, Glycine max
  Clone ID: LIB3051-088-Q1-K1-C4
catgtcttgaaatatatgtttgctatatgctattaccttttctattctcccaagtgtaacttcagaagtatctatatggaatgtgtggaacaggttttggagatgaacaacaacccacactatttgtatcggatgactattcttcgtgctatctctctgcttgctcctgtgatgggccctgaaatcacttgttcaaacttgttaccagttgttgttgctgcatcaaaagacaggtactttgtattaccttttgaaagccgggtacatgccatcatttccatacagtttctttaagttcctaattgctgccatttactcccttttagagtgcccaacataaagttcaatgtggcaaaggtattagagtccatcttccccatcgttgatcagtctgtaagtatcattcttatgtttccatcttctgttcatctttctttgtcttaa

SEQ ID NO: 28636 - DNA, 254 bp, Glycine max
  Clone ID: LIB3051-088-Q1-K1-C7
cccacgcgttcgtagaagtattattatacttccattaccatttaaaagaaaatggcatagacgggtattgacacattcgaggacgatatcacctctgctgcggctcatgctactctttacaaagatgtcgttacagatgccgacaacattattccaaacgctcttaattcctttaacagtgaaggaaaccgtgagggaaaaagcagccccgggaccaactaggaaaaaaatttcggaaacaaatgatgaaccca

SEQ ID NO: 28637 - DNA, 438 bp, Glycine max
  Clone ID: LIB3051-088-Q1-K1-E10
gagaactaaaggtttcacctgttaatgaaagatgctgtactgacaagcaagtgttgctttaaaagcttttgtgacagatgtattagggactatattatctccaagtctatctgtgtatgtggtgcaacaaatattcttgcagatgatctcttaccgaataagacattacgagataccattaatcgtatattggagtcgggcaatagcagtgctgaaaatgctgggagcactttccaagctcaagatatggagtctgctcgctgtccgcagcctaagattccatccccaacctcatctgctgcatccaagggagaactaaaggtttcacctgttaatgaaaaaacaacaaatatacaggaaacaactgatgatagaaaggctgtttctgctccacagcagacatccgagcaagtaaggaaccccagagctgctgatata

SEQ ID NO: 28638 - DNA, 435 bp, Glycine max
  Clone ID: LIB3051-088-Q1-K1-H10
cccacgcgtccgcccacgcgtccgcccacgcgtccgcgcggagatcaatatttgatctaggtccatcgtcgatagaagatacgagaaaccaaaggcaatgtttttgtgggattggttttatgggattctagcgtcgctcgggctgtggcagaaggaggccaagatcttattcttgggcctcgataacgctggcaaaactaccttgcttcacatgctcaaagatgaggttttgttttccttttttttttttgtttccccaatcgtttacctttttttttattattattataagagttggttttgcagagattagtccagcatcagcctacccagtatcctacatcggaggagttgagtattgggaagatcaagtttaaagcttttgatctagggggtcatcagattgctcgaagagtttggaaagattactatgcc

SEQ ID NO: 28639 - DNA, 325 bp, Glycine max
  Clone ID: LIB3051-090-Q1-K1-A12
acggtttgcttttcccctcctgagttctctcgctcccaccaacggcagggtcaggccacggggcgggccccacccctgcgcatacattgccatctgtttctcctgtttttgtttgtttgtttgttttccgatttccctttttacttttttttcccctttcttcctacacttagtttcttgggctgggtgggatttgcacagctgcagtcctggccccaggcagtcccccacactctccttctggcatcagtccctgccctctttttcacatagagcctggcttgggagaggggcttaactcttggtgtgcctggctgtctggtgt

SEQ ID NO: 28640 - DNA, 255 bp, Glycine max
  Clone ID: LIB3051-090-Q1-K1-A7
tcctccgacgcgtacgcccacgcgttcgtacaaaaggatttcgcatgagagcagagctgagagacaaggggtaaatagtactccaatgtcgatcgctatacattcacaaacgagctgaggcagctgctaaagctgatgacaaagaactgggacaagtgacagagcacctagagaccgacaattccgtgctactgctgatcatcaactatcatcgttctcaggaagatcaacatgaccgtcgagttacaacgtcca

SEQ ID NO: 28641 - DNA, 364 bp, Glycine max
  Clone ID: LIB3051-090-Q1-K1-A9
gatgaaattgaacttcttgttgtctttgaacttgtgctatgctctttgctaaaatattgaacttgggcataataaaaaaaaaagaaaaaaaaaaaaaaaaaaaaaaaaaaaaaaaaaaaaaaaaaaaaaaaaaaaaaaaaaaaaaaaaaaaaaaaaaaaaaaaaaaaaaaaaaataaaaaaaaaaaaaaaaaaaaaaaggggcacctaatttaaattaactaactctactttttacaacatttcaaaatgtaaaaaccttgatggtacccaaaaaaaacaattttgtggcacatttttaaaaaaccagtaaacgtaaaaaccaataagttcccaaaaaaaaaccttttaaaaaaaaacccaatt

SEQ ID NO: 28642 - DNA, 363 bp, Glycine max
  Clone ID: LIB3051-090-Q1-K1-B6
cgcctggctcgacccactcgtacagtcgtagattcaaagcgcagataccagtgcaggtgctaacccttataaggagccactcgtcctggtgcaattgaacaatcatggagtgacgcagttactcaaactattcgcactgcaaccatagtcaactatatggcacatgcataagcacctgttgctggtgcaaatagagattggcgtgaagctaatccaccaccactaccatccctgatattgctattgaattgactctgtccaaacaactggctgggaataaactcacgattttcgatgctatgatcttgcactgtgcttaaactgaattgtcctgcctagaagtaaactatggctcagagtttt

SEQ ID NO: 28643 - DNA, 392 bp, Glycine max
  Clone ID: LIB3051-090-Q1-K1-C12
agccgcccgcttgcccgtcggtcgctagctcgctcggtgcgcgtcgtcccgctccatggggctcttcgtgcggctgctggctctcgccctggctctggccctgggccccgccgcgaccctggcgggtcccgccaagtcgccctaccagctggtgctgcagcacagcaggctccggggccgccagcacggccccaacgtgtgtgctgtgcagaaggttattggcactaataggaagtacttcaccaactgcaagcagtggtaccaaaggaaaatctgtggcaaatcaacagtcatcagctacgagtgctgccctggatatgaaaaggtccctggagagaagggctgtccagcagccttaccactctcaaaccttcacgagaccctgggagtct

SEQ ID NO: 28644 - DNA, 278 bp, Glycine max
  Clone ID: LIB3051-090-Q1-K1-C5
cgcattttgtaatttaatttagctaaatctaattaattattaggcgaagagttgtttttaaagatgaagctccttggttgttgaatccttatggtaattttgatttattattttatgtacttttattctattgtctcaatgatattaaggaaaagtcataaaataaaaataaaaaaaaaaaaaaaaaaaaaaaaaaaaaaaaaaaaaaacaacaataaaaaaatagtcataaaaatatatcacgtcaaaaaaccaaagataaagtctaaatgaaatca

SEQ ID NO: 28645 - DNA, 219 bp, Glycine max
  Clone ID: LIB3051-090-Q1-K1-C9
tcctgtactcaacgaaacggttctttaatatattggggatgccaaccctcacaacgatcatcccacaactctccatggtcaacccgaacacaatccacacctcatttaccctgacaatattgttccccttcatgctacatatccaccttatcctcatatccccattgatcctcctttcaaacatctaaaccattcttaaactgatccttcttgtccttt

SEQ ID NO: 28646 - DNA, 306 bp, Glycine max
  Clone ID: LIB3051-090-Q1-K1-D10
attcccggactcgacccactcatacactacttctagatctccaactaccacccttttttttttttcttcactttctattattaaatgaacttttctatatactggggctactctttacaattccctatttacatattcccacaacattattccaaacgctcttaaattcttcaacaatattttatacattcaattaaaatcatacccaacaaccatcaacaacatcactattctttaagatttacaaaccacaatttttctttacaaaatataaaacattcattataccaactttatatacaacta

SEQ ID NO: 28647 - DNA, 414 bp, Glycine max
  Clone ID: LIB3051-090-Q1-K1-D12
acggctggcaccaggagccgtgggcaagggaagaggccacaccctgccctgctctgctgcagcgagaatgggtgtgaaggcgtctcaaacaggctttgtggtcctggtgctgctccagtgctgctctgcatacaaactggtctgctactacaccagctggtcccagtaccgggaaggcgatgggagctgcttcccagatgcccttgaccgcttcctctgtacccacatcatctacagctttgccaatataagcaacgatcacatcgacacctgggagtggaatgatgtgacgctctacggcatgctcaacacactcaagaacaggaaaccccaacctgaagactctcttgtctgtcggaagatggaactttgggtctcaaagattttccaagatagccttcaacacccagagtc

SEQ ID NO: 28648 - DNA, 467 bp, Glycine max
  Clone ID: LIB3051-090-Q1-K1-E5
cacaactccactctctctctctctctctgattcagcttcagcgaaatcgagttctaaccgtaggtcgtgcttttgcgtctgagaagccacttctctacttgcggttcttcttcttcaatttgatttgattcgcttgctggaaaattctttgagtgagggagaagatgtctggtggcacgcagaagagtctgagaaaagcacttggagcccttaaggatactacaacagtctcgttggctaaggtcaacagtgattacaaggaattggacattgctatagttagggccacaaatcatgttgaacgtccagctaaggaaaaacatataagagctatattttcagctatctcagctacaagacccagggctgatgttgcctattgcatccacgcacttgccaagcggttatcaaagacacataactgggcagttgcattgaaaactttaattgtcattcaccgtgctcta

SEQ ID NO: 28649 - DNA, 442 bp, Glycine max
  Clone ID: LIB3051-090-Q1-K1-E8
tgcaatttggaatcggcatgtaaatttcaagttcttcccaaagcgctttgagatcagaatagagaatagttacagatcgagtaccttgagtgagagcgtaaatctcttgttgaatttctgaaacacgaaccaaatcaccttgtgagaaacgctctttcagatcgagccacacatcggaagcgttatccatgaaaacgatggatcgggaaattgaaggttcaacggagttgagaatccagctatgaatcaacatattgcagcgattccaagctcggaacgacggatcgaaggcatcaaccggcatcggaattgttccgtcaagaaattcgaacttgagtttggctccgagagcgcgtcgcagagacctcgcccaagaatggtagttggaaccatcaaagagtggtgtgaccttgacggacgagggaccgtcgctaggatgaac

SEQ ID NO: 28650 - DNA, 389 bp, Glycine max
  Clone ID: LIB3051-090-Q1-K1-E9
acgacaaatggttaaatcttcataaatatgtgtacttctattgcttaaagcaaaaagcatcatcttcggtccagttgccatatgttagaggaggcgcagcattcaaaaggatctgtttgttttaatggaacccaactacaataccatttcgacaacttattaaaataaggaattaaaaactccattgttcacattaatgaatgacgatggtgcaacaatgtatatagtcacctttaccataaggataatacgcttaggctcatctaacctaatgaacgatcttcacttttctacgctttttagcacccaccatgaatctaatccatatttctacaatttgaatagattccacgctaagtactctgatcacttatcatttacttatgatc

SEQ ID NO: 28651 - DNA, 463 bp, Glycine max
  Clone ID: LIB3051-090-Q1-K1-F3
cggacgcgtgggcaaaaatcagtagttatgtatctatctttactgaatgtagaccactttctatgagcatgggaaatgcaattaggtttgtaaagagtcgtattgtcaatctgactttaaatcattcggagtttgaggcaaaaacaaccctgtgttctgatattgaccggttcataaatgaaaaaataattcttgctgataaggtgattgtccgacatgcttttacaaaggttaaggatggggatgttcttctcacatatggattgtcatgtgttgttgagatgattcttttatatgcctatgagcaaggtaaaaagttccgtgtggtggtggtagattcacgacctaagcttgaaggtcaggccttacttcgtaggctagtggctaagggcctgagttgcacatatactcatataaatgctgattcttatatcatgcatgaggtcacacgggttcttctggg

SEQ ID NO: 28652 - DNA, 365 bp, Glycine max
  Clone ID: LIB3051-090-Q1-K1-F7
caatagtgtcgttcccatatgaatgttccggtatgtatccttcttgcatttcggtgcctagggggaactgatttagagatatatgggtactcaatattacccaacactcgatgggtattcagaaaaaagccgcgtttcctgtttaacagaaggttgtaaacatcgaatagaagacaagtgtcatgttaaaccggagttggcgattgcgaatacaatgatgggtggatggctaatttagtcttgctctgcattggaaactcaattgtctttgtggctaatctttagcgaaataacgagacatagtcaacgagagtgcagtttgcaagtctggcttaaagctagaatgtcaggccttacttcgtaaa

SEQ ID NO: 28653 - DNA, 394 bp, Glycine max
  Clone ID: LIB3051-090-Q1-K1-G1
gatggttgagatttctggggtcatactgtatagtattgaaagattgcttgcctgatgtgacaatcagtttgtaaatgttgctaaatgataatgtttagcattgccaaaaaaaaaaaaaaaaaaaaaaaaaaaaaaaaaaaaaaaataaaaacatatatacaaaaagagagaaacactataataaaagaaacaaactacaagaaaatcatgaagcatgagatctgaaccaaacatgtacatttgcagatatacaaactcatgagcatgctaagtgctttcattcgggttgtgcagaaagagtataaatacttcttacgagctactcatcactagcggaacctattcataaatgacatcttaagcaaaaaactttttggccttgatcttatttgga

SEQ ID NO: 28654 - DNA, 315 bp, Glycine max
  Clone ID: LIB3051-090-Q1-K1-G12
acgctggagtttcagcttggacactgagccaatcagacaagcaaagcaagccaggacagaccgtcctgccccaagcccagcttgtctcctgccttccaacgccatggggagcaatctcagcccccaactctgcctgatgccctttatcttgggcctcttgtctggaggtgtgaccaccactccatggtctttggcccggccccagggatcctgctctctggagggggtagagatcaaaggcggctccttccgacttctccaagagggccatgcactggagtacgtgtgtccttctggcttctaccccgtccctgt

SEQ ID NO: 28655 - DNA, 343 bp, Glycine max
  unsure (1)..(343): unsure at all n locations
  Clone ID: LIB3051-090-Q1-K1-H2
tcgttccacgcgtccggcgtcgccttcttcgctgcaactatctaccttacctctttttgcgaatctgaatcgaaatggggtcngatactgagagcggcgcttttcaggccgttatcaatcatgtcctcagtctaataatcaacaccttctacatgcaacaagtgagatctaacttcatgagctcatcagcaatgcactctgacactttggacatgaaccgatctgagagtcttacagacaacagctagcttgatgctcagtcaatagatgacattcaaattattcttgaacagaccaacatcacattgattatcatccacagaagtatcggcatctctaaagc

SEQ ID NO: 28656 - DNA, 418 bp, Glycine max
  Clone ID: LIB3051-091-Q1-K1-A9
atgatattctcatacttaatagttgccggatagcgtcactgaattgagctgttagagtacgctagagtttatttcagctggcaaagttacgagagaatacgaatctttgaggcatgactggttgatctggctgtgtctgggaccccaccatcattgatatttttcattctacatatgtatttaatgccagtaacgactaatgttgtctggcaagcactgcccaaattgacttgaactataaacaaccatgtgggttcccaattgaagcaatttcaagtgaaaaagagtggtactttttcagccccagagacaggaaatacccgaacgggtctcgacccaacagagtagctgggtcgggttattggaaagccaccggaaccgacaagatcatcaccaccgaaagtagaaaagttggcat

SEQ ID NO: 28657 - DNA, 431 bp, Glycine max
  Clone ID: LIB3051-091-Q1-K1-B5
cccacgcgtccgctcgctcagagatcattgaagcatgttcctgttccttcccacaacttgattttggagtacactttcctcagtcagcgggggtactaccctgattcacctgataaagaaaaccaagatagtttctgcatcactacacaactccaaggtaaccccaatgtccatttctttggtgtctatgatgggcatggccaatttggtagccagtgttcgaattttgttaagcataggctggttgagaagttgtcaaatgaccctgcattgttggaggaccctgttcaggcttacaattctgcattcttggcaacaaatcaagaattgcgtagtactagtgagattgatgattctatgagtgggcaccaccccgcgattacggtgcttgttattggtgacactctttatgttgctaatgttggtgattc

SEQ ID NO: 28658 - DNA, 429 bp, Glycine max
  Clone ID: LIB3051-091-Q1-K1-B6
ggataggaattatttacttgttgtctggattcggcgggagtgtactatcttccttattcattagaaacaacatttctgttggtgcttctggtgctctttttggacttcttggagcaatgctttcagaacttatcacaaattggagtatttatactaataaggcagctgctttgttcacacttctgtttattattgtcatcaatcttgccattggaatgttaccacatgttgataactttgctcatattgggggattcctcacaggatttctccttgggtttattttgctgctccgccctcagtttgggtggttagaacaacgacgtccccctgctggtgttcgcctcaagtcaaaatacaaggctttaaaccaatatgttctatggattgtctcggccattttactaattgttgggttatctattgctc

SEQ ID NO: 28659 - DNA, 347 bp, Glycine max
  Clone ID: LIB3051-091-Q1-K1-C1
gaactacatcgcttccgcttcctcttaactgtcgtacactcatatccttttatctccagtgcaacaataagctcacatcataaaaattcacctatgcaatcctaatctcatttctacacttgatcccattaaatctatatcaaatcaagcagggcatgacccgtctcgcctaatactacattcctctctacgacttctagaagcacaaggtccaataccatgttcatccgctcgattataacacataccctaaatacacaaattacgtctagtctcgtacccacaagataatttacaagcgaaaatctgatgtatttctctaactctttgatgatatcactgctaat

SEQ ID NO: 28660 - DNA, 428 bp, Glycine max
  Clone ID: LIB3051-091-Q1-K1-D6
aaaagcatataagagatggggttagaagggaaggaaacgccgtcgtttatgagggattgtgtcgataagtgtggtggctgcgccgttattgacggtggttttgccactgaacttgaaaggcatggggcggacctcaatgacgaactctggagtgccaaatgccttattagctccccacatcttgtccgaaggatctgcagtttcacacgagtgatcaaaggaatgggaaaaaaatgttcacctagattacctcgatgcaggagcaaacataatattaacagcatcttatcaggccactattcaaggttttgaggccaaagggttctctagagaagaaggtgaaactatgcttagaagaagtgtggagggattgcacgtgaggcacgagaaatttattatgataggtgcaccaaagattcttctgactt

SEQ ID NO: 28661 - DNA, 334 bp, Glycine max
  Clone ID: LIB3051-091-Q1-K1-E4
aattactgctattactagacgactcacatttagttttgattgttcgactgctatggctaggaacaggcttatcgatggtgaagctgaattggctcaaggtgttggagaagaagtgtctaattttcacttcgactcagagattattgctgctggaagtggcggcattcgcgccgctagattctcatccaatcttgtgagctaatgtgctgatttacgagctctcatttcatacaattaattctgactcaattcgacgagtcggctgtacgtgtgtcattcgtggatgtgctcccaaacagattctggtctatggagcatcttttggaggtgatct

SEQ ID NO: 28662 - DNA, 430 bp, Glycine max
  Clone ID: LIB3051-091-Q1-K1-E5
cctatctctttcaacattattatcaagttgttatttagtattgtgaccaatggtcatcatgttaacaggagacagctgtcccgcaacacttccattgcccttggctgccttcacaagccttaccataacctacaaagttgataaggcatcagagcgttttcttaatttggctggccaaacattggagagcctcgctgcaggttgtccatggccttgcatgccaattgtagcttccttgtggaccctaaaggcaaaacgttggagtgacttccttatcttctcagcatctagaactgtcttcctccacaacagtgatgcagcagttcaacttctaaagagctgcttcacagctacccttggcatgaattagggctctcctatctcaagcagtggtggtgttggagccctacttggacatggatttaagtac

SEQ ID NO: 28663 - DNA, 428 bp, Glycine max
  Clone ID: LIB3051-091-Q1-K1-E6
cccacgcgtccgcccacgcgtccgtggtgttgcaaggtctcagattccctgacaccccatttgttagtatccaagcgagggatctcattagagggttgttggttaaagagcctgaaaaccgtttgggttcagagaaaggggctgctgagataaaacagcaccccttcttcgaaggccttaattgggcgttaatacgttgcgctatcccaccagaactgccagacttgtgtgaatttggagtttcagagatgaccccacagtcccagggaaagggtgttaagtatgtagagtgcaatgcagcaggagagctagttgaatttgagttgttttgaagagactgctctttggcaagagtagcattcttggtttatggattcccttgtttttggctctatgcttcacgtgtcgagctgcaacagttatgtaag

SEQ ID NO: 28664 - DNA, 353 bp, Glycine max
  Clone ID: LIB3051-091-Q1-K1-G5
cggacgcgtggtctgacgcgtgggttctgcagcaattggtgttgatcctgccatgatgggtgttggccctgctgctgcaattcctgttgctgttaatagctgcatgtctagagcttgatgatattgatctttctgaaataaatgacgcatttgcctcccagttcgtgtattgccgtaacaagctagggctagatccataaaagatcagtgttaatggaagcgcaatggcaattgcacatactctggcttcaacaggtgctcgatgtgctgcaactctgatgcatgaaatgcagaaacgtggcaaggactgtctatttctatttatatctatgtgcataggtactggaatggtg

SEQ ID NO: 28665 - DNA, 429 bp, Glycine max
  Clone ID: LIB3051-091-Q1-K1-H6
cccacgcgtccgcccacgcgtccgaaaatgttttgatattaaaagaaaaatcattatgtgcaaagctttctgatatgggaattagtaaacgccttcttgaggatatgtcttctttgggtcacactgttactggctgtggaagttcagggtggcaagcaccggagcaacttgttcaaggacgtcaaacacgagctgtggatttatttagtttaggttgcattctctttttctgcatgactggaggaagacatccatttggagaacgtcttgagcgggatttcaatattgtgaaaaatcaaaaggatcttttcttagtggagtttattcctgaagccgacgatcttatttcttgtttgttaaacccttaaaaccctgatctcagactaacagcgattgaagtattgcatcatcctcttttttggagctctg

SEQ ID NO: 28666 - DNA, 435 bp, Glycine max
  Clone ID: LIB3051-091-Q1-K1-H7
cccacgcgtactttcactcgaccaactccgaacagacactatatgattacttcgtacaccggatcaatggattatagagcgggcagtactcctcggcatgtgcaacgcctctcctcgacatctttgcactcgtacacgacgctttcttgcaaaaatacgggctcaagttgaacgatgcgaatcgtcctgaggataaacacaaacctatgtatgaagaatgggctaacaattctaatgtgaagtacattgctggacgtgctactcacaattgaatcaggcttgatcactggatgcttcaagcaccaggtgccacaagctacataggttgcataggaaaggacaactatggagaggagatgaagaagaaatgtacaaccttgatggtgtaaaggctaactattgtgaaatcgcacaatacaactactggaacttgtg

SEQ ID NO: 28667 - DNA, 459 bp, Glycine max
  Clone ID: LIB3051-091-Q1-K1-H9
atctgaactgagtaatgacactcttaaccctttatcttcttggaaccataattcatccccgggcaactggactggtgtcctctgtgacaagcatggccaaagagtgacaggccttgatctttcaggcttgggactctcaggtcacttaagcccttatattggtaacctctcctctcttcagtccctccaattgcagaataaccaactcacaggagtgattcctgaccaaattggcaacctattcaatctgagacttctaaatatgagcactaacatgttagaaagaaagcttccttcaaacaccacccacctgaaacagctccagattcttgatttatcctcaaacaagattgccagcaagattcctgaggacatcagcagcttgcaaaagcttcaggctttgaaactgggaaggaatagcctctatggtgcaataccagcatccatagggaacatttc

SEQ ID NO: 28668 - DNA, 432 bp, Glycine max
  Clone ID: LIB3051-092-Q1-K1-B4
gagaagaagagggagaagaaagagaagaatatggaaaagaaagagaagaaaaaggagaaggaggaaaagaaagagagaaggaaaagaaagagaagagggagaagaagagggagaagaaagagaagaaaatggaaaagaaagagaagaaaaaggagaagaaggaaaagaaagagagaaggaaagaggagaaaaaaaataaattataaagaaacgaaacacgggcaagaaaggggagtagagaccactcaataaatgaaatagctactaaaggctttgttctctttttagttatttgataattatccaatttgagttatggagttataaatatgaggagttttttttcaaaaagaaaaaagcataaataaaacaataataaaaataaaaaaaaaaaaaataataataatataataataaaaaaaagggtggccg

SEQ ID NO: 28669 - DNA, 298 bp, Glycine max
  Clone ID: LIB3051-092-Q1-K1-B8
aatagggagaagaaagagaagaatttggaaaagaaagagaaaaagggggataatgatgaatttaaaaagagagaggagaataaagagaaaagggagaagaagagggagaagaaagagaagaaaatggaaaagaaagagaagaaaaatgagaagaatgaaaagaaatagagaatgaaagaggagaaaaaaaataaattataaagaaacaaatcacgatcaataaaggggagtagataccactcaataaatgaaaatatctactaaaggctatgttctcattttattaattagataaata

SEQ ID NO: 28670 - DNA, 347 bp, Glycine max
  Clone ID: LIB3051-092-Q1-K1-D1
tgcacctcataccatgatcgtcttttctttttcaattgcctctttccttctacctaccctgcatgttcaccgaaagttcactaccattcaagtggcctaatgctaaatccaaatttatataattgtggaaaagtctgccttagtctctttagcacttatcatcttagtaatagttaaaattgtataccacaaaaatcaaccatgctacaaatgttggtttcgatacaagctctaattctaaatgaaaagcctttttttaatgagcctgagtatacttcaacatattctggatcttattgtctaactatatcctatgaattcaaccagagttcatttattttattctt

SEQ ID NO: 28671 - DNA, 413 bp, Glycine max
  Clone ID: LIB3051-092-Q1-K1-D2
gttcttttgttctgtttaggtgcctgtttatatagctgagattgcacctcaaaacttgagaggtggccttgggtcggtgaaccaggttgaagccttattgttgcttcttgatgcaagtctgtttttttttttttttatttgaagtttattattcattaattttgtagtttttctggctcagctctctgttacaattggcattatgctggcttatctgttgggtctttttgtcaactggagagtccttgcaattctaggtaaattgctaattatttacttggcttagctcttgcggatagacaaatgaaaatattaaaaaccttggtcacaaattagtttcattaagttcttacagaaaggaacagaaagaatatgtgtgtacaggggaggagccatatttataaaattaaaaa

SEQ ID NO: 28672 - DNA, 379 bp, Glycine max
  Clone ID: LIB3051-092-Q1-K1-D3
cccacgcgtccgcccacgcgtccggagaaaagaaggaaccgattctagagagagaaaaagcggtggatttctagggagagagcggagggcgcgagcgcgatggttcagatcgcgaggaggaagaagggacggtcgtcgaaggcggatctggcgcgccgctccggcgagtcttcagccgccgcgtcgcagtccgatccccggcggagccttcggcgtcggagcgtgaggtacaacatcatcgactacgacggcgattacctcgacgacgactaggaggactagaggaggcgcatgaagaagaagctcaagctcatggcgaagctgaaccaggacggtgaagaagaagaagaagaagagcgagaagaagaagaagaaatcg

SEQ ID NO: 28673 - DNA, 279 bp, Glycine max
  Clone ID: LIB3051-092-Q1-K1-G2
ccattcacacttgcacatgcattttatctcaatccataaaatcacgtaacatcgtgcacttgtaaactcttgcatccatcatcctaagcaaactacatctcagttctctctgaagataactccaatatggaactgggtcactacagaagacctctctataagtactatgctcctacttgtaaacactaccaaaagcttgctccataatataaaaaccctggaagcaacttccataaagccaattctatattcatctccattgctgactgtcatcagcac

SEQ ID NO: 28674 - DNA, 446 bp, Glycine max
  unsure (1)..(446): unsure at all n locations
  Clone ID: LIB3051-092-Q1-K1-H6
gtccaaggcacatgatcccacaatggaagaaacaacatcaaccatcatcagggctgcacgctccaccctcacaccttcccaattctcagatctcactcgctccattatctccgccaccaaccaccaccatcgccgcctctcctccctcctctcctccccaacgctcttctctttaacccttcaccatctccacactctcacactcccccagaagaccctcctcatcgcccgccacctcctctcctccctccacctcctcaccgccacgtcgccgcctctgtccaccaccacacggcagcgcgacctcgacgccgcgctgctcctccttctcctctgcgaaacgcacaaccacaacccacatgccctcgaggcaccgttctccgaatggagaaaaaacttgagcaaagtgttctctgattcgttgntaactgtttctctggcacccc

SEQ ID NO: 28675 - DNA, 426 bp, Glycine max
  Clone ID: LIB3051-092-Q1-K1-H8
atactctgctgcatatcacacaccacctttgcatataagagagaacagagaggatactctgtcttacatgctgcatcgcaggttatcatgcaggactccatctcaatgaagatctaccatccggatctgatgtccgctatcttcaagggcaagctcgacatctccaacgtctcctcctctaccaacgccggcgcctccgacttactcatagagaaccgttacttgctgatgctgctgaccatctgcgttgtcatactgatccgctgcgtcatcgactgcatacagcgcagatcatcatactgcaatggcaagccttttgagccatctaaactgcgttgcaacaagcttcccgaaatcaaaatctacgactgcaccaaaaatgtcaccatgctcttccgcactcaaactcggaccgtcgaatgcttc

SEQ ID NO: 28676 - DNA, 227 bp, Glycine max
  Clone ID: LIB3051-093-Q1-K1-B5
tcgaccacgcgttcgaaatatattatcttggtaaaaaaaaaaaaaaaaaaaaaaagaaaaaaaaaaaaaaaaaaaaaaaaaaaaaaaaaaaaaaaaaataataaaaaaaaaaaaaaaaaaaaaataaaaaaataaaaaaaaaaggacaaaattatagaaggtgactagtatttataaatagaacaaacaaaggataaattaccttaaaaggaccattaaagtaaaaa

SEQ ID NO: 28677 - DNA, 383 bp, Glycine max
  Clone ID: LIB3051-093-Q1-K1-C10
gggacaaatttagtgtttgaagatgaaatcactgcattacaacctgaagtagataagttgaaaactctaaatgtgaacaaaattattgcactgggacattcgggttttgaaatggataaactcatcgctcagaaagtgaggggtgtggacgtcgtggtgggaggacactccaacacatttctttacacaggcaatccaccttccaaagaaggtgcctgctgggaagtacccattcatagtcacttctgatgatgggcggaaggttcctgtagtccaggcctatgcttttggcaaatacctatgctatctgaagatcgagtttgatgaaagaggaaaacgtcatctcttcccaatggaaatcccattcttctaaacagcaccat

SEQ ID NO: 28678 - DNA, 402 bp, Glycine max
  Clone ID: LIB3051-093-Q1-K1-C3
cccacgcgtccgcccacgcgtccgccaaagctctccacctcctccagcatctcctcttcggttttcataaacaaattatgcggctcgcggatgaacgcaagctcctcatggtccacatgccagccacgagacagccagttgtgtggcggcacaaggcgaaaaaggaaaaaagcaaaatcacttcgcaatcgattacggttttaacgccatcgttgccgccgcgaacgggtcgaagctcacgattctgaagtccccgacgggccgcgagatcgaggcccactatgagttgggccgcgaactggaccacagcgagttcgggataacctacctctgtacgaacaaggagttggggatttcatatggttgccgctgaaagattgaagcttttttggtgtagaggaa

SEQ ID NO: 28679 - DNA, 456 bp, Glycine max
  Clone ID: LIB3051-093-Q1-K1-D6
acgggactggtgcactgatcacaatattgagttcattgaggcatgtgcttccaatgctgattgggacaaatgtgtgtcgattgatggtgatttacaatgagttgagcgtctctacggtgcactttctgctcatatgtggcctggaatggtattgaaatctggcaataggataaatcaactgtcatttccagagaaagaagagttatcttcagaagaatctgattatgaacaagagtatgaagtcttatcagctggctcagccgattgggatgaaagtgaacaacgatggatttctgcatcgtccttagattcatggggatcagctcctcaaaacaatgctggcacagttggtcaacatgaggatggaattaaatctgataaagagtcacatgctacaacctcaagcactgcaattcacgatgagagtgaaaaggatattgtgcacaattccatgga

SEQ ID NO: 28680 - DNA, 336 bp, Glycine max
  Clone ID: LIB3051-093-Q1-K1-E10
caatcaccgtgctctttatatagctgcttcgtactacaaacactgactagggtgatggagaccattttaagtatcactggttaacacacatcttcacagtaactcatatgataccactgaaactctgaaggatcgaacatgaatttgaaactgcgactcatgattcaagatatataacctatcaactttctatggtactatagactgcctaccatgctgttatacggttcgaagacaaattactgattctaatgatgagagacatcctgactaacacctaccacatacaatgcacgcaccaagtgctcagattacacaatactgacacgaggatgc

SEQ ID NO: 28681 - DNA, 262 bp, Glycine max
  Clone ID: LIB3051-093-Q1-K1-E3
aaaaaaaaaaaaaaaaaaaaaaaaaaaaatataaaaatataaaaaaaaaaaaaaaaaaaaaggaaaagggaaaaaaaaaaaaaaaaaggagaataaaaaaaaaaaaataataaaaaaaaaataaaaaaaaaataaaaaaaaagggggctttttattaaggtccaaatttatatttctctattatattactaaaatatttttattttgtggccccaaaattaatttatttggccttatttataaaactttataaatgtaaaaa

SEQ ID NO: 28682 - DNA, 454 bp, Glycine max
  Clone ID: LIB3051-093-Q1-K1-F6
tgcagttatggttaaaaatgaaagtgagaagaacatgggttgacattataaatagaatgaagttgtgaaagatgaatctttgtatgatggtggatagggagttctggtggaaacagaaagaagttggactcaaaatctttttttgtaacatattatattataaaaatacctataaatctatgttgctttggatgtgtgtgtttattttctttaaaagtgttgcatgtttatgtgtgtgagtgtgggtgcacatactttttacagtaactgttttggaactccacgtatacggtatatcgtgattcaggtgaatgagaagttattcccatgccaactatcaaataaaaatgttgacatggctgataaggctgtgcaattggctgttgaaacatggggcaagagatccttaactgaacttgaagcatatgaacgcctatcctatacctgtgaaaag

SEQ ID NO: 28683 - DNA, 257 bp, Glycine max
  Clone ID: LIB3051-094-Q1-K1-A1
cggacgcgtgagcggacgcgtgggcggacgcgtgggaggacgcgtgggcggacgcgtgggctgacgcgtgggaaaaaaaaaaaaaaaaaaaaatggaaaaaaaaaaaaaaaaaaaaaaaaaaataaaaaaaaaaaaaaaaaaaaaaatatataaaaaggtggtgctatgtataaaattttgggtatttatcgcctgattaaaagctgtattatcatgtattgggattaataactaggataaattgtattacatttta

SEQ ID NO: 28684 - DNA, 354 bp, Glycine max
  Clone ID: LIB3051-094-Q1-K1-B12
gaagtacttagttagaatacggaattatcaaaccattccatcaccacctgtctatgttggtccactagacgttacgtcccaagtacactaacaagctgggagcagaatttcaggagtatcgaacgatatatgcgtgaaaataaattgttaggacagctgtatattaggcataaccagagtaatgcagatactgatcgtatcctgtctagagccaacaagagttgcttgtctttaccagacaccaattgcttttatgccaatgctcagaagccatcacgacattgtgcttatggctcaaggaccgctagatctatgctggctagaatggagaagctgtcgcatagatcttggccc

SEQ ID NO: 28685 - DNA, 431 bp, Glycine max
  Clone ID: LIB3051-094-Q1-K1-C5
cggacgcgtgggcggacgcgtggggccgatggaaatcgccgcctgcctggcttacgcgctctccgtgtggcttgccgcgcgcaacaatgtgcatacgtggtggacgggcattatcggctgcgtgctctacggctgggtcttctactccgttcagctttacgcggatgtcaccctgcaactcttctttatcgtcagcagcattgccgggtggatcaactggctgaagggcaatcacggtcagcaactggcggtgcgcaaaacgccgctgcaacatatagctttcctgctggtgggcgcgctgattgtcgcgggcggatatgcctggctactgcaccgttttaccaacgcctggtcgccgtggctggactcggcgattatggtcttcagcattctcgcgcagtttatgctgatggggcggcggctagagagct

SEQ ID NO: 28686 - DNA, 417 bp, Glycine max
  Clone ID: LIB3051-094-Q1-K1-F12
gtttcaaatttggagcatcttcagaatttggtggtcattgactgcaaagggttggaatctttgagtgttgactccacctctgagcttcacatgttaaccatcttggattgcttagagttgaagactctccatctcaaaacttctaggctcaagtcttttcggtatcgtgggcctcttcctttgcttaggccagaatatcatttcaacctgcgtgatgccatgcttgatttcagattaggactaagctgcagtggtttaaagaccaaggattttgatgcaacccttttaacaataaagaactgtgaagttcttactctgtgtaaatggacttttgaggaattaatatggccatcgatttctcctctatctgggagcttcatattctataaattaagagagttatggtggattgacaac

SEQ ID NO: 28687 - DNA, 414 bp, Glycine max
  Clone ID: LIB3051-094-Q1-K1-F2
attaccactctcaccccacatcccagttagtacacacttccacacaacacacggaattgttatgttttttaaataaaaaccaccccacttcttttatcaacaacacacgcacgctataatcctaactttccaaagaacttactatttttttttcaggtggtggggcagtgaagcagcttaaccgggaagagaaacaaaatgggtcaacggtggtgccggtgaacagagtggtggtggaggagaagaggttcggcgggccggggtcgtcgacgccgtcgtgcagatccaagtgcggatggtgcagtccttgttttacggttcacgttccggtccaaccgggtttgattattcgcctcgagtactacccagaagcgtggcgttgcaagtgcgggaacaaagcttttatgccatgac

SEQ ID NO: 28688 - DNA, 304 bp, Glycine max
  Clone ID: LIB3051-095-Q1-K1-A11
aaaaaaagatcatacatagttactgtcggtgggtcgcaaagatgcttgggggccttcgagggaggggtcataagataaaggggacactctgtgttgatgctcaagaatgagtacgacgtgaatagcgtatccagcgaccctggaaggatcgctcaaggtgcttacttaatcaggacaacactccatactattactgcctactagggccgatccacgtttgttcagcttattactgctacccaagctgatggcgactgcaacaggaatcttagaaaggctacactttgtcgaatgtatcattact

SEQ ID NO: 28689 - DNA, 404 bp, Glycine max
  Clone ID: LIB3051-095-Q1-K1-A9
ggtgcttgtgctgctagttgtgagactcgaatgtttgtcaccaatattccttacttgcaagaagtaatagttatggcatccacatgtgattcctgtggttaccgcaactctgagttgaaacctggtggccgaattcctgaaaaaggaaaaagaattactcttaatgtgaagaatgttaatgacctgagccgtgatgtaataaagttaaaagttgtaatgatacatatgcaggtctttctaataaggataaactgtgaaaaatgtcatgatgatacccatataggcctgatcatttaaattttttctgcaatctgagacataaaaatgtatttcatatctattgactgagtagtttggtttgattaagctgatactgcaagtgtaaaagttcctgaacttgactt

SEQ ID NO: 28690 - DNA, 433 bp, Glycine max
  unsure (1)..(433): unsure at all n locations
  Clone ID: LIB3051-095-Q1-K1-C11
gaaaaaccgggccgaccgcacgcgtacggctgtgaaacccaacctgctctacgactttttgtgcaagccgaatgatatccacgcgctgtatactactccgtgggaggagcgcgtgaaaaaccacnataaccacacggtgcacgccacgcaccatatcgcttaatcttgtattcacgcgtcgcggaagtgtttttttttttacttttctcatataaaatttaataccattatatctatctcatctttttattaatatctttattatttaatcttatcattcattataaaattatattaaattattttttattgttttcttataattttctttatttactttaactatattttatttattttttttttaatattattttactttcactattatttcatttatattttattctatttaattattttctttttattt

SEQ ID NO: 28691 - DNA, 462 bp, Glycine max
  unsure (1)..(462): unsure at all n locations
  Clone ID: LIB3051-095-Q1-K1-C4
agttactagtgcatattatcgcggtgctgttggagcaatgttagtttatgacatgactaagcgcgaatcatttgatgacatggcaaaatggttagaggaactgagaggccatgctgacaaaaacattgttgtgatgctaattggcaacaagtgtgatcttggaactcttagagcggtgccaactgaagacgcggaggagtttgcgcaaagagagaacctattctttatggagacatcagcacttgagtccactaatgtagaaactgcctttctgaccattctaactgagatatacagacttataagcaagaaaacacttactgccaatgatgatgcagatccaagtggtatttcagggcttctgaagggaaccaagataattgttcctagtcaagaaatcaatgctggtgaaaagaaaggtaaaggtggcnttgtgtgaatgtcctaactttttcttggttt

SEQ ID NO: 28692 - DNA, 378 bp, Glycine max
  Clone ID: LIB3051-095-Q1-K1-C7
gatcaactagcttcactctctctcaatgacaatcttgtgtcttagattcctttagtggtgggactgtaatctgcgtgtgcagttattcctattccgtatgcttccccccagtttatttgcaggtgtcttagatgttttgttttagtcagagtactaaggaagtttatgttcttggtacttttggtttcactttttttcctatctgaattgctgtccgatggattagcataacttgttggatctattatagcaatgctggtctcaccggcctcaagatcatcatcaacacctatggaagattgggtgcacatagaggtattgccttctctagtgaagatcctaccaacgttgataagaattgtgcctacattgtgaatg

SEQ ID NO: 28693 - DNA, 240 bp, Glycine max
  Clone ID: LIB3051-095-Q1-K1-C8
catatcaatccccccactaatttcaaacacaaattcacaaacaatcttcaaacctcgctcaaacaaatcactttttctccttctacactatacactaattatacctaccaccttcatgtttattttcctataaattacccaattgaatcttctctatttatattctttcattcccctactcttcattcccatatttacaataaccatcacatttgtttaaatatattttattatttatta

SEQ ID NO: 28694 - DNA, 273 bp, Glycine max
  Clone ID: LIB3051-095-Q1-K1-D12
cccacgcgtccgaaaaaaaaaaaaaaaaattatataaaaaaaaaaaaaaaaaaaaaaaaaaaaggaatatttaaaaaagagtggaaaaataaaaaataaaaaaaacataaatacaaaataataaattaatatataataaaaaataaaataatttacctcgttctaaattttaaaatttttttatacttaaaaaaccaaaaacgtttcccatcttaatttcttttcaaaatatattcttttccccagtttttataaatatctaatattgttaaa

SEQ ID NO: 28695 - DNA, 430 bp, Glycine max
  unsure (1)..(430): unsure at all n locations
  Clone ID: LIB3051-095-Q1-K1-D2
ggaaatccattgacatcgatggaaagaagtggcccaatgtttctggtttagcttaattagcgtggcgctgggtccttggttcttctcaccactgcaccaacccatcccctctcgcgtcgagtcacgagtcacgagtcacgagtcactcactacaactacttctttctctttctggtaggtttctctctcgcacacttgtcactgtctcctcctcgctcccaattttgaccgagttgttgactccacgatgccttccaattccgatttggtccgcgccgttgagtcgctcctcggcgtctcgctcgccgattccgtctccgattcgctgctcctcatcgncaccaccttcgccgcgctcataatcggcctcctcgtgtttctctggaagaaatcttcggatcggagcaaggagctaaagccggtgatcgtg

SEQ ID NO: 28696 - DNA, 429 bp, Glycine max
  Clone ID: LIB3051-095-Q1-K1-D3
gttgatttagtggagcaatgtcgaacatacaagcagagagtggtaaaccttgttaattcagcttcggacgagtcactgctatgccaaggcctaactctgaatgatgatctgcagcgtgtcctggccaaacatgaatccattgcttcaggaacttctgctcaaaatcctgctgagaaaccgaaacctgcacctactggagcacttgtagatgttgatgatcctttggttgatattggagatactagtaaacaaacagatgtgagatcgtcttctagtgctggagctgggtctcaaacattgaatcagttaatgcttcctgcacccccaacatcaaatggatcagtcccccctgcaatggttgatccccaagtggacctactcagtggtgaagactataactcaccaaaagcagaaacttcacttgctctt

SEQ ID NO: 28697 - DNA, 382 bp, Glycine max
  Clone ID: LIB3051-095-Q1-K1-D7
caaaactttccgattttggcttggccaaagatggtcctgaaggagatgacacacacgttggaactagagtcatgggcacacaaggctatgcggccccagaatacatcatgacaggtaaataatttcacatcaagaagtaaaaaacaatgacaggttgacttggagtttaatttttaactcattgctagctcaaatctcacacgtgtacatttttttcttcttccgtataggacacttgacagcaatgagtgatgtgtacagttttggagtcgtgctcttggagcttctaacaggacgaaggtcagtggacaaagggcgcccacaaagagaacagaacctcgtggaatgggccaggtctgctttgaatgattcccggaaactt

SEQ ID NO: 28698 - DNA, 474 bp, Glycine max
  Clone ID: LIB3051-095-Q1-K1-E3
cccacgcgtccgcggacgcgtgggttcagaaaacgtgccaaacttgagcgacgtcactaagaagaccaaaggtcggcaaaagatagagatgaagacgatagccaacaagtgtagccttcaagtgacattttcaaagcatcgaactggagttttcaagaaagcgagtgagcttgccaccctttgtggtgtggaccttgctgtgattatgttctctcccaataaccatgtttactccttcggtagccctaatgtggattctgtaatccaacgttatacgacagagggcccacctcccctcttcacccaagacctcaatgaggccccttgcaccatggatgagggtgagctccaagcacacctcaactgtttgtccaaccaaattgacgcggagaagcaacgtgtagaggatctaaaccatttgttgatggctgcgaaggatcacatctggtgggatgtgccaattgaaagcatgag

SEQ ID NO: 28699 - DNA, 278 bp, Glycine max
  Clone ID: LIB3051-095-Q1-K1-F11
gaaatggataagaataacattgcacctaatgtcaccactctgaataactcgctctgtggcttttaccgcgagaagaagtttgatgatgtacggaaggtgtttaaattaatggagaagtatagtgtttttccttctattagtacttacaatgttaggattcagagtttgtgtaagctgaagaggtcttccgaggctaaagcgttgctcgaggggatggtttgtaacgggaggaagccgaattcagttagctacgcgtgtttgatccatgggttttgtaa

SEQ ID NO: 28700 - DNA, 474 bp, Glycine max
  Clone ID: LIB3051-095-Q1-K1-F5
cggccggaatcccggtcgacgacgcgtccgcggacgcgtgggtgcgtcccttgttggaattcctaaagagaaggtgctatctgaagtaaagcgagatgagaaaaagaagtgataaatgaactacagaaagataacaacattgtagcaatggttggtgatggaattaacgatgcagctgccctggcttcttcacatgttggtattgcattaggtggaggtgtcggggctgctagtgaggtgtcttctattgtattaatgcgcaaccagctctcacagatagttgatgccttggagcttagcagactgaccatgaatactataaaacaaaatctttggtgggctttcatatacaacattgtaggaattccaattgcagctggagtgttatttcccataaatgggactgtgctaactccatcaattgcaggggcactcatggggttgagctccattggcgtaatgactaactcgtta

SEQ ID NO: 28701 - DNA, 387 bp, Glycine max
  unsure (1)..(387): unsure at all n locations
  Clone ID: LIB3051-095-Q1-K1-G9
cccacgcgtccggttaaatagaaaagaggagtttgagaatggcaacgatcancccggtgtgggtttaattcctggagtggccancnatngttacttcaccagcctccggcaagacctatttcctccgcagcacaggggagaaaggattgacgattgaggggaagttcataaagttcacaggcatacgagtatacttggaggataaggcggtgccatcactctccgctaagtggaaaggtaaaacttcaaaggagttaattcacacccttcacttctacaaggatatcatttcacggccgtttgaaaagctaattagaaggtccaagattctgccattggctggcgctgaatactcaaaaaatgtgattgaaaacttcctggcacaca

SEQ ID NO: 28702 - DNA, 444 bp, Glycine max
  Clone ID: LIB3051-096-Q1-K1-B12
tgcctgctgttagctggtcaaatgaaaagtattacttggagcagattctgccactttttggcgagcataaggtggtacatttcaacaaaacagatgcacgtctagcaaacaatggtctcccacttgatctacagaaacttaggtgtcgtgtaaatttccaggcattgaaatttactcctcaacttgagaatttgggccaaaaattgattcggatacttcgtgaaaatggaccctttctggcattgcatctgagatatgagatggatatgctggctttctcaggttgtacgcatggttgctctattgaagaagctgaggagctcaagcagatgaggtatgcattcccttcctggagagagaaggagatagtttctgaagaaaggagatcacagggtctctgtcctttgactccagaggagtctgccttaattctgcaagccttgg

SEQ ID NO: 28703 - DNA, 413 bp, Glycine max
  Clone ID: LIB3051-096-Q1-K1-C1
cccacgcgtccgcccacgcgtccgattctcgttctctctcttcttaccgacatacatgctggtcgccacacttctgtgggggaactcgattccattattctaataatcatatctgatagagacagtgtttgagattgagggaagatgctgaccaagttcgtgaccatacgtaatagagtgaatggactgagtctccacacgtagagaccctgtatcctctcgagtcttcacagagacgtgagacacctatgggattaccgcatgggtactgttagtgacagagtcgatgagcatgatggtgctgtcagaggtgttcatgctcataatgaccagcccctgtaggtctttggaggggatgattaccagattaatgcttggaactatgtgacgcctaggtgcttggtcactattct

SEQ ID NO: 28704 - DNA, 428 bp, Glycine max
  Clone ID: LIB3051-096-Q1-K1-C11
ccaaatccgctaaaagaaggccatgatctattcaaaaaaggacttttaagtgaaacagttgtgggattggaagctgtagtcctaaaaaaccctgtgaatgctgaagggaggagactgattggaatagctcatgcagagaatgatgatgatcaacaggctattgcagcaatgatgcgtgcacaggatgctaacccaacaaacctggaagtgcttctagctcttggtgttagtcatacacatgaactggagcaaacagctgatctgaaatatctatatggatggttgcgccatcacccaaaatatggtacacttgccccgcctgaaatggctgattctgtgtactatgctgatgttgctaggatatttaatgaagcatctgaactgtcacctgatgacacatatgtccacataggtttaggggtcatgta

SEQ ID NO: 28705 - DNA, 405 bp, Glycine max
  Clone ID: LIB3051-096-Q1-K1-D4
aaaagaggagtttgagaatggcaacgatcttcgcggttcaggtggagttcctggagtttgcggcgttggttacttcaccagccttcggcatgacctatttcctcggctgcgcaggggagagaggattgactattgaggggaagttcataaagttcacaggcattggagtatacttggaggataaggctgtgccatcactcgccgctaagtcgaatggtaaaacttcagatgagttagttcacaccctccacttatacagggatatcatttcaaggccgcatgataagctaattacagggtcaaatattctgccattggctgacgctcaatactcttagaaggtgatggataactgtgttgtacacattaagtctcgtgggacttacggtgattcttaagccgcat

SEQ ID NO: 28706 - DNA, 258 bp, Glycine max
  Clone ID: LIB3051-096-Q1-K1-D8
aaaaaacaaaaaaaaaaaaaaaaaaaatttttaacaaaaaaaaacaaaaaacaaactaaggggcacattcatacaaacgtgcacattcttctataatatcaccatatactatattcactgccccttcattttacaacttccatgacttgttaataaccctttcactacctaactaaatcgctcttacaatacatatcctctttctccagatgcccttatatcaaccagtcccattcatatcacacttcaaaaccttta

SEQ ID NO: 28707 - DNA, 446 bp, Glycine max
  Clone ID: LIB3051-096-Q1-K1-E1
cgacacacgcgtgcgcacactttagctaactcttgaacaagtgtttaacgtacatgaaacacatgttggatgagggtgcgtctgtctaacacctagtgctagcattgcattctgataacatatttgcacaacattatcaccaagattcttcttcttagggtgaaaacttttaaggatgctgtacaacctgttcatgtacgataatgactgaccaatcataatccataggatatatatgtatcattgtacaagtatcatgatgacctgactgcacttgctaggcgtgtcaagctacatatcgtcatatgtcgagatgaataaattccgcgctgtatccagatattatacacgagagcaacaaacactgcttctattacagatggacctgatgtgatgaaaactgcattagctgaaagattatctcaacgtatagtgcctgcagatgt

SEQ ID NO: 28708 - DNA, 430 bp, Glycine max
  Clone ID: LIB3051-096-Q1-K1-E5
cgcattttagctccctcttggacaattctcgaaagtacaagaaagaaatgggggatgagtatgtgtctgtggaacaccttttgctagcatttcattctgataagagatttggacaacagttgtttaagaatcttcagcttagtgagaaagctttgaaggatgctgtacaagctgttcggggaagtcaaagagtgaccgatcaaaatccagaggggaaatatgaagcattggacaagtatggaaatgatctgactgaacttgctaggcgtggcaagcttgatcccgtcataggtcgagatgatgaaattcggcgctgtatccagatattatcaaggagaacagaaaacaatcctgttattattggtgaacctggtgtggggaaaactgcaattgctgaaggattagctcaacgtatagtgcgtggtgatgt

SEQ ID NO: 28709 - DNA, 434 bp, Glycine max
  unsure (1)..(434): unsure at all n locations
  Clone ID: LIB3051-096-Q1-K1-F1
nncgccacgcgtncggccacgcgtccgaatctcggtctctctcttcttacctacatacatgctgaggggcacacttctgtcggggaactcgatttcattattctaataatcagatctgagagagacagtgtttgggattgaaggaagaagctgaccaagttcgagacccaaagtaatagagtgaaaggactgagtttccacaagcagagaccctggatcctcgcgagtctttacagtggcgtgatccaactatgggattaccgaatgggtactctcattgacagattcgatgagcatgatggtcctgtcagaggtgtccatttccataattcccagcccctgtttgtctctggaggggatgattacaagattaaggtttggaactataagatgcataggtgcttggtcactcttctaggacaccttgattatat

SEQ ID NO: 28710 - DNA, 411 bp, Glycine max
  Clone ID: LIB3051-096-Q1-K1-F2
tctacacgttcgactatatgttataccatataaaccactattctaatggacgaacgcggtggtagcaacacgttgtaacggccgaatcggtttcagactcggaattggtgtacaagagcgcgacgatgacacgggttcgaggcaggatcctaagtacggtccacaaggaacatgataaatgggtcccactgaccatactgagctggatagcgaaggacggaagaattcttagccttgatcagatctacctacactagctcccgatcaaggagcaccatgatcatcgacacgctagtatgttccaccatgcaagactatgtgatgaagatcacgccagtccctaaacatacctggaccatactaatgaccccgatcaggtactatctagaagttggatacgagttcggccac

SEQ ID NO: 28711 - DNA, 432 bp, Glycine max
  Clone ID: LIB3051-096-Q1-K1-F5
cacacattaactcacctcttcaacaactctttaactctctacatacctacatacatactgagtagtctctctaatgtcgggtgagactttacatcattatcttaatatacacatctacaacagacactctttattattgagctaagatacttaccaatttctggacctcaactaatatatcgaagaaactcaattttcacagctctaaaccctgaatcctcactagaattctcagacacgtgttccaactatctgacttccctatctatactctcattgacacattccatgatcattatagatctttcaaatgtgtgcattttcctcatttcctcaccctgtacatctctctatgccatgattactcgactaacgtttgtaactatatcatccatagctgctcgttcactcttttatgacacccttatttta

SEQ ID NO: 28712 - DNA, 317 bp, Glycine max
  Clone ID: LIB3051-096-Q1-K1-F6
gcattcgttgcttacaatgaaggctactttgaagggacagtacgatgtcgacaaaagcggcgctgtctttgccaacatcgacgcccagaaacccggttccttcatcgtcgactacaacgttcccaaaaaggactttccgattcagtctatgaacacggttagggttgcagagagtccggagaatttgacctacgcgcacagcatgggcgacatctgcaccatcttggatggaacctctgagtatgaatctgccaacacggtatctgccaattactcgctctactcatggaactgcacgcttaagtacacctatgttc

SEQ ID NO: 28713 - DNA, 425 bp, Glycine max
  Clone ID: LIB3051-096-Q1-K1-H7
cccacgcgtccgctgacgcgtgggcaagatacgacgccggggccggaaatcttgttgtagcagaagtttgcaaagcgggggtggtggagcttacaatggggcggggggccgaattggaggaggttggaagagaggttgagggattggaggttgcaggcgactggctctctggactgtttgtaacttaaatgccgtcatcctcatacgcgttttcatgagcaatgtcaacaagcccttgttatccctctctagattgattcgttacaccaatggaaaggaggataagatagctgtggtagtctgtgccgtgaccgattacattagggtgtatgaagtccctgttctgaagtaactgtcctgaagtttactgatactgctataattagaattgataaggctgttgttgaattctttacctttgatca

SEQ ID NO: 28714 - DNA, 422 bp, Glycine max
  Clone ID: LIB3051-097-Q1-K1-C7
cgaccgccacgcgtccgataaaacgatgaggaaataaaaaaaaaaaaaaaaaaaaaaaaaaaaaagaaaaaaaaaaaaaaaaaaaaggaaaaaaaaaaaaaaaaagaaaaaaaaaaaaaaaaaaaaaaaaaaaaacaaaaaaaaaaaaaaaaaaaaaaaaaaaataaaaataaaaaaaaaaagaaaacaaaaacaaaaaaaaaagacaaacaaaaaaaagaaaaacaaaaagaagaaaaaaataaaaaacaaataaaagaaaataaaaaaaagtaaaaaaaagaaaaaaaaaaaaaaacataaagaaagaacatacataaaaacaaaaaaaaaaaatgggcaaaaaaaaaaaaacataaaagaaaaaaaaataaaaaaaaaaaaaaaaaaaaaataaacaaaaaagctaacaaagatataag

SEQ ID NO: 28715 - DNA, 310 bp, Glycine max
  Clone ID: LIB3051-097-Q1-K1-D2
ataaaaaaaaaaaaaaaaaaaaaaaaaaaattaaaaatatataaaataagaataaaattaaaaaaaaaaaaaaaaataaaaaaaaaataatataagataaaataaataaaaaataataaaaaaaaaaaaaataaaaaaaaaaaaaaaaaaaaaaaaaaaaaaaaaaaaaaaaaaaaaaaaaaaaaaaaaaaaagaaaaaaaaaaaaaaaaaaataaataaaaaaaaaaaaaaaaaaaaaatataatatataataataaaaaataaaaaaataataatataaaaatagaaatataaaaataaaaataaaaa

SEQ ID NO: 28716 - DNA, 212 bp, Glycine max
  Clone ID: LIB3051-097-Q1-K1-D6
acgcacgcgtccgcccatacgaccgctggtaccgcgatgactttggcgcccactcaggcctacaacgcgttcgtcgacactaccaagaggaagactacgaacctgcgtgccgcggaaggggtagcgctcttcgacacgtgctacgaccagacggctctgcaaagcgtgcgggagccaacagagacatttcacagcaactgcgacaggacgtg

SEQ ID NO: 28717 - DNA, 218 bp, Glycine max
  Clone ID: LIB3051-097-Q1-K1-D8
aaaaaccaagaaaaaaaaaaaaagggaaaggaaaaaaaaaaaaagaagaaaggaaaaaaaaaaaaaaaaaaaaaaaaaaaaaaaaaaacaaacaaaaaaaaaaaaataaaaaaaaaagaatgaaacaaaaaagaaaaaaataaaaaaaaacaaaaaaataaaaaaataaattaaagaaaacaaagaacaaaaacaacaaaaaaaaaataaaaacaaaa

SEQ ID NO: 28718 - DNA, 510 bp, Glycine max
  Clone ID: LIB3051-097-Q1-K1-E1
gcgtccgaaaaaaaaaaaaaaaaataaaaaaaaaaatttaaaaaaaaaaaaaaaaaaaaaaaaaaaaggaaaagggtaaaaaaaaaaaaaaaaaaaaaaaaaaaaaaaaaaaaaaaaaaaaaaaaaaaaaaaaaaaaaaaaataaaaaaaatataaaaaaaaaaaaaaaaaataaaaaaaaaaaaaaaaaaaatatatataataataaaaaaaaaataaaaaaaaagataaaaattaagaaaaatataatataataaaaaaaaaaataaataaaaaataaaaaaaaaaaaaaaaagaaaaaaaaaataaaaaaaaaaaaaataaatatataaaaaaaaataataataataaaaaaaataaaaataaaaataataaaaataaaaaaaataataaaaaaaaaatataataaataaataatataaaaaataataaaataaaaaatataaataatatataaaattaaaaataaattaaaatatagataataaaaaaataataaagagaaataaa

SEQ ID NO: 28719 - DNA, 441 bp, Glycine max
  Clone ID: LIB3051-097-Q1-K1-G7
cgcgtccgcccacgcgtccgcccattcgtccgtacacttacagctagcagatattacatacacgtgaagcactaattaagccatggagaagaaatcaatagctgggttgtgcttcctcttccttgatctctttgttgctcaagaagttgtggtgcaaactgaggcaaagacttgcgagaacctggctgatacatacaggggtccatgcttcaccactggcagctgctatgatcactgcaagaacaaagagcacttgctcataggcctgatgcagggacgattttcgctgtaggtgcaccaaaaactgttaaatggatccattcactccaacgagaataagatccttcctcgctatattataaaaaataaaactactaatatctattatatataaagactgtcacttgcattaatgacctatgtataataatatatattatt

SEQ ID NO: 28720 - DNA, 407 bp, Glycine max
  Clone ID: LIB3051-097-Q1-K1-G8
aaaattaaaacataaataaaaaaccaaaaaaaaaaaaaaagaaaaaagttaaaataaaaaaaaaaaaaggaaaaaaaaaaaaaaaaaaaaaaaaaaaaaaagaaaaaaaaaaaaaaaaaaaaaaaaaaaaaaaaataaaaagaaaaaaaaaaaaaaaataaaaaaaaaaaataataataaaaaaaataaaaggaaaaaaaaaaaaagaaaaaaaaattaataaagaaaaaaattaaataaaatataaaaaaaaaaataagaataaaaaataaataaaaaaaaaataaaataataaaaaaaaaaaaataagataagaaaaaataaataaaaaataaaaaaaaatataaaaaataatataaaatgaaaaataaaaaaaaataaaaaaaaaaataaataaaaaaaataaa

SEQ ID NO: 28721 - DNA, 299 bp, Glycine max
  Clone ID: LIB3051-097-Q1-K1-H9
ggaaatttatagtgtatgttataactatttgaaaatagatggttcacctgtgaaaggtgtattactgacctggaagtcgaagtccatctttctgatttgtagtttctcaagaattattattgttatccctgttcctagttcctacacctagttgattatcttgaataatatcttaaatatattacttatatttataatgtttattttaatatattaactatttttttctatcatttgacattcttaaatttttttttagatactataccttatgtttttatttataaatatatatattt

SEQ ID NO: 28722 - DNA, 397 bp, Glycine max
  Clone ID: LIB3051-098-Q1-K1-C11
ccacgcgggcgaaataaaaaaaaaaaaataaaaacaaaggtttaaaaaacaaaaaaaaaaaaaaaaggaaaaaaaaaaaaaaaaaaaaaaaaaaaaaaaaaaaaaaaaaaaaaaaaaaaaaaaaaaaggggcggccccgaaaaaggacccaaccaaacacacccgcgcagccaacgcaaaaacccaacaaaagggcaaccaaaagaaaaacaacgggccgacgaaaaaaaaacgcagaacgggaaaaacccgggcgaacccaaacaaaaaccccaggcaaaaaaacccccaggcgccagcgggcgaaaaagcaaaaagccccgaaccaaacgcccacccaaaaaaaggccaaacccaaagggcaaaggggaccccccaagaaacggcccaaaaaccc

SEQ ID NO: 28723 - DNA, 298 bp, Glycine max
  Clone ID: LIB3051-098-Q1-K1-D12
acgcgtccggctttaacagtccccttttactggtaaaagttgcaaatgaggtgacttatcgcaggatgaaaagacccttggatcagttgagtaaagagtgcacaagggttctgcctctgatctgattcctgtcttgtttggggaaaggccaccaacagtgttcaagaaggatgtatctttcactccctttaataaaaatcttgatcactcccagaaagaagcagtttcaaaagctctatcatcgaaaaatgtgttcttgttgcatggaccacctggaacgggaaaaacttcaacagtt

SEQ ID NO: 28724 - DNA, 231 bp, Glycine max
  Clone ID: LIB3051-098-Q1-K1-E1
cttttaagcaggggtttaaaatccgagctctctcgtggtgatgtcgaaagggttacattttacacaacaatcatacaaagcaagtgactcattcccattcaaatggataaacaagaagtggagagaaagttttcatgttacttcaatggctactgcatgaaatcatatatatgttgatatgttacgaaatgcttaatttattgatcaagtttttgaacttgattatctcta

SEQ ID NO: 28725 - DNA, 274 bp, Glycine max
  Clone ID: LIB3051-098-Q1-K1-H6
accacaaggcctgacatggttctttttcttcttttggactcattctttcttgcataatatcaactgatgcttctggtctgtctaatggctattgttctgttcaatatgacaatgaatatgctgcacacaatgctatatacaagctaaatggcatgcttatcaatgattatcaagtctatgtatgccattctctgctaaagtaatacatttagaattcttttatcatgactaaaatttaataatgtttattttaaaaacttattatattcaacca

SEQ ID NO: 28726 - DNA, 364 bp, Glycine max
  Clone ID: LIB3051-099-Q1-K1-B11
acgcgtcctaactttgatcaaataggccttgctcaaaagatttacaagcatgagcttcttgagatgagacagcgtgctgcttacatttacgagaaggcaagtatgccgaagcagtctattgctttgtcaaagaaggataacctctacaaagatgccatggagacaacctgccaatcctgggagcgtgaactcgctgaagaactgcttgtgtactttattgatcacggtaagaaggaatgcttttcctcatgtctatttggatgctattatctcatactggcagacattgttcttgaactaacttggatgcaccacatgattgactttttccccccatatctattgcagcttattcctgagttca

SEQ ID NO: 28727 - DNA, 234 bp, Glycine max
  Clone ID: LIB3051-099-Q1-K1-C10
ctctctacaaggtctatacattatgcacaggttattaatgatctactcatcaaattagacaagttcccgtcaaatctttcaccaatgttcatgattaaacccattcaatttgagaaagattatttcacatactaccatatggatgtgattgttcggctttccaacatgagggcccgcaatttcagcattacctaagtttacaagcttaaaaccaattttattgcttgactgatc

SEQ ID NO: 28728 - DNA, 378 bp, Glycine max
  Clone ID: LIB3051-099-Q1-K1-E10
cactcgtcctgcttcctcagcatacacttaactactaagtcttttgattcagtctaccaaaatcccttaaaagcgtcctaatactctacattgtccattgttattaccttcactgtgttcttgctcttgcattgtctacttaaaacttacaagcaaaaatcgagtcacaagtttccccctataccatggaagctacccatcactggtaacctccatcacctttcattatcatattcacttccctgatcaaactctacaaaaactcgttctcaaatatttacctctcattcacatccaactatgtgaaattttaacactctttgtgtccttcccccaagaatattataccacatatgaaaacccattaagttcattttt

SEQ ID NO: 28729 - DNA, 452 bp, Glycine max
  Clone ID: LIB3051-100-Q1-K1-A10
tcccacgcgtccgtacctttcttattttaaatttcttttctttcataatacttctgcatttgttctatattttcggtggtcatcaacattccactatagcaaactttcatacctacatgctttaacattattatttgtgactttccattcttatattcttctgttttttcttttcttcctttttgaaatctctatttcttttagtctagctacattgcaaatctatacattttatatttaaataccctcttccttactacctactgtcttctgtaattatgacaattattcataaacacaatagaatcctaaataaaatctggtgattatttctgaagattcttacattggctctctgtatctcaatgaatcatttaaattcctaatgacatctctcaactatggttttcctctttctatatctgttatgacctctaatctataatgttcat

SEQ ID NO: 28730 - DNA, 277 bp, Glycine max
  Clone ID: LIB3051-100-Q1-K1-A5
tttacatctgcatcttcaatattgcttctggtttattagcttcgcgaactagaacaaataaccctatacagatccattccatagccatgtcacgtgttgtccctctatctcacgattgagaacccgtcgttcttcttaagaaggctcccaccgtcgacgccaagaatgacgagaaagccgtcaactcctgccggcgctccgacgcgcaaattgaaaccctaaaaaagtataatgctggtacaaataaagcatcatctagcatcacttcattgaacac

SEQ ID NO: 28731 - DNA, 435 bp, Glycine max
  unsure (1)..(435): unsure at all n locations
  Clone ID: LIB3051-100-Q1-K1-C9
gcttaggaaaaaggcctatgttcaacaactagagtcgagtaggattaggctgagtcagctggaacatgagctacagcgcgctataactcagggcatgttcttgggtggaggtgcactatagggtggagagcaaggacttcctgtcactatgaataccattagcacggaagctgcaatgtttgacgtataatatgctacatggcaagatgagaaccaccgcataatgtgtgagctaatagctgcagtgcaagagcacctttctgagaacgagcttagactntttgttgacaattgtttggcacattatgaccaagtgatgaacctgaacagcttagtggccaaaacagatgtgttccatcttgtcactggcatgtggtataccccagctgaacgttgctctatgtggatagatggattcaggccatctgaactcat

SEQ ID NO: 28732 - DNA, 241 bp, Glycine max
  Clone ID: LIB3051-100-Q1-K1-E6
ctaaaaaaaaaacataagaaaaaaaaacaaaaaaaaaaaaaaaaaaaaaaggataaaataaaaaagggaacaaagaaaaaaaaaaaaacacaaaaaaaaaaaaaaaaaaaaaaaaaaaaaaaaagaaaaaaaaaaaaacaaaaaacaacaaaggattcaaataacaaaaacaacgaaacaaaataaactaccaagcaattagaagatagaaaaacacatgatcattacaacatacaaaagg

SEQ ID NO: 28733 - DNA, 448 bp, Glycine max
  unsure (1)..(448): unsure at all n locations
  Clone ID: LIB3051-100-Q1-K1-F7
gtccgccattttcgtggtagatttgaaatttcgctttatcaaccggaaaagtttttgcaggantagtagcatttgcaacgggggcatagtacccttcttaatatgccttctcttgttgggggaaaccataagcagttttctgcccagcagcaaaatccccttttgcagcaagtgcttcttgtgtatcaaatttgtcttcactttgcttattggttctttattggaagattcattatgtccaacaaaattgagttgtctagcctaaacatgcatttcatgcatgttcttctaatattaagctttgaccctcttgataatattccaagctaaatttgaattcaattttttgttttctatgtttctctaccttaaatgatggagaaagtttaagggggaaaaggaagaaaattcatatttttccttttctgctggttttaatttactgcct

SEQ ID NO: 28734 - DNA, 442 bp, Glycine max
  Clone ID: LIB3051-100-Q1-K1-H11
atttttgtatgcatttatccaacttaattcatacggtatgcattagtgatattttgctgggcttaggcgagttgtgttgtcttgaaaaccctctcccgccaacacacttcttcttcttcttttttgtgttttgtgaatactgagatgagtgctgtgaacatcaccaacgtcaccgtcctggacaaccctgcttcctttctgaccccctttcagttcgagatttcctacgagtgtctcaccgctctcaaagatgatttggaatggaagctcatttatgttggatctgctgaggatgagacctatgatcaattattagagagtgtccttgttggtcctgtcaacgttggaaactatcgttttgttttacaggcagatccaccagatccatccaagattcgtgaagaagatataattggtgtcactgtgcttctgttgacctgct

SEQ ID NO: 28735 - DNA, 316 bp, Glycine max
  Clone ID: LIB3051-100-Q1-K1-H3
ttgtctttgtctacgtcgacgacaacttcaacaccgtcacgctttattcgcaagtcggggtgttgaacatcaactggtttcagaaacagcccaactgcaatgaccaggtcagcatgacacttaatatatctgcagatttgcttttcctttttacattgaacacacaataactttttgactttctaactgctgactttgaaactcccaacaattccttgcatcatatatccctgcggtatggaatcactcccttttaagagcattccaaattttcgattcatacatctaattaataccacttcatttaccaaaccag

SEQ ID NO: 28736 - DNA, 225 bp, Glycine max
  Clone ID: LIB3051-101-Q1-K1-A1
ttttatttttcttttttcttttttttttttttttttttttttttttttttttttttttgttttttttttttcttttttttttttttttttttttgcttttttttttttttttttcgttgctttttcttttttcttttttttcttttttttttttttttttttcttttttttttttttttttgttttttttttttttttttttcttttctttttttttcttttttt

SEQ ID NO: 28737 - DNA, 432 bp, Glycine max
  Clone ID: LIB3051-101-Q1-K1-B10
accacgcgtccggtaagggctgctgatgtgcatgctgattctgatgacctcgaaaaaagtggtcatgagcggagcaaaactactggaaatgctgctggcacagtagctcgtggtatcattgatctgcaaggataaactaatcacatgaggatggaaccgtgctttataattgtggaataaagcatcacccatttaaacccgtttggttaggtccggtctgtgtacggctgaattctgtgttttgcttgtatcgcatatgacggttatatgtcgacacttgatgcttaatcaaattgttactttgcctgaagtatgtgttagtggttatccttaataaaacaagcagttcaaggtcttctacttgaagatgaagggcgattaccaccgctatctcgccgagtttaatgttggggacgatagaaaaaccgctac

SEQ ID NO: 28738 - DNA, 225 bp, Glycine max
  Clone ID: LIB3051-101-Q1-K1-B12
cccacgcgtccgcccacgcgtccgcccacgcgtccgaaaaaaaaaaaaaaaaaaaaaaaagaagaaaaaaaaaaaaaaaaaaaaaaaaaaaaaaaaaaaaaaaaaaaaaaaaaaaaaaaaaaaaaaaaaaaaaaaaaaaaaaaaaataaataaaaaaaaaaaaaatataaaaaaaaaaaaaaaaaataaaaaaaacatatacgatataaaacaatatatactatt

SEQ ID NO: 28739 - DNA, 347 bp, Glycine max
  Clone ID: LIB3051-101-Q1-K1-C2
gaaaaaacaggaaggagacaacgggaaggaagagttgaaagaactggaaggagagaaaggaaaggaagagttgaaagaactggaaggagaaaaaggtgaggaagagttgacagatactgtgaccgagataggaacagggagtgggagcgagatcgagaccgtgaaagatacagagatcgtgacttggacagagatcaggatagggacagaatcaggagggataaggagcgtgaaagagagatagagaggagttttgattatgacaagaggtctaagtacacagagagagaaagcagccgggattatgacaatggtagtaagcactatcgtaagagcaggagtcggag

SEQ ID NO: 28740 - DNA, 200 bp, Glycine max
  Clone ID: LIB3051-101-Q1-K1-D4
aaaaaaaaaaaaaaaaaaaaaaaaaaaaaaaaaaaaaaaaaaaaaaaaaaaaaaaaaaagggaaaagaaaaaaaaaaaaaaaaaagaaaaaaaaaaaaaaagaaaaagaaaaaaaaaaaaaaaaaaaaaaaaaaaaaaaaaaaaaaaaaaaaaaaaaaaaaaaaaaagaaagggaaaaaaaaaaagaaaaagagagggac

SEQ ID NO: 28741 - DNA, 419 bp, Glycine max
  Clone ID: LIB3051-101-Q1-K1-E12
gatacgcgctcctataggcttccttagattcttttcacaagcgaacgtaagccttaagcgagacttacatcctttaatgacaaggcttgtacgctacctgaatgatcctgacataactgtgcacgatgcaatgatacatatatggaagtcacttatgaatgattcacagaaaaccatccatcaaaatttacatcatatcattgaatgatttactaatgcattaggtatccaacctattgagctcactttgaggtaccatgtcttgctcttacatacatattccaatgacgaacttttcatgacgttagaaatcatttaattatattatggactagaacattaagtctcatggatcacataaaggaaactgttagaataactgttcaaatattctaccgaactataacttcctttacttc

SEQ ID NO: 28742 - DNA, 175 bp, Glycine max
  Clone ID: LIB3051-101-Q1-K1-E3
aaaaaaaaaaaaaaaaaaaaaaaaaaaataaaaaaaaaaaaaaaaaaaaaaaaaaaaaaagaaaaagaaaaaaaaataaaaaaaaaaaaaaaaaaaacaaaaaaaaaaaaaaaaaaaaaaaaaaaaataacaaaaaaataaaaaaaataacaaaaaaaaaatgaaataaaaaaat

SEQ ID NO: 28743 - DNA, 431 bp, Glycine max
  Clone ID: LIB3051-101-Q1-K1-G4
gaattgcagttcgcaaccaatcatttaggccattttctcttgacaaaccttttattaggaactatgaaaaaaacagtaggggtatgcaaccaggaaggaagaatagttattctatcatcagaggcacacagatttgcttatcgtgaagggattcaatttgataagatcaatgatgaatcagggtaatggtctggttggaatgataaatcaatgataaaccttttccctatttggctattttctactaagctcttgctataaaaattcataataaatgtatattattcatgtccaatgttttgagtccccaaaattgcataatttccttctctatctgagttttatacaggtatagcaggtaatttgcttatggacaatcaaagcttgctaatatcttacatgcaaatgaacttgcaaggcgcttgaaggaa

SEQ ID NO: 28744 - DNA, 346 bp, Glycine max
  Clone ID: LIB3051-101-Q1-K1-G8
tggactcctgtgcgggcacgtgcctacctcttgatgcaggatgcgacaccggggatagaccctcaccgcattgaccgtatccctagagggggtacgatctgacaccatcgacaacgtctaggcctacagccaaggcatggaatgaattgcgaaggaccaccaacgtgtaagaaagcacgctaagcaactgggagactgaccgacactagctgactgcagcatcaataaagagacgcctcctcaactaggactacgtcaacatgatggcatgcaaatctacaataagacactcaccggcaagaccataaccctagaagctgcatgctccggcaccatcaatgactgg

SEQ ID NO: 28745 - DNA, 443 bp, Glycine max
  Clone ID: LIB3051-101-Q1-K1-H2
ggtgaactgaggagagagagagagaggatgagaggggtgaagagagcaatgtttgtaggcatagccctgagaagcaattccaacagcggcgtgtctgcccatggccatggctgcttgaccccatcaaatccaaatccaaatccaaatccttgtgtttctgttactgggttcagatacctttctgcttatgctgctgccacgtctcttgtccaagacgctctgaccaatgccgttaaacccaaagaacttgcctctttcaatactaggcctagccattctgcaacaagcgtttctggactattatgatattccattcaaagcggttgaggtaaatcccatctacaagaaggagatcaagtggtccgactacaagaaggtgcctatcctcaccgttgatggtcaacaaaaggtcgactcttcagacataattgataaattgatca

SEQ ID NO: 28746 - DNA, 309 bp, Glycine max
  Clone ID: LIB3051-101-Q1-K1-H6
gcattttatacccggtctcgttagcataaggatgactgcactgctaacaggtggataggtgctgcaaaagccatgcataccaatcaagagggctacagacttgttagggcacacacgcttagagccgtacgatatacaattgctggatgctgccatacagagactctaatcgactatagaggaagagtagctatccaattgaaaggatgcatgttcacgactgcctcagtgtatgatattgccattccttatgatcactggactaatcacgatctccggatgagagcttctgctaattattccttgacc

SEQ ID NO: 28747 - DNA, 356 bp, Glycine max
  Clone ID: LIB3051-102-Q1-K1-A8
tcgcggacgcgtgggtttcttcattatttcagcttttgcattggtgtcatagctccttgctgcggggggatacaaaggcatgaaggcagatgattgttgggtccaacttaaattataccatcatggaaaaattggttccaaggctttaacatttgctacatgaattaaagctctggctcattatgttcatgggaaaggtttgaagactttgatatattcacatgcatgaaattcaactctgatgaaacgcatgcctggatcacttggacacgaagaacaagatgccaaaacatttgctttttggggagtttactacttggagtaatgataattgtgaaaatattggtttatttgcc

SEQ ID NO: 28748 - DNA, 446 bp, Glycine max
  Clone ID: LIB3051-102-Q1-K1-B1
tcttactaaaaaaaaaaaaaaaaaaaaaaataaaaaattaaattaaaaaaaaaaaaaaaaaataataagtgaaaagtataattaaaaaacaagtatataaaaaataaatattttatataacctcttcttatattttctattctttcctctttttttttcatacttttatttttataatacttttttttcacttcatttttttttcttattatttataatttttttatatattattatccttttaattactccttcttttattatcttttcttttaaaaactttttttaatttcttattttatatttttacattctttttttatctttcttttttccctacttttttttcttttttaaactcaattttaacctcttcttttttaccttccttttatcctcttttttttgttttttcttcttttttttactctttattttctcttttt

SEQ ID NO: 28749 - DNA, 407 bp, Glycine max
  Clone ID: LIB3051-102-Q1-K1-B12
tatgctaggcgtaaccattaatccgtgcatgtatagagatgaactagttcagactgaccatctgtggatggctcattatatcagacattgagagagcgatagtgtatactactggggttaccgagaatattctagaacttataccatcaacaaacgcgaactcttctaaggtatgcacacattatattaaatgtcaacacatgctttgtctgctgtttcgatcattcatgatcactcatgcgatcacactgactacgttccatgaactcattactacaatacttgctgtatgaactttcgactgtctgatagtagactaccatactatacacaattgacctgaaactgagacctgatagctgatcatgatccatagaactctctatcacattgctcgtatgctacat

SEQ ID NO: 28750 - DNA, 433 bp, Glycine max
  Clone ID: LIB3051-102-Q1-K1-B5
cgcaggcgttgggactccagctgcagctgcagctgcagcaacagacgctaaggcaggcaagtatggagctgctgcaggcttagtgcctgttgggccatgctttgtcccggtagtagttggtgtcccaggagctggcgttccaggtgttggtgtaccaggagctgtgattccagttgtcccaggtgctgggatcccaagtgctgcggttccaggggttgtgtcaccagaagcagctgctaaggcagctgcaaaggcagccaaatacggggccaggcccggagtctgagttggaggcattcctacttacggggttggagctgggggctttcccggctttggtgtcggagtcggaagtatccctggagtcgcaggtgtccctggtgtcggaggtgttcccggagtcggaggtgtcccgggagttggcatttccccc

SEQ ID NO: 28751 - DNA, 365 bp, Glycine max
  Clone ID: LIB3051-102-Q1-K1-B6
ctctctctctctctctctctctgcttcactttctgacttttgcattgtcttgtcaggcagggaatcctcagaaccaggatcggtgcccttctggctctgatctctcaaagctgcaaattctgcttgattggcttgcttgccagtttggagtatgatatcacctccgactgtagttacgcgagatgatgggctcaacaacctgtcgtctaccgggtcgtgcgactctaagcagtccttgaaccatttctctcagaatggcgctgcattgacagaacgaaattacttagggttatctgatcgatcatcagttgatagcactggcctctactgccccatagcttgtgtgatgacaaaaaggagaacat

SEQ ID NO: 28752 - DNA, 163 bp, Glycine max
  Clone ID: LIB3051-102-Q1-K1-D3
ttcataatgggtgttttcacattcaaggattaaatcaactcccctgtgactcctgttacgctttactttgatctagtgacagatcctgacaacttcataccaaacgctcttaattccttcaaaaatatttaaaaccataacttaaatggtaccctaagaacca

SEQ ID NO: 28753 - DNA, 249 bp, Glycine max
  Clone ID: LIB3051-102-Q1-K1-E10
tctgactcttgggcttactcttggtaaaaaaaatataaaaataaataaataaaaaaatgaaggaaaaaaaaaaaaaaataataaataataatataaataataaataacataaaaaattataacttatattattattttaatataccatctattcatacttcttttttaaattttatttctttcatttacctttatttattttaatattatcttttctaatattacaacttttctacctaattaactctc

SEQ ID NO: 28754 - DNA, 423 bp, Glycine max
  Clone ID: LIB3051-102-Q1-K1-E12
ctgttttgccggtcctggttcccggttgccggtgatgttaagggcattctgatcatcatgcacgggctcaatgaacacggtggaagatatgcggactttgcaaggctattaacatcatgcaactttggtgtctatgcaatggactggataggtcatggaggcagtgatggattgcatggttatgttccatctcttgatcatgtggttgcagatacgggggctttcctggaaaagattagatcagagaatcctgggataccatgctttctctttggtcactccactgggggagctgtggtcttgaaagcggcttcccatcctcatattgaagtaatggtggaaggaattatattaacctcaccagctttacgtgtgaagccagctcatcctattgttggtgctgtggctccaattttttctctg

SEQ ID NO: 28755 - DNA, 444 bp, Glycine max
  Clone ID: LIB3051-102-Q1-K1-F6
cccacgcgtccgtccacacgtacgaccacgcgtccgaaaacaaagacaaaaagattgaggagaaaaaaactaagtttatgaaaagaaaaaaggaaaggaaagaaaaaacattatacagaagaaaaaatagatcaaactgagaaaaaagaagaagaaagaaatgagaaatagaagagaaagaaaaaataaagaatatgttgaggaaactgagtagcatctcatggatggctgaaactggtacagctggagtagaatgtgttaaagatgcatcaacttcactcctggaggagacagcttgtggttcttttggaagaacattctgtaagtgttgggcatgcaatcctagtcatagagccctattgatgactgtagtgaggtctgtggtgcctatgttgtgtcatttggccaatgtgccaatgggtatgcagctgttgcttccctact

SEQ ID NO: 28756 - DNA, 346 bp, Glycine max
  Clone ID: LIB3051-102-Q1-K1-H11
cggacgcgtgggaaaaaaaaaaaaaaaaatttaaaaaaaaaaaaaaaaaaaaaaaaaaaagaggaaaaattaaaaatcgaaaccgtccttctatagaatccatacttacatacacatcctataaaaattaatacctttcatttaaatatcccctaaattaatttaattgcccttctttttacacctttgtttctgtcaaacccctttcttttcccattttaatccccttctttaacatccccttttccccaattgccttattatctataagtcccctccctttcccccttcccaccattttctcatcctgattgttaaataaaacccccctttttactgcccttta

SEQ ID NO: 28757 - DNA, 432 bp, Glycine max
  unsure (1)..(432): unsure at all n locations
  Clone ID: LIB3051-103-Q1-K1-A8
gtcttggaacgcggctgggacgttgcttgcaacttgtagtagagataagtctgtttggatatgggaagtgctgcctgggaatgagtttgagtgtgtgtcagtgctgcaaggacactcgcaggatgtgaaaatggtgaagtggcatcccacagaggatatcttgttttcatgtagctacgataatagtgttaaggtttgggcggatgaaggtgatagtgatgattggcagtgtgttcaaacgcttggggaacccaataacggtcatacttccactgtttgggccctctccttcaatgtgagtggtgacaaaatggttacgtgtagtgatgatcttacactgaaggtatgggaaacagaaagtgtaaggacgcaatctggtggtggatttgcaccttggacacatctttgcactctttcanggtatcatgatcg

SEQ ID NO: 28758 - DNA, 455 bp, Glycine max
  Clone ID: LIB3051-103-Q1-K1-B11
cccacgcgtccgcccacgcgtccgctcagatctttctctcactctccaacaatcgggaggcaaaaccctaccaacaccacactcaatcgaaattcttcattctcttctcatcgatggggcagaagtctctgatctacacgttcgtgtcgcggggaacagtgattctcgcggagtacaccgaattcagcggaaacttcaactccaacgccttccagtgccttcagaagctccctgccaccaacaacaagttcacctacaattgcgcacacaccttcaattacctcgtcgacaatggctacagttgggagtgtgataaagagtccagaaatatctggtcttgtccctactctacttaaggaactttgtcatcctaatgagcatacaaaatattcctttaatattcttcatcaagcttttaataatgttttcagttgtggtatcacttgctaaacaat

SEQ ID NO: 28759 - DNA, 430 bp, Glycine max
  Clone ID: LIB3051-103-Q1-K1-B4
gcttatcttgatttgtcccataattctcttcatagtgaaataccttcttcattggcagatttgacccaattagagttcctaatcatctctcacaacaacattcaaggctcaattcctgagttgttgtttctaaaaaatctcactgtcttagatttgtccaataattcacttgatggtgagatacctcgtccggcaaatcttatccaattacagagcctaatcctttctaacaacaaatttcaaggtcccattcctcgtgagttgtttctaaaaaatctcattgtcttagatttgtcctataattcacttgatggtgagatacctcgttcgacaaatcttaccccattacaaagcctaatcctttctaacaacaaatttcaaggccccattcctcttgagtttgttgtttctaaaaaatctcactgtctta

SEQ ID NO: 28760 - DNA, 456 bp, Glycine max
  Clone ID: LIB3051-103-Q1-K1-C12
cacagtaacaatcaatcaaggttttctttttcaaggcatgaggaatccataatccatagtgttttattcacatgcatgttatggtgtcagcctttaactaccatatctaacagtcttcctcaattgtgcataaagagacttgtatattgatttgtatgtcatttcatatttattttataccattgtcttttaggatgcgttatataaatttagtgttctcaacatgttactttttctgaattttttcgttcattttatttgtttctttttttaactttcttgtttttttttttatgtttattttttttacctttatttattattcttattatagataatctcttttttctttttttttttatattacttatttttcttataattttttatattttatttattttatttttttcatttttacttatttttttttcactttttatctatttctttttt

SEQ ID NO: 28761 - DNA, 344 bp, Glycine max
  Clone ID: LIB3051-103-Q1-K1-C8
taaaaaaaaaaaaaaaaaaaaatttaaattaaaaaaaaaaaaaaaaaaataaaaagaagggataaaaaaaaaaaaaaaaaaaaaaaaaaaaaaaaaaaaaacaaaaataaaaaaaaaaaaggggttgtcattttaaaggtccaaattttacttactattgcttgtcaataaataaattttttttaggttcatctaaatctaattaatggacctaattttaaaaacagtttaaattgttaaaaaccttggtcttaccaaatttaatagttttaaagaaaatcctttttttacaagttgggataaattcaaaaagcccattactaatcgccttttcaaaaattttt

SEQ ID NO: 28762 - DNA, 429 bp, Glycine max
  Clone ID: LIB3051-103-Q1-K1-D10
cccacgcgtccgcccacgcgtccggtggaagtggaaatggcaactctactggaaccacggctgggggtggtatcatagttgttggatcattagaacatcctttgtcaagtttgtctattcaaggttatgtaaaagctaatggaggaaattttgaaccgcaaatcagaaacgaaaaatttgcaatatttgacaattttactggaggtcccgggggtggatctggtggcactatactaatgtttctacatatgctcaccattgggaaatcagctgttctttctagtatggggggatatagcagttctaatggaagtggtggtggaggtggtggaagaattcatattcattggttcgacatttccactggtgatgtttatctgccaattgctagtgtgaatggagacatttagatctggggaggaaagggta

SEQ ID NO: 28763 - DNA, 356 bp, Glycine max
  Clone ID: LIB3051-103-Q1-K1-E4
aaaaaaaaaaacaaaaaaaataaaaatttaaaaaaaaaaataaaaaaaaaaaaaaacgggaaaggaaaataaaaaaaaataatgaaaaaacaaaaaataaaaaaaaaaaaaaaataaaaagggggacccttttaaagaacccaaactaccgcaccctcgcttacaacaaaaaacttttttattaggtacacttaaattaaattaattggcccaattttaaaaaccacaaaatgggaaaaacctcggagaaacccattttaatgcttctaggccaaatacccttttatccattgggcataatttcaaaaaggcccaacccttttacatttccaaacatttgcccagcctaaatgcaa

SEQ ID NO: 28764 - DNA, 439 bp, Glycine max
  Clone ID: LIB3051-103-Q1-K1-F11
ctcacgcgtacggttaagacatggcctagtacattgattgggtcattaaaaacaacactgctgtgtctgccatatatgagcttgcaggtatgctatcgcacattacagcagcgcagtacataggaatgtgctatggaatgatgggtgataatctaccatcaaggcatggaagctgcatacttatataaaacacaaggcattgttggaatgcgtatatactacacagttgaggaatcactagaagtgcttagaggttaaagcattgtactgattatggacatgtataatgtaacacttcagtcatagacagacttgaatgcttgtacagactgcgtcattcaatatgggacaccttactcgcgagacgccaatttcaagttcatcgatgttggtaatgaaattcatacgagtaccactgtggcacaatatattctatgtg

SEQ ID NO: 28765 - DNA, 313 bp, Glycine max
  Clone ID: LIB3051-103-Q1-K1-F12
ctcacgcgtccgtttaagacggggattcgtacaacgatacatgcaatgctaacagggcgggattatctgccacatatgatgctagaggtaagcccactgtcatgccatggccacaaatgaccttgactttgactgggaatgattacccatttgtcgacgataattatattcaacttgagtgctgagctgcttcaacactcccctgttcacaacaaggtttcatcgctatttcacaatgagcagaccatatcagagccttctgcgattgtttaatacttttattagacatggtagaacaaccagtcttattacc

SEQ ID NO: 28766 - DNA, 415 bp, Glycine max
  Clone ID: LIB3051-103-Q1-K1-F9
atagaatcccattccactagaacactgctttggtgacccaaccagctagccacatcgacgcatccacacgcatttcctctaccaccgacaccgctccctgtcactgaaggaggaggatcgtcgcgactacctcgcctgcgcacactccactggatcttgatggcaaccacatcgtgcccctcaccatatgcatgatcgacaccggcggcttcataggctcccacctatctcagaagctaatggccgatacgcaccacacacgtctcgctgttgacgactactgctacaagatccgtcaccttgtcgaccccgagccgccgtacctttccaggcgcatctcattccaccgccttaacataaaaaacgactccaggctaaaggtgctcattaatattgccgatctgaccataaacct

SEQ ID NO: 28767 - DNA, 349 bp, Glycine max
  Clone ID: LIB3051-103-Q1-K1-G10
gcaatgaataaattgaaaaggatggcattgcgtgttattgcggagaggctatctgagggagaaattggcggcctgaaagagttattcaagatgattgacacagacaacagtggaacgataacgtttgatgagttaaaagatggcttgaatcgagtaggatctgaacttatggagtgtgaaatcaaggatcttatggatgctgcggatattgataatacgtgggacaattgattatggtgaattcattgctgccactgtgtatttaaataatctatagatagaggataacctagtgtcagcctattacgtattttgacattaatggcaagggttacataacccttgatga

SEQ ID NO: 28768 - DNA, 430 bp, Glycine max
  Clone ID: LIB3051-103-Q1-K1-H8
cccacgcgtccggttggcaccctccttggtcatggctttggttctcactactggggagggttcactccggttgctcctgggtttctctacttaagagtttacaggtctattagagatgtgatgttcttgacagatgaaattgtatctcttttaatgctttcagttagagatatagcaaatggtgggttgcccaagggtgaagtggagaagctaaagaagactaagtatggaatgagatatggacaggtttctctttctggatcgatgacacgtgttaagcatgccgctcttcttggggcttcgtttctttggatatctggtggttcaggtttggttcaatctttgattacagaaactctgccttcatggtttttatcagcccaagggttagagcatgaagggggagaatctggagttgtggttgctatgc

SEQ ID NO: 28769 - DNA, 439 bp, Glycine max
  Clone ID: LIB3051-104-Q1-K1-B2
aaataatagcataaaatattataaaaaaacttatatattataaagataaatttctcatcaagaaaagacttttatcaattaggtaaaatacaaggaatatttcagctttaacataaggggtattcaaggttggtttaagttggatttaactaaatcttttattcaattcgttcaaaattatattggttgagttgaatttatgtgattttgttgttaaatttaaactgaatcaatctagtcacaaataaattgacttgggttgagtaagtcaggtctaagcttttatagttattttaagtgtcctaaagaataattttttttcttaccaatttttacatattctatagttaattattgtatatttaattaaaaataaatgcacattctaaagatattgaattttatcaacgttgcatacttgtactaaacaataaattaa

SEQ ID NO: 28770 - DNA, 464 bp, Glycine max
  Clone ID: LIB3051-104-Q1-K1-B3
ggtccgaccgacgcgtgcgacctcacatcctatatatttcaacaaataattaatcttatatattacatcaaatcattaagataaggcacaataaaccggagtgtaatctaagaatatatatactgataacataatgatacattcagagtaaactaaatttggacctacttaaatttatctattaatactcatacataatattattaattgaattgaatttatgttaatatttgcacctacatataaacaaaatctacctattcacaaataacgttactctaattcaataattcattgctatgcttatacagataatcctactattcaaaataatatttattaatattactattacctacatattctatatattcacattgcccatttacttactaatatatgcacatactaaatatactccattatatctacataccatacttgtactaatcaataaatgaata

SEQ ID NO: 28771 - DNA, 348 bp, Glycine max
  Clone ID: LIB3051-104-Q1-K1-C11
tctaatctataaattcacccacatattttaaaaattcattccaaggatttactagaggcactgtttatcataacaggtatactactaatctatactaaaactccatccaatgcacacaaatattctcacaaaacaacaccatagcatgctcaaaatttaacacttttatataacaacaccattacgatcacaactatatacttttgtataacatcaaggacaagatccattatgatatccatgacaagtgttacaaaaataacaacaaggacaagaataacatggatcatttacatcaccatcatcgtcatagcatcatcattgacattgattatatcttatatgtta

SEQ ID NO: 28772 - DNA, 443 bp, Glycine max
  Clone ID: LIB3051-104-Q1-K1-D6
ctcacgctctctactcttacggcactttccataaacatggccataaggtctggctcactggatcgatggccatacgaggaacctacatccgtcatactgacgctcgacgaacggacttcaatgagatacggaaatgttatcagaaaacctcgccagcatcgtcgacacctacgaccggcacgcgtacctctgctacaagagtcacctgtcctgtccctctcgcatctaggcctgcgacgacgatcccttccgcaagcgcgtcgccgacaccttcaaagcccgcaagaacgacttgcccctcaagacgaaaatcaccgtgtgcgaggtgcgtgaggaggctggcttactcgacggtgacgtgttgattctccccgacatgatcaaatacaggggtttggaggaatcaaatgttgatagctgtatcgaagatgttgtggtgaatg

SEQ ID NO: 28773 - DNA, 412 bp, Glycine max
  Clone ID: LIB3051-104-Q1-K1-D9
atttaaccctgttttaataataatcctcgccactctaccgtatagatgcacctgatcgacatttctcacacccctctacatcatcagaacctcaaacttgcaaacacaaacaccttactaacctgcaatcaacgagcgctactgcttttcaaatggagagcacacattttcgatatactccactgacaaacctcatatgcatagcactcatactaatcctcgaactgatattcacatctctggatacgattatacattccgtgtatgacactttcaaagctttttatacgtgcctactagcacaaacaaactctgcatccaacaagtgttccatacataaacttcttacacaatctcatatacatccatctcttgtgctactactaatcattacctatctcatactctttaa

SEQ ID NO: 28774 - DNA, 135 bp, Glycine max
  Clone ID: LIB3051-104-Q1-K1-F3
gcgcccacgcgtccgaaaaaaaaaaaaaaaaaaaaaaaaaaaaaaaaaaaaaaaaaaaaaaaaaagaaaaaggaaaaaagaaaaaagaaaaaaaaaaaaaaaaaaaaaaaaaaaaaaaaaaaaaaaaaaaaatga

SEQ ID NO: 28775 - DNA, 451 bp, Glycine max
  Clone ID: LIB3051-104-Q1-K1-G1
accgacgcgtgcgtgaaagccctaccctatatataacatccgtgctgattacacaaggtcaattcatttgggcgctgtcgctgttccaaaaccctaatccttcgtcttccagaaaatggctgattctccccttgcaaggaattcaaggtccccttccccgtggaaagctcagtcgagatctaggtctaggtcaagatctaggtcgaggtctaggcctagacaaaggccaagatcccgttctagaagtcatggcaggtcaagatcaccaattcatggaaggtcaaggtcacccattcatggaaggtccgagccttcaaatcctggtgacacactttatgtaaccggtctatcttcaaaggtcactgaaagagacctagaggagcatttctccaaggaaagaaaagtttcttcatgttttcttgtggtggagccccgtacacggatttctcgt

SEQ ID NO: 28776 - DNA, 435 bp, Glycine max
  Clone ID: LIB3051-104-Q1-K1-G6
gttagttgtttaatgaacgcaattcggtcccgttggttgacgagaatggcagaagacatggggaaaagcaacctcgaatcctcttctgcttcaacaacttcccgaggcttctggccttctgtcttacgttggatcccctcttccaccgatcacatcatcaatgctgaaaaacgccttctctctcttgtcaagactccgtatgctcaagaacagtaaggatgattctcctacgctggtgatggttcatggatatgcagcatcgcagggtttcttctttcgcaattttgatgcccttgcctcccgtttcagagtgattgctattgatcaacttggttggggtggatctagcaggcctgactttacatgcagaagcactgaagaaactgaggcatggttcattgattcttttgaggaatggagaaaggccaaaaacct

SEQ ID NO: 28777 - DNA, 439 bp, Glycine max
  Clone ID: LIB3051-104-Q1-K1-H1
ccactcgtacgggggatgtgacggaagagtagaaggaagttgaagtgactgaagagaagagggaagctgaagtgatagtagaagagaagaaggaagttgaagtgacggaagagaagaaggaagtggaagtgaccgaaggaaagaaagaagtggaagtgatcgaagagaataaggaaacagaagtgacagaagaaaagaaagaagtggaagtagaagtgagggaagagaagaaggaaagtgaagtgaaagaagaagaaaaaggtcgggaggttgttccagaggagagtagcaagagtagtaaggtgactctgtctgggttgttgaattttatagatgggatttggtctgcttgtggaggtgaaaggatcattgttttcacgacgaattatgtggagaaacttgaccctgctttgattaagagagggaggatggataagca

SEQ ID NO: 28778 - DNA, 413 bp, Glycine max
  Clone ID: LIB3051-104-Q1-K1-H3
cgaccgcgcgtgcggaccaatccatagccgaagagaaaaagagacaaggaccgtctagaattgatttcattgaggggggcaggaaccaattccatgtgcagtttctgattcgtcaaacggacaaaggaagtgaaagggtttaaggtgtgacctgagatcaacatgttgcggaggcttctctcttctcacctcaaaaccctagccgccaccgcttcttcttccactccccgatctgctttcgccgtcgccagattcgccgctctctctcgctcctcccgctacttctcaacccagtccgaggatgctactgccatcaaaaagaaggttgaagatgtaatgccaatcgctactggtcacgagcgcgaggagcttcaagctgagctcgagggaaagaatattcttgaaatagacca

SEQ ID NO: 28779 - DNA, 437 bp, Glycine max
  unsure (1)..(437): unsure at all n locations
  Clone ID: LIB3051-104-Q1-K1-H6
cccacgcgtccgaaaagatgagttccaattccagagagagtcaagttcacccagaaataggagaggtcgaggatgcttacctctctgctgtgttactttgctttagccgggtcctccctgcagtcctaaatgcagctattgatctcaatttgtttgatatcatagcaaaggcacagagttcatgtgactcaagtttctcagcctctgagattgcttctttgcttccaaatcaacacccacaattggctaataggcttgaacgcatattacctttgttggccagttattctcttctaaattgctccattcgcacaaatgaagatggtaagagagaaagagtttatgctctctcacccgttggtgcatactttgcatttgataaggatgaaggaagttctttggctcctctctcttctntaatccatcgcggatttcat

SEQ ID NO: 28780 - DNA, 413 bp, Glycine max
  Clone ID: LIB3051-104-Q1-K1-H7
cccacgcgtccgaacagacgagctccaattccagacagagtcaagttcacccagagatagcggacgtctatgatagcttacctgtctgctgtgttacttagatatagccggatgctccctgcaatcctaaatgcagctattgatctcaatttgtctgatatcataacgtaggcacatagttcatgtgactcaggtttctgaaactttgagatagcttctttgctatcaaatcaacacccacaattggctaactgtgctgaacgcatatcacctttggcggccatttatactcttgtaacatgctccattcgcacaaatgacgatggttagagagaaagagtttatgctatgtcacacgtatgtgcatactctgcatgagattacgatgaaggaaagcctttggatcctgtatg

SEQ ID NO: 28781 - DNA, 326 bp, Glycine max
  Clone ID: LIB3051-105-Q1-K1-B11
aaaacctaagcttacaatctgaaactaagactagaagaagggtaagaatagatcgctgtggatgcaggtaggagagaaagctgtagagtccattatggaaacagctacgaacattggtgcttctgtacaaggctggcatggagaagaccaaagccactgtacaagataaggcacaatgaatgacatcacgtgatccagtgcagaatgaattggcaacccaactgaaagaggcatagatgaaccacgctgatctggacaagcaggctgcacgtcagcataacacggcggtcaaacagtccgacaccacggatgggcacatgtgacat

SEQ ID NO: 28782 - DNA, 235 bp, Glycine max
  Clone ID: LIB3051-105-Q1-K1-B12
cccacgcgtccgtggagttcctgctgatatggccaagaagaaaacaagtgtaatttcgagtaactggtttcctgtttgggatgaagagtttgattttccttctgactcttatcattctctcgaacttctgtgcgtatgcttaagatcactggttctgacctcgatcattcaaaaagaacctcacagctcggacgcgtactttatatgtctactcatctccagctatatatgatga

SEQ ID NO: 28783 - DNA, 432 bp, Glycine max
  Clone ID: LIB3051-105-Q1-K1-B8
cacttctataaccatcatcaccacaataatttacattatatgtcatctatctaaatgaatgtctatctcaatggggaactcagcttaaacactatctcaaataatttcacaccattactacatatactaattcttacaatattcatcattacactcgactattattaactattatgaccttcttatcctacctactaacataaacacctatcttattcttaaataccttgataagaacaacaatctgattctgacaatattatacaatcaatatcttgcaaaacttgcacaatttgcccactaccaagctcactttcaaaaaaatttgatgtatttagcttcaattgcttatgaccaaccttaaacaccaaccatgcctccacatatggcactacacccttacatgcaaccaagattatatatgcaacattc

SEQ ID NO: 28784 - DNA, 235 bp, Glycine max
  Clone ID: LIB3051-105-Q1-K1-D1
acgaaaaaaaaaaaaaaaaaaaaaaaaaaaagattagattaaaatgaaagtgttaataataatgcgaagtgtaaaaatagtatagagagtaaggccaattataaaaaaaaaggtccacatttatattattccataataaaaatattattaaaacaaaatcataataacaaaaataacttacacttaatttaacaaaattacttattgttatactcaacttgtttttaaataacaa

SEQ ID NO: 28785 - DNA, 237 bp, Glycine max
  Clone ID: LIB3051-105-Q1-K1-D2
cccacgcgtccgcggacgcgtgggaaaaaaaaaaaaaaaaaaaaaaaaaaaaaaaaaaaaagaaagaaaaaaaaaaaaaaaaaaaaaaaaaaaaaaaaaaaaaaaaaaaaaaaaaaaaaaaaaaaaaaaaaaaataaaaaaatataaaaaaaaaaaaaaatttaaaaaaaaatattaaactaaaaataaataatataaaaaatttataaaagtataaaaatataataaaaaaaataa

SEQ ID NO: 28786 - DNA, 370 bp, Glycine max
  Clone ID: LIB3051-105-Q1-K1-D3
aaaaaaaaaaaaaaaaaaaaaaaaaaaaaaaaaaaaaaaaaaaaaaaaaaaaaaaaaaaaaggaaagtgaaaaaaaaaaaggaaaaaaaaaaaaaataaaaaaaaaaaataaaaaaaaaaaaaaaaattaaaatttaaatggatccaaattttaaaaaccaaatttttgaaaattataaattttttaattaaacgttatttaaatttaaatccattaaatcttttttaaaaacagtctttttaaaaaaaaatcttttttaaaaaaatttttttaccttaaataaaaccacttttttaaaaaattcttttattacctaaaagtataaattaaaaggcctttaaaaatttctttcacaataaattgccaatt

SEQ ID NO: 28787 - DNA, 260 bp, Glycine max
  Clone ID: LIB3051-105-Q1-K1-D5
gtcagaggcaaggtgtgagcgtcattctagtaacattcactcttatttttgctgctagtggccttctgttcgaaagtttcaggtcaatttgatttgcaggtccacaaagctgttgatgcttgcaagaatgttcttagaggattgcatagcaacaaaattacggagagggagttggacagggttagttattgaaatgctcaacttgtttttacattacaatttagtgagcagcacttttagacagtttttctcctatacgt

SEQ ID NO: 28788 - DNA, 345 bp, Glycine max
  Clone ID: LIB3051-105-Q1-K1-E1
gcttaatttctactctctacttctagctaacagagttaagtaaactgtcgcttcagtactggatgtgtatataatggcggtggctgtgacgattctggtgacccttctctcggtactcactactgcatcgcgtgtttgagtggtagacacatatccctgaatattgaaccaacaaccatgtgcaagatcactttccttgcgcattgagctactatattcgtgctgcacagcttataacgcacagctgatgctaacttgcgattcaactgctgcgctgttgagggttctgtattgcatttcacagttttggattatcacattaagctccaaattgagacctgttcc

SEQ ID NO: 28789 - DNA, 432 bp, Glycine max
  Clone ID: LIB3051-105-Q1-K1-F1
ttttgcatgtgtcattgttcatctggctgagtgcagttgtctcttcattcttctattttgagaaggtgagcgtgattgccactacagttaccagctctcttggaagaagaaaattgtttgcccagataaatagcttcattgctgattttattcttgttggacaactgtccttgacgtacagggacgcattcttactgttgctggggtgactacagctatatgctcagcacctttcgttggcctcttaaatttagtcgctctagctgtttggccaaaatgggtggtggttgccatttgtgagacgctgagaaaggttattatgacttgcaaatattggttcctttaatagatttcagtaattaacaacatatctagaaatctgtattgtgaaagtagatttagaatatgtataggttcattgtatgatataat

SEQ ID NO: 28790 - DNA, 439 bp, Glycine max
  Clone ID: LIB3051-105-Q1-K1-F4
ggctttacaacgtaccatggggcatgtacaaatcattgatgtacataaaggaacgttatggaaagccaactgtgttcttatccgaaaatggtaacattatatatcaatttcttgctttttcctttttttggcttggtgattctgttgtttcaatgtcatgtgacatattttatgacatgtaggcatggatgatccgggtaacgtgactcttcccaagggtttgcatgacaccacaaggataaactattacaaaggctatttgactcaactaaagaaggcagttgatgatggagctaatgtggttggatactttgcatggtcattgctggataactttgaatggaggttgggttacacatcaaggtttggcattgtctatgttgatttcaaaaccctcaagagataccctaagatgtcagcatactggttcaagcaactc

SEQ ID NO: 28791 - DNA, 398 bp, Glycine max
  Clone ID: LIB3051-105-Q1-K1-F9
atcttcgtcaaaaagcttctcattcatggcgacaacgctcatttcggcttactcattcatgggcacacctatcgggtaactccctcaccaccaactatcactgcggaccaggctcgacatcaccaaagtcctcgtacgacttcacgaatataccccaatccactccatatgtcccaacattgtcttccccggaatcgcgactagagccgtacgtcttctctacacgctcgccgatgctactgttgctgctgaccctgcggctgctgcagactctgcggctttcaccaccgatgctgaccgacagaaaagcggatgctgattctgcttcatctcacataccatggaattcgttctcaacgaggccaatgatggcctttctgtcgagcatgtaccttatg

SEQ ID NO: 28792 - DNA, 337 bp, Glycine max
  Clone ID: LIB3051-105-Q1-K1-G12
aaaaaaaaaaaaaaaaaaaaaataaaaataataaaaataaaaaaattaaaaaaaaaaaagagttaaaatacaaaaagaaaaaaaatacacatacaaaaaaaaaggtacaccaatctattgggtccagctttacatccacatccttactcctgtttagatttcttctcatgtagcttaaatgcaatctgctgatcctatgctttaaagcttcttaactggcaaatccctttcattactcatctaatcctcctatttgaatatcccactttataaagcttgcttaactctcataatgcccttacaaatatcctttctaaacttttgcatatcttgactg

SEQ ID NO: 28793 - DNA, 420 bp, Glycine max
  unsure (1)..(420): unsure at all n locations
  Clone ID: LIB3051-105-Q1-K1-H5
cccacgcgtccgcccacgcgtccgattctttcccttcggattaggccctcgaatctgtgtggggcaaaatttggcattggttgaggcaaagattgctcttgctttgatcattcaaagttacagttttgtgctatctccaaactatatgcatgctcctatactatttgtgactttgcagcctcaatatggtgcacaaatcattttcagaaagatatcatattgctgattgttgttgccttttcccacttctccccctgtgtaactttaaactccgtaaatggggaagcattgtagctataaatattgtgctttttttacttgtgaaagcttatgtagcctatgttgataactggtgaaagtttttcaggttaaagcagcataacttaaattggatcatcanatatataaagatttggcatg

SEQ ID NO: 28794 - DNA, 206 bp, Glycine max
  Clone ID: LIB3051-105-Q1-K1-H8
aggaaattaggcatgaccctctttgagtatgctctgcctatttgaaaatttccacacctgttttaattgtcgtaatgatgtgtgaagtgtgtgttattttaaaaaaaaaaaaaaaaaaaaaaaaaaaaaaaaaaaaaaaaaaaaaaaaaaaaaaaaaaaaaaaaaaaaaaaaaaaaataaaaaaaaaaaaaaaatttaaaaaataa

SEQ ID NO: 28795 - DNA, 335 bp, Glycine max
  unsure (1)..(335): unsure at all n locations
  Clone ID: LIB3051-106-Q1-K1-B2
ccttaccctctttgcaactacccttccgcaccacagatatctctcccgccgctccttccgtttgcgccgcttacgactactatctccgtcttcctcaactcagaaagctttggaactccactgattttcctaattggaacaacgaaccgattctaaaaccaattttgcaagctctcgaaatcacgttccgctttctttccattgttctctccgatcccagaaccttcctgaaagcagcagaggactgctacgccgtggagaggatctggaagcttctcgcggaggtggaggacctncacctgatgatggatccggacgatttcttgaggctaaag

SEQ ID NO: 28796 - DNA, 272 bp, Glycine max
  Clone ID: LIB3051-106-Q1-K1-B9
tcccactcgtcctaaaaaaaaataaaaaaattttatatcataaaaataaaaaaataaaaaataagttaatcataaaaaaaaaagaaattacaacctaaaaatataccaatttaaattatcatattatcaaccccaaatctattttaattttaattaatataattttaataaactctatctaaaaaaaatctttttaatataataaccatctctattttccactcctaacataacttattttaatctaatctcccaatcttattaaattcttc

SEQ ID NO: 28797 - DNA, 306 bp, Glycine max
  Clone ID: LIB3051-106-Q1-K1-D7
tccacacatactcctttcattatttaccttccacttaaatgaatagtattagcgtcagggctattactgtactttgttccctaactttataaaatcatccttgattctcctctaataatgttatctacacctatttcaattctattctcaacatagtcacatactattagtttccaattattagactaaatggcttctcaatataatttgaccaaaccaaaacacaaacataccctctcactgttgagcaatctacctttacagtctcaaacagtctaccactgataatattatccccatttaaaa

SEQ ID NO: 28798 - DNA, 381 bp, Glycine max
  Clone ID: LIB3051-106-Q1-K1-E1
cgagcctcaccttcgagctctcctcgccccagactccctcgacggcggcgagaggcgcggagggcgacgtgatggggctgttgctgagagagaggattgtgttcctcgggagcagcatcgatgactttgtggccgatgctatcatgagccagttgctgctgttggatgcccaagaccccactaaggatatcaggctcttcattaattccactggtggctctctcagtgctacaatggctatctatgatgccgtacagcttgtgagggccgatgtttccacagttgcactcggcattgcagcatcaacagcttctgttatccttggtggaggcaccaaaggcaagccctttgctatgccaaatacacgaattatgattcatc

SEQ ID NO: 28799 - DNA, 364 bp, Glycine max
  Clone ID: LIB3051-106-Q1-K1-F2
cacacgacttctgtgagatggctgctaactatcatacagaagagcctcatatgcttgagtacagtaaatatgctgatcttgaggagcgtcaaagatttgtgcaggcatatctgagtacctccggtgagcagcctagtgacagtgaagtggagcagctacttcaagaaattgagaagtatacacttgcaaatcatctattctggggcgtctggagaataatttctgcacaagtgaacactatcgactatgactactaggaggtatgctaacagagatttcaagagtactgggcaaaggaaaccttagctgctaataaactctgaagcgccttctgcttataatgtgcctgagggtacaggagagc

SEQ ID NO: 28800 - DNA, 458 bp, Glycine max
  Clone ID: LIB3051-106-Q1-K1-F7
atttaataaagtttaaattcttttatattttattatattaattattattattatgattataaaatatataatttagttatttatattaatttatatttttatatcttaatttcttataattttagttatattaatttctcattttattttttattctatatgttagttaatgaattgttgcattttaattattaaaataaaaacctaaatatcatgatatatttgatttataattttatgtttactttaaatgttaagaacctaagaaatgatgtttttatgttagtttttaatattataaagttgtggtattatatttatttagtagtataattttatgtattaattattattatattctattaatactagtcaaccacgattcaaacatgattaagtcattaagttttgaactaatattttgatcgattcaatcatcaatccgattttaaaaacat

SEQ ID NO: 28801 - DNA, 337 bp, Glycine max
  Clone ID: LIB3051-106-Q1-K1-H3
aaaatttccaaaaagtaatagggacttacagattctttagccattttttaatcatgtttgcttggttatgtaattttcaggttaaaatcatatgagattcttaagagctacaaacctagggcaagcatctttcccagtgttcttgattatacagtttgtccttacacatggcctttctgtcgtcagccactctatgcaggtgccatgcctgtcatcttcaatgccaccattttgaatggaatgggtgttgtcggatatgttgatagtccaccaacatggcatccttctgatgaagaaaggaaatcttctaagcatacattttacttattctgagatc

SEQ ID NO: 28802 - DNA, 443 bp, Glycine max
  Clone ID: LIB3051-107-Q1-K1-B10
tcggccatagcatcgcgaaactgggaaaccattcaaattgaagacctcaaaattgatcgcaatgagctgcttgctgtgaactgtctggtaaggtttaagaatttgcttgacgagtcaattgaagtgaacagtcccagaaatgctgttctgaatttaatcaggaagatgaaaccagatatttttgttcacagcgtagtaaatggatcttataatgctcctttctttctcacacgcttcagggaggcactgttccattattcttcaatttacgatatgtttgatactctcatatcccgtgaaaatgaatggaggttgatgcttgagagagaatttttgggccgggagataatgaatgtggtagcatgtgaagctctagagagggttgagaggcctgagacatacaaacaatggcaggctaggaatactagagctggttttaagca

SEQ ID NO: 28803 - DNA, 300 bp, Glycine max
  Clone ID: LIB3051-107-Q1-K1-D1
ctcacgcgtacgctgatgctgtgggaaagttggctgccatcatgaaaatatgccgctcatgagagcatatatttaaagaccatcttgatggcttgccgactgaacgtgataaaatgtataatgtctttgacaatcacatcgccgctgcttaaaaatggttccaatgacattagcacctttcaatggaatatataaagtaacttattactgaatctgatgggtatcaaccacatcttatagctccagaacaaggatatcgatcgctaatcgaatcttacctaataactattatgggccctg

SEQ ID NO: 28804 - DNA, 278 bp, Glycine max
  Clone ID: LIB3051-107-Q1-K1-F4
tgatggcgttcctggccttcatcgtgggttcaacatctcatgtgttgcaattatagtcgcgtcgtggctctttactactggaatgcatgactccctgaaaccagatagttgctggcttgagcgagttgcatagatgactttctgacgctagaaaacctttcgggatggggaatcacaattggtgctcgtttgcctacatataccattgacactgtgcgtagaataatgatcatcacttgtggagaatctgtcaactacaagatctctttccttgcatt

SEQ ID NO: 28805 - DNA, 258 bp, Glycine max
  Clone ID: LIB3051-107-Q1-K1-G2
ttgaaaataatgcacaggatgctactgattgttcgtctcactaaggagcacactttcctggtcggttcactgctattgcagagaatactaagttccaaacgatattaccgtccactgagcagatgacaggtctcaatcatctattacatggagccaagcagcatcacaatgtgacaaatgtatatgtatggcatgcactagctaggtattgatgtggagtgataaccagcatcatccagcatggaacattatgacact

SEQ ID NO: 28806 - DNA, 410 bp, Glycine max
  Clone ID: LIB3051-107-Q1-K1-G4
ggatctgtgaaggaagttttaaatgttatgcagcttaaggggcataagagtgctgtgacgtggttatgctttatgccaaactctgagcaaataatcactgcatccaaggatggttcaatgagactatggaatatcaatgttcgttatcatcttgatgaggatccgaagacgctgaaggtgttcctaattcctcttcatgattcttccggtactacactgcactatgaccgcctgagtgtttcccctgatggaaaaattttggctgcgacccatggctccacactgcagtggttatgtgttgagactggaaaggttctggatacagctgaaaaagcccatgatagtgacatttcatgcatttcatgggctcctaaacccattccaatgggaaatgaacaagtttttggttt

SEQ ID NO: 28807 - DNA, 372 bp, Glycine max
  Clone ID: LIB3051-107-Q1-K1-G8
cagatgatgatagccgaaaggcatggcgaagcgaaactgcttgcacctgattatgcgtgggtgaatggacacccagttttttatcatgaatcgttaactctcctgaatcgccccaaccctcccaagaaacttaatccactgacctattcgcatgaataagtatacgcgttttcatggacagacagacacaagcctttacacattataactcctcatctcgatgttgtacgccccatccaacaagatgccagcaatggaaacactcaagtgttcattaatgggacgaacataacccaactcgagctcataatgttccagatctcaggacttcactgctgcgccgacccacatttctcgatcaatgatgatggt

SEQ ID NO: 28808 - DNA, 426 bp, Glycine max
  unsure (1)..(426): unsure at all n locations
  Clone ID: LIB3051-107-Q1-K1-G9
cattaagctagctctgagttatgccctgtctgttctaaacttaacatcttttcgaagcctaggtgaaactntatgttgggccacctagagatttccagtccagcaaactttatgctcttgagacagcttgagtgtgagaatgatctacattggttgggtatatagtcaaagtaccccatataatgacttcagctatactcttcacttgagctcgctttgaaggttgagttaggctcattgtgttttcatttgtaaccatttcaaagttgggtaacctgataaaattctatactctctgaatccatcttacatgtgttgcatgactatgaagacacaatataccaggctgtttttcctggacttcatagtggtccacacaatcacactatatcaggcttatcagttgcactgaagcaggctatgaca

SEQ ID NO: 28809 - DNA, 420 bp, Glycine max
  Clone ID: LIB3051-107-Q1-K1-H7
gaatatttgaaaaacagcgttgagggtttatctcggaggctattctatcttgctcttccacgcttcagtatatccatcaggtggcaagatgatcaagacttgttgcatgaataaatgtaagatgctataatatatggatatgattgcaaatgtttcaaaaggacaaatagctgtttgctgagggagggtgggagatatgaacagcgacacagtgaaccatagctcaacaattgttgagaatgatgctttgtcagacattagtctacacatcatgacagagtccactttaagctcttcattttaacttttatttaaatgttggatacttgtctactttatgcaagatctttttcctgataatactggtgctagacatatagctgctgcttacagctgatgggattctggcttcacaagata

SEQ ID NO: 28810 - DNA, 444 bp, Glycine max
  Clone ID: LIB3051-108-Q1-K1-A5
cccacgcgtccgcccacgcgtccgcccactcgtccgggcgcacagatgttgagagacttgggtgtacgatctatgaagctgatgacaaacaatccagcaaaatatattgggctcaaaggttatggtttgacagtttcgggtaggatcccattgttaactcttatcacttcggagaacaagagatatttagagaccaaacgtgtgaaaatgggtcacatatacgccatggaatttaacggccaattgagcactcatgacagtggcaggcaggctctaccaaaaatgttcatcttgattcttgaaacatagtgccatgacaagggcattgctatttcagggttattttttctttggtgccttttagaggttcatcatttctggactctggaagtcattggccctagtttcttcattctttttggtacatttactcatgtatcacag

SEQ ID NO: 28811 - DNA, 461 bp, Glycine max
  Clone ID: LIB3051-108-Q1-K1-A9
cccacgcgtccgatggtggcgacgaacgtgaaggcagaaaccatgtctctgatggacaagcgcagcgccttggaggctgagatgaactccatcatcgcccgcctctcccagcccggcgctcctggcctctccggaaatctcgtcgactctgagggttttccccgttccgatatcgacatccccgttgttcgagccgaacgacgtcgcctggcagagctgcgcagtgaccacaacgaagtaactgagaaaattaacctaaatattcagattctgcattcggcacgactcggaaataggtcattgcccttcaagaattcagatactcagatctcatcaaatatggacactgttgcatcaacaccatcacaaaatgtccttctgatacgatctcccaactcaatggatgtgaacgtgttgattagtagaccatctgcaatggtagatgagatagcagatgcatc

SEQ ID NO: 28812 - DNA, 307 bp, Glycine max
  unsure (1)..(307): unsure at all n locations
  Clone ID: LIB3051-108-Q1-K1-B10
tctttcttccactctttctaaaaaaaaaaaaaaaattttataaaaaaaaaaaaaaaaaaaaaaaaaaaaagaaaaaataaaaaaaaaaaaaagaaaaaaaaaaaaaaagaaaaaaatttttaaaagtttcaatttttatttcaattactttcaaaattataaggttttntatttttttaacctcaattgtttttcatttcccgtttttttaaaaattcttttcttttaaaaccctttaattaaccaactttttctcttttttacaaatttcctttttttaaaatctcgtttatcccaaaatttcccc

SEQ ID NO: 28813 - DNA, 375 bp, Glycine max
  Clone ID: LIB3051-108-Q1-K1-B3
cccacgcgtccgaaaaaaaaaaataaaaataataaataataactcctttaaatatacatgagaaacgtttcatctgcctatcgatgtctagaaaaccgtcgttcactccccaactttcgagaatggcatgtcaatgttccagcctcagcttacgatgtccacagtcatttttaatcacgccattgattagaaaaagactggtgttaacccacagtctccactaaaaactgatactgatcctcatagctgacctacaatagatcctgccctaactcatactccttaatggctatgctgcatgcaaaacccttatggcgaatcataccataacaatggaatctactgcgaaaagcctttacataacaaccatgttta

SEQ ID NO: 28814 - DNA, 457 bp, Glycine max
  Clone ID: LIB3051-108-Q1-K1-B7
tcgcccacgcgtccgtgaaactagcgtttgatggtttgaaaggtttggggtataaaacagcgagacactgctataagagatgttggtgggtttgatagtgttgagttatcagtacttctttgcaatgatgagtttatacaaaaacttaataaggaatggagaaatgaagatcatgccacggatgttctgtcaatgtcgcaacatgtacctgggctcaagattcctattcttatgttgggtgatattataatttcggttgagacagcggcaagacaagccgaggaaagaagacatactcttcttgatgagatccgaatcctcatggttcatggcttgttacatcttttgggatttgatcatgaaataagtgaagaggctgaagtagaaatggaaagagaggaggacatccttttaaagagtcttgattggaaaggaaaaggggctaataaagagtgca

SEQ ID NO: 28815 - DNA, 388 bp, Glycine max
  Clone ID: LIB3051-108-Q1-K1-C1
cgtcttttgcgagctctttttgagattgtcttgaaacgtggctgggcgcagttggctgagaaggctttgaacttatgcaaaatggggaccaagaggatgtggagtgtccagacacctcttcgtcagttcaatggaattccaagtgatttattaacgaagttggagaagaaagatttggcttgggaaaggtattatgacctatcatcacaagagataggtgaactcattcgtgcaccgaagatgggaaagactcttcataagtttatccaccagtttcctaaattgaaccttgctgcacatgtgcagccaattactcgcacagttttgaaggtggagctgacgataacttcagactatgcatgggatgacagaattcatggatatgttg

SEQ ID NO: 28816 - DNA, 446 bp, Glycine max
  Clone ID: LIB3051-108-Q1-K1-C12
atgaagggaaaagaatccggtgaagcaaaaggttatgcttttgtgaccttcatgacaaaggaattggcatctaaggctattgaggagctgaacaactctgaatttaagggaaaaagaataaagtgctccacatctcaagttaagcacaagttgttcattggtaatgttcctaaatattggactgaaggagatatgaaaaaagttgttgctgaaattggccctggagtaatttgtgtggaactgttgaaggacccacagaattctagccgtaaccggggatatgcttttatagagtattacaatcatgcttgtgcagagtattcaaggcagaagatgtcaaactcaaactttaaacttggcagcaatgctccaacggtgagctgggctgatccaaggaattctgaatcatctgcaatctctctggtaaatcagtgtatgtaaagacc

SEQ ID NO: 28817 - DNA, 439 bp, Glycine max
  unsure (1)..(439): unsure at all n locations
  Clone ID: LIB3051-108-Q1-K1-C6
caagagtggctttttggtgaattgattggtgatcccgagttggttgagttcactgcgcatagacatgttccttaatttccccaaatattaaaacaagattcaaagcacgtcacttacgttcccgctttctgtttaacaagtgaaaaacttgaaccttttgagacctcagttctctgccatggcaaattctcatttatcaacaccttctgagctattttcaagacaacataagccccctagggttccaaatcttattgggggcagttttctggactcaaaatcgttaactttcattgatgttatcaaccctgcaacacaagaggttgtttcacaagttccttgcaccacagatgaagagtttaaagctgcggtatctgcagcaaagaaggcatttccatcatggcgaanaactccaatcacaaaacgccaacgtgttatg

SEQ ID NO: 28818 - DNA, 402 bp, Glycine max
  Clone ID: LIB3051-108-Q1-K1-D9
ggcaatattctgagtccagccgttacttttctctgaccctgacggaatggttcaaagaggtcttgcactgacccatcaggatgagatactgacacctgctgctcacaccatcgactcatccttcagaaatgatcatgtcgactcctatgctctgcctgattccaatctctatgccaatgcctacaagaacataatcatgacccgaggcactactaagctactgctcgacatggcacccatatcgaaatttgctgaaatgctatacctcaacgctagatctgctaattacaccatgggaaggaagatctttaccggtgctcactcatatcgacattgacactatcatgacgaagccgctatacttgatagctaccgctgcatgcatagtgcactaagcaatgc

SEQ ID NO: 28819 - DNA, 393 bp, Glycine max
  Clone ID: LIB3051-108-Q1-K1-E1
ctcaaacatacgtattctttacctaatactttcaacattctttttaccctacctaatatattcatttatggtagtatttatcaacacggtctcctccccttacttaaataattcatcataactcctcctaacacacttccttttttccttccacacatcattcaaatttcttccctatcaactttccatcataatatatattcctaccatatttattacaaatcacctataattactcttccatttccaatattcaaccttaaaaacttttaccacatccaatcaaatcatcaaactctcaaattacccaatccttacacctatctactaattacaataaattacaataccatactcatataaacctattataaaaatcacaacaatttaaat

SEQ ID NO: 28820 - DNA, 452 bp, Glycine max
  Clone ID: LIB3051-108-Q1-K1-E7
gatcaaagcaaaatcagaaaagggcacagagtcaagtagctcattaccagaagattggagagcagctttatatctttctcttgaaagtggcaaattttggttccctgctcaagtctataaccgtgagaatggtcatgctgggttcatgctctcatgttatgatgcccaactatgctatgattctcgatccgacacttttctggcaaggtactcgcctcatgggagatggacaactgaggaaaacatacaatgggaccggctaagagtgccaccaattgctacttctccacatgctcttcacatctctgactgtttggatgacttgagacctggagatcacattgagattcagtggagaagaaacaaagaatttccttatggttggtggtatggtgtcattggtcatttggaacaatgtcaaggacatgggaaccattgccattgtcactata

SEQ ID NO: 28821 - DNA, 456 bp, Glycine max
  Clone ID: LIB3051-108-Q1-K1-F3
tcgcccacgcgtccgcgaattccctgcaattaacataagcataacccctttccaacctttctgctcttcagatcggatcagatcagatccaccgccatggatttcatgaaggtcttcgatcaaaccgttcgagaaataaagagagaggtgaatctgaaggtgctcaagattccggaaatcgaacagaaggtgctggatgctactgataatgaaccttggggtcctcatggtactgtgctggcagagatttcacaggctaccaaaaaatttactggatgtcaaatagtcatgaatgtcctttggacaagactgggtgaaactggaaaagattggcgctatgtatacaaggtaatgctttccaaagaaccatgttatttcttaagatgttaagatacatagagaagaatttttggtggcattttctatgttgatagatacacaacttacttttctttc

SEQ ID NO: 28822 - DNA, 444 bp, Glycine max
  Clone ID: LIB3051-108-Q1-K1-F7
acgcattcgtccactcgtactctaattccttgcaaataacattatcataacccctttccaacctttctccgcttcacatttaatcggatcagatccaccgccatggatttcatgaaggtcttcgatcaaaccgctcgagaaataaagagacaggtgaatcttaaagtgctcaagatttccgaaatcgaacaaaaagtgctggatgctactgataatgaaccttggagtcctcatggtactgtgcttgcatacatttcacaggctaccaaaaaatttactgaatgtcaaataatcatgaatgtcctttggacaatactgggtgaaactggaaaagattggcgctatgtatacaaagtaatgctttccaaaaaaccatgttatttcttaagatttttagatacatagagaagaattttttgtggcattttctatgttgatagatac

SEQ ID NO: 28823 - DNA, 335 bp, Glycine max
  Clone ID: LIB3051-108-Q1-K1-G3
tcgcccactcgtccgaaaaaacaaacaaaaagatctaataacctaagatatagaaaaatgtaagtgcgattaatcaagtcaagtcttgcaaaacgttagggtgcatgaataggaaatcgagatgttaaatgatgacgagatccatgcttgcgcatgcaacttgtgacatgcatccttcgtattagacaccttagccttcgaggattacgtgctgactattggttactgtgttgtctacctaccaaacattattcaagtggctagtaatgacacattccatccaggcctcttcttctctgacgctggaagatttcaaagtaccacacttaaaccac

SEQ ID NO: 28824 - DNA, 401 bp, Glycine max
  Clone ID: LIB3051-109-Q1-K1-A11
ctgatgcatgaaactgcaatttaaaatcccatattcatcgaaattaattctggggatgttagaaatgaaggtggagagtttgcatcaaaccaaggagaatgtagcattgttgttctctccatataagcaccacttatgaggaaagagtcaagaactgtccactccttattcttgcactgctaacaagctcaaatccggcgctgttacaatagattctgatcttggacgtaatgagaaaaatgggttgtagaagaaactctgtatacacgacaggattgatttcggccggatgtttcacggtgctaggagttcccatgactggcaacttgctgaaaatttgatttttggtgctgatccgcacacactcaatgaagccttgtgtatcacactgcattccatct

SEQ ID NO: 28825 - DNA, 368 bp, Glycine max
  Clone ID: LIB3051-109-Q1-K1-D7
aaggatgtatgcttgggttgttgctaattatgcacttgtcactcttggaggtgatcgtttggaaacaactgggattattgaacttggtggtgcttctgctcaggtgacctttgtatcaagagaagcagtgctgccttcattttcacgaactgttaaatttgggaataccacctacaacctttacagccacagctttcttcattttggcctgaatgctgctcaggactcgttgaaagaagcacttgtattgggagaatttaacttagcttctcaatctcttcaaaaagggttgcggatagatccttgtactcctacaagatactcttataatgttgaatcatggaagttcccttctagctcagagagtg

SEQ ID NO: 28826 - DNA, 355 bp, Glycine max
  Clone ID: LIB3051-109-Q1-K1-E6
atcgaatcgaatcgaatcgaaagggaagtgcaaaatggatgacatgcccgtgcccggggtcttgtgaccaagccccaagaatcaccccgcatcacccgattcggcgccgaccatgatgttgtgaaaaaagggtgcgaggctctgcataaatgcgaggacatggtcaataatctaggtttgttctcttccaacgagaccaaagaagatatcagcaccacgaatctcaaatacattctggtgccattttatctcgcggagttgacagaaaaaatagcacaggatgacaggatacagattctaaagtcttcccaagcaaaaactaaggaagttatctcattctgtgaagcaatggagc

SEQ ID NO: 28827 - DNA, 329 bp, Glycine max
  Clone ID: LIB3051-109-Q1-K1-F4
gttctttctctgtctttctctttggttttctgaaaaaaaaaaaaaacaaaaattggtgggatttgaaggtatttgaggtggggattgaattgggtacattgttggggttggaaaaatctatcaccatgaatattatgcgaaagttgaaaagcattgcttctgggaagacttccgtttcatcagatcctggaggggattgtaccacaaaaagagtaaagtttgatcaagaaaccgaaagaaaagtcaatgaagaaacatatcctaatgagagatgcggaaaagatcaggagcagtatgtagatgcattaaaagaaagtgttaattctaat

SEQ ID NO: 28828 - DNA, 379 bp, Glycine max
  Clone ID: LIB3051-110-Q1-K1-B1
acggttctagatcgcgagcggtcgtccttttttttttttttttttttttttttttttttttttggtggttttttttttttttttttttttttttttttttttttttttttttttttttttttttttttttttttatttattatattttttttaataattttttttatatttttttttattataattaaattttattataatacatgaagtaagtaaatttttataatttaaaattagcttatgtaaaaattaaaatcaactatttaaagaattcattaatatcattaaacttctataaaaaactgatgcataaaataattttatgtttatggaataacaatatttcatctaaaaaaaaaatagtgaatcaacctattta

SEQ ID NO: 28829 - DNA, 381 bp, Glycine max
  Clone ID: LIB3051-110-Q1-K1-B10
tcgcccactcgttctggacaattgaagggatattcgatagaggatatattgcgacagcaaatagaaaagggctgaagtgggggaaagcctgcaggaggactaggtaacggtggatgaatcatcgacacctgatgttgtcatataaatgaaaccactgaaagtgcaatactggattcttactgaaatgcctgatcttataaactgattttctgatttctcttgatgatcggtttctgtattttgtcaactggcttcatggggatataattgcagtataacatcgatgacttttaaaatcctaaactgactggtacaagtttggttggttgacttattcataaaggaagccctgtattatctattactgatgatggttaaaca

SEQ ID NO: 28830 - DNA, 459 bp, Glycine max
  Clone ID: LIB3051-110-Q1-K1-C10
cccacgcgttcgcccacgcgtccgcaactactgtgtcttctgcttgtcatttggtgcccggattggagtcacatttgtggtgtgggttgaagacaacaaagggtgggaatggggctttggaatctctactataaccatatttgtatctatcccagtgttcttggcaggctcaactacttataggagcaagatcccttctagaagtccacttacaaccattttgaaggtactagttgctgcttcacttaacagctgcttcaacagtagaaattctagcagtgcagtggtgaacatgacttcaagcccttccaatctaaactcaagcagaaaacaagtagggaaagaagcttccaatattgcaaacaaggaaccagaagccccaataacaaacacactcaaattcctcaataaagcagttgagaacaaccctatctattcatcaataaaatgcacagtgga

SEQ ID NO: 28831 - DNA, 347 bp, Glycine max
  Clone ID: LIB3051-110-Q1-K1-C7
accacgcgtacgcccacgcatccatctggataaccgtttactgtcctatatcttcagccagacacctatctgtctacagcgaacatggtctgcacacctattatgtcaccttgactacttatattgctctctgatgaatagacatattcaaccctacgattgtgtatcatcatttaggagaaatttatacagctctcatattaggcagatctctcttatgaatattctcgtacatcaaggatcatactacaccgccatctacaaattctcgctcatctggacatctaatcattaatttatactgcgagattgaactttatccacaccattgcaaaacattttgacat

SEQ ID NO: 28832 - DNA, 443 bp, Glycine max
  Clone ID: LIB3051-110-Q1-K1-E12
cccacgcgttcgcatacccacaaaccacagctcttctagatgactctctaaaaagcaatggaccagctgggtgaagtcttaatgtttctctaacaatgccttgcaagtaaggaaggttggcaatatctgattcttctactattctactctttccaaccactgcatccatttcttgtcttgccttctccaacacacctggattgttgattaactctgccatagcccattccatcgttacagctgaggtgtcagtcccagcaattaatatgtcctaaatattgtcattagaaacaacacatgttgatgttagtcatgtttgcataactcttttcataaactagaaaaactcagctataaatttttggttagataatattctcaaaccatataataatttatgctcacaaacacctaaagaaacaaaaaagattaaacaaaagaat

SEQ ID NO: 28833 - DNA, 280 bp, Glycine max
  Clone ID: LIB3051-110-Q1-K1-E2
aagagtcgattgtagatcatgactgaggagccatcataggatgttatcgatgcatgtaacgcactgtcttagtacaaggctatgtctgcctaatagcacctcatataccgcagagacccaaacatcttaacgttcgaacgcatgcgagctttggatcgaaaccactactatgtatgcagatttcagatacccatggaaatggaggctcaaatagctgaagtatgcactgaggatggtctcgaaaacatccctacaactcgtaatcctagcactacaattc

SEQ ID NO: 28834 - DNA, 367 bp, Glycine max
  Clone ID: LIB3051-110-Q1-K1-E9
atttgcagctggtttagctgcggaagggctcaagccattttgtgccatttattcatcatgcttgcaacgcggatatgatcaggtatgtaggtagtccatgatgttgatcttcaaaagctacctgtccgatttgctttggatagggctggtttagttggagcagatggaccaacccattgtggagcatttgatatcaacttacatggcatgcctacccaacatggtggttatggctccttctgatgaagctgaactgatgcacatggttgcgaccgcagcagctatagatgatagaccaagctgctttagatttccaaggggaaacggaatcggagccactctgccactaaataacaaaagaacccca

SEQ ID NO: 28835 - DNA, 356 bp, Glycine max
  Clone ID: LIB3051-110-Q1-K1-F6
tgtttacctgtcatgtttgtttctgttgaatgatgaacttgttaatcctcgttgatcccattacttggtaaacaggattgccattccccatacgctccattcatcaccctttctttcattctgttgcgaattggaactcacactttcagcgtgctagtccattatctcgccttctgttcccctcgcagctttatttgcggcgaaagccggaactaagagttcgcaatgctgtttattagctggcgcacacaaagcgaggtttcctaggctcgtcggtcaagttagccacgttcgctaacagcgccgtacgcgtcactgcggtgctctccacgcgacttgcatcggtgacaagatcc

SEQ ID NO: 28836 - DNA, 323 bp, Glycine max
  Clone ID: LIB3051-110-Q1-K1-F9
gtttaacactaagttgcaaggcagcggacttcgttccagggcttgatatcggcctcactgttgcggcggtgttggatttatcaaggctcggtacacaccaccagccctagaacatgcgctgatgtgtcttacctgtcctacactatatatcactcgtaagcatatgctgatcaagaacttgacatggttgtgaacgttaggcatgacctaatgacgaaatctagagagattgcattccattgtgctcatgctgccactgtcatgtacgcttaattcatgcatagtgatcggaatctgtggtgaatatggtgacagtttgggca

SEQ ID NO: 28837 - DNA, 318 bp, Glycine max
  Clone ID: LIB3051-111-Q1-K1-C11
cccacgcgtccgaaaaaaaaaaaaaattaaaaattaaaaaaaaaaaaaaaaaaaaaaagaaaaaagaaaggccggccgttttaaaggtcccagctttccttccccttccttccaacgtattactttttttttagggtaccctaatttaattcaattggccgcctttttaaaacgtctgaactggaaaaaccttggcgttcccaactttaatccctttgcagaaaatccccttttccccagttggcttattaccaaaaaggcccgacccaatggcctttccaaaaaatgtcccaccctaaatggcaaatggaacccccc

SEQ ID NO: 28838 - DNA, 297 bp, Glycine max
  Clone ID: LIB3051-111-Q1-K1-C7
atttgtgatgacctgcttaagatatacaagaacaataataatcataatttatgtttgaaagaaaaaaaaaaaaaaaaaaaaaaaaaaaaaaaaaaaaaaaaaaaaaaaaaaaaaaaaaaaaaaaaaaaaaaaaaaaaaaaaaaaaaaaaaaaaaaaaaaaaaaaaaaaaaaaaaaaaaattgaagaactaaatttcaaaatgcaattgtatattaatcaaactgaacaacaaaaaattaatacatactcaaataaatcaacattttaatgaacaatctttttagctaaaatgtatat

SEQ ID NO: 28839 - DNA, 416 bp, Glycine max
  Clone ID: LIB3051-111-Q1-K1-D8
ctcgctcatactctcaatctgagactagaccgctccaacacgcgagttgcaagtcgtcaggcgggtcgtaccgaggaatcggccgggaaatcgcgcttcacctcgactcactcagcgcgcgactagcagtgaactacaccttcaactcggcccaagccgactcactcgaggcgcatatcaacgccgcattcggcaccactacaccgatcgcacgacgggaccatgccgacgtgtgacgatccggctcatgagaagatgctcttctactcagtctaacgaccactggactgaccgatccacatactcgtcaactcagcaggcgttatcgacagaacgtatccctgcgtcagctacaccactcgtagagtcctttgaacgaactgtcgctgagaacgctcgtggcgccttcaactgcg

SEQ ID NO: 28840 - DNA, 443 bp, Glycine max
  Clone ID: LIB3051-111-Q1-K1-E6
cccacgcgtccgcccacgcgtccgcccactcgtccgatggcccgttagttagggtaagtggatattttgtcctacacatgacggcatgagaatggaactacatctaacactatgttgtttcagtcctagttgactactctgtctgtatgaatgagatgatatagtagaaaaaaaaaaaaaaaaaaaaaaataataataaaaaaaaaaaaaaaaaaaaaaaaaaataattacaaaaaataaaaaaaaaaaaaaataccaacataaatactatataaaaaaaaaaatccttcagttttaaaaaggggaccaaagggtttcgttttctgtgtttaatgcctagggggttattttttgaacctttttgaggtgtcccccatctaaatccaaaatttttgaaaaaaaattggcaaaaatgccccaaatggggtattttatataaaaag

SEQ ID NO: 28841 - DNA, 353 bp, Glycine max
  Clone ID: LIB3051-111-Q1-K1-F1
aaaaaaaaaaaaaaaaaaaaataaaaaaaaatataataaaaaaaaaaaaaaaaaaaaaaaaatgaaaggataaaaaaaaaaaaatacaaaaataaaaatactaaaactatataaaaatatactataccaatcctttaaccacacaaaaacctcttttttttgctaaaaccaattttcaaaataccacccatcatcctaaattatgcagcatgtcttataatctgaaatttcctgttcattataatttctcatgcaaatttcaaaattctgaattttgacctttctcattatcttagccctttaaattttcctaacaattttccccttaaaaatcctaattattcgcattttaa

SEQ ID NO: 28842 - DNA, 413 bp, Glycine max
  Clone ID: LIB3051-111-Q1-K1-F4
tgagaggaaagggagggcctcagaactgcaaatccctactcccactaaagggagcaaatagttaagaacaaacacatagaggagttcagttcacgatagcaagtttcattgaataaaccatgacggaacctcagaatccttcaccattgacacattctccagcgttagaaatcacacctcaaccactgctacctcccaaaaggaaacgaagcctccctggaatgccagatccagatgctgaagtgattgctttgtcaccgaagacgctgttggcgacgaaccgtttcgtgtgcgagatctgcaacaaaggcttccagcgcgaccagaacctacagcttcaccggcgtggccacaacttgccgtggaagctgaggcagcgagggagtacagagccgcggaagaaagcttacgtg

SEQ ID NO: 28843 - DNA, 218 bp, Glycine max
  Clone ID: LIB3051-111-Q1-K1-F8
ctgacgcgtgggaaaaaaaaaagatttaatttaaaaaaaataaaaaaaaaacaaagtggaaggataataaaataaaaaaaaaaaccaaaaaaattactaaataaatacacataaaactaaactaatccttacctttctataccttttacatttactccccctttattcatcacacttactcttctttatacctccctctttgtaattccatttccctt

SEQ ID NO: 28844 - DNA, 432 bp, Glycine max
  unsure (1)..(432): unsure at all n locations
  Clone ID: LIB3051-111-Q1-K1-G7
tttttgttcaaggctgctgagttgtgcatggttggtttgagtgctggtgcagtacagggtgcgttgtcaaactctttggctagtaaaaaggaggggagattatctgtgacagtcccaagtgtgagcagtaatgctcttggttatggtgcttttcttggaatttatgctaacctgagatatcaactgttatgtgggtttgatagagcaatgatgacccattttgacgtcattggagttgccttgttcttcagcacagcattcagggtcttgaacgttcaattaggagagacctctaagcgtgcctggcttggagttgaggcagatccactggctcagtcggatgacctcttgaaaagttataacaggacttctgagaatgtagaaaagtcatcctcaaaatggttatatcanagaatgcggntgtttctgggc

SEQ ID NO: 28845 - DNA, 386 bp, Glycine max
  Clone ID: LIB3051-111-Q1-K1-H11
cggacgcgtgggaaattcaagagattcccaaacttttttactttttattccctttttgtcactatacaatacaaatacacattcaacaattttcgattcaagttcaaagccatcgacgagtgttgaggaagaataacaatgggaatgatagtggattttgaaaatgaccaaaacgacgccgttctggttccgccccctaacttcgccatggttgaagactgcgttttccgatccagcttccccaccccttccaatttcccctttctccaaaccctaaaccttcgctccatcatatacctgtgccccgagccttatccggaagaaaatctcgagttcctccgctcgcagaatattcgcctctttcaatttggaattgaggggaaaac

SEQ ID NO: 28846 - DNA, 356 bp, Glycine max
  Clone ID: LIB3051-112-Q1-K1-A1
tcgcctttacagcctagtcgataatcgtaccaggatcttatgcataatcatattcaatctgagtctctggagaggctacaccgccatgactgtcatattgctgcttcttggactattatcttacactggagtactctctaccgtggcactatctgccgatgcgtcttatggacgaaatggaaacaatgtaccagcatatcaggcattgactgatctttccaaatccgtcagaataggcgacattcgtcatactatgcagacgaatgagccctctatgccctcagaggatcaatcctatctgagagcctcggtgaacctaatgaccaactactatctatcaccaacgctggagctga

SEQ ID NO: 28847 - DNA, 365 bp, Glycine max
  Clone ID: LIB3051-112-Q1-K1-A3
gcttgaagcccatgtggccagctcatatgatttggatcagcatattcaacttctgtcaccggaaccgcattccctgatggacgctctacacttgaattccccaaatgggaaacacctatgatcttggatgttgaacacttctccacccgaagatggggttctagactgggatctggatcattgactccagacagtgcatggcatggttcaagactaggttctggatccttgactcctgattgcgttgatcttgcttcgccattaggctcttgctgtgtgacacctgatcgaccgtagcaggaatccatgttaggttctagctgatttacacctgtacaagcttttctcaaccattcaaaacaaca

SEQ ID NO: 28848 - DNA, 219 bp, Glycine max
  Clone ID: LIB3051-112-Q1-K1-B6
accattcaccaaactcactcatcaattgttatcactcttctcactaactattaagtgatcgtgctgatcacaactggccaagtcatcaaattccaacctgctgattcatcggaagcacctaagccactcgtgattgaagaaaccgatgctgctccaccacaagctgatgaaatgccctatactatcctttacaccttcatttgccacactgatgattac

SEQ ID NO: 28849 - DNA, 446 bp, Glycine max
  Clone ID: LIB3051-112-Q1-K1-D10
caaaggttccggtttatataatttcttcagtggctgaagagttactagcgttgctgaacggcatacctgagtggctttgcaaacagcggcaagagaaactatttgatggggaaccattgtttgcacacctcaagctcctaaaagagagaaaaattcatgtggttcctgctattcattctcatgaactcttaattaattggcaggaaccatgcattgtattttgtcctcaccggaatttgcgtatgggtcctgttgttcatttgcttcgacgatggtgtggtgatccaaaatctttacttattcttgaggatgttttgaatccactatcacttttaccttaccagcctgttgcaatgaaggttcttcaatgtgtatttcctgttggaatagggttgcatgaagttcaacctttactaaagacattgcagccgaagactgttctgtgt

SEQ ID NO: 28850 - DNA, 434 bp, Glycine max
  unsure (1)..(434): unsure at all n locations
  Clone ID: LIB3051-112-Q1-K1-D3
tcgcacacacacagctagcagatattacatacacgtgaatcactaattaacccatggaaaaaagatcaatagctgggtggggctttctcttccttgttctctttgttgctcaagttgtggtgcaaactgaggcaaagacttgcgagaacctggctgatacatacaggggtccatgcttcaccactggcagctgcgatgatcactgcaagaacaaagagcacttgctcagangcagatgcagggacgattttcgctgntggtgcaccaaaaactggtaaatggatccattcacttcaacgtgaagaagatgcatgcagcgctattttataaaanattaaactactatatactatatataataagactggcgctgcatcaatgacctatgtattatagtatatattattaccgatgtcagaactatagatgcatgt

SEQ ID NO: 28851 - DNA, 431 bp, Glycine max
  Clone ID: LIB3051-112-Q1-K1-D7
ctccaatggaaaactccaaagatttagacgctctctattactcttagacgtcatgttctgcctcagatactttctttcacactacccttggccttgatatacaaaaagacatgtataagaaccggttgcaagaattggctcaaagaagatggtttaatttgccagcctactcatgcattcgcgaagggccagatcatgctcctcggtttaaagcaactgtcaattttaatggagagacctttgaaagccctacattctgctctactcttagacaggcagaacatgcagcaactgaagtggctcttaacactattgcaaaaagaggtccctctggagctttggcagcaagagttctggatgaaacaggagtatacaagaatttgctccaggaaactgctcatagagctggactgaatcttcctgtgtataca

SEQ ID NO: 28852 - DNA, 182 bp, Glycine max
  Clone ID: LIB3051-112-Q1-K1-D8
attccctgctctacccactcttcctaaaaaaaataaaataaaaaaaaaaataaaattaaaaaaatatatataaataaaaaagaaaaagaatataaataaaaataaaaaaaaataacactaactattaatcacaatattaaataaaacatctttcaaaaatttaatacaaaaaataatctcaa

SEQ ID NO: 28853 - DNA, 446 bp, Glycine max
  Clone ID: LIB3051-112-Q1-K1-E2
aaaggggttttaactgcgccctttatgctgctcaaaacaaatcgactaggggttatcctggcctgtgctgtttacaagagagatctcccatcaaatacaaccccaaatgaaaggattcaagcaactgacgggtgtgcctagtttttgaatttttttgcatctgacattcattagcttttttggtcaatttttatgatttcttatcattcatataatttagcttattccattttggtcatctaaagctttgaagtactactaagtaactaatcactgtattcaaattttcagagaagattcatgaaatctattaatgtgagaagagtgaataattattggctctccccttgtgataattagaagctttgaagttataaatctacttttaaattcaataaagccaatgggaaataaaaaaaattgtcaaagactattggaaggtgttg

SEQ ID NO: 28854 - DNA, 297 bp, Glycine max
  Clone ID: LIB3051-112-Q1-K1-E4
cacaaaccctagaagccaacgtttttcagggtgagtctctccttcgcgtgctaatccatagagtcgcttgttaatttctcaggttgttagagcacgatggttcagtataattttaagaagatcactgtggtgccaaatgggaaggatgtcgtcgacatcatcctctctcgcacccagcgtcagacaccaaccgttgtgcacaaaagatatgctatttcacggcttcgccaattctacatgcgcaaagtgaagtatactcagcagaattttcatgacaagctcttcacaattatcgac

SEQ ID NO: 28855 - DNA, 462 bp, Glycine max
  Clone ID: LIB3051-112-Q1-K1-E5
cttttctcttcaatctcaggtctcccagtcacactttcactgtcaaaccaacatgaatctgttactcgccgctgtaactctcctcgtcttttatgcggcgaaatttttttactcaaatttctgggtcccatggagaacagagcggcacttcaagaggcaagggatagggggccctggctaccgtccgatcttcggaaatacatcagagatccgacggctctacgcagaagccaagtcagaggcaagtgcatcccctcctccgttccaccacgacatcatgggacgcgtggctccattctacgaccggtggtctcgcgcgtatgggaaaactttcttgtactggttcggttcgacgccgcggttggcggtaaccgaaccggacatgattaaggaggtgctcatgaacacgcgcggggagtatgtgaaagttccgttcaaccctcagtccaagttgctctttgg

SEQ ID NO: 28856 - DNA, 251 bp, Glycine max
  Clone ID: LIB3051-112-Q1-K1-H3
taacgacctagtgctctctctatgcgactttatatattccgtattgcacacactgaaacaagttctggtccttaatctaagtagatatcattatgctaaatcactattaaaccatatccatcatcgtcagctttcattaaacacatatctcaaattgattatacatacacattttcttgttgcatacttatccactcaccattaatatgtgcattatacaatatacaattccttaactgtcaataaaatga

SEQ ID NO: 28857 - DNA, 341 bp, Glycine max
  Clone ID: LIB3051-113-Q1-K1-A9
gccagatcctagatggctagacgtacatcttattcattgatcgccagatcatgataggggtaaagagcttcgggaaaacttggaccggtgagaccatcaccctcgatgtggagatctccgacaccatagataacgtgaacgctagaatgctagacccggaaaggataccaccttgccggcacagagtcatctttgcaggtaaacatctcgaggatctgttaacggttgccgactacaacagataagaggagaccagtctgcaactggagcttcgccgcacgagttggatgcaaatgtttgtcaagactttaactggcaagaccatcagcctcgaggacgaa

SEQ ID NO: 28858 - DNA, 292 bp, Glycine max
  Clone ID: LIB3051-113-Q1-K1-C2
attgtaaattaaaaaatttgaaatacattttaattgtcaaaaaaaaaaaaaaaagaaaaagtaaaaattaaaaaaatataaaaaaaaaaaaaaaaaaataaaaaaaaaaaataaaaaaaaaaaaaaaaaaaaaaaaaaaaaaaaaaaaaaatgtgaccccctataaaatgaatcaatcataatttccccttatcattaaactctaaaattattaaatagtgacacttaaataaaattcactgaccgatttttaaaaaacatcaaactgaaaaacatttgattatacactata

SEQ ID NO: 28859 - DNA, 303 bp, Glycine max
  Clone ID: LIB3051-113-Q1-K1-D1
gcgataaaccctttagagcctgagggttaagaaaagttcatatcctacatgggctaaaggggtccctgtggctgttcaacattagtgcgacgcacgtatggcctcaaaggctttgcttctggacctgaaattgctaggggtatgctgctgagtccataccatgccgggctactacaaatgcttgacattactccatcagctgagacgtataatggggataaaatggaattggctgatgctgcattgcctcttcttaaaggagttgatgctacaacacgatgtggctgaagcatgcactggggt

SEQ ID NO: 28860 - DNA, 434 bp, Glycine max
  Clone ID: LIB3051-113-Q1-K1-D10
gccatgtattcttcattgtacttggtacataagagtggctattctgttatggactctgggggataccaattcacatgcatttgacttgatatttcatcttgttgaattggtgtactataacacggcattgaccttggtttgtatattttgcagaagtctcagataaagcttctcacaaagcattttctttggaagacaagcagaaacttgataggcagttgcatgatatggctttagccattgagaggttggaaagcagtaggcagaaacttctaatggagattgactcacaatctactgaaatagagaggctttttgaggaaaattctaatctctcaaattcgtaccaagaggcagttggggcagcagcaagatgggaaaaccaggtaacaatcagcatcaggggtttggccataaatataatttatggttac

SEQ ID NO: 28861 - DNA, 356 bp, Glycine max
  Clone ID: LIB3051-113-Q1-K1-E1
caaaatgactcaagcccagattcaaccagttaaacttggaacccaaggctttgaggtactgttaactacattacttgctcttattttgataattgatacaattaatctcattctaggtttcaaaattgggattcggatgtatgggccttactggagcgtacaatgaccctctccaagaacaggatggcatatctgttatcaagtatgcgttcagtaagggaatcacattttttgatactgcggatgtttatggaaccaatggctatgaaactttggttggaaagggtttgaaaccacttgccaaaggaaaggatcagattggcaccaaatttggtattgcttcacgagggttttct

SEQ ID NO: 28862 - DNA, 221 bp, Glycine max
  Clone ID: LIB3051-113-Q1-K1-F3
acgcaaaattcaaggcgtaattgaagctggagtttgtagccggcgaggtgaccttgggatgcgcccttccaattcagtgcttattcctgctcttcagactgatggaaatattgatactggagatgaatatcatacacaggtcatgattgaccatcaagctctcacacgtacatagaatatgttgactaatgcttatcttatgagcatattctatcgaacca

SEQ ID NO: 28863 - DNA, 289 bp, Glycine max
  Clone ID: LIB3051-113-Q1-K1-G2
gcttcaggtaaatatcatatgcgggaaatgtacgaatggacactgtaaaggtcgggctggatgcatatgtaatgtcacaaatgaatcaaactgctgagttttaatagatcttgcaattccatgtgataaaccgttccctgcactatttcaaggcttcactggtggcattcattcaagatcatgggatctagtatataatggcatgacccaaattggttttgagaaaccccaccatgagtctagctttcatacagggcaaactcaagtagttctgggtatcactgaattt

SEQ ID NO: 28864 - DNA, 391 bp, Glycine max
  unsure (1)..(391): unsure at all n locations
  Clone ID: LIB3051-113-Q1-K1-H4
tcggcggttttgcgttcttcatattctacctttcgccaggtcaagaacccccaaaaccctaggagaaacgctggcggcaccggttctcgattctcggtggtgggaaaccgcccgtctctggtcccgaaatcgaatatctgctattttttttcttctctcgctctgatttcgattggcagttctaggggttctgtggttctgatttgggggtttcggaaatgggaagcagaaaggaagaagagaggaacgaganaattattagaggtctcatgaagcttncgncgaatcgaagatgtataaactgcaacagcctgggaccacaatatgtatgtacgagtttttggactttcatttgtatgacatgcagtggaatacatcgtgagtttactca

SEQ ID NO: 28865 - DNA, 131 bp, Glycine max
  Clone ID: LIB3051-114-Q1-K1-B7
aaaaaaaaaaaaaaaaaaaaaaaaataaaattaaaaaaaaaaaaaaaaaaaaaaaaagaaagaaaaaaaaaaaaaaaaaaaaaaaaaaaaaaaaaaaaaaaaaaaaaaaaaaaaaaaaaaaaaaaaagaaa

SEQ ID NO: 28866 - DNA, 216 bp, Glycine max
  Clone ID: LIB3051-114-Q1-K1-D10
taaaaaaaaaaaaaaaaaaaataaaaaataaaaaaaaaaaaaaaaaaaataaagaaaaagtaaaaataaaaaaaaaaaaaaaacaaaaaaaaaaaaaaaaaaaaaaaaaaaaaaaaaataaaaaaaaaaaaacaaaaaaaaaatccaaacctaaaatctaaaaaacaaacccaaataaaaatactaacccaaacataaaaaacccaaaaacaccaa

SEQ ID NO: 28867 - DNA, 408 bp, Glycine max
  Clone ID: LIB3051-114-Q1-K1-H7
aaaaaaataaaaaagtgctggaaccttttttcatcaaatagttcatatttgattcctgagggagtcttgttaaggaatttagagagcagagaggaagagatttgtattgaggaattcaacccaactaaaaacagtttacaactctgtttatatgacagttacataactgtaactgtcaactaacctgagtgagttagtgacatctgtaacatagctgtcctaactaactactgaccatagttagacttactgacttagctaaacttcggtattctgcttcagtactggacctagccactactgattgctttttggaccaccaagagaccaaattgggtcctaagaaaattgctgcacctaaagtggaccttctatcatcaagatctgatgcccagtcagcatcacaat

SEQ ID NO: 28868 - DNA, 285 bp, Glycine max
  Clone ID: LIB3051-114-Q1-K1-H8
cccacgcgtcccgatcgctctctctctaggatctgctgccttttcttctctttctcaattctcattcatagaggcgaattcatttcttcgatctggaccctctatttcttcctcatcacatcacgcgacaacatgttgctctttgactggttctatggcaatctcgctttcctcgatctcatgtcacatagaagcctaaattcttttcctaggtctcgatcttaacggccaaaccacccctctttacatgctcaatgactagagatttgatcatcaccatccgac

SEQ ID NO: 28869 - DNA, 363 bp, Glycine max
  Clone ID: LIB3051-115-Q1-K1-A7
cttcacctgccccaccacgatgcaggagctctgggatgattccgtcactccaaacacgaccctttacaggctcatacacatgtggttctcgcagaagtacttgctcatgaagaagaggtcagaggatgttcaaggaagggcttctgaacttcttgagacactgaagaaggtgaagagtcaggctcgggttcaggccctcaaggagcttcaccaattagtggcttcccatgccactgcacgcaagactgtcattgatgaaggtggagtttctggtgtatcttctttgcttggtccttttacttcccatgctgttggctctgacgttattggtattcttgtgactttgacacttgattcggaatc

SEQ ID NO: 28870 - DNA, 389 bp, Glycine max
  Clone ID: LIB3051-115-Q1-K1-B10
gccactcgtccgatgttacgggtgcgacgttagtgacaattctaacggcgcttgagggctccataattgcggaagcgtttaatggtcgaacgtgcacgataatgcgctgagcattctatacatacagggctaggctgagccagcaaccatatcggtgctaaattatggtaagcagcatgcgccccacgatgtaacgattacgctgatgggtaccagaagcacaacgagtataaacttgatccaaacgacctgtattgcactgattcgagtctaggatggcctgtgcatactgcagcgctcgtggaactagaggaacggaccatggacatgctaaaaactggtccatacggttagatatatcgaatttgcaacattatattcggtcagag

SEQ ID NO: 28871 - DNA, 547 bp, Glycine max
  unsure (1)..(547): unsure at all n locations
  Clone ID: LIB3051-115-Q1-K1-D2
aattcccgggtgcgacgccacgtcgtctcgctgtgctttcttgtctcttctcgctttcttcaagtgtctgcttcctgctgttttccttttctttcttctcatagatgnggggtggcatcagtccctctaagaagatccaaaaacgtagaactgtcgatcatggaacgtgattctcaatagtaggatnagtgtttgagcagtctgaaatgcttcaagtagcagtgtctttatacatcagtaggaagggggtgcatatcggctttcaaaagtgctttggtaccataacataaattggaagtagaaataaagaatagcatagtttttagaaagttcttgggttttatgtnggaaaccccttgtcttgnggttaatggaaagctgctgctataatggcgcattgtctttggcaaaatggaggaaggaaggggccaccagattggcaggaactttgtncggaattatncgcgctgcttagtgatcatacttcacaattagnttntattgagggaaaaccaatgnctggcaatgcnntgctgctgctcttatg

SEQ ID NO: 28872 - DNA, 433 bp, Glycine max
  Clone ID: LIB3051-115-Q1-K1-E7
gcgcgccttttactttgaacttgagagttggtagtggagggagcagagaacccgaacgccatgtttggctccgctcaaccttcttcttctcccttcggcacccctgcattcggtaccccttcttctacccctgccttcggttcttccctcttttccacacccttctcttctcaacaaccacaaccacaacaacagcagcaacaacaaacacctctgtttcaacagcaacaacaacaacaaacttcttctgctttcggctttcagaattcactcgcattcgcagcaccgcaatcctcgcccttcccaaatgctcaattaaccactcagatggctaacgttgcacctgttcctttctccctcgccgatcgcgatgttcagactattgttgatgcatataaggatgatcctgggaaccccaagtacgcctttaagc

SEQ ID NO: 28873 - DNA, 376 bp, Glycine max
  Clone ID: LIB3051-115-Q1-K1-F2
tcgctcaggcgtcctatatgttgtcctcgagctcgtttactaggacatatgatgtgacaggtgaggaggtccgtccggattcatggccaattacattcaggatgacgctcactattgcacttgctgaataggggttcgaatatgagtacttggaggacgacttgacgatcatgagacctatgatcttacatatgaacacgattcacaagatgattcccgatgtcatacacattggcgaatccattatcgaagccctcatcgttgatgaggacattgatgacgtttgtaatgacaggacttcatagccgtattaagacgcttacgatagagcttaggctggatactgggccgattatgttcacgttcttggacatga

SEQ ID NO: 28874 - DNA, 434 bp, Glycine max
  Clone ID: LIB3051-115-Q1-K1-H3
ggagccaacattttttgtgctaagtgctgaccacgccagaatttcattatttgcattagcttccgattctgctcaaagtgtaacacgaccaattatcgtggtaaccagctatactgataaagggtgcaattttttgaaaattattcccatgattcatatccatcaacgaccactcttgtgtgcccacttacaaagcttctcctatcgctataggtagcggctcctcacttgcagataggggctcaaggcagttgggtcgacccaattcagagaatgctggagggcaggacgccaataatctgatggtcaagcttgatctcttaggtgattctggtgccggtaaaagctgtatcgttctacgatgtgttcgcggtcaatgtgatccaacatctaatgtaactgttggagcttcttttttgtcgcaaacaatatct

SEQ ID NO: 28875 - DNA, 424 bp, Glycine max
  Clone ID: LIB3051-116-Q1-K1-A4
gttatatttcgctctagggaacatgaaaactgtggtccacagccagggtgtgttcgggcacatattgaaagtggaggatttaatatttcccccttaaaacctcgaaatgggaggcccaggacccaagtccagcatcttatgcagattgatctgaagggatggggtgtgggttacttgtcatcttttcagcagtattgtgtccgccaaatgttaaatagtgtagctggtttacgtgaatggtttgcccaatcagatgaaagacatgctcattcaagaattcctgtcatggttaatatgtgctcaacagctgtttcttcaaagaagaatcagaagccaaatgatgtttctgtcaatcctacttctctcgatcaaatgaatgctgcaagcaagaagttctgccttgatagatgaatattctgatgat

SEQ ID NO: 28876 - DNA, 425 bp, Glycine max
  unsure (1)..(425): unsure at all n locations
  Clone ID: LIB3051-116-Q1-K1-B5
cccacgcgtccggctgatgcatatatgcagttgcttgaaatgtatttggatccacaagatgataaggatcccatgtttactgctgctgttcgccttctgcataatcatggagaatcattagatccattgcaagttttagagaaactgtctccagatatgccacttcaacttgcttctgacactttactaagaatgttcagggccagagttcatcatcatcgtcaaggacagattgtgcataatttatctcgtgccgtagacattgatgcaagattgtcaagattggaggagaggtcaaggaatgtacaaattaatgatgagagcctctgtgactcctgtgatgcacgtcttggtacgaagctatttgcaatgtatcctgatgacactngtgtnatgtacaagtgttaccgncgtcaaagtgagtc

SEQ ID NO: 28877 - DNA, 396 bp, Glycine max
  Clone ID: LIB3051-116-Q1-K1-B7
cctgcgcatgcaaccgggcagtccacgggccatgtcaccgaaggagtggagggctcacatgccatgggaaccaacagaaggcctggtgggaccgatacagctcatcatacccgtgcgggtggaaagccgaatgattatgggtatcggactgggggtacttaattaatgatgactatatcatcaaggcttataggcaatagggtaataataaggcttattaaatgtagtcagtttggggaatggctatcgtacttgttagacaggatatcatggttggtcatgattttctctccactcgatatggagagacttgagtgtggatatgacagtgtactcactacgtggaaacgttatatgtggttaacttgtacgtgtatcatttagtgatgattatta

SEQ ID NO: 28878 - DNA, 391 bp, Glycine max
  Clone ID: LIB3051-116-Q1-K1-C5
gcgacgcgtgaccgtccacgactgttcgtataatacgactcattcaaagttaggagcttcagtccttatgccggatcacggcatggggcgacgagacctcaaccttcgacgtaatccgaagcctgtacgctttacgatcagcgtctgtgcagcgcgggtgcaacaaccaccactgttatacaggatagtccgacggctgaaacacagcagcaaagtcatactgcttctaaaaccatcggctgatgcaaatgctgatgacttgcgagctggagctcaggagactgcgcatataagaagtcagcagtcgactgcaaggaaaagcctgacaaccgaccacggcttgcgccccgagcacaactacaacaggatactcttagacgccatcaatgag

SEQ ID NO: 28879 - DNA, 405 bp, Glycine max
  Clone ID: LIB3051-116-Q1-K1-E2
ccagaatttgcatcaggggcagcagttgctgatgcagctggtacaagagataatgcatttgaagagaatgagtctgagagggaaccgagcaagtccatttcaacgctgttagtggtggctggggcggcaggagcagctgatgaaggaccacgtgggtcaaaaaagtcatcagtcgtctcagtttcctgggctccagatgcagcagtagttgcttcggttggattattgtttacaggaaaagatcccgtaagagcagagatttgactaggattatcatttacatgaggagaggagtctctaggagcagatggtgctgaagtttccgcatctctttcactgtgtacagggctgcgagattcaccaacagcttcttcatagctaggaggagcacccatattttgctca

SEQ ID NO: 28880 - DNA, 434 bp, Glycine max
  unsure (1)..(434): unsure at all n locations
  Clone ID: LIB3051-116-Q1-K1-G9
aatgtattaaaaaatatattattaaccatattacactcataaatcaaatataacctttatctatctttctttgttgattgatctctacctttaattgatttagaggatttgtttcaatgctaaattattgttacacaacgtatgcagggtgccaacatcaatttgagggtacaaatgttaaatcacctattcatgtactccacaattgctatcaaacttggaggttttgtcaaagctaaacagtacctcaacaaagtgttgtactacgttaatataggaagcaatgattacataaacaattactttcttncnncagtttacctaacaagccgcatctatccccctgatcaatatgccaacattcttattgcccagctatctcagtatatgcaggtatnttataattttctatattggtttcactttgtgtcaca

SEQ ID NO: 28881 - DNA, 409 bp, Glycine max
  Clone ID: LIB3051-116-Q1-K1-H12
ggctctctgggtgtagccttcaaaggatgtccttcagggacaaatatcctgtggtaatgttcatatgcagtattgttgtgcttgaggcgctttgcaagtgccttaaggaaatccttcatcagcacacaaccaaatgcaggtccatttgcgatcaccacccgatcaggctgcacaatgatcgcctttgagggttaatgttcttttccaacatatacagaagatgctgtctggtgaaactgctgtaattgctgagacaggggattcctggtttaactgccaaaagctgaaattgccaaagggatgtgggtatgagttccaaatgcaatatggttcaattggatggtctgttggtgctactcttggttatgctcaggctgttcctgagaagcgagtgattgcctgcattggt

SEQ ID NO: 28882 - DNA, 446 bp, Glycine max
  Clone ID: LIB3051-116-Q1-K1-H8
cccacgcgtccggcgagttgcttagtttcaagaagtcatgcgagatccacatgtagctgcagatggttttacttatgaagctgaggctatacgaggatggcttgacggtggtcatgacaattcaccaatgactaatagtaagctggcacatcacaatcttgttcccaaccgcgctcttcgctctgcaatccaggactggcttcaaaaccactgatcaagctcattatttttctctgcccatttttattgaactgtgtatctactgtttataccatgtataggaaagaaaagtgtcatttcattttgttaccttatatcagttttatttcttggggttcttcaatcacattttatacctatcctcttgtataggttagataaccacgggattatcttacaatagttgtaaagtacatatatatcatagcatatatgtcagaagtcaa

SEQ ID NO: 28883 - DNA, 348 bp, Glycine max
  Clone ID: LIB3051-117-Q1-K1-A11
aaaaaaatgaaaaatatgatcaataactgataactctcacagctgctccctatggttgaaaaaaaaagaagatgttatactaataaaaacggaagaaaaaactttgtcaattggttgctcatggggatccctggattgagcaatcagaataatgggcagcaaagattatgcataactgagcccatttcattggctggaccaactgaggatgatgtgatcaagacgcgtgaacttgagaagtacttgcaaggtgttggattgtacgagagtcacgaggaggctctgggaagggaggaagtgcttggcaggctggaccaggttgaatttgattgtgtttaatgcaatttc

SEQ ID NO: 28884 - DNA, 434 bp, Glycine max
  unsure (1)..(434): unsure at all n locations
  Clone ID: LIB3051-117-Q1-K1-A12
atcatacaaaattatattcttattaaccctatgcacttagagtgcataagctgaggaccctttaaggcgattctgctacgaaaacaccatgattggcagtggaagaaaattatcagccaatattgataaaatattgactgaaatagcactcaaaacttcctacactggttttgatgccaccacatatggcatagaccaagactaagtgtacgcactcgctcaatgtanggcagatgttagcacccaggattgctccaattgcatccaagatgcaacgaaacaaatccgtcaacgctattcaaaccaagtggatggcagaatttggtatgattactgctttgtaaggtatagtaacaagagtttctttggtgaggttgatacatcttttggtatattctatttcaatgttgaaaatgtgactgaccctgaagatt

SEQ ID NO: 28885 - DNA, 296 bp, Glycine max
  Clone ID: LIB3051-117-Q1-K1-A2
acgtccacgcgttcgtccactcgttctttttcgtttcgtttcaatggggagcgaatagcataagggcgaattctacctgcgggactacgtccgtcacaaaggcaagtttggtcactagttcctggagttcgagttccttccatacagtaagctccgctactccatcaacttcaactacaaaaactacaccatcattcgcaaggaggtttacctaatccccgccgttcttctcgagtgccgtcgcatcattacctacagcgagattattaatgaagatgataacaactgttccgaac

SEQ ID NO: 28886 - DNA, 354 bp, Glycine max
  Clone ID: LIB3051-117-Q1-K1-A7
cccacgcgttcgctcactctttctgctgcattacgctttaatggggcatcattggggtaagggctaatagcaccagtgggacgacgcttgaacactacgttttgcatgctgacatcaaccagctgttcaagctcatgataaacagcttgttcagctacaccgagattttcttgtgtgaaactatcaccaacgtttctgaggctttgaataaattcgatttgagagtttaaccgccaagagcatgttcgatgctaagacatagctattgattcgtattgtgccttacaaggacaacaagactctttgcggtattgacatcggcattgtaatgaccaaagcagattttgtgaacaa

SEQ ID NO: 28887 - DNA, 431 bp, Glycine max
  Clone ID: LIB3051-117-Q1-K1-B10
taagtcatcaatttttttattatgagaaaagagaactataaatagttatccaattatatgtgtatagacaagattaaaagttaattagtgatattatatgattatttaaaaagttatctgtatttttctgttgatggttcaaatataatctaatgatcttatttgtatttctcactttcttacaataagaagtattgttatttaatgggtttcacatgcgagttatatataatgactatacattatttttagatagtagattggtttgtgaagatttggccaaaatttaagaccataggaccaaatgtgccatctttcttcttagataagcaatgcgaagatgaccaagattatggggttacacaattcaagagtgaagaatgcgtggaatggctagatgataagccaaaagggtctgttgtttatgtatc

SEQ ID NO: 28888 - DNA, 388 bp, Glycine max
  Clone ID: LIB3051-117-Q1-K1-B3
cccacgcgtccgagatggggcagtgatcccctttcttatggttcctactctcatgttagcgttaagtcatctggtgccgattatgatatactcgctgaaaacgtggggaatagattgttctttgctggtgaggccacgagtaggcaatacccagctactatgcatggtgctttcttgagtggcttaagggaagcatcacacatttaccgatcagctcggattcaaaacaatcctaggaagtgcatgcctaagaatatcgtaagcaatgacatcctgggtgatttattcaagtggcctgatttggaatttgggaagtttgctttcattttttatccgtcttcagaaaatctgcagtcaacggggcttctgcaagtcactattggtgatg

SEQ ID NO: 28889 - DNA, 389 bp, Glycine max
  Clone ID: LIB3051-117-Q1-K1-C8
cccacacgtccgctcacgcgtacagtcattatctactcctgcacagtctttgaagaggttgccacagcagaatcacttcgttgccctctccttgtccaatctcatgatgtcaatgtcattcatcccgtcttatctgaggtggctgttatgtgcggatggcttggcgttaattgcatatgtgtactactatctcatatgatggtacaggcctactattttgcacttcactccagatatgattagctgttagggtccagacgaactatgggtgctagacttactggtatgcaggttggagatcttgtatcttatgcaggtcatcctttggactcatatgctgaagagctgatacttactcctactaaaggattccctgttccttagtcaat

SEQ ID NO: 28890 - DNA, 428 bp, Glycine max
  Clone ID: LIB3051-117-Q1-K1-C9
cggttctcggaatttcccggcgtcgactccacgtcgtctcgctagatactatgctacattagaatagtagtaatcggtgcataaggcggactatctgtgacgatgagcatctccctagccgctatgtgtctcctaagaaagtgttctatgggcgtggaccaatgtaactatgattgtactttaactacagaccagcagggccgatcatggaatttgatggattgaacgcttcatagacagcggtcaatgaccctgttgtgtccttaaagacaggcttgtcgtactggatggcacatgtgcggcctgctatcaatccaggttctggttcaaccattatagctatcaatgggacacttgaatgtgattgtgcttacactactactgttcaagctcgacgaaattactacacgcagtgttgctcacaactt

SEQ ID NO: 28891 - DNA, 421 bp, Glycine max
  Clone ID: LIB3051-117-Q1-K1-D1
cccacgcgtccgcccacgcgtccgctcactcactaactcaccctctgcttgtgctcgtctagcgctgtcgtcgactcactcaccattttcgtgctcacttataacagtgcccatgccctctcgaggaaaatatatttgagtggcaatttgcgattagagggcctcgtgataccgaatttgagggtggtatttatcatggacggattcagttgcctttagagtatttattcaaacccccttcattcaaggtgcagaatggtatcccttgatctgaaatggagttcaggccaatgcatggttatggggaaggtagagtcaagtactaaagctaaaggggaagatatgccttccttgtgcgctagttcgacctatgagggcaaagagtaaatattggtgctatgggaccagccatagatcatgc

SEQ ID NO: 28892 - DNA, 419 bp, Glycine max
  Clone ID: LIB3051-117-Q1-K1-D12
gacgtgaggaactatagggttcccctttgtgtgctcaatgggcacgggtatgctgttaggaaggtgaaattctcgccacacgtgcggaatttgatggtgtcttgctcctatgatatgacggtgtgtgtttgggatttcatggtggaggatgctctggtgagtaggtatgatcaccacacggagttcgcggtcggggtggatatgagcgtgcttgttgagggcctcatggctagcactggttgggatgaacttgtttatgtgtggcagcatgggactgaccccagggcaccttgaaggtgaaaggtctaccacagcgaaatctgtggcattccaagttcgagctgagaaatttgcaaataggaagaggaaaaatcagtatacgggaatccgtcaacgcccttggggaaaatgggcagctg

SEQ ID NO: 28893 - DNA, 412 bp, Glycine max
  unsure (1)..(412): unsure at all n locations
  Clone ID: LIB3051-117-Q1-K1-D4
cccacgcgtccgcccacgcgtccgcccacgcttccgggaaaaatcaatgtgccaacatgggtgattgagaaagagtaagagagagagagagagaaagagaaaacgtattatatttatgacctcaagacatcaccacaagaaacagcagcagcaactgcagtggcagcaaanaacatagtaatagtaatagtagaggaagagagacacaagagacccaccaaggaaattttgctcaaaaccagaacttgctaccaaagttaacatcttttgatgattccaagtgactttgagcttcaaagtccatagtggggtgtggtgaattttttgaattttgaagagaagaagtgtgtgtgtgtgtgtgtgtgtgagagagagagagagagagagatgagaagagtgagagtggggggta

SEQ ID NO: 28894 - DNA, 371 bp, Glycine max
  Clone ID: LIB3051-117-Q1-K1-D7
tccacgcgtccggagcattcagcattgagcatagtatggatatatcaaatcctgcagcctgagtcaatgcggaactgttgcacttctatgttggaagaatggtaaggatcgtggtgcaagttgtgcgatctgatggtggagttgtcatttgaaaatcaacagatgagaaacaactagtttgtaaaagatcacgctcacctgctgctcctcttacaacttatgatgaagtttatggtcttgttaacagtgataagtcaattggtgctgagatatggaccaattttggtgatgccatccatatggatagctacaataagctttgtcagctcgcacatggagaatttaaacacttgatcctgtgaggtctaaca

SEQ ID NO: 28895 - DNA, 350 bp, Glycine max
  Clone ID: LIB3051-117-Q1-K1-D9
aaaaaaaaaaaaaaaaaaaaaaaaaaattaaaaaaaaaaaaaaaaaaaaaaaaagaaaaggaaaaaaaaaaaaaaaaaaataaaaaaaaaaaaaaaaaaaaaaaaaaaaaaaaaaaagaaaaaaaataaaaaaaatggggctgccgttttaggggttcaaagttttctttcccgtgattgcaaggtcaaagctttttttttggggcccttaaattaattaaattggccgtgtttttaaaacgtttagattggaaaacccttgggtttcccaaatttaaatgcttaggataaaatccccttttgtccgcttggggaattgccaaaaaggcccgcaccaatcgcctttccaa

SEQ ID NO: 28896 - DNA, 269 bp, Glycine max
  Clone ID: LIB3051-117-Q1-K1-E5
aaaaaaaaaaaaaaaaaaaaaaaaaaaaaaataaaaagacaaaaaaatctaaaaaaatggaaggtgtcatactcgtgcatgcggacgtcatacctattctttcaagcaacctgcttttcaattcactgaccctacttctattaccttgactctcattaaacactgacttccctctatttactcgtcttgaaccaaattcaccttgctccaattctgctcatacctattaagcccgcatcgctcgaccttactaacacctactcgacctt

SEQ ID NO: 28897 - DNA, 362 bp, Glycine max
  Clone ID: LIB3051-117-Q1-K1-G4
gacagagctactaatgaatccacaggccatggaaaaagcacaaaaggaagtacgaagcatgttgggagaaagacgagttgtcgcagagagtgatctgcatcaattggagtacatgagagctgttatcaaagagatatttcggttgcatcctcaagttccagtattagtcccaagagaatccatggaagatgttgtgatagaggggtacagaattccagctaaaacaagattttttgtcaatgcttgggcaataggtagggacccagaaagttgggaggatcctaatgcatttaagccagagaggtttttagggagtgatattgactacagagggcaagattttgagctaataccatttggag

SEQ ID NO: 28898 - DNA, 372 bp, Glycine max
  Clone ID: LIB3051-117-Q1-K1-G5
aaaaaaaaaaaaaaaaaaaaaaaaattaaaaataaaaaaaaaaaaaaaaaaaaaaaaaaaaaagaaaaaaaaaaaaaaaagagaaaaaaaaaaaaaaaaaaaaaaaaaaaaaaaaaaaaaaaaaaaaaaaaaaaaaaaaaaaaaaaaaggcccccctttttaaaaattcaaattttacttccctttttttctaacttaaaatttttttttttgggcccctaaatttaattcatttgccccctttttaaaaactattaacttgaaaaacccttggttttcccaatttaattccttttcaaaaaaaaccctttttcccaaattggctataaaccaaaaagccccatcccattcccttttccaaaaattttccaa

SEQ ID NO: 28899 - DNA, 434 bp, Glycine max
  Clone ID: LIB3051-117-Q1-K1-H10
ggtttggattatgccatgatgactggaggagatgttgcacctctgggcgcacaggctgttaccaaaattcatgatatatttgattggtccaagaaatcaagaaaaggcctattgctttttattgatgaggcagatgctttcctttgcgagtaagttctggagcgtttaaaatacattttgaagactgcttctataaaatataactatttaaattactactacgtagcagggtagccaaaattttgtttttgtagtttatctaacatgtgagaaatgtaactgttgtattacaagttaagacagtctacgtataacatctttatacttttacacaaatcctaacggtttatatttgatttatattgtgtttttaataaattttgatatttagaatcacgaagtgtctttaacttcacatattcggagattaaata

SEQ ID NO: 28900 - DNA, 390 bp, Glycine max
  unsure (1)..(390): unsure at all n locations
  Clone ID: LIB3051-001-Q1-E1-A3
gcgtcagcccaaacgtccggcaaaacgaaacacccgtcaccctctcatctcagagcttccatatagaaaccctaaacctaccgaaccctttcaccgcttgttctctgctctttgtcgttcttgtgtgattcgcaatataagggtttggcatggcgagaagacacagcagcagcagcagcgagtcaagtgacgatgacgtgagaaaacgccgtggtagtgaatctgacgatggggagagggataagtatcgacactgtggtgggagtactaagaagagttccggtcacttcagtcacacggcgaacggtgatgacagtgattcgggagaagaaacaaatggtgctaaaacggatgggaagagtaagagtanggagagaaaggaggagcctg

SEQ ID NO: 28901 - DNA, 376 bp, Glycine max
  unsure (1)..(376): unsure at all n locations
  Clone ID: LIB3051-001-Q1-E1-A9
gcgtcaggaagaatttgatggagtaaaaaaaagcagaaatgagcagcgattccctgtctctggggaacctgtttgtcttatatgtggaagatatggcgaatatatatgcaacgagacagatgatgatgtctgtagcatggaatgcaaaagtgaacttctggaaattcgtaaactcaatgagggatcctcncacaaccaagttagagatatctcctcatctggaattagtgctgctgtaccagttccagtttttggtgatgatacctgngattataatcaacatcactggtccaaaaagacatgtagtctttctacttatgaatgttaggaatgtcaaagacctggccacctatctgaagattgtatggtcactgat

SEQ ID NO: 28902 - DNA, 400 bp, Glycine max
  unsure (1)..(400): unsure at all n locations
  Clone ID: LIB3051-001-Q1-E1-B1
gaggcacgcgtcaggaagactatctctaactcttccacctccaaaggaagaaactctctctagacattctatccttggtcccaacgggctaaaagggcagtggagaccacctatcattgataaagggatcaagtatccaagcaacatagatctgtctcctgttgaattaccaagcctacaacattccttggaagatgaatctctgaaaaagaaggataacagcattgcagaacaccataaatcagagttagattcaattctaacccaaagtgaggactgccagccccatccccaacctcagcctcagcatgatcaggagcctccttctcttatttcttttgagacaactganacctctgctcgaatagaagttatcagacaaacttctccttcaaccgta

SEQ ID NO: 28903 - DNA, 424 bp, Glycine max
  Clone ID: LIB3051-001-Q1-E1-B3
gaatttacgggtcgagcacgcgtcaggatccaccaaacccatcacagaaaatcacgtaagattgtacctccaactcaaaagcttcaaactttttccagtttccaaattaagacacagagagaaaaagcacaaagaagctgcaaaattttcatcttttgtcacttttttctgttttttcatcacaaaagtttgaaccttttctttccttccattgaatttggatggctggcggcggacgtggggaccggccgccgtggaaagaggcggcgccgccacgacccaccatcactctgccgccgcggtcgggttccatggagacccttttcaatggagggttcagccctggtcgcatgactctgctttctggctttttgggtgatggggatgatggaaagtccttctctcagctcctcgccggagctat

SEQ ID NO: 28904 - DNA, 374 bp, Glycine max
  unsure (1)..(374): unsure at all n locations
  Clone ID: LIB3051-001-Q1-E1-C1
gcgtcagnagaaaatacaatccaaatgatgaaatagatgttcatgatttgagaacaataaaatcaagtaaatggggtgcaactgaacaatttcaagatgcatatgaatgtgaagagtgggtagatgaccgagatatggatatgttgtattcatctggtaatgttgaattgaatcctaagatatacacgaagtataaccatacatatgacgaggtggccaatgaatgatattttccagctgatgaatgggttatacctcaatggtctatgggacaagtttaaaggcagtcaattcaatttcggcagttttccaatccatatataaagcagcactcaaagtctagttcttcaaactggtataaatcccaacatttt

SEQ ID NO: 28905 - DNA, 383 bp, Glycine max
  Clone ID: LIB3051-002-Q1-E1-A12
cgtcagcggacgcatgggaaaacaggcttgtaacagcattcatgatggtgtggtgtcaatggatgttgataaaccagtgacaaaataaatttgggcatctggggcgaaattctactatcatttgtcgaaattaaattgcatcgtctttcttgcaaatttcttcctgatatgctcactatcaaatcaaatgagtttgctttaattcaataatgctgtcatttcctgcaatattctctctaaatcaaattaatctgtttatgtaaataggatccactgagtgggttgaacaaaaacttattaatctaagttccaaagctgtatcataccttaaggtggactgtcctgtgcaacgtcctaatttccttggtggttcaactcctcag

SEQ ID NO: 28906 - DNA, 387 bp, Glycine max
  Clone ID: LIB3051-002-Q1-E1-A2
ggtcgaggacgcgtccgcacacgaatccgcttacatctagctagcaagctgagctctctgttcctctcatcttctcttttcaagtcatgggttcgtcctctagtcgacttgggtctcgcccttctgcttctagttctagtcacagggtcacgcgcttcagactatcgtctcttctatgtggcacctccacctcacgctccattcagcagatggaagaacattcatctgaacttcaagttgattcagctagagattttgatggtgaaattctgaaagacactgacgaattgcctttgtcatatacagaagctagaattagctccactccccctgctgaaactgtaaactcatctgatatgagaactgagttccaggcctatactagtg

SEQ ID NO: 28907 - DNA, 351 bp, Glycine max
  Clone ID: LIB3051-002-Q1-E1-C9
acccgcgcgtccgaagaaaagtcataaaaagcataagaatctgcaacaaatagtcatggctgcgcttggggaccaatcagaggaacaagccatggctgcccaacctaaacctcagaaccgacccatttctaacatcgtcatcgtcgttgctatgcagacggaggcacttcccattgttaacagattccagctcactgaggaccctgacaccccgtttccgcaatgggttccttgggtccgttatcaggggacatacaaagatcttaatataagcttgatttggccgggaaaagatccaactttgggggttgataatgtaggcagcataacatctgctcttgtaacgtatgc

SEQ ID NO: 28908 - DNA, 275 bp, Glycine max
  Clone ID: LIB3051-002-Q1-E1-H1
gcgtccgaatacaaattcctggcgtcaataccgagcaacgtgcgaaatgcctgacttgaactcacgaacggaggtgatgccgaacccagagtttctaagcctgttttcctcacccgacacactgcagggggtcgtggccctttcagggtcctcctctgtcgcagcttgctcagcagcaatcagcctacgaagcaggtcacacacgtgcatgcactgggactatgatcaaactggcgctcgcggataaaaccccgcatttccgcaggtttcggccc

SEQ ID NO: 28909 - DNA, 195 bp, Glycine max
  Clone ID: LIB3051-002-Q1-E1-H4
gtccgaccacgcatccggagtcggaaacaaatgccattcgatctctcggagcacttgagggcccccatggggcaatacctcatgtgccatcccaatagattcgatgtctcggtgctcgcacacgtatcttcggtcagcaacaccataatcagcttgtatatcgtcacagcacaccgtatcctattcagggaaatg

SEQ ID NO: 28910 - DNA, 219 bp, Glycine max
  Clone ID: LIB3051-003-Q1-E1-C2
cgtccgcccatgcgtccgcacacacacagctagcagatattacagacacgtgaatcactaattaagccaatggacacgagcctatgtaatggaatttcaagatccaattggtttgtaaatattgtggtttaagtgaattaagttatgaggagtacgtcgcagtggcgaaggtggcttttaaaaatataattttagaaagtgtagaatctgaaatggttt

SEQ ID NO: 28911 - DNA, 93 bp, Glycine max
  Clone ID: LIB3051-003-Q1-E1-D3
cagctccttcactcgttgatccggatctagagtcctttttacacgcctcacttctcgttgtagtgcctcgctttcctgatccatcgggtttca

SEQ ID NO: 28912 - DNA, 347 bp, Glycine max
  Clone ID: LIB3051-003-Q1-E1-D4
cgcgtccgaacttatggacagcctgctcaacgatatcctgctccgggttatcctcctactggttacccccctgctgcttatcctccaccaggatatcccccttctggctacccgaagtgattggtctacagcgcagcagttgatcgtgcttcatagaacaagggaacatgtttgtggtgaaatacaacagttcgattgattaattaagttccattagtcttataattcgcggattaaccttataatccctatccggatgtgcattcggatacttcgacctctgtttgtatactgttctcctttggtggttatacatagttcacatgtttcgcctgttatgtgcaaat

SEQ ID NO: 28913 - DNA, 56 bp, Glycine max
  Clone ID: LIB3051-003-Q1-E1-E2
agtgcatatggggtagatgaaagcacatattggcgtggtggctatggccactatgg

SEQ ID NO: 28914 - DNA, 157 bp, Glycine max
  Clone ID: LIB3051-003-Q1-E1-E4
cggttccagcatgttcagtccggtgaacacatggccgccatgggcgtgtttttcttgcttcaggtatttttcttcctggattgggtgaagcatttgcttagctggaggacgttgtttcaggcatttttggcgataactgtgacgcgggcggctgctg

SEQ ID NO: 28915 - DNA, 102 bp, Glycine max
  Clone ID: LIB3051-003-Q1-E1-E8
ttccgggtccaccagcgtccgacacgcgtccgaaaagttcaatcatgcagcactccactctctctctctctagagagctcgggatagcatgtcactacaaac

SEQ ID NO: 28916 - DNA, 361 bp, Glycine max
  Clone ID: LIB3051-003-Q1-E1-F2
cggaaaacaccgcaaccaaagacaaaattaagaatagaaaatcgttcgtgacttcttcttaacttccatcgtccatggcggtttcggggttgagaagcggtggtttgcctctcttccaccatcaccaccaggagcaccaccttcgcttccttcaatcccctccttcctttgccaagctcagttttcttggctccaagtcgtcgaagaaggggttcacagtcttctcccgctatgcgcaagcgcgtgaccgtttctcctcgcgtagattccaagatagcatggagaagctgccgaacctgcgggaggacattgtgcagacatgcttaaacacgggtccaacggggtgtccctgaggttggct

SEQ ID NO: 28917 - DNA, 77 bp, Glycine max
  Clone ID: LIB3051-003-Q1-E1-F8
ttcaacgatttgcgctgtgaatcgatcattcattaacgatctttcaaggaaatattcgttgcgatcggtgattctgt

SEQ ID NO: 28918 - DNA, 344 bp, Glycine max
  Clone ID: LIB3051-004-Q1-E1-C1
ggtccacggacgcgtccgaccacgcatccggggttcagttggggtttaaggttctctcatcacatcggtgttatcactgtcacggcgtgagctcatctcatcgttgagtataataatggattcggacactgaagaaacaaaacccaagcatcccaagaaggagaagaaaaagaagaacaagaagaaagaggttgaggttgtccaacctcaatctgaacagattgaggttgaggtcgaagttgtccgtgagcaccccaataaaacacctcctgttgttggttatttcccttccggatttgatccggtcaagaatcatggcgggggtccctccaattttcaagttt

SEQ ID NO: 28919 - DNA, 291 bp, Glycine max
  Clone ID: LIB3051-004-Q1-E1-G2
cttacactgcaagtcctgtgttctgagcttccactttccctatcagagactttcctcttctggcacacgctatctgatgcaatggaccatgcataaccctcatcgactgcgaaggccaagtcatttgcatcaacggaaggtgcaacgacgaccgcgacgtctgaacccacatctgccgcggcggaatgccgccaaatccgccaccaatctgcggaagctgccagtcctcgggaatcctaaattgccgcggaaaatcgtatcctcagtaacgttgctctccgccggtaactt

SEQ ID NO: 28920 - DNA, 407 bp, Glycine max
  Clone ID: LIB3051-005-Q1-E1-A4
ccacgcgtcaggaatcagtcataacttttccaggactcctttcaccttttgactcattcttgctttcagattttacctttccttcctgattagtttcacacttttgagtatcttgatccaccttacatttcattgtatcacacttgatcctttttgaaattgcaaatgcattacacttgctattaatcttaggatcagttgaattattattctgaaaaatttccgttttatgctctaaaactttttgcataaagctactccctgtattttgcttctcaatcttgtcaaaatcctgaccagatattgactctagtgtatcctccttcactgcttcagtggaaaccattctacatttcacaccatcctttatcaacctccttggatacttcaaaagccttaacagtgac

SEQ ID NO: 28921 - DNA, 386 bp, Glycine max
  Clone ID: LIB3051-005-Q1-E1-C1
cacgcgtcagggagggagtgggaattcttcttcagataatgatgttagttttgtcattcgtcttaggtcacgtccttcgtcgcaagaagatttacgttcttcccgaagccagcgcttctcttctcattggcttactcgttggtactctcgctaacatttctcacactcaaaccagcatcagggcgtggttcaattttcacgaggagttcttcttcctcttccttttgcctcctatcatattatatcctctttcatttcattcttcttcttcttcttctttacttttcatccctcttaattcattaattccttgaccttattttttctcgctttactcagtctggcttcagtctctctcccaagcctttcttcgctaatttcggagc

SEQ ID NO: 28922 - DNA, 438 bp, Glycine max
  Clone ID: LIB3051-005-Q1-E1-C12
gcgtccggggagatctgagagaagcagagctgaagaggtgaagtgaagatgatgtccggaaaatatacgtcgattgacgcgcagcagcttcagggatctgttcctgccgttccagattcacgacccgccaccgtcaatttcgcagattcaaatcttcagacttttcctccttctggagctcagggcaagatcaccgctgcttccgggcctcctcgtgacgctgatgattcattttcaaaacctgtatctggttctgatgaaccgcagcagggtggttggtttcagacttttacaattgctgcttacaaaccatactttgatgttgacacttcagatgttctagagaggattatcgactcactatttccatttagaggatctttcaatgaaaaaactgctaccaaccctgatttgtatggtccattctggatttgcact

SEQ ID NO: 28923 - DNA, 350 bp, Glycine max
  Clone ID: LIB3051-005-Q1-E1-D10
gacactaataatgtagctcatttaagcaattatttatctacaattttaaaggacggttataaaattacagaaaggaagcattgaagtctgtatgaaacggatggtctcatatcgtgataaagactaacagaactattacaatacacaattcgctaaagtgaaatgccacattgcaacttgccacttaacacaatttgcagttcaggtgcgtcgttgttcccttgtttaaagagcttcaatttccctcatcacttgagctttgtcggcttcaaattgttcatcctctttatcaattttgaagtcttccaatagtctcagcatcttacttttgttcgcaacaaatatactga

SEQ ID NO: 28924 - DNA, 224 bp, Glycine max
  Clone ID: LIB3051-005-Q1-E1-H8
gacccacgagtcacgaaataaaaaactgacaatgaaaaaaaaaaataaaaaaaaaaaaaagaaaataaaaaaaaaaaaagaaaaaaaaaatgaaaggcaaccaagggggtctctcttcaggtggctcgacactaaaattagtcttgcagctaacgtcggacctctaaattctcgtcgcgggccgtcattttactggccttcgtttgggaacatcatgggtttaa

SEQ ID NO: 28925 - DNA, 399 bp, Glycine max
  Clone ID: LIB3051-006-Q1-E1-A11
gccgacccacgaatccgaacaagcatcggcaacataggttcacatcacaactaggagttgtggttgctgatcattcgcttctcatcactgggacttgatacattcctctcacgcagctaccattcgtaatccacactcacattgataggatgcatcttccgggttctgaaggtgtgactccatcagtaatataaattgtagtaaggaaaagacgtgtctttgcagtttgaacaacattagattcgcaaacatatatggagatgattgatagctacctcgaggtcatgaagaactagtaatacaaggtgttctagcgtgcgtaaggcaggatctagtagagagaaacttacagagtaacgctagacaggtgtacgatgaacaacagaaacttggctgaca

SEQ ID NO: 28926 - DNA, 324 bp, Glycine max
  Clone ID: LIB3051-006-Q1-E1-B1
cacgcgtccgaaaaatgaaaggcccttgttgtcctctcccctccccaccagcaccacgagacacagccgtctcccccgtccactacgcccgcttcctggacttcctgaaatcccactgggccccacctttcaccccggacaccctcctccactttttgaaatccaagctccatcaccacccttccttctcccacttcgacttccacctcttcacatgggcctcctcctccctcgactctttccgccacacccacctcaccttccactggatggcccgctccctcgcctccacccaccgcctcccccaacgcggcaccctcctcc

SEQ ID NO: 28927 - DNA, 201 bp, Glycine max
  Clone ID: LIB3051-006-Q1-E1-B2
gcgtccgaaaagacttagaatgcgatgagcaaaaatagacctcaattccgaattcagagatagcacgcaccaggagaagccatggctactcaatccccttcacctcagaacctaggtggtgaaatttagcaaacagaaaatgtagatcagcataatatgggagaagagcttggtaaacagagtttatacacatccggtgtt

SEQ ID NO: 28928 - DNA, 362 bp, Glycine max
  unsure (1)..(362): unsure at all n locations
  Clone ID: LIB3051-006-Q1-E1-B3
acgcgtccgaccacacgtccggcagtttattctatcatatccttgttcaaataattttcttttcaattacaataccccaatcccagaaacttatgttcatgaccatcctcaaggtcccaataacatttacttgaagacaattttgagttgaccttacagcctagttccacctacaaacacccttgatccttcaaagcctctcatagttccaatactggcaacaataatactcttgggcatctaaactatctccattcttttttccccctttctttgcagtggatttgcgaggttttaaagaaattagaggcgtttttatgtgctaaagagctangtaattatagaattcatctcacacatac

SEQ ID NO: 28929 - DNA, 409 bp, Glycine max
  Clone ID: LIB3051-006-Q1-E1-B4
cgcgtccgaacaaaagcctctttaatttccccatcccctctagattttctctctaaatggttttccaaagatctctcacaatggcctttaatctcgtgcttttgttctgtttggttgcggtgatcaacaatgttgtcattccaactagtgctagacaactcatgatgactgcatcaccaaatgagaaagaagtgatgaatattggcactgaaaatagaggacatgatgaacatgatcatcaagcacaagtactagacgatccaacaagcaagaataacgtggaaaagaaagaagaaagatttgacaagagcgagctcttccctccctttttcgcacttccgcgatttactcgtccatttccacgtgctgcttttccatttccacgttttccacttccagggcttccatg

SEQ ID NO: 28930 - DNA, 145 bp, Glycine max
  Clone ID: LIB3051-006-Q1-E1-C6
gcggcaaccttcgatcttaatcccacggggcaacgttggatctgttgaacttcttcattgagatgcactctgtgatttcgctacaccctcactccgcttcgccacgctatccgggacaacagcacgaacaacgatgccttcatgc

SEQ ID NO: 28931 - DNA, 238 bp, Glycine max
  Clone ID: LIB3051-006-Q1-E1-C8
gtagccagtgagaaactcctcattctccttcttcttctgctacccagggctttgtctgcgtctgagcctcctccaccttcagttcctgctcccgttcaatcgagcgctcctccacacttgatctacaaaaatcgttgacaagagtttacttcagactgaggcgatgtgactttcctgtgtatcagaccattaaggagggacaggatcatagtccaaaatttaggtcgacggtgtgggt

SEQ ID NO: 28932 - DNA, 179 bp, Glycine max
  Clone ID: LIB3051-006-Q1-E1-E4
aggaacttgattcaaatattcacaaagccttgcaatgccttgggaaataacaatttaaaaaccaccagaccaacaatggtaaactttgggccggggaaaaaaatttgtttgattttcttgctgaacccattcaagttagttcagactcaaaggtggtaaaaataggcggtggcactctt

SEQ ID NO: 28933 - DNA, 270 bp, Glycine max
  Clone ID: LIB3051-006-Q1-E1-E6
caacataatcatgagccaattcttgttgctaccaacaacaacaaccctgaatcctctgcagttccggctccaaaggcaatcctcaaaagtgccctcaagcgcctcaaggatactcaagtcgatacccaagctggagcacctaatagaagcttgaactgcaggaggacaacggatgcttctgaagcagaggttattgaggccatgcagaacataacttcacaggtcaacggccctgcagagttcagcaaggcaacaaagcttgctatacag

SEQ ID NO: 28934 - DNA, 272 bp, Glycine max
  Clone ID: LIB3051-006-Q1-E1-E8
gcaatccaacatgtcgctacctttccaccagcagtctgtcccgagacatcctacacgtcacggatccaaggtcctatcgcaatcggaaggaagcgatccatgggtccattcgcgcctgcgaggacaagaagaaacaacgcggagttaaaaatttcccgggtgacacgcgcaatgctccccgccaagaacagcaatccgccgggctcggaaacctccctcacattatgaagcacgccgtgtccctcgtcctcgggcacgtcctccgccccaag

SEQ ID NO: 28935 - DNA, 283 bp, Glycine max
  Clone ID: LIB3051-006-Q1-E1-F1
acgcgtccgaaccaatgaagtctcccatgcatgacttgggataagtcgtaaaagcatgtaagatagggtttataaaaagtctctgttccctttccctccttttagaagactcccaatcaacgggaacgctaaccagaagttttaccttccctttccctcccaaatccctcatccaaacatgcccctggtgttctgacatcttcaatatgaagtttacttctctaattcacaatttatacaacatcagatgttcttggaaaggggtattgtgccattatggttg

SEQ ID NO: 28936 - DNA, 147 bp, Glycine max
  Clone ID: LIB3051-006-Q1-E1-F4
acaaccgatatggtcacatgagcgtcgtcccttcaatcaactatctcgtctgattgcttacagctactatcggattcttcagtttcaatccgtcgaagctatgattcaatggcaccctttaccttctacagcacacttaggttttgt

SEQ ID NO: 28937 - DNA, 158 bp, Glycine max
  Clone ID: LIB3051-006-Q1-E1-F8
acgcgtcggcaactggtttggtgagatgaatggtgttctttccaacagcgtcatgtattcttgcgtgctgctacctatggattcctcagtttcacttcctctaagcattgattcagaggcagccttaaccgtgaagcacatacgtggcttttgtacgt

SEQ ID NO: 28938 - DNA, 286 bp, Glycine max
  Clone ID: LIB3051-007-Q1-E1-C8
gaccacgcatccagtttcatctaagccctcttgtcgcaacgtattaagaataattaatcaggcccttcgatcttcgattcatctgaaaagaggtcttttgtttcacatcaacacgagttcatgcacagtaatgggtatcgctcactttccttgtatagcatttccagtgcagagagatgtgaaccctcttatgcaaatttctctgcttgtggtgaaagatggttgcaaggtcacttttgtacagactgagttgaacctcaagcgagcagagacttggggtgctgac

SEQ ID NO: 28939 - DNA, 236 bp, Glycine max
  Clone ID: LIB3051-007-Q1-E1-D5
gggccgacccacgagtccagggtcattggccaaaattgatatgtgtccaaacggaaggatttgttcagtttgacaatcctcgaaaatctgagaggcgaatggacaaatgctgcattatgcaaatggaaaattagttaaaggagatggagcaatgaataaatgtgtcatagttgtggatataatttgcattgaaggagcagtacaattgtacttggtgggtgaagttgttaagaatt

SEQ ID NO: 28940 - DNA, 225 bp, Glycine max
  Clone ID: LIB3051-007-Q1-E1-E1
agcgtccgaccaagcgtccgcccacgcgtccgcaagcagtcaaaatgaagtatgtacatataaaaattgattttcagaataacgagaattcgcagttagaaagagcaatttcaacaatagatgagagtaataggaggcagtacgacaacaatgaacctaaggagggcctgagcttcagcatgtgcaaaaagttggtacagatgatgcaaggtaatagatggatat

SEQ ID NO: 28941 - DNA, 313 bp, Glycine max
  Clone ID: LIB3051-007-Q1-E1-G4
gccgcaaacccttcctctgaactctgatccgcactggcactgaagccattgctgtaccttccaaaccctagcgtagccacgcgctgaattgcgatacgatgatcgtgcgcacatgaggcggcacggcacggcacgatgatgaacacagccaacggcacgatgatctcaccgtcgtcttcgtcgggaacggcggcgcagtcgccgggactgaagacctatttcaaaacccgcgagggaagatataagcttcaataggagaagactcacccgtccagtcgtcttcattacgcccatggcagaaccgttacgcagg

SEQ ID NO: 28942 - DNA, 211 bp, Glycine max
  Clone ID: LIB3051-007-Q1-E1-G5
gacgcacgcatccaccgacgcgtccgcgcacgcgtccgcccacgcgtccgcccacgcgtccgggcagcagggggatattcaaagttcgtcgccagccagctaagtctgcgccttcggcagatccgtaggcgggagtacgcgtggtggctcccacggaagccaggtgcgaagcaggctgagaggaggggggaggtagaatgagctggggaaa

SEQ ID NO: 28943 - DNA, 204 bp, Glycine max
  Clone ID: LIB3051-007-Q1-E1-G6
acgagtccacaaaggccgagtccgtgccatgactgttggcatcaatacactctttgctggtgcagaggatggtgtcttttttgcgtggagaggaagctctaaagccgattctccttttgaactggttgcgtctctcactgggcacactaaagcagtggtttgtctggcggttggatgcgagatgctgtaggccgggtcaatgga

SEQ ID NO: 28944 - DNA, 442 bp, Glycine max
  unsure (1)..(442): unsure at all n locations
  Clone ID: LIB3051-007-Q1-E1-H12
ccacgcgtccaaacattgttcaggctcctttgattcctagtcacactgatattgctaagattgtccagaaagtgttacaaccaaagcttcctgtccatcccacgtggactcctccatcaagggattatatgaataaggctttcacatgtcagatgtgtgaactcagtgtcaatgaggttgatactgtacttctctgtgatgcttgtgaaaagggatttcacttgaagtgcctgcagccatcagtcttgagaggaattcataatagagttgattggcattgtatgaggtgcttgagtttaagtggtggaaagcctttgcctccaaaatatggtcgtgtcatgagatcctcaaacacaccgccaaaattgccctctaatacaggtggcgttcaaccatgttctgagaagaaagtagagaatatcgattcanaggtcatcccaca

SEQ ID NO: 28945 - DNA, 402 bp, Glycine max
  Clone ID: LIB3051-007-Q1-E1-H4
tgttgccaaagggctagttctgtcatttatgactgacttctttaaggagtatctgattgacaacagccttgatgatcttatttcaattctaaaacggggaaaagtagaggaggatcttttggacattttcccccctacaaaaagatccattgaagctttctctgagcatttcaccaaggaaggattggtggccttggtggagtataatgaaaagaaaatttttgacgtgaaacttaaggaaatgaagtcttctttaacagcacagataacagaggacgctgatacatctgaagtcattgagactgtgaagctgcgagttagagatgctaaattgccggaaattgacgtggtaccgattcttgtgggaagttttaaatgaatgccgttcaattggctgaaaaa

SEQ ID NO: 28946 - DNA, 357 bp, Glycine max
  Clone ID: LIB3051-008-Q1-E1-A11
ctccctcaattttctctttcttcatctttctcttttgcatcatcatcccttttccttttattcgttagggatcttcattcatgcatgcgattccagctccatgcacgcaagttgctgaagacgaatttttatcgcaacatattcatctcaagtaattccttcttatttttctttcacgacagctttgtaactaattttttttaaccttcagtttctctgcgagtattttccgcaatggccgaagaaattgtgaatgaatttgttcaccaaaacggcatcgctgtcataacacacaatccccccaaaagtaatttcgttttcctcaaaatcttcttctcttttccttttaatcctttt

SEQ ID NO: 28947 - DNA, 399 bp, Glycine max
  Clone ID: LIB3051-008-Q1-E1-A12
ggtcgaccacgcgtccgataaaatctcacacaaattacacatgtcatcaactctctcggttgcatcatcatctcttttcaatttaatctcaatgtgacttcaattaagcaagacaaatccagttcaatgcccgtcaatttcaatcagtcgtcatttatataaagaggggattcagctcaagttattcatttttagtttactttcactaaaactttctagcctaatcattttgcagcttcattttatttgccattactttctttaatcactcttaacagtgaaaatgaagttcttcataacggtggcaccgttgccagaaatctcaatttcaccttcagtataatcgctaaatttgccatcttctatgcttttaccattactatttctgcttataccttc

SEQ ID NO: 28948 - DNA, 420 bp, Glycine max
  Clone ID: LIB3051-008-Q1-E1-A4
cttcggttctcaattgaaccaagctggcccaacttcgcaaaatctcagctttcgtttcgtcacacaaacaaacctcgtcccgctcctagttacacactacaatgaatgccctttaacatttgttgtcttctttttttttctcccccccttccccgagcattgtatgacttcacttccgcttcctcggacctcactctctctcttcaattctcggttttgttattgtagaatggttttaagttaggggggcggtgtggcgtgttagggtttttcctagtccaattcacgtcggtctcggaacgacccatcgtaggtttaagaatgtctggtggtggtggtggctgtggcggtgttttcgtgacgtgggaagagcaggtgatatgtcaggagcgtgggaaccgagtgattcacttttacctg

SEQ ID NO: 28949 - DNA, 461 bp, Glycine max
  Clone ID: LIB3051-008-Q1-E1-B12
gcgtccgattcactctacgctcagacctctggttgaagttcttttccatgtaggtcttcctctccgttgttatcgttgctgttgccttaactctcctctgccttctcctcaaatccgttccaactttcgctttcgctctctaactctcccggttgtgattcttctcccgaattccgctgtaaatacctgaatctagcttctctcaatatctaagcagcagtataattgtagtgagtgagatggatcattatggttcttctggatgaagctggacgatgatcctcaaccacaattcaagtattcaatcccaatcccaatcgaaccaggaccctaacctctttcttcaacaacaacaacaacagtttctccagtcacaaccttttcagcaagcactatcaccccaatccccatttcaacagcaccaccacctttatcagcagcagcagcaatcacaacaacag

SEQ ID NO: 28950 - DNA, 449 bp, Glycine max
  Clone ID: LIB3051-008-Q1-E1-B5
acccacgcatccaaaaaaattaagttagtatgtatggatgtatgtgttcttagtaatcataaagtgctaagtcaaatacaaatattgtttgtgtgtggtggtttgatcaacaacacacagaaggggtatctcaaaaacacaacaacattggagattatggagctagcgcaaaagaaaggatttctggttcatcatgagtacgatgatcttgttggttctttttattcttcctcgacatcttcttctgtttctggaatttcaagtgggtcatcgttggaatctgattcttttgaagaagtaacatcccctgcctcttcttctccctcatcatcagttgatgatcaacttgtacttgttgctgatccattgagtgacatgtcttctctctttcaacaacttcccatcaagatggggctatcaaaattctaccagggaaagtcacaatcttt

SEQ ID NO: 28951 - DNA, 397 bp, Glycine max
  Clone ID: LIB3051-008-Q1-E1-C2
gtttcattttaaaaggggtaaccaaaacttcctgggttcccggttggcttaaggcccccaacccccgcaaaaggtttggttggccaaaaatttgcaaaacaaagttgtaaaccaaggaaacgggcgggttgtcaaaggggggttgaacaaacaatccccctttgatggaattgtcagaaaggatcccttggagggaacccaagtgcaacttaagtctacatagtttaacacgtatctcacttctgaaaatgagggtggagctgatgttgtatccaaccgtgactcagcttctggttgggaaacattcaatctgtggacgatcagtgactcatccttcaacttgagagtgttcaacaagaaatttgttgagctggaaaatcatgggggtggaaacaaa

SEQ ID NO: 28952 - DNA, 361 bp, Glycine max
  Clone ID: LIB3051-008-Q1-E1-D2
cttctcttctcacacaatctctgttcaacaacgctagagaataatatctcaagtatcatgtgatgagatgaaccaagcacaacaacttcaagaagcttgaagtttggggtgtctcaaacatgttctcaaagcttcagccacaacaccagcaacagcatcaaccttttcaattctctcgtgaatgtcaaacgtccgaggacgatgacagccgaagcagcggtggccctaacaccgccgtcgcccaaaaatcagttttaggcggcggaggatgcagcgatggggccacaattgaagtggtgcggcggcccagaggccgcccgcccgggtccaataagaggcccaagccggctctcataataac

SEQ ID NO: 28953 - DNA, 427 bp, Glycine max
  Clone ID: LIB3051-008-Q1-E1-F12
gggtcggccacgcgtccgatcaaccacgccaccgtcttggctcaacccccgcaaatcaccctcccaattcaatttcaactttggcccctccccggggctccaaattccaaattcgccccaatctcagttcgatttcgcagaacactggattccagaagctcggttcttgatcgccaagaaacggagccctaaaaataattcttttagggtttctctgtctctgtgtggttttggcactaaaacttttgatccgtttgagaatgggggatcgaggagaagacgaggatttgcaaatggcgattcggatgagcatgcagcgtgggacgccggagccgaagcgcagcaagccgcttgacgccgtcgccggggcggtttcggggtcgccagaggagtctccggagtacaagacccggcgacgggagctcat

SEQ ID NO: 28954 - DNA, 433 bp, Glycine max
  Clone ID: LIB3051-008-Q1-E1-G11
acgcgtccgataaattgggaggtgcagctacagaattgatttctgctccaaatacaagggaaccatgccagagtaattccattgctgaggatagaatggtggtttctgaggtatcttctggcggtcttggaaatgaattggagaggcatagagtgtcttctaccctatgtgttgatgatagagataataagcatgaagctgattcaggtgttatagttgatatgaaaagctctgtgcatgatttaagcactatgataaattcttcaatctcatctttgggcaattcttgttcaggattgagttttagttctgaaaataagcatgtgccccttggaaatcctcgtgtctctgcattgtctatggacaaccttcatgcacttttgcaaaatacagttgctgttgatgttcaatgtgagaaaactgctagccaaga

SEQ ID NO: 28955 - DNA, 432 bp, Glycine max
  Clone ID: LIB3051-008-Q1-E1-G12
gcgtccgacaaacgtccgcggacgcgtgggttttttttttgctctatttataatggaatcatgccaaattaattccattgctgatgatataatggtggtttctgatgtatcttctggcggtcttggaaatgaattggagaggcatatagtgtcttctaccctatgtgttgatgatatatataataagcatgaagctgattcatgtgttatagttgatatgaaaagctctgtgcatgatttaagcactatgataaattcttcaatctcatctttgggcaattcttgttcaggattgagttttagttctgaaaataagcatgtgccccttggaaatcctcgtgtctctgcattgtctatggacaaccttcatgcacttttgcaaaatacagttgctgttgatgttcaatgtgagaaaactgctagccaagatca

SEQ ID NO: 28956 - DNA, 173 bp, Glycine max
  Clone ID: LIB3051-008-Q1-E1-G2
ttttatgcctgaatgtgatcacttggcttcaatgccaaaggctttttaacaaaggttggatcatgttgatgtatgcatgaaattggttcaaccaatttcatcatagcaatctgaaggtgtctatcaagtttcagcctgaatatacgatcttctcattaacgacactgacctca

SEQ ID NO: 28957 - DNA, 415 bp, Glycine max
  Clone ID: LIB3051-008-Q1-E1-G4
aagatttggttggataatggggtagttccaatttcctggatggtaaaaggcttatgggacaaactaaaacttggaatcctggaattttcaagtttccctggctaaaatcaattggaattttagcaaaatggttacttttcccccggcttttgcacaggcaaatgcaaaagggaaaccggttgttcagcacagcgggggatcatgcattattctgtgttgccaatcaataatagtttttatcacactatttatttacttcaaaaacttgtctgtaatttgagcactaaattgaaagttgtaaatactggaaattccttttatggcagaattgtgtctaagttttgtaacgtgttaaatagaattttccttaaaaaaatttcgttccggttaaaaaaaagagcataaggtataatta

SEQ ID NO: 28958 - DNA, 453 bp, Glycine max
  unsure (1)..(453): unsure at all n locations
  Clone ID: LIB3051-008-Q1-E1-G8
gggccgacccacgcatccaatcagagacaaatggttctgttataaatactaatgaagttggaaacattcaagaagctgaagccgagggctattctatttatgtgaaaggtctgccaccaactgctacgcctgcagtcttggagaatgagtttaagaagtttggacctattaagagtggtggcatccaagttaggagccaaaagggattttcctatggctttgtggagtttgaagtggcaagtgctgcgcaaagtgcacttgaggcttctccaatttcgatcaatggccgtctcgtcgttgtagaagagaagagatcaactaatcgaggtagaggacgtttctcatctggcaaggctcctagcttcaggggtgaaggtgcaagagggcgtggaaattatggaaatggccgaacctatggccgtggtggtgactttaatggcangggagaatatg

SEQ ID NO: 28959 - DNA, 378 bp, Glycine max
  Clone ID: LIB3051-008-Q1-E1-H6
acccacgcatccacgaacttcttgtccaagaaagatcaactgccgcagccaaaaatgctgcagttattgcttttttgcaacagttatctggtcagcaccaaaattccacaacacaagccaatttccctcaacaaccacctccacaaaaagttacaatagtacaaccaccaccacaacaagctccacaaccacaagctccattggtgttgtcaaatagtgacaacatggagattcagaaaatgaataatcctcacaatggtggtaacggcaacggtaacggcaacggcaatcctaaccctaacaacaacttccgtgccggcggcaatggcaataacaacaatccctcctccatgaattccttaacctcctccaaggtgg

SEQ ID NO: 28960 - DNA, 348 bp, Glycine max
  Clone ID: LIB3051-009-Q1-E1-B1
gcgtccaaacaaaagcttcttgcacgcacgcctttacgaggcgtgctgctactaccggggcatcgtccgggtcatcggcggtgggcgctctataggctccatcgctactttcgcgtactggcgacctctttactcttctaaagtctcacccagggggatttcactgtcggtctttttagaacttcatgacggggaaacccctggcgtcgcccatcttattcgccttccggcatatccccgatttcgctagctcgcgtgatccccactaggttcgtcccgatcgccactcccaaactttccccagcttgagcggctatgggtaaccgccccgttgcggcccattacccc

SEQ ID NO: 28961 - DNA, 304 bp, Glycine max
  Clone ID: LIB3051-009-Q1-E1-B12
attcggcgtcgacccacgcgaccacccacgcgtccgatcctctcaccaaataaacctcaatttattgcattgcataataccatgtcaatgaagttgtatgcttccctcacccttacggtgtggcttttcatggccacattttcgcgagcccaatacgttattgacacaaatggcgaacccgttgacaatgatgatgagtattacatcaggccagccataaccgacaacggagggcgtttcaccttgatcaagcgaaacgggtcgtgccctctctacgtgggtcttgaaaacaccgatacgccac

SEQ ID NO: 28962 - DNA, 310 bp, Glycine max
  Clone ID: LIB3051-009-Q1-E1-D12
gacgcactcgaccacacttctgtggatccggattctgccgtgaagttcgactcctctttcgcactttctactgtctcttatcgctttgaacgcattccttccctcgttgtaccgtgttcaggtgaaatgacaccgttttaccgttccatcttcgcggcacagtatacgccacgttcgtaaatatatagggaagcatcaacgtgaatgatctacgtgtcggaaatatcaagggactgtcactggactactgtactacaaatgttatggcaagtgtgtgattcgtgacgcatacgtgcgttcttgtacacat

SEQ ID NO: 28963 - DNA, 456 bp, Glycine max
  unsure (1)..(456): unsure at all n locations
  Clone ID: LIB3051-009-Q1-E1-D2
cggggtcgaccacgcgtccaaaaaagcattcctcacgagtccgaaactgctatcgctccccggcccaaatcaaccattcaatggaataggtttgaagaatagaaacagttcgagctaatcggaaagctcgttcggtgaaaccccccgattcctgtttatcgtcttccaattcaaacaagaaatggatggttccctataaattctacgatgtcaagggtcccaattccgagtcagaccctaatgttgacccgtctagttgggttttgtgcaccgaggttcaattggaaaccattctgttgagaaacattgaaattatatacaaatgaacacttggtgcgcaaagcatgtttgcatttggggctacaagtgaaagagaattggnggtcaaaagccaattctgtacaatggacattgttacggtgccaatgatttggcaacaaacgtgctgcacaactc

SEQ ID NO: 28964 - DNA, 144 bp, Glycine max
  Clone ID: LIB3051-009-Q1-E1-D3
cgcgtccgacgcagcgtccgcccacacgtccgaaattttaaaacatgctgaccgtagttgggaattcttccacctccatccttattatagtcatatcctggtaatccttttaatccttcggtgatttaccccgattcctgttta

SEQ ID NO: 28965 - DNA, 422 bp, Glycine max
  Clone ID: LIB3051-009-Q1-E1-E10
aattcggcgtcggactcttgctacgagttgaattgtcactcttggttcgcattctgtggatgcttctaccactgtcagaatcagcatgtgagctatagtttatttttacaatcacttaaatctcttagttcttgaggcaatatgcaagatatacttaaaatccccccttgataattttccattcagtcatgtccacttcaaaatttccctgattactcgagatacgtaaatgcttctgccgtgtcccctttgcatatataaacgccagtttcttcacttgggtctctgaaagttgttcacctcatcctctatgatcacgaatggtttgcagttatagcaacaatgtcagatgacatgctcagacatttctcatctaactcatcaagtcgttcatatcagtctctgtctagatagatcgcaca

SEQ ID NO: 28966 - DNA, 306 bp, Glycine max
  Clone ID: LIB3051-009-Q1-E1-E4
ccgggtccgaccacgcgtccgagtacatctaacagatgaagtaactcctaccccttggcctctcattttggaggaaaggcacagtgctgagaagacaaatcgagaggcccatggccatatgttcactcctagatggtttgatttatcagattaagtgactcctaccccttggggtgacttggaagtttaccaatacgaaggtaaatatacccaacattgtgctgccgtagataattctgagtgcattgaagttcctgacatctgaccagatatcatcccttggaaatatgataatttggatgctga

SEQ ID NO: 28967 - DNA, 211 bp, Glycine max
  Clone ID: LIB3051-009-Q1-E1-G8
ttcatggcttttcaaggtccgccaatggacccgggatgctcacacacacatttttcagggccatcgccgcagtcaaatcacgcgccgcctccattttctcctcggggcgaccacgacaaccacctgacgttgcgtcggcgacacgttggcccaacgccccggattcctccctttcccatccttcatttcgaacccgcaaagggacttgcgg

SEQ ID NO: 28968 - DNA, 388 bp, Glycine max
  Clone ID: LIB3051-009-Q1-E1-G9
tggttggaaccaacctttgggctgatgagtctatcagctggtggttgtttccccccgccccccccccccccccccccccccccccccccccccccccccccgttggggggactatagctaatatacaacaccaaaaaagggggtacggaaatagttcaatatacggtagccttcctataggaacccttatgaatataaggtatatattagtaaacttattaatcatatttgaagcccttaatcaatagtacagaggaacggagtaatagattagtgatgttttccccagagacggaaagggggcaagggcccaaaatgccttcggcagttgtttcggttattaggggtctatcgggttagtactcgtgtggtaattggtcctcgacgt

SEQ ID NO: 28969 - DNA, 179 bp, Glycine max
  Clone ID: LIB3051-010-Q1-E1-A2
gggtcaaccacgcatccgattgcgcttactttgtacactgctgggaaagatgttctcggatactgcctccaatgtggtgctcactaacgatataatcacacttgctggtcataggagtacccacgatgcagtgaagaatacagttacgcatattccgaaactcaatgaggccgctgaac

SEQ ID NO: 28970 - DNA, 450 bp, Glycine max
  Clone ID: LIB3051-010-Q1-E1-A7
gggccgacccacgcatccgacaagtttgtataggtctgaggtcaaccgaaaacctgccggccagaccgacttgttgagaattgaaacactacaccatgctgataaagacaaaacagaagcttatatacttgaactggtcatctggcttcatcatctagtgagccaagtaagagttggtaatggaggaataaggtccccagtcaaatcgcccatatgttctcctacccaaaagacagggcagttatttacacagaaagcctgctcttcccccatgttaacggttgaagatcagcaaatgcttcgtgatgtcagcaagaggaaactaacacctggcattagcaagagccaagaatttgactctgccaagaccaggttgagtaaacaccataggctaagcaagagtagtagtcattccccaatcagtgaaagtaaaaatgatatattctctac

SEQ ID NO: 28971 - DNA, 250 bp, Glycine max
  Clone ID: LIB3051-010-Q1-E1-C1
ccgatagattttgtgattagtctcataaacgtcaatcatattctcaacttgattacattatctgtatattatgatcacatatctcgttatcacaattgatctgacaccggagggggatataggctactgaacctgagagacatgcgggataatgcttgaagatgtcgaagtgtggggcatgaacgaaactaaggacacagtatgtagtggtatcattgggtgaagaagatatcatcgacgaaattgctga

SEQ ID NO: 28972 - DNA, 311 bp, Glycine max
  Clone ID: LIB3051-010-Q1-E1-C4
acccactcatccgatcacttacctatgaattgatatcgaggtgtatggtggcagccttatacttttgcaacccgattctaccatgaaatgggttatacgtctcgacggtactaataagttgtgggctcttcccagtgaaaacggtaagttgtcgtgggaggaaggagttttggacttggatagtgcggtattgcacgatataaggcatttactacggcttgaccactctaacaaagaggactctgttatgtacccttgcatattgccttcatagcaaccaaatgtgcagctctcgaaatctgatacgacca

SEQ ID NO: 28973 - DNA, 427 bp, Glycine max
  Clone ID: LIB3051-010-Q1-E1-D12
acccacgcatccgaaaaaaaaaaaaaaaaaaaaaaaaaaaaaaaaaaaaataaaaaaaaaaaaaaagggaagaaaaacaaaaaagttaaaaacttaaataagggtggatgcatacgtcggatctctgctatatttgtcatttaagttcaattcatatggctgtcgttttataacagtcgttactgggaaaagcctgtcgttttccaacttcgtcgctttgaatctcttgcccttttcaccatctggcgttttaccgattatgcccttttcgatcgctgttcccatcagttgcacgccttgaatgttaactggtacgcgccttttaccggctcattaggcgcggcgggtgtgctggttactcgcaccttaaccgctgcagttgtgagggtccttccgctcgttcctttcactttcgtcacttcctttc

SEQ ID NO: 28974 - DNA, 185 bp, Glycine max
  Clone ID: LIB3051-010-Q1-E1-F5
gtttgctggggcttctgatacggctggtccgatggatatggcggtctagtttgacatcgtcgacgctgatacgttaggattggatcagttcatgactgtcgggtagtagtgtattaacgtcaaggataacatcggtggtgtacggacaaagacggcaagttctgtatcacctatgcaggatggca

SEQ ID NO: 28975 - DNA, 347 bp, Glycine max
  Clone ID: LIB3051-010-Q1-E1-F6
atcaccagctagagtctctcatcgaacgacaccttcgatttcaatcgtgcaaggatttccccctatctcagcgctccttcctctcccaagcgttttggccaatttgattagctaagcgcccccgcaagcccttctaaagattttgatcttgcggctcacgatgatgatgccttcgcctttttcgttactggggaatcgaagagccctcgatccgcggcagagctttacgacggcggcaaaatcacgccgctgagcgaggatgattcctcggactctggtagaagctgacttcattctgacaaacgatcttccagttcgcaaggcatttaagccattcgcgaagcctt

SEQ ID NO: 28976 - DNA, 422 bp, Glycine max
  Clone ID: LIB3051-010-Q1-E1-H12
acgcatccgacagatttcaccctttctcagtttctctctctagaaaaaccaaaacctggctcctttttttagctctttccttatttagccttcacacactccaaactgtgaaatccatttttagcaaagtaaaaaaaagtgagccagtgtgagagagagtggtcatcagtcatcaccgttgattgattaagatgcagcaatcaaacggctctgattcgacgactacgatggagcagagcgcgccgccgcctccgaggcaatcaccggcggtggcgaggccgcagcagtgggtgccgatgcagtaccctgcggcggcggcgatggtaatgccgcaccacatgttgccgcctcagcattatgcgccgccgccgtacgtgccttaccaccaccagtacgcggcgcagccccagcaccagcaacag

SEQ ID NO: 28977 - DNA, 340 bp, Glycine max
  Clone ID: LIB3051-010-Q1-E1-H7
cgggtcgggtcacgcgtccgagcttaatatttgctttttctttgattattccggtcttatgtcactcctatagccgagttagttgtatgcgtatgctcacctagaagctactagatagcatgcatagtctgctatgaacagtagctttcacattatttcgtcatacaagttgtcgtgaattaacttcacagatccgcagtacacagacgagcataggcctgagatcattgacgatatttgatgtgcatagattctctatccttcattaagttttcaaggcgtagtgtacaggatcacttcatcagtaatctgacatctacagtcgtccactccaattctg

SEQ ID NO: 28978 - DNA, 421 bp, Glycine max
  unsure (1)..(421): unsure at all n locations
  Clone ID: LIB3051-010-Q1-E1-H8
ctttcggcgcaatgggcgcgtgcgcatcttctccctccgcgaaaacgacagcagcaagtgtgaacaagggtggtggtggcggcggtgcacctgcgtcggaatctttccgccgaccgtcgtcgatcatggtgatggacatgctcggtcgaatcaacgagtacaaacaaccaatccccgccagaaacgtgctctccgagaatcctcatttctacctctgcaactcggagacagtgcacatcggcacgtgcatgccacgtgtccccgatgaagaagagcttctacctggtcgaatctacttcctcgtccctctctcgcattccgattcccctctgtcactccctctcctctgcgatctcgccgttaaagctggttccgctcttcncaaccctaataataacagttacaatggtcaccgtaaaaa

SEQ ID NO: 28979 - DNA, 391 bp, Glycine max
  Clone ID: LIB3051-011-Q1-E1-A11
ctcagcccacacctccgcccacgcctccgggcactttcaaaattcccaattccatcggcgtcctcctccggggaactgagatcttcaaaaggagcagattgttcccaatgtatgttgtttttggcaccaccgtggggctgttcttgccgctggcttacgtgcttggtgggtttgcaagaagggatgagcatgcagtgcgttctgccaccccgcacttgttcttgctatcgtttcagatactcactgagaacattattggtggtttgtctctgttttcgccacccgtgaaggcgttggtgccaatcatctacacaattcggaggatctttgtggatattgattggattcatgatgtctggctcaacaagactttgcctgtcaatgccaaatt

SEQ ID NO: 28980 - DNA, 251 bp, Glycine max
  Clone ID: LIB3051-011-Q1-E1-A12
ccggccacacgtccgggcactttcagaattcgcatttccatttgcgtcctcgtcggggaacgttatcttcaaatggaaccaagtgttccgaatgtatgttgtttttggcaccacccttgggcatttctttccggcggcttacattcttgggtcgtttgcaaaatcggatcaacatgcacttcctgctgccatccctcacttgttcttgctatcgtttcatctactcaccgacaggattattggtggtttgt

SEQ ID NO: 28981 - DNA, 351 bp, Glycine max
  Clone ID: LIB3051-011-Q1-E1-A3
gacgtcagcccaagcgtccgctcatcatttgctgaaccttgttgtgatctgaaattgcagaagaacaccgtgtaacgattctggtggccgttgcaccaagccaaggttggcatccaagttttataacactaactactgcatacaagagtatgagaatatacataacaacagttactgatattgttgtgattgtgtgtgattttggtgtcgtccctttttcgtatgtttaaggttgtaccgagtttatgtgtggattcaattcgtcgatcagacaccttagtttgatatcttgattggttccgtggacagttttttcttccttggtgtggtttttgggttgtgctgtttttg

SEQ ID NO: 28982 - DNA, 398 bp, Glycine max
  Clone ID: LIB3051-011-Q1-E1-B10
caacccctaaatttcaatctagggtttctttgcacgctaattccatcttcaaattctgccttcattcgattcaggggggaattaaattgtttctattttttttcgaatttaccacaaattagaaatcgataaagaaaaatggtgagggtgttgagaagctgcattcaatcgattttgaagctggtgaactcggtgattgggatggcggggctagccatgattctgtactccgcatggatgattaaggtttggcagaggaagatgggcgaacttccctttggtcacgattctgattacccacctccgtggttcatttacatgtttcttggccttggagttgctttctgtgtaatcacttgtttaggtcatgttgctgctgaaactgctaatggctgttg

SEQ ID NO: 28983 - DNA, 393 bp, Glycine max
  unsure (1)..(393): unsure at all n locations
  Clone ID: LIB3051-011-Q1-E1-B11
tcaagttttgacgcatccatctgttgtggtgaaaatggaaggcaaagatccattanacaagccgttccaagggttaaccgtccggccaaaaaagcgcgaagctaacggacaaagaaatcaacaaggcctaccgatggaaggctctcgaattgcaccctgacaagaagcccgacgacgccaacgccgccgctaacttccaacaactccgcacctcgtacgacatcctcagggacgacaaggcccgcaagttgttcgacgacctcttgcgcgtcaagcgcgaccgcgagctccgcaattcgcagcgcgacggaaagcgccgcaagatggtctccgatctcgagcgccgggagcgcgacgccaacgcccccgatcccgccgcgaaggaacgcgaag

SEQ ID NO: 28984 - DNA, 283 bp, Glycine max
  Clone ID: LIB3051-011-Q1-E1-B9
ttgaaccaaaaaaggaacctaaaaaaaaaaaaaaaaccaaaggaaaaaaaccacaaattggaactaaaccctcccagaggaaaatgaagaaaaatctgatccccagcttgcacaggtgaaagtaagacttgagaaacttgaagaggctgtgaaggagattgtggttgaaacacagaaacattcacgcagcaaccttggagaaaatcaggcaactgatgatgagaaaaaacgcctaaattcttctgcaccaagggacccaagtaccactgattctgcatcaaat

SEQ ID NO: 28985 - DNA, 389 bp, Glycine max
  unsure (1)..(389): unsure at all n locations
  Clone ID: LIB3051-011-Q1-E1-C1
acgcgtcagattttatgcatcagtgatcacaatagaaatgatgataaagctcacaattcatctgttgctcccataataattatacgaagcctaacatccgttaaaggtttaaaaagttattaacctccggaaacaatccttaactaaccttggcaaaatcaaggggtaaaataataaggcaataatgaaaacaattaagctaagggcttttagcatgtgagacccgaagggacagcgcatgaagtagtagcangtaaatcaagttctgaatgggaaaagaaacttgacttattttggcaangaaggctgaatggtcangatcccttggaagtaatgactgctaaggagaagatagatgctgcagcaatggaagtantggattcatatgt

SEQ ID NO: 28986 - DNA, 159 bp, Glycine max
  Clone ID: LIB3051-011-Q1-E1-C6
acccacacgtcagattttgacaaaatagatgggaagcctagtgcagatggggtagatgaaagcaagtattggcgtggcggctatggtggcggctatggtggtggttatggaggtgggcgtggaggctatggaggtgggcgtagaggctatggaggggga

SEQ ID NO: 28987 - DNA, 418 bp, Glycine max
  Clone ID: LIB3051-011-Q1-E1-C9
gggtcgaggacgcgtcaggttggatttggcgttttgatttgtgcagccacatggattccaatgctggggtttttgtcctatttgtttgagaattggtgtgacttgaatccttcgatgttaagttgttgaatttggagagcttgtgctgtgtggaagttggagttagaaattagttgcatttgagggaaaagggtcagtttttttgttgatcctattcttccatatgagtggacaattttgtgttcgttttctgtggcagtgctggacgaattgaagtttgaattgtcttgttatgaaaatcctgtgggacaagggcaaatcttgttgctagaaaaggccatgtggtgaatttgttttgcggtcattgttttttttttataggtcgtaatgaaggctccatccaacggttacttgccta

SEQ ID NO: 28988 - DNA, 396 bp, Glycine max
  Clone ID: LIB3051-011-Q1-E1-D10
gcgtcagatccaattcattcttcttcttgttctttgttaggcaatacaacatttattacgcatactcaaagtagcttcgaagttcgtatttttattggcatatcatggagaataataatcagtcgttttggcaattcagtgaccagctgaggttacaggcatctaatttggcgaacctttctctaaacgattcgatttggagcaacagttacatctccaagaggcgtgatgaaaggattaattttgacatcaaagttgggggtgagatcaactctttcaagtcaaaggagccagcttgtgattacaatgataacatgaatggatctcttcgtgccgtgccttacaacaacaataacattttgggtgttggtggagttggtctcaatggaggcttca

SEQ ID NO: 28989 - DNA, 145 bp, Glycine max
  Clone ID: LIB3051-011-Q1-E1-D7
gacccaagcgtcagactaagtctcagcagtggggacagtttgtaaattgcgacttccaatggcgagttgcgaatcaagcgatgatggaaaaagtgcggcaaatgatgtgtgtgcttgctccggtgtctgcgctgtgacgtacgtg

SEQ ID NO: 28990 - DNA, 421 bp, Glycine max
  Clone ID: LIB3051-011-Q1-E1-E11
agcacgcgtcaggctaacagcttctctgtgtatgaaaccttgagatcttattggcagtcaaatagatcggatgattcacctgctgtcgttagtctggcttgcggcagtctttcaggcattgcatcatcaacagagaaagagagtttggtgcaggaactgcaccaagtatctaaccagactgacccatagaaccagagaccaggttggagttgttattgtatctgtggcatatgacaatttagtaaggaaaatgacaaaaaacatttttctcgtctttctgtaactttattttttatctaaagatcttgctcaagtaatcatcttcccaagttttgttctatgacatgtctccccaagctatgcaggggattccatcatgtggtggcattacttggatgaaactatatgattccctcagtta

SEQ ID NO: 28991 - DNA, 294 bp, Glycine max
  Clone ID: LIB3051-011-Q1-E1-E4
acgcgtcagtgttattcttactagagttgattcttttccagtagctttactggctgttccttttggcgttaagaatgaaaatctgagttctaacgccactaaccctaagctgacgcgacctcttgagaactgttagagtcccaaataactgggtgaagagtgtccttttgcatttgtgaactaatgtgtaataatttattcacttaaattaaagcgcattactatgtgcaatgagtgtgtttaaatattaaaaaaaaagcaacaagaggacacccgggaggctgctctacaagg

SEQ ID NO: 28992 - DNA, 249 bp, Glycine max
  Clone ID: LIB3051-011-Q1-E1-E7
gacccaaacgtcagcccagccgtcaggattagggagaatccactagatcgtatcacggttcattgtcagcaagagttaagacagcttgctcacaatcattacgctgccataaataccctgtctgagcagatatgataattggacaattcatctagcaatacgttaaaatgatcacatttatctcacgacctccagccatcatcttagcaggcaacatccatcttcacgtactgagcatcaggctcagtc

SEQ ID NO: 28993 - DNA, 164 bp, Glycine max
  Clone ID: LIB3051-011-Q1-E1-F5
acccacacgtcaggaaatcgatatccaacccgtcctagcagaagcctctgtcagaatagtattctctcgatgccagatgaactacatcaatatcatatcaatcacttgccttacagactgacacgtgcattaacaatcagctggtcctggttacatacagcatg

SEQ ID NO: 28994 - DNA, 414 bp, Glycine max
  Clone ID: LIB3051-011-Q1-E1-F9
gcgtcagcccacacgtccgaccgaatgtaacgtgttggaattggcgtattggtgtgcagtatctatttagagagagtgggaatcattcgtttcgtttcgttcagaggtttgtttcactgtttcagaatgaacggcttaagaagtgaaagagcccctctcttggaggctgagcgtgctgtaagtctatttctcttctcttcttggcccatatgcacagtgccattcattggtgctcaccttcagcttctcctgcttcagcaatttggccacactcaaacaatttttgtcttttgtcaattaattgtgtgatgaattggaaaaaaaaaaacttttttccactgcctctgggataataataggaatatcctattgcactgtttgaaaccttttctatttatgaaatcttttgatgtg

SEQ ID NO: 28995 - DNA, 390 bp, Glycine max
  Clone ID: LIB3051-011-Q1-E1-G12
gcgtcaggaacagtttttggtttgggttgcgtggcgtcgcgttgcggcgagggactcaccttccttccttccttcttcctccttctcgttattctctcgtccattctatggagcttcagaggcgtccagatcagtgcctcccggagaggaaagggcagaagaagaagctcgaggaggaattcgatgacgacccacagatctcccctcctcccaccggcgacgctcgcgacgccctcctctccgacgttaaggaacaggtttccctcctcgattccactttctcctggaacgaacccgatcgtgccgccgccaagcgcgccacgcacgccctcgccgatctcgccaaaaacgaggaagtcgttaacgtgattgttgaaggaggcgccattc

SEQ ID NO: 28996 - DNA, 447 bp, Glycine max
  Clone ID: LIB3051-011-Q1-E1-G5
gacccacacgtcagaacatttctaaagctccttctcctctcaatatctcatggcaaacgctcttgaagtctctgctctcaatcgcatcaagctgcatcttttaggagaactctctcccctcacccaatttcaggaaccaaacacaacctccctctgttcccaatcttcaacttccgattcattcaccacagttgaccaaatcttctccgaattcctcgatttcccaactactactacttcttccacagaacaaaaccagttttctgcattcgagtttgagccaaaacccgaaataattgagccacaattggaattcagttttccaaccacacgctgcaaatcgagtcgaaggccgtcgctgcaaatctctctcccgaagaagaccgagtggatccaatttggagagcccgaggttaccgaaacggtgtcgcagagtaacccgaacgc

SEQ ID NO: 28997 - DNA, 334 bp, Glycine max
  Clone ID: LIB3051-011-Q1-E1-H10
cgtcagacataaaatcaggcctcaaaacaaaaaaaaaaaaaaaaaaaaacaaaagaaaaaaatgcaaaataaaaaaggaggttcacctctgtgatacgatctacagttgacctagtcttttagcagatgctccttctattgtattttctaaatgttgttctcatacggtgtcttatttggaaatggactggagtagcctaatctagttcgtcgagaataatccacacatttcaaagcatactttcttccggtgctttcattaagtcttctcagtccgatcaatttaatcggattttgggataatcctgttttccatgtatgaggtccattccta

SEQ ID NO: 28998 - DNA, 409 bp, Glycine max
  Clone ID: LIB3051-011-Q1-E1-H12
gaggcccgcgtcagcccacacgtccgatctgttctggcgaggtttcatattcttagatctcgggatgaatgttcatgttctacttcttcagatcggaaacagttacatggagatgaatctgctgctgtctaatgaatggatggcataacagttgcaacaaatgtatctgagggtaaaagtttggatgtccatgcaaatcctgttgtggtgcatctcaattcctacactgccgtggacatgtcaatccgaaaggagtttcatctggattctgacgacaatcaagaaactcagcctagcggaacctgtgagtttcagcctcctacttactactccgatggcatcgcgtcagactgggaacatgtggagataagcttgtataactattttgaaaccttttaacactttggtt

SEQ ID NO: 28999 - DNA, 229 bp, Glycine max
  Clone ID: LIB3051-011-Q1-E1-H4
gcggccggcggtaataatgacattccataactcccaagctatggctagatagctatataataaataaagatgaccctgtagcttcctaatttcccctaacttaaaaatttaaaaatttcccaaatttaatttggtaccaacctcctgaattctctccctccggaacttcccaaccaaatgttaatagaatatcatttacaaatttaaaattaaaattaattgtaatgtt

SEQ ID NO: 29000 - DNA, 446 bp, Glycine max
  Clone ID: LIB3051-011-Q1-E1-H6
cggctcgacccaagcgtcaagtgtgattagtatattgtcggtactatggtatcttaattcatgttgtaacctatgtattaggacaccatagtcctacctaaattggactctctgtaatcattccggacaacttgtactgctatatatataatacaattctacttttgctgattaaaaaaaaagtgttaagacttaaatatctttttagctcttgtaatttagtgtcatttttgctttagtcttgcaaaattattctttttatttttagtccttgcaaattatgtttgttatttttcttccttatgatgctttagataacattttttttactgatctaagcgctatctaaggtgttttaaggactaaagataaaacaaaaaaatttgcaaggacaaaaaaaagcaaaagagcactaaattgtaaggaccaaaaatatatttaaacat

SEQ ID NO: 29001 - DNA, 63 bp, Glycine max
  Clone ID: LIB3051-011-Q1-E1-H8
acccacacgtcagaaaaaaaaacaagaaaaaaaaaaaaaataaaaatataaaaaaacgaaaaa

SEQ ID NO: 29002 - DNA, 319 bp, Glycine max
  Clone ID: LIB3051-012-Q1-E1-A3
cgtcaattcataacctctcatagttccaatactggtaacaataatactcttgggcatctaaactatctccattcttttttccccctttctttgcagtggatttgcgaggttttaaagaaattaaatgcgtttttatgtgctaaagagctaggtaattatagaattcatctcacacatacttctttttactaccttttatcttttagattttatttttgaattatccttgtttaatggagtaatttaattcgttgaggggttgtggaatttgtgtagaagattttcctataagaatttttaattcgctaagaaaatcctc

SEQ ID NO: 29003 - DNA, 382 bp, Glycine max
  Clone ID: LIB3051-012-Q1-E1-B11
gcgtcagtcgggcctctatattttttccctatacaaaaaaaaaagctctgtgctttgtctaatcaattgagcttctagaataggaaagaataatatgtaggaaatcttacagtactcacaaaatttgttatttttgctgccctgagaatttggagagatatcttgttcggaatttattactaaatcagtaaagtctgaataccttcgattatggatctagtttcttgggtgtgtagagactatatcctctaattctaattcttgatcttcaaatctactcactaatttcagtaattttcaatgttcactacatgctgttaatgatttgaaaaagatgatttcattacattgttttatttagtgttttggattggctatgcat

SEQ ID NO: 29004 - DNA, 368 bp, Glycine max
  Clone ID: LIB3051-012-Q1-E1-B3
gaccgacccgtccgcttccttcaatggcggtttcttctctctctgttactcctctttcgctctcaaattcttcgccctctctatcttccaagccaaagtttccatctttgtgttttctctctggcaacaacaccacattgagggtaacatgcccaaaacctctgcactcatccactgttgttcatgttgctaccgaagcgttggattcatcccctgatcccttggacccacctccagaaacccttgatgatgactctgacgccaccacctttgaggttggtgacttggggactcctagcacttcagcaattagcattggtggcgatgcagatacaatggcaccaaagcagaagattagaatcaagctt

SEQ ID NO: 29005 - DNA, 242 bp, Glycine max
  Clone ID: LIB3051-012-Q1-E1-C2
tctagaattcaacggtcgacgcgacgcgtcagctctgaagttgcacccgatgatgcataccagaattttgacaaaacagatgggaagcgtagtgcaaatggggtagatgaaagcaaatattggcgtggtggctatggcgactatggtggttggcgttgtggtggtttgcgtggttgctattgaaggttgccttgtggctatggtggtgagcgtagtggcccttaataaggtggcggctgggg

SEQ ID NO: 29006 - DNA, 257 bp, Glycine max
  Clone ID: LIB3051-012-Q1-E1-D2
aattctaaggccgacccacgcgtcaaataaaatattgtgttacaaataagaaacgaaacccacatcacaatccaattccatgaacccttgtatgggtgcagaaaatatgagccaagtggaagaagagcaaggatatgtcttcaaagaagaaattcaacccacggtgttcaaaacttccctgttcttcgcgggcgaaggcttcaccgtctaagaatgcaaagggtaacttgtgttcaaaattgactcttaagggcccg

SEQ ID NO: 29007 - DNA, 269 bp, Glycine max
  Clone ID: LIB3051-012-Q1-E1-F11
acccaagcgtcagatttaagtgtcactgcaaattttccatcaatttcttgagtgagccccatcagctgatttgtagtattctagctatacttgcaaaatcagtgtcactcagtaatggtagcctcttgatccatgatgctcacttcaactatttggtgcctttgcaaattgcaaattttcaactgaaatcctctcctctatgaaatctttctttttgcttatcacctttctgaaatgagaattgcaacataacttgtaattgtaagttg

SEQ ID NO: 29008 - DNA, 359 bp, Glycine max
  Clone ID: LIB3051-012-Q1-E1-F12
gacccacgcgtcagccaaattttcagtttcttcctcgcttttctgcaaaatcatctaaatccgtttctgatcctgaatcatcagtttttcccttgaaagatgggaagtggcaaggacaaacacaatgaagaagagaaaggagttttctcacatctggctcatggagtatctcaagctgctcatgggtaccctccaagggcatatcctccacctcctgtggcataccctccttaccaatggtatccacctgctcaagggtaacctccacaaagtggctatcctccggctgggtatccccctgctggcgaacctcctgctgctggtgggtaaccccctgctgggtaacctccacatgggta

SEQ ID NO: 29009 - DNA, 168 bp, Glycine max
  Clone ID: LIB3051-012-Q1-E1-F7
gcgtcagggttgaagagcatatagagtttttgcgttgaggtggatcggaaggttaattagctagacggagaaggtaggtaaacggtgaagacggaaagtgggggtagtttgtgatttgcgggtgagtgcgtggaaatacggttaggtgggagaagctcgtgactcgtg

SEQ ID NO: 29010 - DNA, 195 bp, Glycine max
  Clone ID: LIB3051-012-Q1-E1-G12
gactcacgcgtcagtacagttgtccagattctcatatcgttatatgcgtatttctttcaagactattactgcaaaagagttacatactgtcatgtctttacgagctttcctgttatccgtataattatcattgtcttacattttcatgagtactttgggtgcttccaagtagttgtaatgggtaagcattaattg

SEQ ID NO: 29011 - DNA, 396 bp, Glycine max
  Clone ID: LIB3051-012-Q1-E1-G3
cacgcgtccacactcctaaaaatggtagcagttaatctattgttgctgccaaaaaaatgagttataaattcaaaaatactgatacttccaagaaaagtgaatcaaaggatgatggcagtatcaaacaaaaaccttctgccaagtttaagcatgaaactccaaaaagtggaaaatccaagcaagaaaccccaaaggctgccatttccaaaggaaaacctgtcaaaagtggtggaaagactgatgttaatggtaccagcaaagcaagatctggtttaattgaagagaaaagattccgagaattagaactctgatgtttcagctggagagagagagaatgcaagggcaagagtgcaaattcatcaaaggcaaaaggaagtgacctgaagagtggaaaga

SEQ ID NO: 29012 - DNA, 102 bp, Glycine max
  Clone ID: LIB3051-012-Q1-E1-G4
aattcaaaggccgaccgacccgtcaacccacgaatccgacccgccttcttccgagaaacaaatcctttgagcaacaagcgcttttcaagcgcaaggggaatt

SEQ ID NO: 29013 - DNA, 355 bp, Glycine max
  Clone ID: LIB3051-012-Q1-E1-H4
aagctgaagaattggaagtgaaacgtcatcggtgtcatgaagagaaaccaagattttctaaggttggtgtccttgaggagacagaagagaaaccgattctttctggaagttgtgtggctgatgactcaatagacgagttgaaggaaatcacaactggctttgaacagtgtcaaacaagtgaagaatgtatggcaacaactttgaaaaatgttaagtctgaagtagcaggagaaagtgaagaaatggagagagaattggacgaagttgtgaaaaactctggcataggttgagaggttaatcactttccgaaggaacctatggatataaccagtaatgcaagaggtaactattggta

SEQ ID NO: 29014 - DNA, 112 bp, Glycine max
  Clone ID: LIB3051-013-Q1-E1-C10
gagagttgaaaacatatagggaaatggtagcccattaacgatcaataagatcactttccttaatgatcgccaaacgatatttgtgctacccactctataaatcaatgttgat

SEQ ID NO: 29015 - DNA, 392 bp, Glycine max
  Clone ID: LIB3051-013-Q1-E1-C6
attcgcgcgtcgatccatgcgaccacctacgcgtccgcccacgcgtccgcccacgcgtccggaatattctcagccaagggtaatcccttatcgtcttgcagctcatcttacatcagcatttgctatttactgtggcctcttttggactgcactttctgttgttatgcctgaaccaccagctgaatcactaacatgggttcgtggggcagctaaagtgaggagacttgcattgcctagcatcatacttgttggtcttactgcagtctctggtgcattcgttgctggaaatgatgctgggcatgcttttaatactttcccaaagatgggtgatacatggataccaggagacatttttgaaatgaagcctctgattcgaaatttctttgagaata

SEQ ID NO: 29016 - DNA, 396 bp, Glycine max
  Clone ID: LIB3051-013-Q1-E1-E10
acgcgtccgaaaaaaaagagagctcaaattcatgagtctgaacgagaaagacaggctcacataaacattgctgatggaaagaagagttcagttatcttagcatcagaagccgcaatgatggatcaagttaacagagctcaaggtgatgctgaagccatccttgctaaagcaaaagcaacagctgagggactaactgttgtgtcaaaatcgctaaaagaaagtggaggaccagaggcagcaagtttaaggattgcatagcattatattcaagctttcagtaacatagccaagcacggcacaacaatgttgcttcctagctctgcatccaatcctgctaacatgatggcccaagctcttactatgtataaaatcctgcttggtaatcctatcaatgat

SEQ ID NO: 29017 - DNA, 378 bp, Glycine max
  Clone ID: LIB3051-013-Q1-E1-E3
ccggtcgaccacgcgtccaaggacgcgtgggaaaaaaaaaaaaaaataataaacataaaaaaaaaaaaataaaaaataaatcagcgatataaaaatacaaacatacaaaaaaaatttcaaaatccaataaacatttacaaaaaacttaaaaaaaaggggggcccccccaaaggttcaaactttacttaccctttaatccaaatttcatacccttcaaaattttcccctaaattcatttcactgcccttccttttaaaacttcttcatggaaaaaccttggttttacccaatttaaaccccttccaaaaaatccccctttctccaattggcttaataccaaaaaggccccacacattttcccttcccaacattttccca

SEQ ID NO: 29018 - DNA, 179 bp, Glycine max
  Clone ID: LIB3051-013-Q1-E1-F12
ccacgcgtcagcaccaatacaaaataaccactcactgaatattcggtcgaagatgtccgccgccgaagaagctaaagttcccgccgtcgaaaagccggtggaggacgtgaatgcgcccaagcttggcaaggagaaaaaacctaaaggccccaaagaaaaaaaacccaaacaaggccaaa

SEQ ID NO: 29019 - DNA, 80 bp, Glycine max
  Clone ID: LIB3051-013-Q1-E1-G2
cgcgtccgaataaattagtgttttctcttgtcacataaaagtcatctaagaagaattacaagattatcaacacaataaca

SEQ ID NO: 29020 - DNA, 397 bp, Glycine max
  Clone ID: LIB3051-013-Q1-E1-H2
acgcgtccgaacagatatagtgcaaacttccttttgtcatatgttctgaacaacttttactagcttaccaacatcagggagaccatccttccttataacaaatgttcgtttcctctcatgatctagcaccgcaattatgtttggagagctaagatacactcgatccacctgccaggaaggaaggatgaattttgaaaaactctttattcatacccttcattattacaaaacctaaagactttagtgaatttgatatgattgacaaaactgcataggctagtattatggtgctatagttaccacaacttgaagcaaaagcttataattgcatcacggaactatcaatatctacatgttgtaaacattaatataacctggagagatttacctcagattc

SEQ ID NO: 29021 - DNA, 392 bp, Glycine max
  Clone ID: LIB3051-013-Q1-E1-H7
attcgcgcggtccgaccacgcgaccaattaaatatcaacaatttcgcccaagaaaccctctctcttgtctcgtcgcttcaaactcctctgcggtttccccttcatgttcttcttcacagaaatggaggtaacagtggccaaagcgttgaaaccgagtttaaggagagagttcatcgttcagcaaatgctctgcgaggatattttcaacctgaacgccaacaccgtcgccgccggcgaagatttctccgtcgacgacctatttgacttctctaacggctctcttcacaacgaacaacaacaagaatacgatgaatggaaacaaagtttaacggcttcagaggaccgcggagaatacgattgcaaatccaattccaccggcgtttcccatgatt

SEQ ID NO: 29022 - DNA, 277 bp, Glycine max
  unsure (1)..(277): unsure at all n locations
  Clone ID: LIB3051-013-Q1-E1-H8
gacccacgcatccaaccacgcgtccgcacttttcttgcacgttcgatcaacttgacatatcatcttcctgcttggtttgttaaactagaggagaagtttggtcatacctggctccttcactctgccgtgagcttggaattgtggtagtcgcaaccttgccattgtctgtctaagtctcaatagccaaccacaagcttggtcttcacttcgaccatcgtgcgggtgaggtaatcaatgaagggcaagtcatanggtatttggatcaatttggcactgg

SEQ ID NO: 29023 - DNA, 410 bp, Glycine max
  Clone ID: LIB3051-014-Q1-E1-A11
cgacccaagcgtacgtttgaatctgtattttcttaaaggaaactgtgtgatcgatgttgtaaatcttacaatataaagaaaatcaagagattcagttcttcgaagtgacaacgttgttggaaaacatggtgtgcttttgttttcttgtggatcagacaaagaaagtgaagcggagcaagccggtggcagggtcgtgctcgcggtgcggcggcggcgccagcgtggcagacatgattactcaaactagattttgctttgttcctttctattggaaatcttggaaggctattatgtgcactttctgtggagccatgctcaagtcttacagatgacaaattacttgcaaacaaggttttaaattgcattcgcgattaattaggtttctttgtatttcatgatatcgtaagaaa

SEQ ID NO: 29024 - DNA, 404 bp, Glycine max
  Clone ID: LIB3051-014-Q1-E1-A4
acgcgtcaacgatttgcctaaggagtccttaagaaaattttgcctgaaaaaaaaggttaaggccttaaaaggcatttcattcacggctgaaggaaatggcgttgttttttatgttagcggctaacgatttagacatatatcttaaccgtcaggaaaaattcctcgaatgtaagtttagagatactgaaaacattgccacagttgcaacatatggagcatcaccaaagaggtggcacatttggtgatggtggtggtcgtggttaccggtttggtggaagaggtggaggacgcacgaatggtaagttctccaatggtggcggaagaggtggacttggcggcaactggggttgaaagagatgggtaagctgagaaaggacttagggagttgagttttcactctgctc

SEQ ID NO: 29025 - DNA, 426 bp, Glycine max
  unsure (1)..(426): unsure at all n locations
  Clone ID: LIB3051-014-Q1-E1-A6
acccacgcatcagcggacgcgtgggcggacgcgtgggcggacgcgtgggcaaggagctggggttttatttgcagcttatagattaatagagaagatagttcttctactctactgtggagatattcctgaaagatactcagccatagcatcaaaatcccgtgagtgctttgggttctttcgacgtgggtcaaggttgcttggttggtggtcaatagatgaaggaagtagagaggaagaagctagacttttttgtgctgggagtcctgggtataatactttcacccctgatacggtgaagaaaatgcctagggcagatctggttgaggagatttggagactacaagctgcattgggcgagcagacacaagttacaaaatttagccaggatgagtatganagacttcaaaatgagaagatcttatgcag

SEQ ID NO: 29026 - DNA, 288 bp, Glycine max
  Clone ID: LIB3051-014-Q1-E1-B4
cttcgcccaagccttcggccaagccttcgcagggtgatttccaggtgcatccctggtcaaatttgcccaccctctcctgcttccagcgggtttcttgcacaaacgggtttagtccctgttgaacatcaaatgcgtgagatgggcttagagaacctaaagagcaaatgactttttcttataagatgcgtgagatgggcttagagaacctaaagaacacatgactttttcttataagatgcgtgagattgggagcttttctgaagatactcttgaaatgtttgagaaata

SEQ ID NO: 29027 - DNA, 335 bp, Glycine max
  Clone ID: LIB3051-014-Q1-E1-B9
cgacccaagcgtacggggtaatgttctgcctgtcactggttcttgtctcagtcaccattgcacattcttcgatgcatattctcttacgcactctctctcgatctcacgctttctccttctgtctccattgatcgatttcaaccacgctccacttcatcagctgtgctccgccgttctcctcggtgttactccgcatcctttggtcctacactcttagcttccgaaaacgaatccatcatgcagtttgtgatttttggggctgtttatagctctgttgcaaaacatgaacaagtatgctctaccacagtaggtgagcattcagacgtctgttgcac

SEQ ID NO: 29028 - DNA, 417 bp, Glycine max
  Clone ID: LIB3051-014-Q1-E1-C1
accacgcgtcaacagattcagggatgaatataccttcggtatgttctcccaactcctcttatcacctatttttttttttattactaccattattaagggtttactttcttatctgagacttgattgatttggtgtgtgcgcagaacaaaggcttggagaatcgcgggatattgtggccaaataccccgatcgagtccccgtaatcatcttctccttaattaatcaaatatttaatctcggtttatgtagaagcacacggtgacgatgaacatgctttccctaaccctaattttgtcattatatgatcgattcttcttgtttttcttctgcaggtgattgtggaaagatatgcgaaatgcgatctgcctgagttggagaagaaaaagtaagatcatccttcatgattgaagtcatgat

SEQ ID NO: 29029 - DNA, 388 bp, Glycine max
  Clone ID: LIB3051-014-Q1-E1-C3
acgcgtcaactacgactcctgttggttgttctctcaagtctcaactcccatcccccctctttgacttttctatcagaagagcttgttggagttgagaactgataagaaaacatggcagcacaaaggcctgtggtagtaccatcacttcgaattttctgtttagctggaagttgctatgggaaggttcacttctcttccttgacaagaacccttgatgtcactgcttcccccaagcaggaacaagttctggaggctggattagacaaaatcacagtgacatgggcattgaacaagaccttacccgcggggacagactctgcctacaaaaccataaagctgaagctatgctacgcgcccattatccaaaaggaccgcacgtggagaatga

SEQ ID NO: 29030 - DNA, 127 bp, Glycine max
  Clone ID: LIB3051-014-Q1-E1-D6
ccacgcgtccggagatgtgttatataaatagacttgtctcctaatatattatctgtagatctattacttatttcgggacatttctaactgtatcgcacatctacggtcgcgtgcacgtgtgcattgt

SEQ ID NO: 29031 - DNA, 392 bp, Glycine max
  Clone ID: LIB3051-014-Q1-E1-E1
ccgggccgaccacgcgtcaagaaccgtacaagtgatgatgtactgcaaccgagtccattccatttccatgtccatgtcctctctgactcgaagagagggttagaacccccatcttcttcccctcaacgatgccagtgccttccaaacccataaacaccttcaccatcacaatcatgctcaccttcaccttcttcctcctcttcttctccggtttcctccacttcccctccgcttcctcctcctctttccctcccatcacccgccccacaaccacgccgcccacggcggaacccttctccgatctggtcgcggccttcaggaaatgggattcccaagtgggctgcgctcgcttcaaacaaaaaccaaatggggtgccccttaaacactcaaag

SEQ ID NO: 29032 - DNA, 354 bp, Glycine max
  unsure (1)..(354): unsure at all n locations
  Clone ID: LIB3051-014-Q1-E1-E2
cacgcgtcaagttaagattagttattcattgcaaccattggatttcaagaaaatctttgagtaacttgatccctcctcatatatatataggcaatatcatgcttttgccttttgtttccttttatattaattgaatttagttatgtctaaattatgctaatgctgattcaaaagtaacgtgcaccataaatagagatagcaatggtgaacagtgcttttagactacagctttatatgttctctttattgaacaatctctttgattgactaaaatttattggaaatcacatatttttgtaggtcncacttgttatttaataattctctcttttgattttgtaattttctataaat

SEQ ID NO: 29033 - DNA, 353 bp, Glycine max
  unsure (1)..(353): unsure at all n locations
  Clone ID: LIB3051-014-Q1-E1-E4
cctttaaaattaataaccaaaaaatggtggaattgggaataaaactaatgggaaaataaaagttgttggaaaataaaaaaaaaaattaattataataatataggatttaattcatggatggggctaatttaaggatggccctttttccttgtaatttgaattgtgttttgtgaggaattttgttctgcctagcatttganaaaggcanagatggtttaattaaggggcaagngtggatgtttaaggtttacacccgccaatttcgtttgttgtgtggttcgtgttatgttatccacaattggaaaatganaaaaaaaagtgatattttctagcttagcgaatgagaatagaat

SEQ ID NO: 29034 - DNA, 408 bp, Glycine max
  unsure (1)..(408): unsure at all n locations
  Clone ID: LIB3051-014-Q1-E1-F1
ccgggccgacccacgcgtcaagagaaatctatcaagacaaaggttggagccttttctgttttgaaagaacttgtggttgtattgcccaactgtcttgcagaccatattgggtcactcattccaggaattgaaaaagcattaaatgacaaatcatctacctcaaatttgaagattgaagccctaacatttacaagattggtattatcttcacattctcctgatgtttttcacccttacatcaaggctctttctgcccctgttctgtcagctgttggtgagcgttattacaaggtcactgcagaggccttgagagtatgtggagaacttgtccgtgttgtgcggccaaacattgangggtctggttttgatttcagaccatatgttcatcccatatataacggcattatg

SEQ ID NO: 29035 - DNA, 395 bp, Glycine max
  Clone ID: LIB3051-014-Q1-E1-F10
tcgacccacacgtacgggtcaatctggtcatttgcaatctggatatcccccttctcagcccccaccttctggaggatatgcccaaccagagtcaggttctcaaaaagctccaccatctggttacggtggtgcagtgcagccggggtatggtccaccatcatatggtggtgtcccagcaggtggtcaaccaggttatggccaggctcctccatcgtatagcaacagttcttatggtgctggtggttatgctcagcctccagtatattccagcgatggtaatgcatgtgggactactcgcggaacctatgatggagcacctgcccaggctgttcaacaggctagtgttgctaaaacgtcacctcagagttgatttagtatagtttgtcaaatttgga

SEQ ID NO: 29036 - DNA, 339 bp, Glycine max
  Clone ID: LIB3051-014-Q1-E1-F3
cccccgaaggttgaacccaataatccatacaagaattttgccaaaccaaatggaaaccttagtgcaaatggggtaaatgaaagcaaatattggcgtggtggctatggcgactatggtggttggcgtggtggtggatggcgtggtggctatggaggctggcgtggtggctatggtggtgggcgtgctggctatggtggctggcctggtggctatggtcgtgggcgtggtggctactgaggttggggtggtcgctttggccctaacgaacataatgacgctgggattgatgctagccctcacaactaagaacgaaacttgctaaagcttatataggattta

SEQ ID NO: 29037 - DNA, 413 bp, Glycine max
  Clone ID: LIB3051-014-Q1-E1-F4
tcacataaagggcatatactacattcaatttttctcattggatcaaatgctgcagccatacttcctgcctattggtcccttcggcagaaggcatttgcagaatggattttgttcacatccagtggcattgctagtgggctatatcatgcatgtgacgttggcacctggtgtgcattgaactttaatgttttacaggttactgctctcttcctttagtggtctctcttacttgaatagctgtgacaagcttcaacattgttctgtgacctgagttccaaataagattctcattcttaacaggattattttatgctgtgaattactcccaggacttgggtgtcaatgatagtagcatgtataaacactcggatgaaaagctaaaatcacttagaatgtgtttggtttgcattttc

SEQ ID NO: 29038 - DNA, 400 bp, Glycine max
  Clone ID: LIB3051-014-Q1-E1-F6
gacccacgcatcagcccacgcgtccgtgacgatattggaccgatcactttctctggtaagaaaaagaagtcatcccaaaaggctgcgaattctgttagcaaaggtgcttctgttgaggaaggtgatgacaaagatgaggatgatgtttcgttagttgcattttcaggtaaaaagaagtcttctaaaaagaagggcagtagtactgctgccaaagggagtgatgaaaatatggatgcagtggatcctgaggcaaccagtgttggtagtactgatgctggcaacagcaatgtaaataagattgaacaggtcactggaaattccataaatacacagaagaataagaagaagagtggaagaactgctcaagatgatgaagatttggacaaacttcttgcagagc

SEQ ID NO: 29039 - DNA, 239 bp, Glycine max
  Clone ID: LIB3051-014-Q1-E1-H3
gcactttcggattcccctcccattttcttcactccgtttcccgctttaggtttttttcctggatggttgtttctcgtccccatactcttcgattccgtggtgcgttccatttcgttcaagattcactcgggtcccttttctgaagccaggcctcgctgccatctgttgaatggttcccgcattatgctttctatcacttatcttgccgagtgctactctcttttcggacccccaaactg

SEQ ID NO: 29040 - DNA, 422 bp, Glycine max
  Clone ID: LIB3051-014-Q1-E1-H6
gacccacgagtcaacaacaatctccacctccagatttgcttgacttgggagaaccaactgtcactgttgcacctccctctgtggacccattcaagcaactggaaggacttcttgacccaaaccttagttctacagcaaatcgtagtggtgctgctgttacgaatgcaccagatatcatggcactctatgcagagactcctgaaagtagagagagcggcagtggtgactattctatccctgtgaggggggataatgtgaatcttctatcagagttttcaaatgcagctgccagaggtactactgtagaaacaacagtgacgcctttgtcacagtctgtaaagggtccaaatgttaaagattctttgcaaaaggatgcaaaagtcaggaagatgggtgtgacaccctcaggtcagaaccccaac

SEQ ID NO: 29041 - DNA, 415 bp, Glycine max
  Clone ID: LIB3051-014-Q1-E1-H7
gacccacgcatcaggtcagcagcaaaatcaacattcgcctcccattttcatcaatcggattcccgagtttggtttttttcccggagggttgtttctcgaccccaagatccccgattccttcgttcgatccatttcgttcaagattcacgccactcccttttccgaagccaagcctcgccgccaacggagaagggttccggcagcgtgctttctatcagttagcttgccgagtgcacatctcgttagcgaacacaaactgcaaaatggagaacactgtgtccgaccaggagacaacctcaaacggtgtcgttcagcagagagaggttatggtacgacgatgcaatgccgtcatcacgactaaacatctctgagctggtgctatagccgctatggtctcgagaacttgtgtggctcc

SEQ ID NO: 29042 - DNA, 405 bp, Glycine max
  unsure (1)..(405): unsure at all n locations
  Clone ID: LIB3051-014-Q1-E1-H8
gtgaatgcactaaaagaaaatgctgctcccttccatgtgagggtttcccctgtgaaacttcttgaacaaccacgtgtttctagtatacctgcaccagaagcaccagctcctagcactgacagtccaccagaaaagaataatgagattggaggtaaggcttatgcaatatttgttgcaaatttgcccatgaatgcaacagttgaacagctggaacgtgttttccagaaatttgggcccattaaacgggatggcattcaagttagaagtaacaagcaacaacaatcttgttttggttttgtggaatttgaatctgctacttcaatgcanagtgcacttgaggcttctcctcctgttaccttggatggacgtagactttcaattgaagagcgacgagcanataatgat

SEQ ID NO: 29043 - DNA, 244 bp, Glycine max
  unsure (1)..(244): unsure at all n locations
  Clone ID: LIB3051-015-Q1-E1-A10
cctcagggtatggtgattaggcctgcttttttcattaattatccaaatctttctcctntgtgatctacttcctcatctgctgatgcatcttccatgatgtntgttttttcctgtttctctctctctctttgtatctcaagactttagatacaaacccttaattttcttggaaaaaattgttcctttgagaacaatgcatgttagatcctaagaatttgctggcttttcttaatcaccaaatatt

SEQ ID NO: 29044 - DNA, 414 bp, Glycine max
  Clone ID: LIB3051-015-Q1-E1-A11
gtcagaaagttcaaaaccctaaacgctacgattttaattttctggttttctctttttcaatcggtgcttcctccggcggcgcgtgggagtgtctttggcgcgtgattcctagttccccgcttacctatgcttcgctcgacccgcattgtagagttcacgccggagagacggcggaatctcaccggacgatcgtgatttcgcatcttcatggcttccgcctaccggaacgaacctaattggccacggcatagaagcggtggagctggattcatgggaaaagtacctttctctaaccctaaccctaaccctaattctaaccctaaattagcgaatggcaagaagaccaatcggcgtccgatgatgcttcctctatcaaccggagatcgaacgacgccgcaactcactcccagtatg

SEQ ID NO: 29045 - DNA, 389 bp, Glycine max
  Clone ID: LIB3051-015-Q1-E1-B1
gcgtcagaccatattctgttacgccaatctgcgtcggcgacgcgaattgtgattactgaacggtgaattttgaggatctgctacgtttttcaacattgaataaggtgtatgtatcagacaagtatttgtcagaatcacattgttaattctcttcgaaagaattcattcgttcatcctccggaattaaaggggccccaaaaattccaattttggaaaatcaattttccccggaaaaatccccgaaattccggaatcctgaacaaccggcaaaattgtgccagagtttgtacttgtggccatggttgcagatcgaagctctgaaatgtcgttattagttggattttagaaatagatttgcatttttccaagcttcagaactgaaaccagcg

SEQ ID NO: 29046 - DNA, 256 bp, Glycine max
  unsure (1)..(256): unsure at all n locations
  Clone ID: LIB3051-015-Q1-E1-B10
aaaaacactggggaacatcagactccaatacatcattcattgagactctgccggagcaaatattcaagccatcattgtccacaatcattcccgagaattcaaaacttgtaacagtatcaccaacagattcagttctgacaacaacaaagaagatgggtgaaatttcgtgcaaagttgtgcagttgtgacagttaatgacaaacctcgtggcatctttacttcanaagatattttgttgcgggtaattgcacaaaat

SEQ ID NO: 29047 - DNA, 367 bp, Glycine max
  Clone ID: LIB3051-015-Q1-E1-B2
gcgtcaacccaatttctgttacaccaatctgcgtcggcgacgcgaattgtgattactgaacggtgaattttgaggatctgctacgtttttcaacattgaataaggtgtatgtatcagacaagtatttgtcagaatcacattgttaattctcttctaaagatttcattcgttcatcttcggtatttaaaggcgctccataatttctagttttgcagatacatttttctctggaaaaatctctgaatttcggaactctggactatctgctacattgtgcctgagtttgtacttgtggccatggttgcagatcgaagctctgaaatgtcgttattagttggattttagaaatacatttgcatttttcgaa

SEQ ID NO: 29048 - DNA, 58 bp, Glycine max
  Clone ID: LIB3051-015-Q1-E1-D12
aaaataaaaaaaaaaaaaaaaaaaaggagccaaaaacaaaagtatcagggcaggggag

SEQ ID NO: 29049 - DNA, 410 bp, Glycine max
  Clone ID: LIB3051-015-Q1-E1-D4
cgcgtcagcccaagcgtccgcccacgcgtccggtctttttctttgccgtgattattctaatttcagatctatatttgtttggttgactttgtttctggcgtcctagttgcgttctcgattaggtttgtgtttgcgattctggtttaactaatgccagggaaaattggtcaccgtcactaattgtcataacttgttgggaattagcgtctatcgagtcggtgatggttcagacttcagaatgatatgaggatgcagttgtgttaaaactaggggatgaaacttactgttgttaaaaattttaagatgatgttgctgattagctattgtgttggcttgaaatttcttatcttatggttttagttaggatggccaaatagataaaacaatatgtaggaagtaattaagttttt

SEQ ID NO: 29050 - DNA, 417 bp, Glycine max
  Clone ID: LIB3051-015-Q1-E1-D5
gacccaagcgtcagcttcaattctctccaacgttaacaaccttcattccatcctcgtatcggttattattaattttaattccacgtaatgggcaactacgtttcatgcaccttggcgcctcctttgatgaagaattccaaggccacgagggttatcatccccaccggtgaagtcaagcaattcacagagatcgtgaaggctgcggaactcatgctcgaacaccccaactattttttggtcaattctcgttctttgcatataggaagaagattctctgctctcggtgctgatgaagagttggagttcggcaacgtgtatatcttcttcccgatgaggagagtgaactctcttgtcaccgcccctgacatggcagtactcttcttggccgccaactctgccgccaaaagattgtccggc

SEQ ID NO: 29051 - DNA, 384 bp, Glycine max
  unsure (1)..(384): unsure at all n locations
  Clone ID: LIB3051-015-Q1-E1-E12
aaaacagctttgattaatgctgttactggtggcattcaaaattgtttctgccaatgcagacaacacaaaggttcaacccccaacttctaagaatatggtgtattatcctcaaagttgtaagtgctgctggttcatatggaagccaatgatcaaatgtgggaaagtttgttgtgaagatggatgttgctcttaaacttatgcaacacaaggttgaagcagacctcctataatttctacagttctatatatgtttctcttcatccagatgcttatataatgtagtgctaaataatcatccaggaatccagaatttgattatgtgccctgcgagtagtttgaanggtaattgatgagttaatgtgatcaaagtttttatttctatat

SEQ ID NO: 29052 - DNA, 395 bp, Glycine max
  Clone ID: LIB3051-015-Q1-E1-E2
acgcgtcagcccaagcgtccgcccacgcgtccggtttagaacaaaaaatatatcttctggaaagcgatttgaattctttagtcaagaaggagaattcaactaaagaaactatttcaaacctgaatggaaacattgctgtgctacaagcgcaggtggaagaattggaggagtccaggaataatctttttctagaaaaccagcaattgagggaaaaagtgtcgagtcttcagtcaacggtccaaaatcatgaaaacagtaacacttcttcctgctcatgggatgcatctgtaaaggatcttgcttctgaaaacgaagacttgaagtctgaaattgaagcagcctttacgttggtggagaaattgatggctgaaaatgcagaacttgttgagaaagtc

SEQ ID NO: 29053 - DNA, 403 bp, Glycine max
  Clone ID: LIB3051-015-Q1-E1-E5
gacccaagcgtcagcccacgcgtccggatggtgatattgaaaagaagtcgagagctattgacgaagagaaggcgaaagaggaagaggacgcggatgccgaaatgcagctcaacatcaaccaagagtctgatgagttcagattgcctaccaaagaggagcttgatgaggaggctctccgcccacctgatctttccaatctccagaggagaaccaaagagattgttcgtgttctttcaaattttaaagctttgaggcaagatgggtcaacgagaaaagagtatgttgaacagcttaagaaagatttatgtactctactctagagtttctattatctagtttcaatcttgtcttgtaaaagaaaaaaatgaagaaaaaagaataaattaaatgggaaataataagg

SEQ ID NO: 29054 - DNA, 313 bp, Glycine max
  Clone ID: LIB3051-015-Q1-E1-F12
cgtcaatttccaactgccagccacgtggaaaccacgtgcttaacaattaagaataacctcgttaagtttttcaaaactagcttccaacaaatgccttcaaagaatcctaacacagttcaatggggtagtttttaaaggtgattaatttgaccattagcgaagcttaaacatgtataatgaacagggttgattcctaatcctttgtatctgttctacctttggagtaaacacatgcatgtactcccttaattattgtaaggcccgacgacagcagatattattataaaatttacaacttgatatttttagattg

SEQ ID NO: 29055 - DNA, 420 bp, Glycine max
  Clone ID: LIB3051-015-Q1-E1-F2
acgcgtcagcttatacagattgcatacttcttggagcccagtcatgattgtctagtggagtgcttgcctacctgcaaatcagacagtaatccgcccaaatttcctcccatcttatgccatgactacctaactcagcgctacaacgacactcatgctgacttgaatgtttataagaaacaacaagcttgagtagtcaacctttggaactgaacagcctggagatttctcacaaggacactcacctaagctgatttggatgtttacaataaacaacatgcttaagaagttagtcttttggagctgagcagctggggaattttggactgcattatgtgttagagttaacagcatcatattgcattggcgatgttatgtagaatttgtttgaatgggaaattaattttgtttttgtgaaagggg

SEQ ID NO: 29056 - DNA, 392 bp, Glycine max
  Clone ID: LIB3051-015-Q1-E1-F4
acgcgtaagctttatttctgcaaacaaatcaaccctcaaatttccttttgcttcctagaaagagttagttcccggaagcttctctctttgcacttgcatgatttgatctccgccgtggattcgtgatggtgattttatgaacttcctcctctgccccctctttccttttctgattatcattatttttatatttaactagagagagagactcatccttccttcgagacatgagatgaggccgatgcaactgccaccgccttccgcttccggggccaaccctgcccctgcaaccaccaacaacaacaacaaggagcagcgtccccagcgccgccgcaaggacctcacgctgccgctgccgcagcgagacaccaacttggcggtgccgcttcctc

SEQ ID NO: 29057 - DNA, 344 bp, Glycine max
  Clone ID: LIB3051-015-Q1-E1-G6
cgcgtacgcatctgcatgagcgtagccttagtgtgttagcttgccgttatgttgatgaacttactattggttcaccttgggaaattacaaacgacatgatcaccactttcaatatctcagtaattgtgcatggtactgtttctgagaagtcattaaattgtgaactagatccatatgagatccctaagagcatgggaatattccgcttgctcgaaagcccaaaagatagtactactgccacagttgcccaaaggataatggctaatcatgaagcttatgtgaaacgcaatgctaagaaaactatgagtgagcagagatactatgaagagaacaaatacgtctct

SEQ ID NO: 29058 - DNA, 402 bp, Glycine max
  Clone ID: LIB3051-015-Q1-E1-G7
gacccaagcgtcagatctgaagcttgatgctctcggttctatcacggatagacccaagtttcattttttatggcagatagctagtaacattcttcccttttgtttttaaagaaggctgatcacttgggagtgaaagaagtgggtgggttttgatcggaaccctgcattttgcaaatattgcaataagttacaggtgtctcaatcccgcctgcttaacagggattttttttttcttttgggttaaaagttataggttggtggttgggtaggggtaggctacggctgttttgtctgcagtggaaggtgctgggcaattgcatcttttggggtattttgatccttttttctttcagagggttgattctacaagataaagtttatgatgtctttggtcaattttac

SEQ ID NO: 29059 - DNA, 368 bp, Glycine max
  unsure (1)..(368): unsure at all n locations
  Clone ID: LIB3051-015-Q1-E1-G9
aattctaaggccgaccgacccgtccgtgaaatattctttatntcagatcctctcttctcncctgattctctcctacatcatcatcttctatctccttgccaaaaacacctcctgtggtgtggacccaaaatttcttgcatgtccacccacaacctgcgccaacaacaatcaaagtataagttatcccttttacatccaaggaaaacaagaacctttttgtgggaatcccggttttggcatctcttgtggcccaaattgttttccaatccttaatctgtctaatanccaatacatcattcaccanatattctacgaaaatcagacacttcgagtgtccaataccgcgttttcagtttcacgaacaaaca

SEQ ID NO: 29060 - DNA, 385 bp, Glycine max
  Clone ID: LIB3051-016-Q1-E1-B6
ctcccggccgacccacgcgtcagagaagaagaagaagaagaagaagaagagatgagcgtggaagatcttcctgggaaagaggtaaacgtgctgaagggtcacgagggtggcgtgttagccgcgaggttcaacggcgatggcaattatgttctgagttgcggcaaagaccgtaccatacgcctttggaatcctcaccgtggcatccatatcaagacctataaatcccacgctcgcgaagtccgcgatgtccacgtcacacaggacaactccaagctatgttcctgtggtggagatcgacaaatattttattgggacgttgcacctggacgtgtaattaggaaatttcgtggccatgatggtgaggtaaatggtgtcaaattcaatg

SEQ ID NO: 29061 - DNA, 387 bp, Glycine max
  Clone ID: LIB3051-016-Q1-E1-B8
accacgcgtccgcttcaaatctccttctcttttcgcttactcccccttccttcttcgcgatccatcactgccaaatctccccaagatttcgattccgcactgtttcggtgatcgattttctccataaccctcgatccacataggtcatctataaaaatccaaaaccctagttttttcttttccttaatttcatggtggagttttagattaggcacaaacccttcaatgattatggtccctttcgttttccctcggagcaaaatttcatgggtgttcctaaagtttttgaattgaatcgcttttccctgtgattttgtgttccgactttggggcgattcagtgtagatagccacctcgcgatattcattgaacgggagagtgtttttc

SEQ ID NO: 29062 - DNA, 353 bp, Glycine max
  Clone ID: LIB3051-016-Q1-E1-B9
cgcgtcagcaaccactggagagagagacatcccctccgacattttctctattcttcaagcaaactcttcgtctcagatctctctttctctctctctagggtttccgtttctctctctgctatttatgatcactctctgacgcgcttctgtcaccaaatcaagtgcttccgtctcttccccttcttctctgattggaaggattcgtgtggtcggagatggtggtttcggggccaatcacgccggggcaggtgtctttcttgctgggggttattccagtttttgtttcatggatatattcagagtacttagagtacaagaaactctcatctcctcccaaagttcattcagatgct

SEQ ID NO: 29063 - DNA, 433 bp, Glycine max
  Clone ID: LIB3051-016-Q1-E1-C12
ccggccgacccacgcgtcagcccacgcgtccgcccacgcgtccgaaaccatcaaggtggaccactgcaagtcaggagctgatctggctaatggcagtaccacagttgaggaaagctcattggaagtggctgagaagcaggatgctcctgaaattcaagcttccgacaatcctgagcaacatgctagtgaagatagtggtaatgcctcaaagcgtccaaggacagaggagtaagccatatgatctactgaatcagcattgaactgacaagacgataccaattcatttaagatttcgatttagtaaggaagacttggtagatccataacttgagtttcccctaacctgttgtgatcaatgaggacttgcatatgtatgtcattgtgttacaaaaatgatgagtcaatttttggaccatgaggttcttcgaacttc

SEQ ID NO: 29064 - DNA, 435 bp, Glycine max
  Clone ID: LIB3051-016-Q1-E1-C9
ttcccgggctcgacaaacgcgtcagctttgcaggcatctcagactccagttgatgagatgatgagacatgcgtatgttgatcctaatgatccaacaaaaatatttctgcaacaacccaattctgattctcagcttaggcgtcgaacatatcagccacaggcagatggaggccatgtctgagtctgaaatttcactctcctcactttcatcgtactatatatgggaattgtgcattaatacatcaaaataaataaaaatcttatgagactgtttggatctatgtttatagaatttattttagatcaatatgattatataaaatttgattatgaagtaatgtaatttttttttgtttggataagagattgaagtgatttttacgacaatgttggttggattttttgttgacattgaagcttcttataaaagtcatga

SEQ ID NO: 29065 - DNA, 374 bp, Glycine max
  unsure (1)..(374): unsure at all n locations
  Clone ID: LIB3051-016-Q1-E1-E2
acgcgtcagatccgtaatcaacttctatagctaatgttaatggcgaggcaaagattgagccgaaggctgctattgcaggcaatgctggaggagggacctgaatgacaggtcgcgtctttaatttgtaggaatttttctttttttagcagttcaaaatttgcagagcaacctccacaccgtttctacatttcagcatattaatcccagatgcgactatctttcatttgttcattgatgccctcctctatgagatggaaaatattcaagtggtctgaagaagcttgtgttttgttttgttgtagcgttggctttataggtgacagcttttggggtaattantggccatcttcatagggttacnntatctaaaaatc

SEQ ID NO: 29066 - DNA, 437 bp, Glycine max
  Clone ID: LIB3051-016-Q1-E1-E4
attcaagggccgacgacgcgtcaggacaagaaagacgtttttgatcgtgaagcataaggatatgacaagttagcccaagcaaattatgacaggtgtgctgatgatatcaagcatgatatatttcagcaatctacggaatacaatgaagcaattagtcaatctttctcagatgccacaaaatctggtcctgagggtggagcatctcaaagcgattacgtgtacgaggaatcttctgggtactaatacagcagtaattttggccattattatgatccaaatacaaagctctattactcagcagcatcagggcaatggtactcctttaattatgagactagcacatatgaagaagttcacgacgttgcatccaatgtgagctgaatgactgatttaatgtggagaatacgctaattagcaataccacaatcactgtctat

SEQ ID NO: 29067 - DNA, 432 bp, Glycine max
  Clone ID: LIB3051-016-Q1-E1-E8
gacaacgcgtcagggtggttcgtccagtcttcgggttattggcaaccgtagatggggagataatggttatgtcagggctggtcgtcaagaagctcggccagtccatcgtccaaactttcaggattcaggagcaagttcttcttcgcatgagccgaagaagaaagaggctgggaaaattatcacaggcagaagggcaaagagggcacagaaaagggaagctgctgacaaggcggcggaagcaaagcatcagcagcatttagtaaggttgggtaggaagtgattctattttatttatgtcaggccatggccttgaactttccttcccataagttaaatattttctttttctttacattttttttttcttgtacattgtttctgtgctctttactctgaagcatgtaatagatcttggggaaggtgttttagaat

SEQ ID NO: 29068 - DNA, 306 bp, Glycine max
  Clone ID: LIB3051-016-Q1-E1-E9
cgtcaactggaatattcataaggaaaatggtttggacttccgaattaaacatagtctttgcaactttttgtcttcctattggtcctttcagacttgcaagttgcaaatagcaacaaatggcccgagtttgctggttgtgttgctgtccttcacttttgctgaaccaaccgtatcagaagcttgtaaagaggctgttaagtatcaattgattgtcaattctgacttctgaactagagttttcaaggatggtggataaactttaccatgactaagttagtcaagatgtctaactctgatgaacatatg

SEQ ID NO: 29069 - DNA, 274 bp, Glycine max
  unsure (1)..(274): unsure at all n locations
  Clone ID: LIB3051-016-Q1-E1-G1
gcgtcagccgaaaataacggagggatttccttaacccacaaactctcaaataccctctctctctcaccgnacactatgttgcagagacctagacgccgctgcgagggcactgccatgggcgccatcgttctcgatctccgtcccggtctcggaattggacccttctccctcgggatgcctatatgtgaagcatttgctcagatagagcagcaacctaacatatacgatgtggtgcatgtcaagtattttgatgaggaacccctgaagttggatg

SEQ ID NO: 29070 - DNA, 384 bp, Glycine max
  unsure (1)..(384): unsure at all n locations
  Clone ID: LIB3051-016-Q1-E1-G11
gacccacacgtcagcccacgcgtccggacatttctcacctcacatgtgccgatttccttcgagcccctggagttcagacccccctcatcgtccgtttctccactgttatccacgagcgtggcagccccgaaaccctcagggatcccagaggttttgctgtcaaattctacaccagagagggtaacttcgaccttgtgggaaacaacttccctgtcttcatcgtccgcgatggcctcaagtttcctgacatggttcatgtcctcaaacgcaacccaagttccacatctacgagaattggaggatcctcgatttcttctcccgacatcncgaaagccttcacatgttctccttcttattcgacgacgttggtatcactcaagatta

SEQ ID NO: 29071 - DNA, 310 bp, Glycine max
  Clone ID: LIB3051-016-Q1-E1-G2
gcgtcaggaattcttctctgctattttatccctcctttgatgattatcatccctttcgtatctctatgtttaaggggaggtaacagtgcatggggtgtagaagaataagggaaaagatgagaaggaagcactgctacttggtaattaaggttgttgacagaagatagagagcacagatgatgatatgcatattatataatatatagcagggaactcatgatgaattgtgcatcttactcctttgtgctctctatacttctgtcatcaccttcagcctccatttctcactattccccctctacaccaactg

SEQ ID NO: 29072 - DNA, 436 bp, Glycine max
  unsure (1)..(436): unsure at all n locations
  Clone ID: LIB3051-016-Q1-E1-G4
acgcgtcagcgctgaagtcagcgcttgcgtatgacgtggccatggacgtgtgggtcncgctccccgacatgtcgcgtgagcgagacgagtgcaaggccgtgttccgacgcggcggcgcgctctgcgtcgtcggagggtactgcacggagatgcangggcgcttcgagcggagcgcggaggttttcgacgttgccaagtggaagtggggcccagtggaggaggagttcttagatgccgccgcgtgtccgcgcacgtgcgtcgacggcgcggatggtgcggaggggagaatgttcatgtgccggggtggtgacgtggtggcgctgcacggggacacgtggcggaatgtggcgaaggtgccgggtgagatacggaacgttgcgtgcgtgggagtgtgggaagggttgatgctggtaattggatcgagtgggtttgggga

SEQ ID NO: 29073 - DNA, 400 bp, Glycine max
  unsure (1)..(400): unsure at all n locations
  Clone ID: LIB3051-016-Q1-E1-H2
ccacgagtccggacatgatgaaatcttagtttactaagttgtccatttgagctaagcaataagcatccatttaataaaattgcgacgtggtgtgaggaccagcagtataattttccttcagcaaagcaagttgcggttgtggatgtgttgctgagatgttcagacattttctgtccttttctggttggttctaatanggatcttcctcctcatcgacattcaattaattccaatttttggtattgttacaatagcctcatatttaaatactaactgccaaatanggccaaataaatgtcagtgactgattccatatttaagaacttgtgcttccattagtcagcaaatacgtaagtgtgtttttggattctgttgtagtaattggacccatcaaacaatg

SEQ ID NO: 29074 - DNA, 435 bp, Glycine max
  unsure (1)..(435): unsure at all n locations
  Clone ID: LIB3051-016-Q1-E1-H4
cgtcagggaaaataaagcctcgtgtcggtggtgctcttgcagtgcacgcaccctcgtgtcaatattcgctgcaattcttctcctattccaaccaaattgcatcgctaagcaacagcaccaaccatgccctccttcatcctgcggcataattggcaacatatcgttcccatttcgcctcaaagacgacccaagccactgcggcgacacaaggtaccagttagattgcgtgaataacgcgacgctgttaaccttgttctcgggaaaataccatgtacaagatatcgattacaagagatacaaaatcaaggttagtgacgcgggtgcactggaggactcaaattgtttcatccctcgcaatttcttatgggatggtaatttcaggcccaccggcctggtcngcccagatgattttggattacagccgtntgttttgga

SEQ ID NO: 29075 - DNA, 353 bp, Glycine max
  Clone ID: LIB3051-016-Q1-E1-H6
acgcgtcagcggacgcgtccgcccacgcgtccgcccacgcgtccgaaaaaaaaaaaaaaaaaaaaaaaaaaaaaaaaaaaaagaaaaaaaaaaaaaaaagaaaaaacaaaaaataaaattaaataaaaaatagggaggtcgttcataaggttagctcttatacttattcatgaatgtaatgtttaatacttttatatagtgtaacctggggttcatttccctggtgattcctctttgaagttcgtgaccgggaatttgttgggctttactaaacattaacgtccttgcagatcacccggctttcgttttcagccttcttagtggagaagcctacgcgttttgccctttcaaac

SEQ ID NO: 29076 - DNA, 115 bp, Glycine max
  Clone ID: LIB3051-017-Q1-E1-A1
acagctcactaaaaatttcatgtatacagaattaatgtgaatcctgttcccttctgacattttttttttgtccccatctagtaattagaccacatccggaacatcgtataaatct

SEQ ID NO: 29077 - DNA, 123 bp, Glycine max
  Clone ID: LIB3051-017-Q1-E1-A11
gcgtccgccatactcaacctcctactgagggatggggccccacttcttgccaacgtgtaaccataccttgcttatgcaaatgatcaaagcagtcctcgtgactatgctcggtttaaccaacaa

SEQ ID NO: 29078 - DNA, 398 bp, Glycine max
  Clone ID: LIB3051-017-Q1-E1-A4
ccacgcgtcaaggaagagagaaaagagggcttttaaacctgagattttgatcagagttagagacgcctctgtttctgaagccgaagctgccaccattgctgctgaggttttgtggggttccagcccatgaaaactgaacttcctcttccaagtataaaagaacttcaattcgagaccaccggttaaactcaacaattaatcgattatgtatactataggtttaatttgtcctgtgttgtatcatgtatgtacagattgggttttacgaacggggagttcaattcatcaaatgtgtaattattgattctttcttcacccactggtcactggaggtgaataatgcatgtgaagaatcgagtttgtcatgttgatatgtcattgatggcttgtcaccttta

SEQ ID NO: 29079 - DNA, 363 bp, Glycine max
  Clone ID: LIB3051-017-Q1-E1-A5
ccacgcatccaccaatccgtgtgttctggggaccaaaattttgaagaatccaaatggggaaacctccacacaatttgtgaaactgagtcactttggggattcactgcgactatcttcaccaaagaggagagacaacttgatttacctcggaaaaactaattccttgagtcttgggaactgggcttaaaccccatcctaacaggttcgccacatgcaggtgatatcttccacatgatcagtggactcaattttgactattctgttccaatcacgccacttttcacttcaagtagctctccgcaaatgccacactactggttggaaaccaattttgacttctcaagatttgattccttcagaaca

SEQ ID NO: 29080 - DNA, 81 bp, Glycine max
  Clone ID: LIB3051-017-Q1-E1-A7
cgacccacgacgtcagcctatgcgtcggatgtgggttacggtcgaggtccgtttacaacagctgatgactcatcagattcg

SEQ ID NO: 29081 - DNA, 300 bp, Glycine max
  Clone ID: LIB3051-017-Q1-E1-B10
acccacgcgtcagcccaagcgtccggcctgggtgtggcttaccctgtgtatccttttgatttcatattctgagcatttgaatttgatagactctgtatcatatggacaagtagtcgttcagaattagatagttatcctacgctttttatctggggatgtaccaaattgtacacttaatttaggctagacttttttaacttagttcatttcacaatattctaggatttctgtttatgtgacttcttgagttccacacatgtgactgtgacctatcgtgttttttttagtacaggcttaagt

SEQ ID NO: 29082 - DNA, 392 bp, Glycine max
  Clone ID: LIB3051-017-Q1-E1-B7
ttgcttcgacttaggctctaaagtgactagcaaatcacgtgtcctcattctcgtcgagagtatgttttctctctctgttcagacttcagagtacgcttcctctctcacggtgggtttcattatgccataccactgaagaacgaagtttatctctctcttgtgacttgtgagcaattcaaattgcggagaacctacacactgcattggaagatacaagaatatcatcagtttctcctattcattaactccagttactcactgaagataacattggaagcattgggcaataaaaatgagcaattcctctgctggaacctcatcaaaaccaagaacagcttcctcacaaccatcagaaacttcgtccaagcgcaaaagaggagttttccaaaaag

SEQ ID NO: 29083 - DNA, 371 bp, Glycine max
  Clone ID: LIB3051-017-Q1-E1-B9
acgcgtcagcccaagcgtccggcctgggtgtggcttaccctgtgtacccttttgagttcagattctgagcatttgaatttgatagactctgtatcatatggacaataaaaggttcagaattagatagttatcctacgctttttattggggatgtagcaaattgtatacttaatttaggccagacttttttaagttatttcatttcactagattctacgatttctgtttatgtgacttcttgagttccacacttgtgattgtaacctatcgtgttttttttagtacaggcttaagttaaaaaacagaaaatacaacaaaaattgaaagagaaacaaaatactggaaagggtcaaaaaaaatattgcatatgt

SEQ ID NO: 29084 - DNA, 269 bp, Glycine max
  Clone ID: LIB3051-017-Q1-E1-C1
acgcgtcagccaacgcgtccgatgagttccaaagtttttcttattctacttatgttcatggccactatacttttgatctcctctgaggttgcacccgatgatgcataccagaattttgacaaaacagatgggaagcgtagtgcaaatggggtagatgaaagcaaatattggcgtggtggctatggcgactatggtggttggcgtggtggtggttggcgtggtggctatggaggctggcgtggttgctatggtggtgggcctggtgggct

SEQ ID NO: 29085 - DNA, 405 bp, Glycine max
  Clone ID: LIB3051-017-Q1-E1-C8
acccacgcatcagcccacgcgtccgagatcatctcaaatcatattcatatcgcgtttggttttgttttgtttttctattttaacacaacagaagcaccaactttctttttctctttcttttagggtccttcctcactctgaatccgccattgggctgcgatggcgaagacgcgaaagtcggtggcaacgcgccttgacgaagtggatcgaacgatgtactccactttctgcagcagcgccaactccctctctcagctctacacccacgccatgaagcaacaaaaactctcatttcaggccggtgaacgacacgctcttgagaaattgtatcaatggattctcaggcaacagcaagaaggatctagggtggccaccattgatattgttacccatttgcagaatgag

SEQ ID NO: 29086 - DNA, 405 bp, Glycine max
  Clone ID: LIB3051-017-Q1-E1-D11
cacgcgtcagccaaattcaagaaattttttaaacttgacatatctgctatcaccttttccgtttcttgcgattcgacgatggccgatcaaaagctttcagaaccggcgcttaaacgtgagcagcgtgatgaattcgtgagtagtctatattttgaacaacgaattcttgaactccgacttcttcaagacctcgagaacaatgatgaatgtaagaaaaatgggagcctgaaaaggttaaatgaccagagtgatgtctgtggatttagaagttgcttcaaaaatcattatgattcgcttccgaatcagaggtgcttgaggaatcgagaagaagtgattcaggagacgatggaaatggagttggaaaatatgatggaactgggcaccctcaagggcaagaaaacatat

SEQ ID NO: 29087 - DNA, 142 bp, Glycine max
  Clone ID: LIB3051-017-Q1-E1-D6
aattcgccgccgacccacgcatcagcccacgcgtccgctcatgtctctcttcgcttaatgttcatttatcccgctcggtcctcacctttacttcctgggagtgtttgtattagactatgggttcatggaggtaatgatggtt

SEQ ID NO: 29088 - DNA, 413 bp, Glycine max
  Clone ID: LIB3051-017-Q1-E1-D7
gacccacgcatcaggccacgcgtccgctctctccctacttcgcaacgatgccgtcttgcaacgtcggaacgcagctaccctcccccgtcgccgacgtgcccctcagaaatgacatcgagatagtctacagaagttacggtggcggtcgaaccaaagtgctcctcatcatacgattggccgcgacgcacgaagcgtggggcccacatatcaacggcttgactggagcaaccgtccccgacgacgtcgtttggagcgaacaataaggcaatggtggcatccatgtatgcgcgtctgacaatctcggcgtcggtcgcaactccgtgactgtccaaaaatctgaattctgaatcaatatcatggcgaacgatgcaattgcgctgttacatcatcaaagttggaaaaaagcccatgtt

SEQ ID NO: 29089 - DNA, 324 bp, Glycine max
  Clone ID: LIB3051-017-Q1-E1-E1
acgcgtcagcgattcttctctcagattcagataccaattcggtttcttccgaaccaaacttgtttttgagaaattcggcaattgattttccatggccaacaatccgtcacagcttctcccatcagagttgattgaccggtgtataggttcgaaaatttgggtgataatgaagggtgacaaggagcttgttggtactcttagaggctttgatgtttatgtcaacatggtccttgaagatgttactgaatatgagatcactgctgaagggagacggataaccaagcttgattagattttactcaatggaaacaacattgccaattt

SEQ ID NO: 29090 - DNA, 375 bp, Glycine max
  Clone ID: LIB3051-017-Q1-E1-E5
aattgccggccgacccacgcatcagggaggtggctcccttgctcgttccttataatgcggtggctcctcctcctcccttgtcggcggttgctgataatgtggtggctcatcctcctttgctggcggcgactgctgataataattatctggtggctcctcctcctcctcccttgcaggctattgttgatggggcctatgtttcaaccgacgaccttgacatggaacttgattggagtggtataattgacagtgatactttgccatcattgaactttcattacggggagtgtagtagccatgctgagtattccaaagtattcatcaaggatcaggagccattggcagacacttttgaaatttcctgtcctgaaaatg

SEQ ID NO: 29091 - DNA, 353 bp, Glycine max
  Clone ID: LIB3051-017-Q1-E1-E7
aattccccgtctgacccacgcatcaggccacgcgtccgctcttccccaacttctcttaaaatccatctagcccgttcggtacgcaactacacacactggttgtctacatattcgtcgatgagatcatcgccctagtggctccagctacagtttgcagtcgtacattagatatcatcacacatgtcatgctcgcgagctacgaagcctgtggctcatgtctcgacggcttgtgtacatcatgcgtcagcaactacctcgtatatagctagcattaacgcaggagaggcaaacttgtttgcgcgtctgatagtctcagcttctgtcgcaactccgtgacagtcctacagtctgat

SEQ ID NO: 29092 - DNA, 227 bp, Glycine max
  unsure (1)..(227): unsure at all n locations
  Clone ID: LIB3051-017-Q1-E1-F12
gacccacgcgtcagacctacatgcatgtaggtgtccaggcttgtacctatggtatcaagtttccattatttctcncttttcattttcaatgcatgggtatttaattctgcagtttttttaggtgtcctgtattcttcctgaaattatatttaacggaaaaaattgtcatctgaaaaacaaactctgattgtattggatttgaagaaagtcaagttattttttattgc

SEQ ID NO: 29093 - DNA, 351 bp, Glycine max
  Clone ID: LIB3051-017-Q1-E1-F6
gacccacgaatcagcccacgcgtccgctgacgcgtgggtgaaattgaaatacaccaatctctctccgtacgatgttgccctgttccgtcatcaattctcgtgtctaaggacacagtttgcttgacaaatttacatgttttcatctcgatgttatgattttgaatatgtatgactatgccattgataacgacacatgtggttttgccacaagtggcttgtaaatggtttcaggtcttgtcaattgtcacatcacggacgatactcaattggatcttagttggtacaatgtctcctgtcccatatgcttggatttacctcagtacagtgttctcctgcattgggcatcgcatg

SEQ ID NO: 29094 - DNA, 409 bp, Glycine max
  unsure (1)..(409): unsure at all n locations
  Clone ID: LIB3051-017-Q1-E1-G12
acccacgcgtcagaacaacctcaaaatatattggaccaaggcctactacttctgttattctgcatatgtattctgcatatgctgtcaattttattttaaccactttttgttatttagttaattctgttacaataattatgtttactatgtttagtagtttcctattgtttttcctatatatttgtgtatagctggtgactaagagagacaacttttgtaaactttcttgcaagtctatcaatatactgattctgagttttccctcagcattcttttgtttctttcttccttcttgttttttttcattccaagttattacagggctaataacttcaatatggtatcagatgagcaacaacctttatgatcctcttcctgaatgggcctatgatcntctcctttgtcccct

SEQ ID NO: 29095 - DNA, 156 bp, Glycine max
  Clone ID: LIB3051-017-Q1-E1-G2
ccacgcgtcagttatcacttttcagatctctctcccttccttccatcacaaccacaaggttgctgagaggacatatactatggtgaagatttgctgcattggagctggctatcttggtggtgcaaccatggttgtgtttgccttgaggtgtcgtga

SEQ ID NO: 29096 - DNA, 202 bp, Glycine max
  Clone ID: LIB3051-017-Q1-E1-G3
ttttaagtttttgattacgatgttttattgtggtcaattgatggatgatattaaatgttaatttattttataattgtatgttggatgtaaatatatttctccgaaggcaatggtggttcagaagttacagggaggaaagaaaggtttatatgttaaatggattttgttcataacttttttagtttatattcaatggttgttg

SEQ ID NO: 29097 - DNA, 372 bp, Glycine max
  Clone ID: LIB3051-017-Q1-E1-G7
acccacgcatcagcccctttttacgttgcagtcatcgagcgctacaacttttcaaatgtattgcacagattttgggtatactccattgataagcctcatattcaatgcagcaattttaatcgacgaattgacattcgtatcactggatacgattatacatccggtgtgtgacaatttcaagggtttttatacgtgcctagtgtgcacaagctgggtgtgcaaccaatacgtgtttggtggactatcttctgcctcaatctctcagactagggtctatggtggttctctctctcattaccaatcacctagtctggacccaatcatctacaatatgtggatccggtttaacatgatccatgatgtcggtgccaa

SEQ ID NO: 29098 - DNA, 316 bp, Glycine max
  Clone ID: LIB3051-017-Q1-E1-G9
cacgcgtccgcccaagacgtccgcccacgcgtccgcccacgcgtccgaggataaagatacaaagtgggctgatagctatggctgaaaacttggcttcagaatctgggttcatggaacgcaggcttcctaacggcaaagtggaagtaggcgacgtcacgataccaagaatcaccatttcctctgcggttgaagtcactaaagtactaaagtgaacaattactacaatcaaggcggtggcgtggcatttctactaactttgaaaaatctcattctctcttcaaaccttcgtgggaatataacaacatattcactgtgc

SEQ ID NO: 29099 - DNA, 341 bp, Glycine max
  Clone ID: LIB3051-017-Q1-E1-H1
acgcgtcaagcatcgcgtccgaaatttcttactcttcgttgtgatagagatacaatggttatatctaggaaagatgctattctatagacatgacatgggataagtttcaattcttgtccgtgagataattgttctgtatatgttgacgagatcgttccaagctccacttcccttaagtgaattactactttgcttcttcactttttcacttatcccttctgatctcatgcattttcccctcatggatctctttgacttgattctcggttggttcggcttaagctacctggaatatttctgtaccactttttatggtctatctatgttttagccatttttgt

SEQ ID NO: 29100 - DNA, 420 bp, Glycine max
  Clone ID: LIB3051-017-Q1-E1-H12
gcacgcgtcaacacgagcaggagactgggcttttcaaacatgtagcttcctttttggcaagttcttgcagcagacaagcatcaggtgatggagacacattacctttcattgctgcaagtgtttgttgccaaggagcagaaattttaggggggaaacctagctcatcagggtattgctgtcgagagacatgtatgaaatgctggaaagccgaagatgacaagccaataacaatggtttcggggactgtggtaaatggtaacactgagcaaggggttgatgtgttgattccttcatcatctgggaaattatgttgcatttgctctaaaagtaagtacataagggtgcacccagctagcactgatgtgctaacagtgcttctgctgtccttaccatctacaacatgggctggcatcacagatg

SEQ ID NO: 29101 - DNA, 353 bp, Glycine max
  Clone ID: LIB3051-017-Q1-E1-H2
cacgcgtcagccagcgcgtccgaaaaaaaatactccgaaagaagagagagaaagagagaagagaaaagggaaacaaaagaaaagagagagagaacaaaggaaaaaaaagaaaactgataactgagataacaatactgtagatatagagagatagttccaagctccaattcccagaaaaaaattaaaactttgcttcttcactttttctcttaccccttctgatctcatgcaatttcccctcatggatccctttgatttgattcgcaaagggtttggctgaagccacctggaatacttctgttacagtttttaaggtctatctatgttttagtcaattttgtccaaattcctgt

SEQ ID NO: 29102 - DNA, 213 bp, Glycine max
  Clone ID: LIB3051-018-Q1-E1-A4
acgcgtcagccaacgcgtccggagacgcgtgagtaatcatcaatacagtgctgcgtgtgttgctctgtgaatccatcatcttcttccattggaggaccagttcctcctggaatagacatgataatacaggttgccttaatcacttctctgagttgctaagttaattgctccgtcattgtttcactcttgggtctcgcgtacccgtgtcaccgt

SEQ ID NO: 29103 - DNA, 76 bp, Glycine max
  Clone ID: LIB3051-018-Q1-E1-A9
gacccacacgtcaggtccattcaagccctacgaatggagggttgcacgaggacccgagactgaaacttcagataca

SEQ ID NO: 29104 - DNA, 425 bp, Glycine max
  Clone ID: LIB3051-018-Q1-E1-D7
acccacgcgtcagcacaatgtaagtttgtccaatacctccttgttttaacttcacattcttactttttcatagatggacttctttttatttaatcattttgttcttagtcccattcccatcttctgtttgattttaacaccacaattgacactggctttgtttttcaggaaggggctgctaaagcaaaagaacttcttgatactgtgatgaatatttacatcaagactatggttgaagatgatgacaaggaagtggttgctcaagcatgcactagtgtggctgacatcattagagattttggttatgcaactcttgagccgtacttgtcccagcttgttgatgcaacttcattgttgcttcaggagaaatcttcttgtcagcagatagagtcagacagtgaaattgatgatgttgatagtgcaca

SEQ ID NO: 29105 - DNA, 83 bp, Glycine max
  Clone ID: LIB3051-018-Q1-E1-E1
gaccacgcgtcagccaacgcgtccgaaggaatttttaaataaagttgaagggttttccgtggaacttttttgttgggttcaac

SEQ ID NO: 29106 - DNA, 409 bp, Glycine max
  Clone ID: LIB3051-018-Q1-E1-E2
gacccacgcgtcagcccacgcgtccgtctcattgctcagccatcacagcctcgtcacaatttctaacgtcctctgcgctgctccatctaatcacagatcgcagagatcaactgcatgtactgcaaggttgtgaaagctagatagtaatgatatagctgagacgaatatcgagacacataccatagtactactacgcttttgtagtatagatatcatctaatatcgtatggtttcacgatttaataaatctcagaatctgccttggtgtgtgatggatcatagatacagataaggagatagatcggatcagatgtcagcatcagctaattcaccgtgcgcggcgtgcaagtttctgatgctaaagtgcatccatgagtgcgtgtgcgagccgtactttccgcaggatgat

SEQ ID NO: 29107 - DNA, 336 bp, Glycine max
  Clone ID: LIB3051-018-Q1-E1-E3
ccggccgaccacgcgtcagccaacgcgtccgggtagacgcacggatgtatgatctaccgcaggagagcctccggcagctgttctgcacgctgccattgatggacagcgagatgtgccgcgtagtcttgaaagtcctcatgcaactgctgtcaggacatgcgttccacgaggtccacaccagcgcccatctatagatccagcgcctgcaccaccgcaatcgttatcacaccgcttggcaaatcgctctacacgtcttctactcatcgatccaattatggttcgacatcctcctcgacctcatccctgtccacgtccctatctccgtcgacgtcttcc

SEQ ID NO: 29108 - DNA, 132 bp, Glycine max
  Clone ID: LIB3051-018-Q1-E1-E4
acccacgcgtcagaaaatattagtcttacatgttacaactatttctaatgaacctgcatgttgtgtatccgaagtccacaatatttaaggctagatacgatcgttttgtattgtttgtgaggttgacggtct

SEQ ID NO: 29109 - DNA, 267 bp, Glycine max
  Clone ID: LIB3051-018-Q1-E1-E5
cgacccacaagtcagaaagtgttcttggtaataatgcgagctcccagacttttccgagattttcagactcggtcttgtttcatggcaaacaaatcttttggctagttatccattaacatttgcgaacagtaatattgggagatgatttttttttttcagaacaacgtgtttacatttaagttttatttgcccgttttatgcaaattcccgcattcctctaaaaaaaaaaaaaaaagaagatacaacatcaaatattactctgaacaa

SEQ ID NO: 29110 - DNA, 421 bp, Glycine max
  Clone ID: LIB3051-018-Q1-E1-F2
gacccacgcgtcagctcacggagcatgcaatgcaaagacaagtgaagaattcagcgacctggttcaggggcgcccagagtcaatgatggatcatgacttggagaccgctgctttgggggcttaccaggacaagcctagaaccttccccaacatgcgcactaaaccttacacccctctgatatttcgtattttacttggtatcaatgttcgtgtcctcttcattcttttgctcctcggcttgggagctatcttttacgtcggagcttctacttctcctatcattgtctttgttatctctgtttgtattctcagcttccttgtggccatatatcttacaaagtgggtcctcgcaaaagatgaagggcctcctgaaatggttcagatatcagatgctatacgagacggagctgaaggatttttc

SEQ ID NO: 29111 - DNA, 189 bp, Glycine max
  Clone ID: LIB3051-018-Q1-E1-F3
ccggctgactgtacatttaatcatagttagggttcaattctcaatcttggtccttgcagttcccaattcccaataacgttaacctaaatccccgggttcctccggaccaaccaaaaggatttcaccatcggaaaccgaaccgttcggttaagggaattaattaaccagattgaaccaattcaagccccc

SEQ ID NO: 29112 - DNA, 407 bp, Glycine max
  unsure (1)..(407): unsure at all n locations
  Clone ID: LIB3051-018-Q1-E1-F4
gaccacgcgtcagctaaaatataagtacgaactgttctaaacttgaaatgaaatagtgacgtctgcttctttagctgctatacctttcctcagttatcgttaaaatgctcgtatctgttgagatagtgtggttttattgggtatataccatactttgggttcttaacataacgttttgctttcggcgtatataatgggcgtagctgtggttagtgtccaagtttgaatgtgacnccgcatgaacggagagtgttttttagtttctccttttagattttgctgttgccacgtgcaatgtatgcatattgttgctgtgaagacactaaacactgggtacgtcgaactccttcagtttatcaagtatgtactttatatctgtggcattatattctctctcattcttaacg

SEQ ID NO: 29113 - DNA, 361 bp, Glycine max
  Clone ID: LIB3051-018-Q1-E1-G2
gaccacgcgtcagcaaaaattcaggaattaagaacgctgggccggtggaccccaaaggaaacacaaagtattgctaggaaaagaaatccatatatcgcagccgtttatttcgggtgcttcaaccatccaacggtgcaaattctgagaagcgaatttcgtaaccgcgtcgaagacaaacgagtaacaaacgtcacgtttctctccaatctgttcaatttcccgcaacacggatttttccttcgctacgaagatatccctctctttcattctcatagttttcagttttctgccaaatcgccgatgctagaatctgagcttcacgatttatccgatgacgccgattacaccgcgtcgcagcaac

SEQ ID NO: 29114 - DNA, 430 bp, Glycine max
  Clone ID: LIB3051-018-Q1-E1-G3
tccgggccgacccacgcgtcaggcaccctgtcatcaaccaaggctttggtgcaaccatcagagccattaacggtcaacttgaatgtgatggtgccaacccttccacagttcaggctcgcgttaattactacactgactactgtagacaattcggtgttgccaccggtgataatcttacttgctaaggtagcaagccacgctacctatacacatattatatagaataaattatgtatcttcttataccactcattttttcttttcaataaagaattgaaagcttgttccctcgctcaattcacttttaggaggagttttaaacgtatatatcttcattcacacttgtatgagagagattaattcttctagatttctttatgtccatgaatttgaaactcaaatataataagattacgtgtttaatatattt

SEQ ID NO: 29115 - DNA, 438 bp, Glycine max
  unsure (1)..(438): unsure at all n locations
  Clone ID: LIB3051-018-Q1-E1-G4
gacccacgcgtcagcccacgcgtccgcccacgcgtccgcccacgcgtccggggatctggatccatagcatagagagagagaagaagaaaatcttggcttgataattcagatttgaaagagagagaaagataaaagggcaaaatgacaacactctttgtccagaaacccataagagccttcttctcttctgctgcaaccattttattattactataaacaattactataagcaaggcggtggtttggcttttctagtaactttgaccattctcattctctcctcaaaacttcatgggaatattacaaagaaactcactgtgccaccactcatctcaacttggtaagtagggcttgtgtgtgtggttgagaaagaaactttacatgttacacgagtgagtgagatacatgnacactagagagtagagagagaaagagaga

SEQ ID NO: 29116 - DNA, 428 bp, Glycine max
  Clone ID: LIB3051-018-Q1-E1-H10
gacccaaacgtcagatgcttattattacaaacaacaaataacaaatcaaaatactcaaaggatttaaaatgacagaggccgacacagatgatgttggtacgaagtgtaacttctcgttcgcattcaacaacatcaatttctcagaccgaattctcaacattgaggttatacccgaccctcatttcatccgcgcccaatcccattctctctctaccctcgctccaaatcgtaagagacgcagactctctcttatgaaagccaatgatgtcctcttgcaacctgaggaaaaattaaattgtaatttaccagatgcagaggaagttgtggcaatcactgacgcatcactttcaggtgatgaagtttctcatggcaatgattcatcattgggcatgagttggtcaaaagttcttagagttaggaccatacag

SEQ ID NO: 29117 - DNA, 423 bp, Glycine max
  Clone ID: LIB3051-018-Q1-E1-H12
cgggccgacccacacgtcagggcacatggtgacgcaccgtaggccccaaacgcactgccaccacctcatcaggctgatccagctgggtcatttggcatggagcagtatttacagcacttggttcgccagcaggcggccaaccacagggggcaggtgcagacccatgagtgtctctaccagctcagcctcagtctgcagagacagggtttcgctccttttgcgtgccctactccagatcagtttagggctaaggttgcatggcccggagattggcctgaggcccaggcaggggaggcgcccacagaggctcccggcgccacggagaaggcccgtatggatgaggagacgacagatctactcgatttcttgggagggagcagagccacatgaccagaggacccccagattcatattttcttttat

SEQ ID NO: 29118 - DNA, 418 bp, Glycine max
  unsure (1)..(418): unsure at all n locations
  Clone ID: LIB3051-018-Q1-E1-H2
cccacgcgtcaggtaaaaaaatctctcaacaccttgagaaattttatctgttagtaatttgctactactattttacattctctttctctctacgttttattatagtcatggcatctcaagcagtttccttcaagtccttcgccgttgctcttcttgtggcgcttttcttcgccgccgccgcctccgctcaggacttgcctccggcggcggcgccgggacccgatgccggggccgccggagccgtttcgagctcggtcgccatgattggagcttccgtactgttgtcaatgctcgccatcttcaagcactgagtataatctgatggatccatcttgtgtgaagattantgattcgttctgcacactcagatctattgttgctgcttttataatacgttacgagtgatgattattaattt

SEQ ID NO: 29119 - DNA, 245 bp, Glycine max
  Clone ID: LIB3051-019-Q1-E1-A12
tacggtcttaattccggggccaccacgcgtccaacagccgagtacctcaccctcgtcgcttccaagcccgacgagtacgagaagctcggctcctaagccctcatcgggctccccggcaactaagccacacgtttcaactaacccggcgagatctaaacccagtatgccatcgtcatccgcggtggggaatttggttttggggctcctcgcgcgagcacgcccgtgtcgcgctgggcgcctcgggc

SEQ ID NO: 29120 - DNA, 371 bp, Glycine max
  Clone ID: LIB3051-019-Q1-E1-A3
cctgaggcagtatcagctgaatagcttgctcgataatttggatttaaagaaacctggttaaaacacttccatgttttgaacccttgtcagcgtacgatgggattgggattacggaaagtgcagaatggttggtggatgtgatggagagaagcatgaggactgaaatgttaacagcgagggcaggtgcaatgggtccaagtcactagaaaggtcttacattaaactgaagtgatttctcgattcctttatatagctttgtaaatccaaattggattatacctgatcataactgcagcgagcagaatatgtaaaagaataacatcgtgttgcattaaactgagccttgaaatttgatgccatagttgttatac

SEQ ID NO: 29121 - DNA, 433 bp, Glycine max
  Clone ID: LIB3051-019-Q1-E1-B1
acgcgtccgaacaaatttcaatcttcttttcatgatttgttcatctttggtctgaattctcttctgggtattcgagattttcggaaaaggttgatttttcagtgaattgacttagttcgttggccatgtctacgtccgacactggaagtgctggatccagtgactccaatgctaccaggagacacagcaagagacgcaagtactcaaagtttactcaacaagaacttccagcatgcaaacctattctcacaccaagagcggttaattcagcattcgtgaatgtcatcattgtgttcattcccattggagttgcttcattaattgcttcacatgatgttgttgaaactaatgatacgtacgactcacactgcataccatcaaatgtgacagacaacgtggcatacactcagactcctggagaataccatgcaac

SEQ ID NO: 29122 - DNA, 357 bp, Glycine max
  Clone ID: LIB3051-019-Q1-E1-C1
cgcgtccgatcgaatgccaggatcgattgcatgcaccttgcagtactcgatttcagcacttcgacgggggcgagaggcttgccggcgatagtggtggtggccgttgccgcacttgacttgacgggatcctccagctggtggacggatatcaactgcactccgctcagacatgatcgcagcttcgaccacctctcatcctctacagaatcgtcgccgctgtcgctctagttcaattagttcgagtacaatggagagtgtcggagtattgttggatcatgcacgacgtcattcacttactcactttcattgagaatgcagttcggtgttaagttgatgtcctccgtcgggatgtgcaga

SEQ ID NO: 29123 - DNA, 425 bp, Glycine max
  Clone ID: LIB3051-019-Q1-E1-C9
acgcgtccagattgagaccctgatcagtcactcactcactcgaagacgatgagttcgatccgtgatggaaccaccaagccagattgtctcattgcggactaccacgactgatcccgatcatgtgaaagtcattcagtgggacgacttccagcacgatcttgcaaggttggcgagtctctcgtctgcactccacgaagccaacgagaagaagcggaatcttcagcacaagctcgagtccctaatcgaggtcaatgctgaatcattgggtcggttgaatgaacttgaggagatgcgtcaggaattggaatcaaagaaaatgttgatggagaatatgtcgatatgttctaggctggcaaaggaggaagctagcatgcaggaggagcagcttagtggtgcagtgcaatctcttttggtgtcagggggtg

SEQ ID NO: 29124 - DNA, 152 bp, Glycine max
  Clone ID: LIB3051-019-Q1-E1-E5
gacccacgcgaccgacctaccagacctgcattaacttgtgatacattttggacaactgtaaacatacactcaattttacacaaacaaacaacagcagcacagaaaaaaaaaaaaaaaaaaagaaaaaaaacaaaaagggacgctctcacgaa

SEQ ID NO: 29125 - DNA, 275 bp, Glycine max
  Clone ID: LIB3051-019-Q1-E1-F11
cagttgttgtagttctatgagtcatagactgccaattcaccttatgagattgctggcgacaagtctagcaaaaaggttgaataagttgaagcatgcccaataccaatacttccgagtcacataacatatactgcttttttctgagaaacacgtttcttttaaagctaacttatttcagcagcacacctctgtaactgattgtgattaataaaaaatgtattacttatttttcaaattggcgttttgcttttactggctgactgccccagtctggg

SEQ ID NO: 29126 - DNA, 435 bp, Glycine max
  Clone ID: LIB3051-019-Q1-E1-G10
ccacgcgtccagaacgacttatcggttgttcgggacaaccttttagtttttggcttcgacttttttaagattctgttttctgggttgcggggtcgtaactcatccagaagaaagggggagcagagaaacaaggtcgatgagagttgagtttataaggttgcagcagtacgagtgaagtttcttcgttggtgctataaataattaaacatgtcttctgcggcagcttcaacttggatcacgtccttctcgtgttcacccaatgcaactccaaatttacctcactggctgagattcattttcctctctccgtgtcctcagagggctcttttgtctggtgttgagattcttctcctgttgactctctttgtgtttgcgctaataaagctctattcgaggttcacttccattggcaaccagaactcagagctcgacaag

SEQ ID NO: 29127 - DNA, 268 bp, Glycine max
  Clone ID: LIB3051-019-Q1-E1-G11
ctattctacggcacgccgcagatgaacgctgccgcgtgcgacggcggagcagcgtcggagaaccggagacacggtggaaggttctggatcctctcgaatttattccgagccagatcgaacaagaccgaatcctcgccctcgcatcctccgccgtcatggttctcgacaatccttcacgcgcgccggcacaataagtgtcggcacgcggatcgaggattgtcgccgttgacagaggtggagaatttcaccgaattctctgctgacacag

SEQ ID NO: 29128 - DNA, 404 bp, Glycine max
  Clone ID: LIB3051-019-Q1-E1-G8
cggtcgacccacgaatccaaaatttgcttcctctgtttccattcattcttcttcattttggtgtcttcttcagttctacttttttcttttgttttcggttgagttttagagctgctgagggcttccatcttcattttattttttgcgattttggtttgggttctttttctttgattggtctgattttttgtggttttatttttggaacaggctacagtaacaacgacaactttggcatagaagttgtcggaaaagttaagaagaagatagaggtcaattatgggaacctcatgtatgggctgatgaaggagtatatccaacataactgaaatgtcctgtctgatccctttttgccaaagagtgctgctgacactggaggaaaaacatctaccttatgaccccaa

SEQ ID NO: 29129 - DNA, 141 bp, Glycine max
  Clone ID: LIB3051-019-Q1-E1-H10
gtccgcccacgcgtccgcccacgcgtccgcccacgcgtccggtagaactattattgttgtattaatatcactggatcctaataggtgttgggctaaaggcctagagctgtatatgcaccttatatttcaatttgcagtacc

SEQ ID NO: 29130 - DNA, 113 bp, Glycine max
  Clone ID: LIB3051-019-Q1-E1-H2
acccatcgcatcaaaacacggattttctcatcgccagcatcgccttgtaagtgatcgtcaatgggttggtgcagccgattatattcactaacgggaaaaatgccaatccggtc

SEQ ID NO: 29131 - DNA, 254 bp, Glycine max
  Clone ID: LIB3051-019-Q1-E1-H4
cacgatcagtttactaatgttgatgggtaacacttaattggtaacataatcaatgtagggaagccgcccaggagattacagccttggttacgcgtactgcgtcatgattcacgctactaaattgttcccaaaatactggacacaggccatcgatatcagcctgttactgggcaaaaaggattgcatgacccacataagaccgctcaaaggattgcccactttcagcacagggctgcaaccagccaatctgagca

SEQ ID NO: 29132 - DNA, 280 bp, Glycine max
  Clone ID: LIB3051-019-Q1-E1-H5
acccacgcgaccgagcatacataaggtgaaaataaacatcataaaaaaaaaaaaaaaaaaaaataaaataaataaaaaaaaaaaataaaattaacacaaataaaatttataaaattaaataaaaacatcaaagctagtcaaagggctccccctccataggattctcacttcatttggcttacgtgcaaattcttgccacttccaagttctcacccaaatccaattaatcgatcttccttttcaaatttctctctcggtaaaaccctgtttttacccactt

SEQ ID NO: 29133 - DNA, 301 bp, Glycine max
  Clone ID: LIB3051-019-Q1-K1-A12
ccgtccgatcccggtcgaccacgcgtcgccgcgagtacctacctcgtcccttccagcccgagagtacgagagcgtgctgctacgccctcatcggcctccccgccacctacgcccgcgttcatcgaacccgcgagatcaaaccagtcgccatcgcatcggcggtgccaacttcgttgcggctcctcccgcgagcacgcccccgtcgcgctgggcgcctccggcgccgccgcagtggtcgcggaatcgtacgctaggatcttctttcggaactccgtggccaccggcgaggtgtatccgctag

SEQ ID NO: 29134 - DNA, 321 bp, Glycine max
  Clone ID: LIB3051-020-Q1-E1-B6
acccacgcgtccacggacgcgtgggtgcaagcacacaaaaaaaaaaacaagaaaaatataaataaaaaaaaaaacaaaaatgtaaacctgaaaaaagaacaaatcaatcaatcaaaatatagatttggtgtcaggggcggcccctccaaaggttcgtggctctcctactcttgcatgcaacgtcgtacgtcttcgagcctggcacgtgtatccaagtccactgggtctccttttgcactgcctgtaccggggatgcctcgcgataactcatcttatcccccttgcgccatacccccctttcaccattcggctttctgccca

SEQ ID NO: 29135 - DNA, 227 bp, Glycine max
  Clone ID: LIB3051-020-Q1-E1-D11
acacgcgtcaaatatttgttgggcatcgatgtgcgaatcacaagttcagatgatcttccattgtgggggtatgttggcgagttacatcccgatgagaatggtgataatggcaagcatgtacgttacacacacaagaacatcaatgttcagtagaatgcagggtcagggtagtcatgtgaatctaactaatgactaggcaaggcctctggaagtaagaaaagctttgg

SEQ ID NO: 29136 - DNA, 59 bp, Glycine max
  Clone ID: LIB3051-020-Q1-E1-D12
ttcggggccgacccacgcgtacacccacgcgtccgcccacgcgtccgcccacgcgtccg

SEQ ID NO: 29137 - DNA, 309 bp, Glycine max
  Clone ID: LIB3051-020-Q1-E1-E8
attcccagtcagacccacgcgtcaacgttcacatacgaagttctgaaaaatgagtaccaaagtgtttcttattctacttatgttcatggccactaaagttttgatctcctcagaggttgcacccgatgatccatagtagactttatgacagaatagacgataagcgtggtgcatatggggtacatcattgcagatattggcgtggtggctatggcgactatggtagttagcatggtggtggttggcgtgctgtctatagacggaggcgtcttgcctatggttgtggacgtaatggctatatgaggctgg

SEQ ID NO: 29138 - DNA, 334 bp, Glycine max
  Clone ID: LIB3051-020-Q1-E1-F6
acccacgcgtcaagttattcttaagctcgctgctgaatcaatcattctcggttttcgcgtactctactcgttcatcccgacatggtttgcttggcttgtttgctgcacctcattctcgtcccaatcgtcaacatcctcactcttcacttccaatttatcatggggaaaatctatcaggtttttggttgggaataaaggaaaccggagagggttcatcctgcatgtccattcaagcctccagccaacagggttagtgaattaagccaattactaatttcaattgtttacgaaaaagtttaatttttatctgctactatcaatcatacattacaaa

SEQ ID NO: 29139 - DNA, 333 bp, Glycine max
  Clone ID: LIB3051-020-Q1-E1-F7
acccacgcgtccactcactcgtcagactcattctccgatcaccattctctgaagacatcggccctggatgtagcaacaacgatatcgagcatcgcgtcacctcggtgcctcgtcatactcttgggagtacacgaattctgcatgtctacattggagtttgctctgctccaggctctagctgctatgttccgtttcagaaactagttagaggacatcagtcaggcaagttcaccagattcatttcagatggactggctatttttataccggtcaccatgtgatctatcttgtaggcagtctgcagatcatatacagacttttcagttcatattt

SEQ ID NO: 29140 - DNA, 329 bp, Glycine max
  Clone ID: LIB3051-020-Q1-E1-G1
cacgcgtccgaggcaaatggccgttagcattggcgttggcgccacaaaagcgatatcaatggcaatagcagcgaggcacctcggaacaaaaccttacgcagcagcagcaacaacaacggcacttgctcttctctcactccacaaacctcttttcctccctcattcctctcccttctcctctcgccgcgctttctgcgccgcgactcttcgcaccgccgataacagagtgcaacagttccgcaggaagcttagggtttccgaaatcaaagaaggcgacggcgccgacgtgttcggccgcaacctcgtcgtgcagggctgggtccgcacgc

SEQ ID NO: 29141 - DNA, 177 bp, Glycine max
  Clone ID: LIB3051-020-Q1-E1-G7
acacacgcgtccagtttcacataccgtcaacaatcgcaaccgcaccgagccagcgagcgagaacaagactcattaaaaaaacgtggtgtgtcagtgttactcaatgcgcggcatcgcacgtacgtgaattcggcacgtgagtgtctattcgtcagccgagtcagagggattctcgat

SEQ ID NO: 29142 - DNA, 381 bp, Glycine max
  Clone ID: LIB3051-020-Q1-E1-H2
cacgcgtccgaaaagttacccctaaaccttctgatggatcagcaaagggtggtgttgttgataaggagtggtggaagaagagtcctttagcgtgtaaagagagtgatagtggtgaatcgagtatcaatagtgacagtgggaagagttctggtagcagtagtagcaatagcagcagtagcaggagtaacagcaggcgtgagaacagtggtaggcgttgctggcctttcattcgcagacccaaaaatcgaacacaaaaaagtaagatatccttctgatgaaacaacacagtgctctgagaactacacatgttcatgatccttagaagctttatcttcataaactcctcacaagttttaccgcgagtcatttgattacaaccca

SEQ ID NO: 29143 - DNA, 387 bp, Glycine max
  Clone ID: LIB3051-020-Q1-E1-H4
cacatatacacactttcaattttcggtggttcttcttctcacttctctaatcttctcccccctctgttactccccgcttctctgaatccctttctgttaatcatctgtctttcacctcgtgattccatatcgattcagactttgaaaatttttctcgaaagccaggtgttttcagaatcgagatccagtttcttatttatccttttgttaataaattattattttctttcattcagccaagatggttgtttttgatccctcaaagcttttttctttcttcttggattaaaggggttgtctattttaatcctcttccatccctttttttttatacgaaacattattatttttttttgtaatttttaagagaaacgcaagttgattttt

SEQ ID NO: 29144 - DNA, 340 bp, Glycine max
  Clone ID: LIB3051-020-Q1-E1-H8
tgagttagggcatgtgtgagctgtggctttgcagggaagaatagtgtcagtagaatatacatgtcctcttcgcagggatactctctatttcacagattcatacctaagtgtcagtgcatcgcttgtcgcctaccttcactgagagacagtgacaatgacgtaggctcgattcgagtcgtggatgccgctatactacaccacatgcggcgtggtggtaggttacacactatgctccatcctcctggccatcttcaactatatggccatccccacgttcacctagccaggcctcttaacctcgctccattagctcacctccgcaaccggcgtcgacgtcttt

SEQ ID NO: 29145 - DNA, 251 bp, Glycine max
  Clone ID: LIB3051-022-Q1-K1-B1
cacgcgtccgcgcacgcgtccgacaatatcaaatttacctttccctctctattactctctttcggattagagatattattagatgattcaggacatagtctcattgtagttaaattttttataaaattgaattttttgtttatatgaaccatggtcaagaacatagacgctgctagtttgagattatgtaccaatagtttagatatgatgattgactctgagcctgtgctttcactaattttaaattctga

SEQ ID NO: 29146 - DNA, 117 bp, Glycine max
  Clone ID: LIB3051-022-Q1-K1-E2
cacgctccgagaagcccgtatgctccgcccgctgcacccgactcccttttcacatgtgtgtgcggcctaacagaccgaagacttaacgactttttgcaggaccacaactccgatcct

SEQ ID NO: 29147 - DNA, 161 bp, Glycine max
  Clone ID: LIB3051-022-Q1-K1-F3
ccacgcgtccgcccacgcgtccgggcagcagtcctgtatgataatagttctgatggcatcaaacttggtggaaatgaagtatggcagttccgattggcttatgcaactaaatggctatgagttgttcttataatttgtccttatcatgatcgtttcatttt

SEQ ID NO: 29148 - DNA, 141 bp, Glycine max
  unsure (1)..(141): unsure at all n locations
  Clone ID: LIB3051-022-Q1-K1-G2
cccccntccacccacgcgtccggatcacaaggcattgggtttaaagatataaagacaaggttagccatttccggttctacttccacgagaccttcaccggaagcaacgccaccacggtcttcgtggttccgccgctccccc

SEQ ID NO: 29149 - DNA, 374 bp, Glycine max
  Clone ID: LIB3051-023-Q1-K1-A10
tggatatggaagagagaaggacatggaaagacgagcttgaacaccaagcccaacttattgaccaatatgaagcaatggagaaggttcaaagagaatgggaggagaaatttagagagaataacagcacaacaccagattcatgtgatccggggaattactcagatatgactgaagattaagatgaaagcaaggttcacattccatatgctgctaaggtggtcacctcagatgctcaagagagtaaaggagaacctagaggtgtttgcttatctgaagaagaattcaaagctgaagccagaaatattatgccaaaaactcatgatgatacaaggggttatagtgaccataagagtgcaactattagcacttctgat

SEQ ID NO: 29150 - DNA, 383 bp, Glycine max
  Clone ID: LIB3051-023-Q1-K1-A11
tgcatccctcaagcaatcttaggaatggatgtcagttgccaagcgaaatctgggatgggaaagactgctgtttttgttttgtctacacttcagcacgttgatcctgttcctggtcaagttgcagctcttgatctttgccacacaagagaactggcttatcatatttgccacgaatttgagaggttcagcacatatcttcctgatataaaggctgctgttttctatggtggtgtcaacatcaatgttcacaaagaattgctcaagagtgaatgctcgcacattgtcgttggaacacctgtgaggattcttgctatggctagagattgtgaccttggtttaaagaacgtgaggcatatgatactcgatgactgtgacaagatgct

SEQ ID NO: 29151 - DNA, 362 bp, Glycine max
  Clone ID: LIB3051-023-Q1-K1-B11
aagcacccattagaccctttgcctgagcgactcactcccatggaatgcgatctaaacgacgccgttttccccgaagaagagctcgacgacgacgacgacgacgacgatgaaactccagaggacgaagaggactacgacgacgaaaccgaaccccctccgttcgtcctcgccgtcgtagcagtcgcgccggccgcttccagcgcctccgaagcactcgacaccacgttgatcccgatctccgccgtcgccgattcctcactgaaaccactgcacccggagctaatcgaggagaaaaaagcgctggacgattcgcggcgactgttccagcgtctgtggactgacgaggacgagatctggctctt

SEQ ID NO: 29152 - DNA, 330 bp, Glycine max
  Clone ID: LIB3051-023-Q1-K1-D11
gttgtaatgtctctggtcaactcaactgtgatgcacctcttgagtgtttgatgtgttttggcgcaatgttatacttggagctcctttttctttcttctatagtggacaagatatctttcattaagaaattattcaaaataatgtatcgatttttcattattgattgtataagttggaatgttaatttactttcatgtctcttggacaattttgtacgcctgcagaattagttgacttcattcttctgggatattaatttcttctggaaactagaatgggctttaaattttggatattgtgcttgcttttactgtatccatcttctttcac

SEQ ID NO: 29153 - DNA, 382 bp, Glycine max
  unsure (1)..(382): unsure at all n locations
  Clone ID: LIB3051-023-Q1-K1-D12
agacaaaaaccaaacaaaatggggtcgcgttcagacacactcacaattcacacaccaacaccaccaatccccaatctctaacttttcccgagaaaattataatttccattctcttttctccctcagattcccggaaaatatagtattcacaacgttatattttggcaccgccaagctccaattcaatccgtcgtcgttttcgcgaattccgaatgcgtcgacttcgggttggagaatgagttctccgtgctcttcttgtggctgtttgttggcgttcttggatctctcttcaaaccctccacagtctcctgtccaattntaactctcttagtcagtttaactatgtatcacacaaagaaattttcaccggctagcatggtgc

SEQ ID NO: 29154 - DNA, 395 bp, Glycine max
  Clone ID: LIB3051-023-Q1-K1-D9
agatcggagaaaccaaaaaaaaaaaatggaggtggacgagaagaaagcaatgatccgcgacgtggcgttacaagtcgttttcatctcgctcacgattttcagcttcctctggatgcacggcatccctcaaaacctctacgccaagctccgccaccgtcccccgaacccacgggccgtgcaagccaagcgccatttcgtcaaaggcgcgcagctcctcgcccaagccagaagatccaaaagcgcttcctccgcaacttccctcgccaaacaagccctagccgaggccgagaaggccatcgcgctcgaccccaaggacgccgcctcgcacctcctcaagtccatggcgctcgacctccagggcttccgcaccaacgcgctcgatgcgctcgacgccg

SEQ ID NO: 29155 - DNA, 372 bp, Glycine max
  Clone ID: LIB3051-023-Q1-K1-E10
aattgctgaaagtggttctgatggggtttgtgaacaagacatccaatcatacagctacatgttgctgacagctgggggtcagcttgcgaatattctggagatgcaatcgctaaatgagttgggcttttctaaaagatacgtgagatgtttgcaaatatccgaggttgtcaatatcatgaaagacctaatatatatctgtgcagatcacaaaattggtgccattgacagtctgaaacattttcctcgtctagcaacaacctctaatgtccagatgcataagatgcaagaaatggaacagctagcaaatgttcaacgtctgccaactgatctaaacacactcaatagactaatggcactgaattctggattgaa

SEQ ID NO: 29156 - DNA, 361 bp, Glycine max
  unsure (1)..(361): unsure at all n locations
  Clone ID: LIB3051-023-Q1-K1-G12
gaatcttttgcctttttcctttggtcgattatcctaattgaatgctctctcccgttaatcaccatcaattctgcgttatcatcatcaattctgctttattagctctatttttatctctctctttttcaatttctttttaaaaattctctctcttcctgtgaactttatgtggggtgggacatttatgacttattatgagggaagaaagacatcgtcaactgagcaaaaaaagtggggatttggagataattagaaaagataacaataatgaactcggacacgtgctgctatactttacttttgataaagtttcttggtaggaaccgtggggtnttgtttttgttcatcgtgcttcttaatg

SEQ ID NO: 29157 - DNA, 375 bp, Glycine max
  Clone ID: LIB3051-023-Q1-K1-H12
tgttgaaatgctactaagcagcatatagaagggaagtggagtaatttagtactaaagaaaattatttcaagtgaaattcagccagtgaaataaacaaaggtactgcaacgtttctaaatacactgttcatgtatccctcacgagttgaaaaaaagcaacattgcttctcaaatttaagacatctcaatctttatggaacaaagttaaagagcacaaatcatcgtggttccaagctcgaaaaaagaagactagtatttacaacacgcgtgtctaatccgtgatttataggacaaccaattcttcgcaaggcaacacactgtttggattatagctctaattccagtccacatgcagcaaattgggtcattcagacaa

SEQ ID NO: 29158 - DNA, 281 bp, Glycine max
  Clone ID: LIB3051-023-Q1-K1-H6
cacgctccggtatgcaatattttatagagtttaaagcgatacctgttagctgcgatagccattcataagaaactggcagacaaatacacttacatccatctaagaaccattaatctgttcagaaaggttaacctggcatacacaattatatacgcaaagacagataatgtaggaactctaccattcaaatgtaatattgataaaatcacacacatatgatactactcaagtcttggaactttaatctgacctagcgcatataaagaagactctgtcatcac

SEQ ID NO: 29159 - DNA, 395 bp, Glycine max
  Clone ID: LIB3051-024-Q1-K1-A10
taaagagcatggagcatctcattcgactcctgtctccaacctcttataattccaattcttcttcttctcctcttctcaataccaatcccaacaacctccactgctcccaaatcaccgacttcaccgtctccaacttcaaacaagtcatcaaccttctcaaccgcaccggccacgcccgcttccgccgctctccaccccaagcccaagcccaagcccaaacccaaacccaaacccaaacaagtcttcagcctcaaccagaaacccaacaagggttcagtttagatttcgtgaagcccaccattctaaactcaaaacccagcaacaaagacgagactttgaccctctccaacacctcctcctactccttcacgtcctacgtcaccaacgacgccagc

SEQ ID NO: 29160 - DNA, 171 bp, Glycine max
  Clone ID: LIB3051-024-Q1-K1-B1
aattgcattggcaagaagacaggggggatttctttgtggttcttgggcttgaattttcagcaatgttggttactggtggagtttgtgttacaagagtgttaactgatccacttgcaccttagtcatttggggcatgggtgcagaatgttgctaacaatgacactggtgcaa

SEQ ID NO: 29161 - DNA, 290 bp, Glycine max
  Clone ID: LIB3051-024-Q1-K1-B10
cgcgtccgttattcacgcctgtccttgtggtggtgctggttacaagatagggtttgcactttttaatcagaaactagccatgaccaggtacagaaaactactgtgttagttaaaaaacattcatcgattattagcaactttttcagtagtagtgtagccttgtaggtgaactgtgtgttaggattttgaagtttgattaatagccgtgtgtagaaactagaaaggttagtgattgttgtagaatcaatggtaggtgttgatctgagtaatatgaatatgaatcgatatag

SEQ ID NO: 29162 - DNA, 253 bp, Glycine max
  Clone ID: LIB3051-024-Q1-K1-B6
gtccgattcccgctcgaccaccgtccgggcctcttgttctccaactacacaaggccgacacgaaaaacgaagaaaagccgtgccagaaccacgacacgcaagttatggcaaaaatcgcgattctcctggcgggatcctccgccaccacaaccaaaactgctgtcgccggagatcttgtctcttcgacatcaccacgggtagagggggagggaggaaggaggggggagggaagaatagagaccgtatgagcgac

SEQ ID NO: 29163 - DNA, 398 bp, Glycine max
  Clone ID: LIB3051-024-Q1-K1-B9
aacatggacaaggaagttaccaataaagtacggagtttttggatcaaaccgaatccgacaagcagagtaagaagactaacaacaacaacaagaaacaacaacaagggcaacctagttgggtgttcgaagacgaggtggacgatgatttggtttcggagttcaaagatctaccaatgaagttccaacaaacactaatccccgacctggaacgaatctccacaacctcaaaagcctacataacaaaagccaacaaagagatcacgagagggttcaaaccctacgttggcaacaagtacgcacccaccatcaccactttactctcttgcgcattcgctttgatccctttgcttttagtctcactcctcttcaacaaaatcaaaacctatttctcactccaa

SEQ ID NO: 29164 - DNA, 243 bp, Glycine max
  Clone ID: LIB3051-024-Q1-K1-D10
ctaagttctgaaaatgagttccaaggttttgcttgttctacttatgttcttggccactatacttctgatctcctctgaggttggcacccgatgatgcattacgagaattttgacaaaattaaatgggaagcctagtgcagaatggggtaaatgaaaccaagttttgccgtggcggctatggtggcggctatggtggtggtattggaggttggcgagaaggatatgaatgatgtcatgtattgt

SEQ ID NO: 29165 - DNA, 144 bp, Glycine max
  Clone ID: LIB3051-024-Q1-K1-D5
cgcaaattcctcgtgacagatctaatctaatcaggcttttgggggtgtttcagacatgggatgcatatgggagctgtggttgtgttggatgctataaagagcctacacggagtgctactgtggatgggccatcaaaagggttgg

SEQ ID NO: 29166 - DNA, 398 bp, Glycine max
  Clone ID: LIB3051-024-Q1-K1-E12
ggaatctcctacgacccaattgaagtcagaagattctgctcaaaataataatagtctggtgagatcacaaggattaccagcagcatcggtttcaatgcagtacagagggaatgaaagtgacttcaaccattacaacaaggtaggtggttctgattccatgttcctggatgttgaaaccgggaatgtacattctctgcaattgaatcatccaaacataacgactgagaaaagatggagtggtgttccagggtcaatcccatctgctatgttcggcatggcaccatccatgcaagcaatgtctccatttgctaaaatggatggcggtcggtctattgcccatacaaacgaaggaagaatgattcaacaagaccaggaatggagccggtaatgatgcaaca

SEQ ID NO: 29167 - DNA, 233 bp, Glycine max
  Clone ID: LIB3051-024-Q1-K1-E9
aagtatgtgtcaggaggaagctataaacacagtcgcttacatggcacgaagaagggtgtgaaaggttgcatcaaactctcatggtctgacatgtaccaatccgccaattgacatcgcacaggcatgtgcggattctcgtaatcgctacatagacatgcgtggaatatagccacgatttcatctgaagacgttcttgctcacagctaagagatcttcaatgtatgtgataatga

SEQ ID NO: 29168 - DNA, 384 bp, Glycine max
  Clone ID: LIB3051-024-Q1-K1-F11
ggctttccaaggattggaaggtttctgtgaaagaggctaagaaaacagttgacctttggtacaatgatagaaaagaggttttgcaatggcaagaggagcgtaaaaaggaagctcgcgtgttacattgtgtttacacattgctagggcgagctcgacggttccctttgatggcccaagctaacacctatcagaaaggtcacattgagcgagctgctattaatactccagtgcagggtagtgcagctgatgttgccatgtgtgctatgttgcaaatttccaagaataaacggttgaatgagcttgtgtggaagttacttctacaggttcatgatgaagtcatatcggaaggaccaacggtattcggcttaagttgcgaaatccata

SEQ ID NO: 29169 - DNA, 168 bp, Glycine max
  Clone ID: LIB3051-024-Q1-K1-F6
gtcgaccacctccgccacctccgctttgaccttcagaggagctggctcacttactcagggggtcctgtgtactggagtcatattgccaggagggggaccgatttcatctgttggattattattggttgcggctcatctgaagggctctgaaatcatgctacaaggatt

SEQ ID NO: 29170 - DNA, 243 bp, Glycine max
  Clone ID: LIB3051-024-Q1-K1-G10
ataatttgtaaaaactatggctagcgatggcggcgaagagtttaggctagtgtcaccggcgttcagcaacgaggggaagttacctcggaactacactgacgagggccagggtgcgaagaagaacatatcccctccgttggagtggtacaacctgccggaggggaccaagaccctcgccctcgtcgtggaggatatcgatggatccgattcagatgggcccatcatgccatggacccactgggt

SEQ ID NO: 29171 - DNA, 386 bp, Glycine max
  Clone ID: LIB3051-024-Q1-K1-H10
agagcagccgtggcatgttgtctctgctacatgtatgaaaaacaatacaagaatgccaaaaattgaggcttcactgaataatactgatttacattttactcctaagaagaaagatcaggaggaattctatttttcagatagtcattttatggattgtgatatttccaatttcttggtctctgaacaaggtaaaatgacatcatctgatctagaatcacatttgatgggagcagagaaaactgggccttggtggcgcactgctggaaaagatgagttggcttccttagttgctcggaagtcacttgagcatattgtgaattgtgatctccctcatccccagactaagcatgttagtcccaaaccccccttccccgaagggggttgac

SEQ ID NO: 29172 - DNA, 176 bp, Glycine max
  Clone ID: LIB3051-024-Q1-K1-H4
cacgcgtccgcattttctgcgggtacacgcactttctctatctacgtattcaaatttgaagtctagcggggacaatcgtcggcctttaggattaattaccatgtcaggggcacgggaactttttctagccgatagggattagggtgaagtcaggacgaatatgagggatttggaga

SEQ ID NO: 29173 - DNA, 209 bp, Glycine max
  Clone ID: LIB3051-024-Q1-K1-H6
cgctcgaccacgctccgacagaacagcaaagaagatttagacgtttagctcttatacgtcagcaaagggaggatgctgctaaaaagcgagaagaagagaaagctacgaaagagcggaagaaggctgaagcgcgcaagtgaatttcctggaaaatgtcatgttgccgaatttactccatattagtaggaggatatgtactcttactacac

SEQ ID NO: 29174 - DNA, 296 bp, Glycine max
  Clone ID: LIB3051-024-Q1-K1-H9
tgcactaactgagtcaggtccatctccgtcgtcgttcatcacactgttgcagctgttagtttccttcagtgtggcggacacttacgttttggccacaccgaaacgcatccgttccgatgacctggactgcagcgacgcgattaaactgctgatgcaccatggctacgcaatctctgcagtcgcgctacctaccacacagtcacagaacacatggctacgcgatctgtgaaattccgtaatgtggcggataccctaatgaagtattgttacgcaatccgtgagtttctgtgacttct

SEQ ID NO: 29175 - DNA, 189 bp, Glycine max
  Clone ID: LIB3051-025-Q1-K1-A12
agaaaagagacacagggcaccgttttgagtaaatgagattcagtggaacacccagcagcttatacgcaacgcaacattattatctacagtttatgattcgtcacgtaagacagaagaaggtgttagggtgtcacctgagaacaaaatgttggggatgcttctctcttctcaaataaaaaccctattctt

SEQ ID NO: 29176 - DNA, 198 bp, Glycine max
  unsure (1)..(198): unsure at all n locations
  Clone ID: LIB3051-025-Q1-K1-A2
tcatttcttggttttgtgtactttcactttaatttcgtttactttcagttntcttttctttcggtttttaacgtgctttaaccatttatttgagccgttttctcgtctaataaatgataaaatgaatttcaaccgatcatttggggttgtaatctcgtttaatcactgttaaaacgaaatctaaccgatcattcacgc

SEQ ID NO: 29177 - DNA, 406 bp, Glycine max
  Clone ID: LIB3051-025-Q1-K1-G12
gcgacgtcgttttcagacacggcttcgatagtgatacaacgattcaatagttgacaagtggttttggtttgatatatagatgtggtgcgcgtcgtgttgttcgaaggaagtgaagtaaagactaaagagagttgtggtgtggtggtggttgtcgtttttgaaatggcagcgtcgtcgtcagagaagcaagtggtggtgataggcatagacgacagcgagcagagcacgtacgcgttgaattgggctctggataactttttcccgagcccaattttcaagctcgttctcatccactccaggcccaccggcacctacgctgtgggcttcgccggccctgtgtttgcaggagccgctgaggtcttgcctattgtagattccgatttgagaaagattggcgccagagtcc

SEQ ID NO: 29178 - DNA, 226 bp, Glycine max
  Clone ID: LIB3051-025-Q1-K1-H12
ttttccttggaaatgtcaaggctttttacatatgatgatgtggtggagagagtagcccaacaacttggtttggatgatccgtccaaaatacggcttacaccacacaactgctactatcaacagaccaaaccccagcctatcaaataccgaggggtagaacatttgtctgatatgttagttcattacaatcagacatcggatatactatactatgaagtacttgaca

SEQ ID NO: 29179 - DNA, 462 bp, Glycine max
  Clone ID: LIB3051-026-Q1-K1-A3
gacccaagcgtgcgcaaaaccctaactctccctacctttgattttgaagatgaaagggaagaagaacaccatgaccaaaaacgacgttgaagacgacggagctccggttccttcaccaacagtatccgattccgactctgattacgaggactcttcagcagatgacgacgacaaatcttctgactcgctggattctcaatctgaatcggaattagaagatgcttcacctgagaatggtggctccggcgatgtagaatctgcagaagatgaggacactgtcaatgatgaagacggtggaagtgagagctctgatctccatcaggaaggagctgagagtgattcctccgaggatgaggtggctcctcgaaacaccattggagatgtgccattgaagtggtatgaggatgagcctcatattggatacgacattcaaggcaaaaaggataagaaaaagggaaagca

SEQ ID NO: 29180 - DNA, 322 bp, Glycine max
  Clone ID: LIB3051-028-Q1-K1-G10
aaaaaaaaggggtaaaatattgggtacaaaaagaaaatgaaaaaaaaaatttggatttttatttggaggggaaaaaataattaaaaataaaaaaaaaaaaattttttataataatgtttttattttaaaaaaaataacataattggaaaaataactctttatttaaaaacttttatattaatgactaataaaatatttttgaagggagtttagggtaaaaattttttaatcaatttttggaaccctataaaaaattccatgtttggggacccaaacccgaaccttttcacattgaaaatcaagggtgacgatggattcttta

SEQ ID NO: 29181 - DNA, 286 bp, Glycine max
  Clone ID: LIB3051-029-Q1-K1-C4
tccaatgaccctcacgggcttgctccgcgacgtcgccgccaaattcccttcccgccgcgccatctccgtcgccggaaaattcgacctcacccactcccgcctccatcaactggttgaatccgccgccgcccgcttagtcgccgccggaatcaaacccggcgacgtcatcgctctcaccttccccaataccgtcgagtttgttgtcttgtttctagccgtcattcgagtgcgcgccacagccgcgccgttaaacgcggcttacacagccgaagagtttgagttttac

SEQ ID NO: 29182 - DNA, 281 bp, Glycine max
  Clone ID: LIB3051-029-Q1-K1-H4
acctaccgttcagatcaatatgcaaaatattctatcatgtctctggagaaaatgtacaaaccgaaggtttttgtggaaccagaactaaggatacctttggaactggttgaacttaatggttataaatcttccaaggtcaaaacaacccttggttcaaaagatgaagaaatggtgccagaagattaaactgctacttctatttaaaaagatgggatttaaagaaaggataaggcttctggttaaggggtaacatgggttgtgaaaacacaatttatttgttc

SEQ ID NO: 29183 - DNA, 396 bp, Glycine max
  Clone ID: LIB3051-030-Q1-K1-D4
ccccttttcttttcctttttctatctataaaacctcgtccaaaccaccaccttagcccgaccttctttctgaaaatcactcacacccaaaagagagagagaatcgaaacaccccgtaagcagcacggcacaatcgcaacgcaagagattaataatcaatttgcatcgatcgatcgatcgttggttaggtttttgttttgggggaatatgggcgagttgactcaggcggaggtgtactcgcctcggactcagcaagtgtggagggcactgttgagttggttggccttcttctttcagatcttcttccagattataagagccttaggtcactaccctctactctctttctcttctaattcttcttcttcttcaaacgcttcttcctcttcctcttcct

SEQ ID NO: 29184 - DNA, 247 bp, Glycine max
  unsure (1)..(247): unsure at all n locations
  Clone ID: LIB3051-030-Q1-K1-E3
ctcactgttaattcattaataataataataccaaatttgttggttctttgattcacacttgacacatattggctntctcttcttcctacatataaaaaggaagaagcaaagcatctttttttcagctttcacgcctctgtcctcttattttcacttgtcaactctctctattctccaagccataattggcgacccaccatggcaccagatactactgccttaagttatttgttgaattggaggttct

SEQ ID NO: 29185 - DNA, 276 bp, Glycine max
  Clone ID: LIB3051-030-Q1-K1-F11
gtccgaatcccggtcgcccaaccttccttgaggtatttcacttctgcttccaatatttccttcctgtgaaacgacacagttggcgtatatcggcgccttagatcctctcacgtgacataactagaatgtctccggcagttttatcgtcaataaaccctgactgtcattgacatggtaatcatctcatgagacgaccaactttgtatattcatccgtgtggatctaaacgatctttgctatcaaggccaacatcacaagttgagaattgtaaattat

SEQ ID NO: 29186 - DNA, 181 bp, Glycine max
  Clone ID: LIB3051-030-Q1-K1-F8
ttacttcttccactaaattctcacatttattagtcataccaaatctaattatatcaaatactaattcttttcatactttcaacatttttttcactacatcttttaatcatatatattattctactacctctcttatctttcttctccttattcctcaacttcatctaccaacataacttat

SEQ ID NO: 29187 - DNA, 291 bp, Glycine max
  Clone ID: LIB3051-030-Q1-K1-G1
tccctgtctacccactcgtcctgaataatcatgcttgggaatgacagaatgacaatatattagcatacgtgcatttgaaagataggttcaatcattcggtttgatagcattcccattctatcactaaaattaatttcacttcccttatcttaaaaacccctcttacttcctaaaacctattcttaacataacttaatctatttctattataaaacacttaacccatttaatctaatacacaatatccatatacatattatcttatcacatagattttcatcctaaatataa

SEQ ID NO: 29188 - DNA, 87 bp, Glycine max
  Clone ID: LIB3051-030-Q1-K1-H4
gtaccggtctcggaatttcggagctacgcctacgcataaaaagaaaaaaaaaaaaaaagcacaaaaattaaaaaaaaaagggccgcc

SEQ ID NO: 29189 - DNA, 295 bp, Glycine max
  Clone ID: LIB3051-031-Q1-K1-A11
tattcctacaatattgtatacttatctgaaattcaaaaccaatatctgtagtttctaaccaaacatgttatgagctactacatgcattattataatctgcatgtaaccattcacaatgtactatcataataaaccatggtacaatacctaactctaaatatgatatactgtatcctccagttcaacatttatgatttgaacctcatatacatatagtattcataacaacatacacaccatctcatcctttgacattatcatgcgtactaagtcacttgatcttggaatgaatcca

SEQ ID NO: 29190 - DNA, 382 bp, Glycine max
  Clone ID: LIB3051-031-Q1-K1-B9
tccgaattcccggctttccaagacatccactggaactcaagttactacctcaggtagtggtggtattataagtgggagaagcagggcggtgtgcatggagctggtgctcctgttcgtcgcaaaccttggttttagtgctgagcccacacctcaaatcccttcacctgttaaagctgtttctgccataccctctgagaagccacaacctgcactgcaaaattgaatattgatgaacttcagcgtaaaactgtttctctactggaagaatatttcagtgtcaggcttttggacgagtcattacagtgtgtggaggaactaattgctccagcttattaccctgagtttgtcatggaagccattctccttgcactagattagagtc

SEQ ID NO: 29191 - DNA, 261 bp, Glycine max
  Clone ID: LIB3051-031-Q1-K1-D3
gaaaagggaacccaaaccaaaaccctaaccctaacggaaagatggcggaccacttgtcatgcatattcgggacggagaaggacagggtgaactgtccgctctactacaagatcgacacgctcattcacgtctaccagttctttctttaaaatcgatgcctacgactttcccaacatctgctcctatccactctttaaagtacaacaaccctgcatatctcacgtactcactaaacttatgtctctcatgtttttccatcta

SEQ ID NO: 29192 - DNA, 78 bp, Glycine max
  Clone ID: LIB3051-031-Q1-K1-D5
tccctctctacccactcttcctcccactcatcctcccactcttactaattttaaacaactaaatcaaaataaataaac

SEQ ID NO: 29193 - DNA, 408 bp, Glycine max
  Clone ID: LIB3051-031-Q1-K1-G12
agtttcaatttgcacttaatggtaacaagttttatgacaagctgttcagtttcaaacttttaacctaaagcttgagagattataacttctttaagaaagaatagatttcaaataacttgtttcttttgtgtgtgttttgaccatcctatggaaagaccttccaaagaaaatacacattggaagttaaaattgtttaaattaatatgtgaccacaattttatttccatgttgagttgggttgcttctggtaaaaggttttgtttatcatttggcagagacaggttaaacattttgtactttaattttttttgtttttatatttcttttgagtttttggttgataatgcatgtttcactgatttgtttggactttggaatctattaatatacaggtacaaggcagagatc

SEQ ID NO: 29194 - DNA, 288 bp, Glycine max
  Clone ID: LIB3051-031-Q1-K1-H12
ttaaatttcttgtcttcgtttatggtctggtttttattttccttttggcttgattttgttacccttttatttttcatcttcttccttaattcccattagaaaaagaaaaaggaaataaagcaggaaggtcagcagtggaagtgaaagaccaacctaatagttcaaagcagcagaaacccaaactctcaaaagctgaaagacgtgcactccaagaatctcaacgggctgcaaaggctgctgcaaaaggtgtacgacgtcaggcatctggaactgtggctacaatgaatg

SEQ ID NO: 29195 - DNA, 189 bp, Glycine max
  Clone ID: LIB3051-031-Q1-K1-H2
ttcccggtcgacccctcgtccgcccactcgtccgcccactcgtccacccacgcgtccgcttccctcactaataaggggagtgattttccataatttcgctaaaaatctacttcatacgacttctaaatgtttaatcctatcatagaatacatattctgatcactctgaatacaatatttccttctcata

SEQ ID NO: 29196 - DNA, 303 bp, Glycine max
  Clone ID: LIB3051-032-Q1-K1-F7
cccaattccacctggacccacgcatcctctgactcataagctcacaaataaactatcatacatccaaagaccatcactgactcgtcatcttacaaaccctgaatctaaccataatatccatgaaccttacgaatctaatcataacattcctcatcctaaatacaaaactaaccctactacttccaaaacaaccatactgaatcatcccaaagcctcacaatctgctctccaaagcaaggattttctttatcataccaatagtgtcaaacattcatcatctactactacttccaataattcttc

SEQ ID NO: 29197 - DNA, 406 bp, Glycine max
  Clone ID: LIB3051-032-Q1-K1-F9
accgttcgcattcccactcaacccacgcgtccatatcacaatcaaacctcattaaattgacaccaaacattttcatcatcaaccaggttgtattgctcagaaattatacaatccactctaaaacccaaacttacacatccctatcaataataatctcaacccatactcgactcttatgtactagttaataccttcaaacacatcatacacatttctatatacatcatttactcatacacttcatacaaaccataccaccctctactcacatttttactaggtcatcttatatgcccaaactacagcttgcattgaaatttatcatatctctcttgctctaatttctctgcttcatattcatcatttatcaataacttatgcctcaaacacagttatacaaatcttt

SEQ ID NO: 29198 - DNA, 132 bp, Glycine max
  Clone ID: LIB3051-033-Q1-K1-H11
cattcaatcacacactaatttctaacactttttatccaaaataatcattattctactaatagccatttccactatactttttaactctaattaaaattcaatccataattcataccatatttatctcataac

SEQ ID NO: 29199 - DNA, 411 bp, Glycine max
  Clone ID: LIB3051-034-Q1-K1-C5
cgcgtcacgcgtgacgagaatgcgtacttgccaagcactctgtcgctcccaccacagaagacgacaacgtctgcaccaaggccgtcgccgcatcacacggtttcatatccgttatagggcggcggcgcgtgatggaggatgcagtgaacgtggttaccggtttggtggctgcggaacaacactgtggcggttactatttcttcgcggtctacgacggccactgatggaccttggtggccaacgcttgccgcgacaggctgcacttgttgctggcggaggaagtagtgagggggaccgcatcatacatagggctggattgttgccaggtgatgtgttcctgtttcatgaagatggacaagggaattggtgaggagaacgatgatggcggcggaaacaccatgggttccactg

SEQ ID NO: 29200 - DNA, 429 bp, Glycine max
  Clone ID: LIB3051-034-Q1-K1-C7
gacccgcgcgtacgcatgcaaatttcaaaacaaggaaatggactcactacttcccaagtcaatctactgaggcgtcagaagttacttgagaaggcggcgctaccggcgtctccacggcggcaccaccgtcgttagaaggaagatggcgatcatccgcttgagagggccacgtaggtattggaggatcagagcagttccaaggcttagatgggtgatgagatcaccattgacgattttgacaaagctcaagaatgcttatatgaactttatgttgaaactgtcagggaacgtatgtgctatgaacagtgataacatctttgaagtgaaacgtgattccaaaggcttcgcaagtgtctaagggctattcccgtgatgaatttgatgccaggctcaattttgagattccttacaccttgcttgcttcctatg

SEQ ID NO: 29201 - DNA, 256 bp, Glycine max
  Clone ID: LIB3051-034-Q1-K1-F6
ctacacctatcatgtctagagaatactgtcatattgcacaaaactttaacttctcctactctactcaaatctaattattagctaactcacatcaaaaatttacctcccaatgacaatagacattatatatattcaatgcaatcacaatcttctgttcaacatttacagaatcattatatctaacttaatcaacaccaattcatatactgcctctaatcatacatcatgttaccttctcaacttacatatgtctgat

SEQ ID NO: 29202 - DNA, 442 bp, Glycine max
  Clone ID: LIB3051-035-Q1-K1-H4
ccggatcgaccgatgcgtccgtacagagcattttccaacacgattacacgaccgaatcaaaccctctctttctctccgaagctgcgtttaatatcttactcgccttagattgttcttctctttcattatactgttctcttttcgatttgagggaacagtacaagagtgtgaggatcggttaacccaactgcacaggtagtcactaaaataatggagtctcacgatgagactggatgccaggctcctgaacgccccattctttgcattaataattgtggcttctttggaagagcagctaccatgaacatgtgttccaagtgttacaaggacatgctgttgaagcaggagcaggacaattttgcagcatcgtcggttgaaaacattgtgaatggcagttccaatggcaatggggctgtgactactggtgctgttgatgtacaag

SEQ ID NO: 29203 - DNA, 115 bp, Glycine max
  Clone ID: LIB3051-036-Q1-K1-C10
gggaaaggcctttgaagggttggaggaaaagaaggctgaacctggccaaggcaggcaccggggaatgggtttccaaggaaaaccttggtttcctaatggaacctttggctaaacc

SEQ ID NO: 29204 - DNA, 369 bp, Glycine max
  unsure (1)..(369): unsure at all n locations
  Clone ID: LIB3051-036-Q1-K1-C4
ttccggaggcctccaggaccacccagtccacgtccctggccgccatcgccgacgtcgaaaacgcggccgacaacgcccccttcgactcctccgaggatgacctcttcggcgaaatcgacaaagctttagctctcaagcgcaaagaattcgtctcccaaggccttctncaacccaatccccccaagcaggaccaactccccgtcgccgacgtcgacgagctccaaccggacgagctcggcgacttggagaaatcgaacgcctcagggactcaccggtgacggtaacggaagctcaacccattcttcggttggattccattttgaccggtattggaaaaggaagggtaggaatggagaaagggaatttaag

SEQ ID NO: 29205 - DNA, 469 bp, Glycine max
  unsure (1)..(469): unsure at all n locations
  Clone ID: LIB3051-036-Q1-K1-E4
tcccggttggaccaagccttccgaatttaaagtaattcaatggctaacactgcaagtcttgggtcctaagcttccactttccgaatgataaactttcctcttctggcaaacgctatcggatgcaatggaccatgcagaaccctcaacgactgcgacggccaactcatttgcatcaacggaaggtgcaacgacgaccgcgacgtcggaacccacatctgcggcggcggaatgccgccaaatccgccaccaagcggcggaagctgccagtcctcgggaaccctaaattgcggcggaaaatcgtatcctcagtaccgttgctctccgccggtaacttcctcgacgccggcgatcctgacgctgaacgacttcagcgaaagccgcgaccgangggacccgtcgcagtgcgacgagaagttccataacaacacggagcgtgtggtggcactcttcacngngtggttcaacggca

SEQ ID NO: 29206 - DNA, 343 bp, Glycine max
  unsure (1)..(343): unsure at all n locations
  Clone ID: LIB3051-036-Q1-K1-F11
cccggtccgaccaagccttccggccaaaagttaccttttgaattttaacattgattgattgcgaactatttgctcagcttctgcatgtaatggaccaatggtattaatcttgtggcatgggtaaaaattgtaaatttcttataatatctaaatcacccgaaaagtaccaagaatttagtccattagcctttgctgctattatgcagatggatactgtttcaatgtttcacgtacaaaaacagaanaataaaaatggttaacagtgtctataacaaaaaaaaagcttnnactcaaaaataacatgcaaatctttgtcaagactttgactgacaagaccatcacc

SEQ ID NO: 29207 - DNA, 101 bp, Glycine max
  Clone ID: LIB3051-036-Q1-K1-G9
tgaaccttggttaattccttaccctttaaggatggccagagccttaaattttaaggattttccatatcaaaccgtttaaaaaaaccggttcagtaaaattt

SEQ ID NO: 29208 - DNA, 254 bp, Glycine max
  Clone ID: LIB3051-037-Q1-K1-B2
tttctattccaaacttgttccaaacttcaaaacatctctctttcgcactttccaacacttccccctctggccggcaacgtcgtttggcctgataacaccccaaaccccaccgtccaatacaccccaggggactccgtttcacttgtggttgctgaatccgaagctgatttcaaccacgtgttagataactcacctcacgaagcatcagagttacgttgtttagtaccccacttggattcatcggattctcatgc

SEQ ID NO: 29209 - DNA, 307 bp, Glycine max
  Clone ID: LIB3051-037-Q1-K1-C2
acaacgaccaatccacctacctcgccttcatattctacaattactactagaactgctactacaccttcgactacttctaacattaccttttaatcgaaatcatcaatacttatactctcataccccaaacattctattcctaaagcattctgcatccatatcttcacattctctacaaactctttctcttcgacttacacaacctttaacctaactaccttacataattctatctaatccatctcctccaattacttatctctgacattcacgcaatctcatccctttcatatggttaattctattt

SEQ ID NO: 29210 - DNA, 329 bp, Glycine max
  Clone ID: LIB3051-037-Q1-K1-D3
acactaacacaaagacatggaactaagcaccatgttgtgcttgagtgcttgcggcgatcttcattgtgctcttcatggcactcatcaaaccttattagtgctacagacgccgtgacttgccactctcacatggctccatgggctggacttacatacgagaaacctttcaaatgtattctcaagatccaaatggcgtctttgccatcaacatacaacggtgcagatctttcactttcatgaacgacttcatgatggacaaacacacgaatctcacttacacacatcatgttcagttgcgccatctacgattggctctatgttcaagtccc

SEQ ID NO: 29211 - DNA, 269 bp, Glycine max
  Clone ID: LIB3051-037-Q1-K1-E6
tccatagacgatggctaatttgaacttgctggacactctacagcaagtggtacatcatcattatccaagctaaaggttagagcgtgaatctgtagcatgtgggaaagggcttgagccatatcaaagatgcatatctgatgtgacagctactgatagagatgagcaatgtatacatcgtttcttgtagcttatacctcactggattcttgcttgaaaaagtgttcactttgagatgattagctgtaatggatgccttggttgctgctgga

SEQ ID NO: 29212 - DNA, 178 bp, Glycine max
  Clone ID: LIB3051-037-Q1-K1-F8
caagcttgttgagaaatatgctgaaatttttagcaagtcaagggctgttgactacagcgatgggagtattaaaacttttggggttctgaaaaactgtcgcctgaactaacaattttaaaggatcgaattgctctttctacagaacctgagaaagacttcaaaactactgcttttgaag

SEQ ID NO: 29213 - DNA, 235 bp, Glycine max
  Clone ID: LIB3051-037-Q1-K1-G3
ggagaaagatttctgggaagatccacgaacacgattcctcgtctttcgtcggattccgaacacgacaaaaccagcgccactgattccttcaggtctaatgttttcaggcttttcggcagagaaaaagcccattcatcatgttcttggcggtggaaaaaccggctgatgtttttctatggagaaacaagaagatatccgcatcgacactcggagttgcgaccgctatatgggttct

SEQ ID NO: 29214 - DNA, 310 bp, Glycine max
  Clone ID: LIB3051-038-Q1-K1-B4
cactgtcccaacgttaaccgatcaaaacccatctctgtctacctttatttgatccaaagttggctcacaaaacgtgaaaaatttcattcccgtgagattttcctccaccgatgcagattgaatttcaggaatcctgggtgtctgcgatacgtaatcaccctttccatgtttttattcattcgatctgtgatgatcataatgccactcatcggaaacttgttgatcgtgtgattttgttcttccttcccctgaatcccctggtttttttttccttttttccttttcctttaacctttttttttttccgggt

SEQ ID NO: 29215 - DNA, 280 bp, Glycine max
  Clone ID: LIB3051-038-Q1-K1-E2
ttgggttttccttccttggaacctttaaccttcctttggaccactttttaaaaaccgttggctttttaaactagagccctttccgttgagggttcctccaggtgtggttggattaacagttcctgatgctgaagaattaaaaaagcttgaaggcttttgctcttctgggtgaaaaatgttggaaagtggtgcgaaattcccaggattaatagatctcaacaaaaattattaccaactactatgatttctctcaaggcttttaccataagcttggggaggg

SEQ ID NO: 29216 - DNA, 265 bp, Glycine max
  unsure (1)..(265): unsure at all n locations
  Clone ID: LIB3051-038-Q1-K1-F2
ccccttctccggtgcatccattttcacgattccaatccattaaaaatagaaagccaaaaccccatcatattcctagaatcacatgcagtggaaaccaaaacaatccaacaccaaaccctaattcccagggagaacctncacatattgtaggacatatgaggaacgttctacttggcctatgagggctctgtggtgctgttactcttaacaacaacaacccttttgcctttgcagctncaatatctcctactgacctaaacacgtg

SEQ ID NO: 29217 - DNA, 375 bp, Glycine max
  Clone ID: LIB3051-039-Q1-K1-D1
gtgcgccaatatgtcattagaggttacaaatttgaatgagctacattcaatggaatgacctctattgagaaagaggatccagaaaaatgagatctctgagctattttatgtaaaggtctgtctatatctgtttctctctgtatagcatttcttgcttaggctattcttctatcaccaactaaagggtgcaacaaggtcagcagtgacctgtttgatgtggaaatcccatctttggttctgcctctagtgtattatatcatcataggttttctttcccctttttccaaccctcaccatcctctccaaattttttcagatattagtagaatttgttgactatttcaattgagataaaaaagtttaatttaggttccc

SEQ ID NO: 29218 - DNA, 408 bp, Glycine max
  Clone ID: LIB3051-039-Q1-K1-E1
cgctccatgtcttcactcttatctcgatttctttcacaactcaaacaattgccaaaatcggacccttgtaccctctggtcctcctccttctccttctgcctccacacactccgcaagtccacttcccctattcgcgcctcttcttctttttctccctccatggctgcttcttctccgctaaacgacgccgtcgaaggcaatcctcttctgcagaacttcgacttcccacccttcgatgtcgtcgagcccaaacacgtgcgacccggcattcgcgccctcctcggcaagctggaaagtgaattggaggagctcgaacggaacgtggaaccgtcgtggccaaagttggtggaaccgctggagaagatcgttgaccggttatctgtagtttggggcatgatcaatcatcta

SEQ ID NO: 29219 - DNA, 361 bp, Glycine max
  Clone ID: LIB3051-039-Q1-K1-F1
gtctcatagctgagagtttaagatcggaattctggctccgttcttcttcatctgacctaccaccttaacctcgggattaaagaagtcatggctatatggggtggttgatggaagatattatcacaaacttggtatgcttctatgagccaaatctcgtgtttcacttctgcttcataatggtcttgaagggtctatgtgaaaagattgattcttcaaaatgctcttctaaaagctcaaccgagactgtagataatacacaagtgcccgtttattcaaaagcaggatctagtgactgtaagtttcccaaggcttacttatggtcaagcatctttacatctggtttttcagtggttgaaacata

SEQ ID NO: 29220 - DNA, 284 bp, Glycine max
  Clone ID: LIB3051-039-Q1-K1-H3
gttcttctcttcgctgggaatgctaatgggcaccatgatgattgtacagactcatttgactgacgaacttcggggacatttagcttacactgcacgaatgtgaaccagatacagtggcatagccactgcggtacgatcatgaaaagcatcggcccaaactttcttgaatttcagaaaatgtaatcctcataggactaccattctaagtcactcatgaacgaattaactgaagtgttgcttaatataggctctataggagtgtgatagagatgatgcctgtgcac

SEQ ID NO: 29221 - DNA, 209 bp, Glycine max
  Clone ID: LIB3051-040-Q1-K1-B1
acccagacgtacgcgtacgcttagccgttcgagaagtccttttagattttaacagatactcaacatgaagacgatctgggtcctatgataccatgaatgtgccctacagcatgagcatcattgtttacgcttatgttattgatgtatgaagccccctactgaaaacttctgcgatacttccaccattttaacttgtacttacaacttat

SEQ ID NO: 29222 - DNA, 203 bp, Glycine max
  Clone ID: LIB3051-040-Q1-K1-D12
attaaaatgaagcgcactatattagatgaaaaccatctgtcacatactctcaatctaagacgacatttggataacatttctaatgtattacaagatatagtctcacttagaactacgaataatgaaatatgctagcctgattcatcgaacatttggaatcactgatggcattgaaaagtccacaaccatgatagactacttga

SEQ ID NO: 29223 - DNA, 160 bp, Glycine max
  Clone ID: LIB3051-042-Q1-K1-A5
tctttccccaaatagtcaaacaaatattttgacaactactaatattcagttttttaagattttttaaaaaattatatacccaaccacactcatattacctatcttaatcattcaatccactaatccaaaataaattctattacttccattttactaatac

SEQ ID NO: 29224 - DNA, 415 bp, Glycine max
  Clone ID: LIB3051-042-Q1-K1-A9
ccggtcatttggtttggactgagaccaacaggacagggtatagttaaatggcaagaagcagcccctacgggaataaaaccgacaaatcgttaaacctcggagccagatattcagagcgggtcccaccgatgatggatactggcggaggaggcggagcatcgtcaccgacagccaccatgtcgcggtggaagtttgcggcgtggcggcagttccagcacctgctggataaatcgacgccgcacgtgggacgccggtggctggggttcgcggcggttgcgcttttgtacgcgctgcgcgtgtacttggtgcaaggcttctacgtcgtttcgtacggcctcggcatatacatcctcaaccttctgatagggttcctctcccctcaggtggaccccgagaccgtgattctcgacgccga

SEQ ID NO: 29225 - DNA, 154 bp, Glycine max
  Clone ID: LIB3051-043-Q1-K1-D3
taatacataatatatcttttaacttatcctaaactaaatatatgcggtgtataaaataaatgaggtaactaaacatacatttaaaaacattaacaaacacttaataaaattatatacttaaaataccaaatatatataactatattatataaac

SEQ ID NO: 29226 - DNA, 221 bp, Glycine max
  Clone ID: LIB3051-044-Q1-K1-B10
tatcatcagaatctgacactctacactttactatacaacctaaccttaaactgaacagaatataaccttagctggatactataatatcatatatattcataacatacttaacttaaaaatgaaattttacttaacttaactcatgtaatatctcatcaactatatcattacaattacagctcaactaatatactacacctcacattacatcaactcaaaaa

SEQ ID NO: 29227 - DNA, 413 bp, Glycine max
  Clone ID: LIB3051-045-Q1-K1-B2
ttccgatcgaccagctccagcttcttccttctctgagctatatctagacggccctgtataaaagctataatgactaaggctctcatgctacataggatactatcaatagactccatctatatgctatctactaagcgttgagctacagcacttgaacactgaaaacagaatcactatttaacgaaatgatcgttcaatgcagactatcttgacagtcagctgattgaatactggagagagacaggcttatcaggctatagaactatgccgcattctgaattgcgatattgactcacactatagcttggcatcaagcatacctgttatggaggattcacaccacatgaccaatacgcttaaacacatgctagtgcaagctgatcaagctgaacgtcctggctttatggaaaggt

SEQ ID NO: 29228 - DNA, 369 bp, Glycine max
  Clone ID: LIB3051-045-Q1-K1-C7
gaattgccgcatgcatccacgcatgcgtccacgcattcgtccacgcggttcatgaaaaggtgctattctgctttcccaggcctatgtgttacatcggataaaattaataccaatccataatcattgctattaacaccatgtttgaacatccaaaagagatccttatccagcacaccatttacagagacactcctacttctttcaactgacattactgctctcatactgctctcactaccgctagatcaaagccaaatctgtcaccatatgtgtatatgcttaatgccaatgatgcttctcatttgctttctttgaccttcactggattgaatttggcatacatatcactactgtactaaatgtcaaaat

SEQ ID NO: 29229 - DNA, 338 bp, Glycine max
  Clone ID: LIB3051-047-Q1-K1-E1
cccacacgtacgaaaaaatctttctgtcaaaacccaattttaggatccatggagtgtgatgtactctaacgacttgtgcattaactaccaaagcagataacaagaacttagatagcacatgccttgaataacgataagttgctgaatactgaatcgattttaaaacgtgccaactgcaagttactgacacggctcttatcgaaatgcttcttccttgcataaatcaaagttctgacgaatcccgcaattactttgcaagctatatggtgaaacaattaaattatattgagcaacaaataactgcttttacaggttgaagtaaatcattaggaaatgct

SEQ ID NO: 29230 - DNA, 414 bp, Glycine max
  Clone ID: LIB3051-047-Q1-K1-G11
ttccggtcgaccaccgtccgatgatacaaaaaagtgacttctgatatcgggtgtgcccttttggaagtatagcaattgtatgcgacaacaatggagagctcttgattttgagcatccgatctctaaatatatgatatgattcatcatctgaacataggtatcaaaatactaacttgctcaaacttaacttatgatacaagtcttacagcatttccataggatcaataaaatgggctcatgctggaggaaaggctattcaactatatattatggcaacctatgactgtgcaactaccaacttgttgcacgtaaagacgctgaatgagcatacagaaactcgcacaattaatctcgtacttcatttgtctgaatgtactattgacatggagatcacatcaacttcaactgagcaaa

SEQ ID NO: 29231 - DNA, 288 bp, Glycine max
  Clone ID: LIB3051-048-Q1-K1-A10
ccgtcctattcccgtcgcccacctccgcaataattattatatggtgttgatatcatattatgtatgataaagagaaatggaagagatgcatgatatttattcttttcttctatatactcactatattcagctccactctatctttcgactctacacatccacgattccgtccgtctactctgacctccatcatcctatgccaacctacacgccctccgacctctctcatctttaagaccaatcccttacgtgcgcgcttcatttccactcaatcatatacttaccttt

SEQ ID NO: 29232 - DNA, 241 bp, Glycine max
  Clone ID: LIB3051-048-Q1-K1-D4
gaatactaacagtactgatcagggctacatcggaccattgttgtcagacggtgtacccttaataattactctgtacaaaggccatgcagctgtaaaggatcatgcatcaaataaactgatctgacaaaaacatgtttcatctgatcaatttgactgcgtattactagcagtgttgcatgcgggtcatacatctggtctctcatagcagttcatagttcagacatggatcattagacattac

SEQ ID NO: 29233 - DNA, 72 bp, Glycine max
  Clone ID: LIB3051-048-Q1-K1-G2
ccctcataggtctcttcctcgctgcggtggtcgccatcgccgtctccaccctccgcggccggaaattcaagc

SEQ ID NO: 29234 - DNA, 385 bp, Glycine max
  Clone ID: LIB3051-048-Q1-K1-H3
tccgcccacccttccggtcgtcacaccagaaccaaccatacaatcacatacgtttaagctaatcttacgctctctctctcttcaatctctctctctctctaacactttccacagcctcggaaactaaattccggtgggctagctagcttctcttctctttaagcttatataagttcaactaactcacgtcgcctccacggttccgtgagggctcaatcattcgtcatcgagtttggacgcacgtgccaaatttgaacgcaactctcggtagtactacaatagtagaatgcaatatagaagaagaaacgaaacgaaaagaaactctatggcggttaataatattatttgagttttaagtttaagaagaagaaagacacggcaacgc

SEQ ID NO: 29235 - DNA, 346 bp, Glycine max
  unsure (1)..(346): unsure at all n locations
  Clone ID: LIB3051-049-Q1-K1-A3
ggattccaggtacgcgctcacgcgtacgtacacgcgttcgatcggtgcacccagagcagagacggtacccttcaccagctgagacgcataagtgcccacctgaaactgctagtgatttgtctatgccacctgctgaaatgaaaccgatatgcaagtcgattttgagaagaaagtccgggagagcttttagctttttctggaaaaacaagagctattctgtataccagtgttaagatccattggttgctgcaaatctgtgttagcatctcatatatttgctgccctgcttttatgctnctactgtacttgttggtaccatggggtgctctgcttatttctggttcaa

SEQ ID NO: 29236 - DNA, 372 bp, Glycine max
  unsure (1)..(372): unsure at all n locations
  Clone ID: LIB3051-049-Q1-K1-E2
acgatcttatctacgaataataaaaaattaattcctcaattgattggttggggcngtgttcgatcggtacctgcatctcttcttttccaggtttggagaatgagttctgtgcaaggaccaattgtgtgcccttctgtccgtgccaaacaagtagggttctgcagcattccaatgattggggcagtgaaaatgaacgttagacgcatccgaagtgaattttggggtctcaatggcgccaaggctaaacccggttttctttcttgccatataaacacgcgaaagtgcaagactgtgcattgtacttttaactcacccttcaatgacagtggaagtaccgctgacaatttcaatgaaaaagatgaagattatgtt

SEQ ID NO: 29237 - DNA, 339 bp, Glycine max
  unsure (1)..(339): unsure at all n locations
  Clone ID: LIB3051-049-Q1-K1-F2
ctgaacttaatttcaaagaatgtcgatcctgcactcaataaaatcaggtcacaaagtttcaaaaagattgatgatagttctgatttcttgctggatactgaaagtgatcttgatgagccggcacagattgaacaagaacatgaaaaatccaattatcatgccagaaagtctgtttcatggatgaattacggactcaacgaatttcacttagctatttgcagaaaaatcggtacagatgagagcaatttgaatttagaagccaagatccagatcactatggaatatcctctaacgcctnctctttgtctattgagcattagttgtatatcgtctggggaa

SEQ ID NO: 29238 - DNA, 430 bp, Glycine max
  Clone ID: LIB3051-049-Q1-K1-H12
tcggagttccgggctccgacattacgcgttcgacgcaaagcgtccgcccacgcgttcggctatcgaaccgggcgagggggtgggccatcccagggcgaatccggatatggatccccagcagcgtccgttaatgtcggaccgagtcaccgttaactgctccgttacgctgcttgctcttctcgccgacggccgtctatggtggtctgagggaatccaacgttgtttgacgatcgaaatggacattctcggcatcgttgccagtgtgccctacataaaaatcaagagccttgtggagacccgacacagatgctgcatcatcagcgcccatgcaagactcgttagaaacgacgtagtctctatgcctttctgctaggaatctcactggctctggtgccataaacttcgtgaattcattgattctctcggtcgt

SEQ ID NO: 29239 - DNA, 366 bp, Glycine max
  Clone ID: LIB3051-049-Q1-K1-H4
acgcgtacacctacttggtctcttgagggttcgcgtgaagcgtggcgtcaaccttgccgcgggtgatgttcgaagcaactacccttatatcgtcatcaagatgtacaaccagaaactaaagactcgtgtgattaaaaaggatgtgaatcctgtgtggaatgaacaccttactctttctgttataaattccaatcacataattaaactgactgtgtatgaccatgacacttcttgcacagatgacaaaatgctagatgcacaatttgacatctttccctttatagaggccttgaagatgaacttaactggccttacaaatggtactgtagtcaccagaatacaaccaagcaagcataattgcctggc

SEQ ID NO: 29240 - DNA, 304 bp, Glycine max
  Clone ID: LIB3051-050-Q1-K1-B3
tcatctcgccatactacctaacaatgtcacatgctaagattcaagatttaaaaaatgaataagtaagttaatgattattctcctaggaacgaatttgacagtgaaaaatcttcagactatctgaaacattcggataactattaaagctatggaaaccccatgccctcatcccatcaagatgaaacagctgttaagaaaaagtattgatgtatgttaccaaagaagcctacactaatatcgaatgatcattaacgttcttacttagactctgctgactgcactttatcgaatcaatgatcacata

SEQ ID NO: 29241 - DNA, 128 bp, Glycine max
  Clone ID: LIB3051-050-Q1-K1-F7
atacataattcatgaacaattttacattagaatatttttataaattaaaactcaagaaattatatgtttactaaattctaaacttacaacatcaagtcttgtacataaaaaaaattcagatgctgggg

SEQ ID NO: 29242 - DNA, 462 bp, Glycine max
  Clone ID: LIB3051-051-Q1-K1-H4
ccggattcccggcccgcgtccgcctatttcttcttccttccaacaagttccaactcgaaacactcactcactcctctctgtgctctcaactccacactctcactctgatcggtttcaatggcttcaccggcgtggttgccgcaggagtcgcagccaccagtgtctggtgaaacgcctcttcccatggcttcttccgctcatacaactccttctactgctcatgcaaaattatttaacgcaaccgcgtttgtagctccggcaccggcaccgccattcgcttacggcatgcttcagaatgttaacgcttccggaagttctcaacagtcatcgacgcatcctgagatgaaatccaattctgcagtgaatcccatgggtgttcaacctccaggtgtctctttacatgctgctccttcattttcatataatattccccaaagtggtgccattttttctagcaaccca

SEQ ID NO: 29243 - DNA, 80 bp, Glycine max
  Clone ID: LIB3051-052-Q1-K1-B9
cccggcacgacccacgcgtccggcgaaagggatcgttgaaatcaatgtttcggtcgtagcgcgaaaagaaaagaaagtga

SEQ ID NO: 29244 - DNA, 240 bp, Glycine max
  Clone ID: LIB3051-052-Q1-K1-E10
tcacccaccgtccgaagactatgctttatcattgctttggattatatgccgagacgggatatggagaatgtgtttaatgatactttctcttcccaagatttatccccccatctgtatgtactttgacccttccacaaatatctgaaaccatcaactttaaatagtctatttaaactgcaatttttatttatttgccttttttctgtaaatattttttatttaatcaatcacaagctattt

SEQ ID NO: 29245 - DNA, 203 bp, Glycine max
  Clone ID: LIB3051-052-Q1-K1-E12
ccggctcgaccccgcgtccgagttttggtttttttttaaaaaaaatcgattatcaaaccgggaaaaagaaaaaggaatggttaaaattatggaagccgggccaattacatggcagagacatgacccggcatggaaacatgttcagatgtttaagaatggggacaaggagcagctgaagtgcatatattggctgaagatagttt

SEQ ID NO: 29246 - DNA, 68 bp, Glycine max
  Clone ID: LIB3051-052-Q1-K1-F9
cccggcattagcttccatcaaatgtcacactctcattctaactgccaatgccatccattccatggcca

SEQ ID NO: 29247 - DNA, 127 bp, Glycine max
  Clone ID: LIB3051-052-Q1-K1-H9
gcatcttcatcttcttcctctgcgccaactcctaaccctaattcccaacttggtatctgaatccctataccgtcaacccttccctactcttaccccctcacccatcaacctaccttacagatctcta

SEQ ID NO: 29248 - DNA, 354 bp, Glycine max
  unsure (1)..(354): unsure at all n locations
  Clone ID: LIB3051-054-Q1-K1-B12
ccacgcgtccgccgtgaccgaccgcggtgacggttagngttacatgaaccgccgcttccccgaggggcaagtctccttctacagaggctggaggcctcgaccgcgtcggcgacccacagtactggaccaccatcagcgcctgcctccgcgacggccacgcctgcgccggcatgaggcgcctcgcgcgggaccccaacactggcatgctcgtgccggagacgcccaccatgtcctacggccgcaacctctcccctgatccagcctggatgctgcaagccaccgacgtcttgtgcgatcagatacatgaacgatacttactggacacaaatcctcaacgtaccgacggagaccaac

SEQ ID NO: 29249 - DNA, 72 bp, Glycine max
  Clone ID: LIB3051-054-Q1-K1-E10
cccactcgttcggttggaaacacgtcgatatcgttttagataacgtgctcccgtccgtcccgtgggccatgt

SEQ ID NO: 29250 - DNA, 365 bp, Glycine max
  Clone ID: LIB3051-054-Q1-K1-E11
cgtttcgaattaccggcccgacccactcgttcggtacgtacgtatatctatccatttagcttagctagctgacgaccatggcgtcggtctggtctgtctccatcaccgccagttccttcactgccgcgcccgctcgcgcagtggtcagcaggaggtccttcaccgtgcgtgcctctctccgcaaggccactgccaccgccgccgtggccgttgccgccagcgtcctgcttgccggcggcggcgccatggcccaggaggtgctgctgggcgcaggcgacggcgggctcgtcttcgagccctaccagttcaccgtcaaggccggcaacaccatcaccttcaagaacaacgcctgcttcccgcacaac

SEQ ID NO: 29251 - DNA, 139 bp, Glycine max
  Clone ID: LIB3051-054-Q1-K1-E12
tgagaatgagagggatgatgattacctcttggctctcggcttcactggcccctccggctactccgggaagggttccattgaaaaattcacagacggcatctacgccggcggcctcaccgccatcatcactggggcgtcc

SEQ ID NO: 29252 - DNA, 409 bp, Glycine max
  Clone ID: LIB3051-054-Q1-K2-H5
tccggccggattcccgggcgaccagcgtccggaagatgctaggtggagttcatcaatattctggtaggtataatatcttcatgaatctagtataacgttattcatagtgaaaataaatcgagccaaggaatttattaataattgtctacattgcatattagctgcctgctgcgacttccttatgcataattttactgtttatagaaattgtgaagctatactgttgtaattgacatgtaaattgttccctttttcatcttacttgatttggtaaactccggttacttgtatccaaataagatgggccatttgtattgcgggggctttatataattgtacaattatctacttgtaagaagttcaaattcgggcgacaacatttgtaatgcagaattatggcattaacatt

SEQ ID NO: 29253 - DNA, 415 bp, Glycine max
  unsure (1)..(415): unsure at all n locations
  Clone ID: LIB3051-055-Q1-K1-A5
cacgcgtacgtaagcgcggaattcggctcgagttgaganatactaagccatcctcataaatacgctctaaggaagtttcaagataagtgtctaaccttagtaacattgccacatattgtgttcattttggaattgtgccactaaaattctattcaattcatctatggctgcctcttcttatgctatgcaatcaatcctggcaaaccctttgatccgcatttccagcgggtctagggtgaaccaatttggcgttcctgctttgcacatgagaaggaatgttggcctgagagttaggtccatggctaaggaagaacaaccaagtgagcctgcaaccccagttacaccgccaccatcagtagaacccaagccacagccagtctctgctccttcaccaaaggtgagcactaagttttct

SEQ ID NO: 29254 - DNA, 373 bp, Glycine max
  Clone ID: LIB3051-055-Q1-K1-B5
cacgcctacgtaagctgggtattcggctcgagtctgaagttcattagcaccagaaatgctaggcaaggcgagacttatcaattaggatacagcactcccatgagttcagaaccggcgtgttcccacctgcatgaacctacaactactgggcaaactcctacacactagttcgagtagagatggcactgatggtgattacatagcacataaaattccaagactgtgccaaacgcactctctatgggcaaacagtactgactacgactagacaaggggcttggaagttctggagagccagcttacccaggaggacctttctacaacccacttggctttggtaaggatgagaagtccttgaaggaattaaagctca

SEQ ID NO: 29255 - DNA, 413 bp, Glycine max
  unsure (1)..(413): unsure at all n locations
  Clone ID: LIB3051-055-Q1-K1-C6
cgtaagctcggaattcggctcgagttgaacataaggggcctgaaggcgctaacagagncagatactttccatatgtagcggaatttgcttactctttatcagcaacttaagttactcattgctgtcacgaaaaaaagaaaagaaaaggaaaacatcactttggaaatgtgtcaatccaatgaaggtatgatgcatggccatataagtagggagttatacgcctgcaacttgaaattgtttgttctctactttgactatgcatcaattataccacataagattgagaaggtagatattctctattgcaaatcaatctttagcttcaacacaatgtaagctacttccccaactgaaaaataatgatgatagtgttattcatgaatcgagatcaaatacctgtgctgagttcctct

SEQ ID NO: 29256 - DNA, 352 bp, Glycine max
  unsure (1)..(352): unsure at all n locations
  Clone ID: LIB3051-055-Q1-K1-D6
accggttccagacatcacccgcgctgcacgcgatacgtaacgctcgcaattcggctcgaggttgaaagattcgtnggcgacgagtgaagtgnggaaggaggaccaattacaacggactaaggtcgcacacaaggctgccacagccagcgacggatgacataacggccactgccactaccactactatagcaagagcagtacaaaagaagcagaattagagagttaaggaacctacgccaatgctattactccttctcgtgaccttcttgactatagatccgatcaaaatcctcatcgcctagactaggataacgactccacccaatgaggataaaaaacgaaaaaatgacaa

SEQ ID NO: 29257 - DNA, 388 bp, Glycine max
  Clone ID: LIB3051-055-Q1-K1-E4
ccggctgcacccacgcgtaccggggacttcggcttgagcttccgattacgatacacgcaagacccgcggggccgggtacactttaaaggatccggaccccaagatcgtaaggcaggctctagaactcaccgaaaccgcaaccactgatatacctgctaccaaaaacgccatcctgaccgcagcaagaaacacaaaagcaaaaacccaagataacgacaacaaccataaaaagcacacagacagggacaaaaaccaggacaagcagcataacaaccacaagcacagacaacgacatcaaagcaaaaacaatggaaacgagacaaatccatacatacacacgcctcatgactctagaactcgacctttaacgaaacacaatgacaaacaa

SEQ ID NO: 29258 - DNA, 289 bp, Glycine max
  Clone ID: LIB3051-055-Q1-K1-F3
tacagaaagagagagtaggggcatttgaaaaattgctaattcccatcatcaaatctttcaaagccaataaaatacctgcaaactttaaagatgacaacgcgaaagaatggcaagcggacaaccagcatcttgaacagaatgattgttcatatcggagttctatcaactaatacatgaattgaaatataatacttgaataaacacaatgctcatactaaccaatacttacattgatggttcaagtacaaccactgattaataactatagcataattttaaacctattaaa

SEQ ID NO: 29259 - DNA, 315 bp, Glycine max
  Clone ID: LIB3051-055-Q1-K1-F5
caacaacgcccgcacgcctacccaagcagagcactcccgctcaaggtcaacgcttaaccctcaagaacgcacgaggcgcaaaggacacatatgaaccgaaacgacacgccaccataccaggcccaccctgaagccaaagcaaaccagaccggaaaaccacgctggaaccgagctccaaaaccccatagtgaaccctaaaaaaagcctaatcatccaacagctggcacctgagcaaaatcacaatacgcccaacacgacacacaacaacccacccataagcagaaaaagaacagccgaagctaccaacgcagccaa

SEQ ID NO: 29260 - DNA, 177 bp, Glycine max
  unsure (1)..(177): unsure at all n locations
  Clone ID: LIB3051-055-Q1-K1-G4
ggctcgattatggcataggtaccaancgnccacccaagganaagagcacactataagaggccggaaaaggaaggggagaaaaggagggaagnagggaagcaccagacggaaaaggaacaanggnccaaagnnagaaggaagcagcaaaggancnngaagcncaaggcagcncaacaa

SEQ ID NO: 29261 - DNA, 67 bp, Glycine max
  Clone ID: LIB3051-056-Q1-K1-D10
cacccacgcgtccgagtgcgggaaaattttcaccagcgccattaactcccccacgacccccatacct

SEQ ID NO: 29262 - DNA, 132 bp, Glycine max
  Clone ID: LIB3051-056-Q1-K1-G9
cgacccacgcgtgcggagagactagagcgtagatagcaatcacatcaccctcatgtcaatggcaacgcgaggtcttttaagaacctggagcgccccattcttacggggggcccaacaagcctttaactggac

SEQ ID NO: 29263 - DNA, 360 bp, Glycine max
  Clone ID: LIB3051-057-Q1-K1-A11
gaccacgcgttcggcgagtttattctatcatatcttccgttaaaatattatccctacaattacaataccgcgaatcgtagaatcttatgttcatgaccattctcaaggtcccaataacatttacttgaagacaattttgagttgaccttacagcctagttccacctatacaaacacccttgatccttcattcttttttgagttgaccttacctaactccaatactggcaacaattatacttttgggcattttaactatcttacattcttatttttccttctatcttttcattgaatttgctatgttttaatgaaattaaaatgcttttttatttactaataatcttttttattttattaa

SEQ ID NO: 29264 - DNA, 51 bp, Glycine max
  Clone ID: LIB3051-057-Q1-K1-F12
gacccacgcggccgcagaatcaaagcaagccaattggctttcaaaacacca

SEQ ID NO: 29265 - DNA, 211 bp, Glycine max
  Clone ID: LIB3051-058-Q1-K1-B3
gacccactcgtccgacaatttcatttcattacaactctctttcaatctctcagcaacagaaacacaataccgggggcttttaatgccaaaggacctgcactatattcagaccaaatgcatagtcaaacgctaaagcataaaaaccgttgaaaattaaacactaagttataacaaatttaaaagaaaaaaacaaaatacaaaatatttcaac

SEQ ID NO: 29266 - DNA, 68 bp, Glycine max
  Clone ID: LIB3051-058-Q1-K1-C8
cccactcgtccgtagagatttggcatattacattgatgcatagctaaacaacaacactgcaatgtctg

SEQ ID NO: 29267 - DNA, 160 bp, Glycine max
  unsure (1)..(160): unsure at all n locations
  Clone ID: LIB3051-058-Q1-K1-D3
cccactcgtccggccttcttaccgaactatgacttgagcattcctgngcagaagaacacgcccgcaaagcgccagttttatacgctatccttcagttcctttataccaacaggctctacccttccatttacactgctatagattccaccccacgatacat

SEQ ID NO: 29268 - DNA, 237 bp, Glycine max
  Clone ID: LIB3051-058-Q1-K1-E3
actcgttcgaaatacacttgtactgttctatagtataactaagttctgaaaatgagttccaaggtgtggttgttatacttatgttcttggccactatacttctgatctcctctgaggttgcacccgatgatgcatacgagaattttgacaaaatagatgggaagcctagtgcagatggggtagatgaaagcaagtattggcgtggcggctatggtggctgctatggcggtggttatg

SEQ ID NO: 29269 - DNA, 63 bp, Glycine max
  Clone ID: LIB3051-058-Q1-K1-G4
gcgtccggtgaccctggacggatgtgaaacgtgtcaagtatgcacactggactgaccggagaa

SEQ ID NO: 29270 - DNA, 128 bp, Glycine max
  unsure (1)..(128): unsure at all n locations
  Clone ID: LIB3051-058-Q1-K1-H5
gacccactcgtccggagaaaagaaaaaataaaaaacacacgctacatacccgtcaaaaccanctcaaactctggaaggtttaaacgcaaccataacatccaccaacacacgccaaacatcacgactaa

SEQ ID NO: 29271 - DNA, 409 bp, Glycine max
  unsure (1)..(409): unsure at all n locations
  Clone ID: LIB3051-058-Q1-K2-A3
ccgcgtttggtggcctggaaaatccaaaaaggcttaataaatatctttctgataataatgacggtagagctgaatatgagagagtaaagtctgaaggtattaaaagctgtaacattagcgagacagatgagggagacaaagtggagaatattctttatggctatgtgggaattgcggaggacttggacaaactagatttcaatagtaagaaatggagtatggtaaagagtangaaggagattgatgacctggataaagctcctgttaaaaccgatgagaagcgatagttacagtgtcattgtcattgaagatcgattcaagagtttcatggtccctgacgcttaatattgagtgttctaattgcataatctctttttctctatgcttttgctagtagtttatgttattt

SEQ ID NO: 29272 - DNA, 174 bp, Glycine max
  Clone ID: LIB3051-058-Q1-K2-D8
ttcccgactgctacccactcctccgcccacacatcccttaaaaacttcttattcttattttttatcgaaaaatacaaagtatcctattttaacaattttcaaaccaataattttaattatttaaactttatagaataaaaatttaatcccattaaataacctaacatctttatc

SEQ ID NO: 29273 - DNA, 285 bp, Glycine max
  Clone ID: LIB3051-058-Q1-K2-E5
ccacctcctattcaaatcagttctttcaacaaatcattctactactaggctgtacttcttacccatactctaatcctcccttctctatcccctcaccatcttcttcttcttcttccacttatccctcatttaaaacaacatataatctcatttctcaacaaccaaacactactacataatataccattcaaaaccttcttttcacttccctctatcctattcttcatcttatataaatcgattccatctttcaccttgcttctcactacctcaccatatctaccc

SEQ ID NO: 29274 - DNA, 371 bp, Glycine max
  unsure (1)..(371): unsure at all n locations
  Clone ID: LIB3051-058-Q1-K2-G12
gggcagctcaattacttaatttgttcgacaacaaaagctgacttaagtcagaatgaacttgtacacttgacagaaagaaaggagtttatctactaatttttaaaatgtaaacaaattttatatagggatgtaactatctgaatacatacattgccatttctctgctatatagtaacatttcttgacaccaatggtaacctgtttattcctccctcagtaccaaatgtgtccatatctatttaaacagtaggagcttcatttctaaagtgatctatgctaggacatatataagccagttattattaaggttaactaaagttttagaactttagaaaattctcagttntaaaataattttgactcattcatcg

SEQ ID NO: 29275 - DNA, 369 bp, Glycine max
  Clone ID: LIB3051-059-Q1-K2-A4
cacccccaattcccgaacccttaaccttacctcttggcagccatggctaaaaaccgaaggcttcaatcctctgaccccgaacccaccaaacccatcaagccacagcaccaggacctagagccagttgaactcgaccaacagcaacaacaacccaaccccgaacaaaccctagtagatcctaacacgatggccgtcgacgaaccataacaggaagaagaagaagaagacgaagaaccccataacgctcaaggctgaagaaaggaagaggaagctgatgaacaacatgaggagcggccaccagaaaccctagaagagcaacaggatccataaaccctggcggctgcaaaccacgccgaagtgaacggcggc

SEQ ID NO: 29276 - DNA, 234 bp, Glycine max
  Clone ID: LIB3051-059-Q1-K2-E9
catatagaccctaagcactttcaatctagctctgaaagaccccaatgaactcctttcggcccatgctacctaagacttgacatgtattaccaagcccagtattgcgcctgctactgacgctgccattaatgcagttacctgctgacttatcagcgattcctacgaagaatgcctcgccagaccctacagctgctgaacatgcttgatccacagcagaccgaaatgctacttgaa

SEQ ID NO: 29277 - DNA, 315 bp, Glycine max
  unsure (1)..(315): unsure at all n locations
  Clone ID: LIB3051-059-Q1-K2-G4
tgtgcgacgacgtagatcgccttctcctgtgcgacgacgtagatcaccttctacagtgcgtcggcgtagatcaccttctgcagtgcgccgacgtagatcacctgtccctgggcgccgacatagatcaccttcccctgggcgtcgacacagatcaccttctcctgagcgctgtcatagatcaccatcacctcttggacaacggaggtcactctcacctagacgacgaagatcacttgttactcggcataggtcaccttcaccagtacgccgaataccgncaaccaatgtgcagaatagatcagaactccccatgca

SEQ ID NO: 29278 - DNA, 359 bp, Glycine max
  Clone ID: LIB3051-059-Q1-K2-H10
cgaattcgggtcgatcacgcgtccgctcctcttttctttttattctttttgtttcttccttcatgcaggcgattccggctccatgcacgcaagttgctgaggatgagtttttaccgtaacacattgaccttagcttccttttctctgtgagtatttttcgctatggccaaagaatttgtgaatggctttgttcatcaaaatggcatcgctgtcataacccacaatccccccaaaggcgattccggctccatgcccgcaagttgctgaagacgagtttttaccgcaacacattgacctcaggtattttcttcttttttcccttttttttcttggtatctaatggtttaaagcttcttttc

SEQ ID NO: 29279 - DNA, 339 bp, Glycine max
  Clone ID: LIB3051-060-Q1-K1-C4
tcttgtacctttttctaaagaacacgagatttctacttcttcgggttagttttcaaatttgaatctttcatcaggttctctgaaatgtatatagatttcatggctctcaactcaaaataacctcttgctgtggtcaatgacgacattcacctttattgcttcaaacactcttgcttcacataggatcgaattgcacaatggccattctccaacaaagtatcttcccttccacatttgatatctttcaatgcttctcatgatgatatgactaacaatattacatctgatcccttaacatctgcattgtatatgtctatcttaattcattaagcatttgac

SEQ ID NO: 29280 - DNA, 181 bp, Glycine max
  Clone ID: LIB3051-060-Q1-K1-D11
tcctaattcccggacagaagaacaaacaaaacaacaaaaaaaaaaataaaaaaaaggattaaaaaaaaaaaaaaaaaaaacaaacaagaaaaatttaaaaaagctattctttcaaaaaatccaacttacatacacatacatccaacaataaatctattatataaaacttcccaaaaactaa

SEQ ID NO: 29281 - DNA, 220 bp, Glycine max
  Clone ID: LIB3051-060-Q1-K1-E3
atctaatcggatcttaaagaactcatggatcttcaaacgatcctgctacctaatgcaacgccgctattttgctttgtgattttagtttttatgcaagtactctatacgatccatgattctctatcgcttaatgatcgtgtattatgatttgtgaattctgacaattttttagccgtacgtagattatactttcgtttatggttacagattcatctaagca

SEQ ID NO: 29282 - DNA, 278 bp, Glycine max
  Clone ID: LIB3051-061-Q1-K1-A3
ttatagcaggtgggattgcagcagctgtgtctaaaaagaagtgatagaatcatttctataaaacacacatgatctgatatgtaagaggcaaacatctataatactgtgaatttgctgcatcttactgcttttatgaaaagaagggcatgaacaataatgtgtacaaagcggtggaaatgatgtctcagtactagatgagagatgtattgcgtgtcttcatgtttaaaaaaaacatatacctctgtacttttatcatttctatgatttactttcttttt

SEQ ID NO: 29283 - DNA, 327 bp, Glycine max
  Clone ID: LIB3051-061-Q1-K1-A4
gcccctttcattctgtctgcatatcgtatgtctatcaccaatcaattacagtttctttccagcagacaacaaaaaatcaatctgggcaacaaaaacaaaatgctcgtcattagaggacgaactcttcccatcaaccccatgaaagttcatgatcgagcggtcccaccacatgaaccgccaactctatcggtgtttctgctacaccagcaccatgtttctgtgggccctctttttaatcgccctcaccgcttactatctcagcttccaaggctttgtctaatccggcagacgctacctcaccgtcttctggggcgggatccagtggga

SEQ ID NO: 29284 - DNA, 398 bp, Glycine max
  unsure (1)..(398): unsure at all n locations
  Clone ID: LIB3051-061-Q1-K1-C1
ccggtcgagcacgcgtgcggcacgcgtncgnccacgcgtnncgccacgcgtnncgccacgcgtncggcaaagctaagttcaattatggaagccaaagaaaaagagacaagaccaaaagcaggtgtggaaagaagaagaaagctctcatcgatcggtgttcaactttaaacactcaggaagagccacaaaattcttctttctgcagggtgcaaggtacagcttcgatgggaaattgctggggttctccacctcacaacccaaccccaacaactaccggtaaccttagtacaggtacgacggggacatctcaggcgatcagcagcggtagctatactactactactacgacgactactacttcttctggaagtgggagcagctccataaatagcaagttc

SEQ ID NO: 29285 - DNA, 343 bp, Glycine max
  Clone ID: LIB3051-061-Q1-K1-C3
acgcgtgggagttttcttcatcccccaaagtttcaatctttgtatgcaattcaccctttctctctcgccatggccacgtgtgttgatgccccaacccctctttctcggaagcctaacgggtcccaatccgatgatcattccttcaattacatgaaattctgccgacccactttctctgatcgcgttccctgcatacccatttgcaagaatcgtgacactgccttcacacgcgtggaggagtttgacacatgtgtggaggataatgatgatattgaggttgaggttgtggagggtgttgatctttggttgaagattcaagaggaggcaaggttagatgttgatc

SEQ ID NO: 29286 - DNA, 304 bp, Glycine max
  unsure (1)..(304): unsure at all n locations
  Clone ID: LIB3051-061-Q1-K1-D2
ccaggaaaaaacatcactctcatggcgctttacacaacaatcgggacatccataancaccaaaaaagacattcctcctccaaagacaaatattcttacaaggggaccaatcacgatagctcctcttattattaacatcatcgctcaaggcatcatcatcataaatatgataactcctcctctgatgatgagcaccactcttccaaacaactacatatggatgataacttctcacaccattagcataaacattctncccattctaatgaacattatacttcatctcatgatgagcataagcatct

SEQ ID NO: 29287 - DNA, 309 bp, Glycine max
  Clone ID: LIB3051-061-Q1-K1-D3
tggcaaacgcatcttctctgccgacggatcaactcgccggcatcaccctcgacgaggttcccaaagctaatttctccgaccgcgtccccatccgatccatcatctcccgcaccgacggcggctcgggcctcgccggcaggaaagcgcgcgttggcggctgggtgaagacgggacgcaaagccgacaaggacgctttcgcgttcctggaaatcaacgacggaagctgcgccggcaacctccaggtcatcgtcgaagccgcgctgggcgaactcggccaactcgttcccaccggaacatgcgtcgtcgtcg

SEQ ID NO: 29288 - DNA, 337 bp, Glycine max
  Clone ID: LIB3051-061-Q1-K1-D9
gtatttgtaataccatttcctcgtgcggcactgctttccgcctccccccccggggtatcttcaggggcaatggcaaacccatcttctctgccgaccgatcaactcgccgccatcaccctcgacgaggttcccaaagctaatttcttcgaccgcgttcccatccgatccatcatctcccgcaccgacggcggctcgggcctctccggcaagaaagcgcgcgttggctgctgggtgaagaccggacgcaaagccgacaaggacgctttcgcgttcctggaaatcaacgacggaagctgcgcccgcaaccttcaagtcatcgtcgaaaccgcgctgggcg

SEQ ID NO: 29289 - DNA, 365 bp, Glycine max
  unsure (1)..(365): unsure at all n locations
  Clone ID: LIB3051-061-Q1-K1-E2
aaaaatcactgtgtgtgaatcaattgcatgggtttcttcaattccagcaccggtgcgtgcgtctgatttatataaccttgtatgctcactcttattnttatgttatggctatttcatatttgaagtcagcatcataagcagctgttgtttctgaaacacacgatgaattctggtgggtacgctgttgaggttacgggtctgtcgccaaaagccactgacaaggatgttcgtgacttctttgctttctccggtgtgattgagaatgttgaaattatcaagtctggtgattatgcttgtaccgcttatgtgacattcaaagatgcatatgctcaagaaactgcatgcttgctcagtggagccactat

SEQ ID NO: 29290 - DNA, 314 bp, Glycine max
  Clone ID: LIB3051-061-Q1-K1-F4
cgggtggaggcacgcgtgcgcgcactccttctgacattctttgtgaccttttttccgaaaacacttcctaaaacaatggttaaaaaacggaggacagaacagaggtccaccaacaaaagtagaaccaaacttggctcgaagcttgacctgtacccaaacctggctgaaccgagagctgattcgacacacacaatcggcgacaccatctgcgacggcacctccgacctcacccgcgtactcggagctgtaccaagaggtcaaccaatactataacagttactataacacttccatagctactgtcatgggtcctg

SEQ ID NO: 29291 - DNA, 216 bp, Glycine max
  Clone ID: LIB3051-061-Q1-K1-F6
ttttcttatccaaaaacatgataaattatgtaatttcactagttatgcccaatgtggcacacgccttgcagaataacattatatacctaataaaatttttattactgtaacatgtagcttatgtttctgcttctggtttgatttctttcacttggatcattattagattatgattttctgctggtgtaaaaaaaaagacacacaaagtaggtttta

SEQ ID NO: 29292 - DNA, 234 bp, Glycine max
  Clone ID: LIB3051-061-Q1-K1-G4
ctctctttgcacttgctccacaccctgcaaacaaaacacttgcatctccaacccaccaagcccaaagcctgtttccttatagacaccttcattttaaaacaaactttcactaccactacgaccttcaaaaaacatggccctattctctcttacttggctcatccaaccgtgtgctcacaccagaatgttcagctcttctcaaacccgagcaacttcttaacacaagtcaaacct

SEQ ID NO: 29293 - DNA, 195 bp, Glycine max
  Clone ID: LIB3051-061-Q1-K1-H10
gagttaaccaaaattctcatactcacaaacccactcaaaaatacataaagattgacactgaagacaactttgcttactagtttatgggcgcattaaaatatcataaaactttcaaatatcttgaacatgcacattctcaagcatagtagatatacttgagtagcacaattcaccattcatactttgcgattcatg

SEQ ID NO: 29294 - DNA, 345 bp, Glycine max
  unsure (1)..(345): unsure at all n locations
  Clone ID: LIB3051-061-Q1-K1-H6
gtttttactacctaagcattaattaacccatgatgtcattctaatcagagtaatcatggtgcaatttggatttcttttgtaatccctggagaagtaacatcatgatttgttaatgggagataatctaatagccactacttttgcttttttatttaatatatgtagntgatgggggatctatttttcataaatggtgctttgattgtagaacaatctagttttggagtgtcataacgagtggaagaaataattagagaaaatgttcagaattctttctacaaaaagttggatgtggatgccttgagacagngaaacggcctagttagttgatttagagtgcatgga

SEQ ID NO: 29295 - DNA, 317 bp, Glycine max
  Clone ID: LIB3051-061-Q1-K1-H7
ctatcatatgtgtagagaatctctactttttgcgcgctctggaatccaccgtcactctcccttctcaacgcaaggccatcttcagcgaccttctctcaagagacgttgctcttttcttagaacgatacgggtccaaactctcgtgcagtgagcttaacgaattctattcgatgaaagacggttatgaagttaattggcacgcgaagcggttaaagagcataattagtccgacttctgaagaactgaagatgcggccagtgactgtgaaaaatcggaggcgcgcctgcttggacaaactgctgtgccaagggcattac

SEQ ID NO: 29296 - DNA, 371 bp, Glycine max
  unsure (1)..(371): unsure at all n locations
  Clone ID: LIB3051-062-Q1-K1-B1
ccggattcccggtcgaccagcgtcaagagggtggctgaccggttgtcaagatgatgttgggagtactgaacagaagagcagccaagagatgtatgataccccaggggaaccagtactgtgaaacatttggatggagagaaaggttgaagctgactagcattggacgagtaagctaatgcagagtctgtgctctcagctcctaaggaaaagaagctcagtggtagacagtggtttgaaagntgaagagcgaaaggtgtggctgctgtcgctgangaatctgaagnggaggacgaggaagatattgactttgatgaagatgattttgaagatgatgaaaaggaggatatgcttgagcattatctggctgaaaa

SEQ ID NO: 29297 - DNA, 385 bp, Glycine max
  Clone ID: LIB3051-063-Q1-K1-A7
ggaagatatcaatacgtaatttattcatacaaaaatagaatatgacaaaagcatcaattttattcgtgcatgatgatgatgcttaattttccagatgaaatatcatgttctcattaattacatatcttttttcatgcatatgcattaatgaagcttcaagcagatggctggaacctaactttgtaaggctcatcagtgagagccacgcgctggttcccattactatccctaaacaccccaacattcctacacaaaggcttgcagaagttgcacactgtggggcaaaacacgagcttgtaatcatcatcatactcctcaatcttgaaccagttgtcgatggtatccttgccagggtttcccaacacaccaccagtggtcacaaacc

SEQ ID NO: 29298 - DNA, 177 bp, Glycine max
  Clone ID: LIB3051-063-Q1-K1-C1
atactacaatctcaaactcttctactctcctttaacaatctctatcattacttacctttatattttcaaaatttatcctcttaatattccaatcatccttatattcttcaacttcacccatcataccctttctatttaactaatattaaatacattcccccatttttaataaaaatt

SEQ ID NO: 29299 - DNA, 310 bp, Glycine max
  Clone ID: LIB3051-063-Q1-K1-D12
ggggaaacggaataaaaatgttataatgctaaatctctggatggagcccggtaggcagaaaagtttcctttaaaaatctcacatcaaataaaaggtttcattgttgatgttgacaattattaaacaaaaataatggaagttctcctatagggactagggagcatgttgaaaactgttgtcaacatgttttagacaactcgggttacagctgcatgtatcgcattcgccagaagtgggacagttttggaactcagaccagccatgctaatcctcccatcaaatgtcatgtatatatggaactctttaatca

SEQ ID NO: 29300 - DNA, 406 bp, Glycine max
  unsure (1)..(406): unsure at all n locations
  Clone ID: LIB3051-063-Q1-K1-E8
aatggcannngcaatgctttgtgaattgggattatcnnngttgtttaagaagggggatggtnctcaaaagtgtcaatctcatttnaatggtagaatgtcatagcatctgctcaagtaatgtatttttctctgagtatgtccagaagtaagaaaaatggatnnntcgaagtcaatcttcnnaagtttacccagcagcacgtagtcaaggggaagttgaaatgggaaaatgaatgnnngtgttggaaagactcgtgtggattctctggtgggaaggaatcgtgtcagnntggggtcttcaagaatcactgtggcnttgcaatcannaaatgtcattattnnncaattctgaccaagtnnatggcggtcaagacctgggaagtnnattgcaagagaagggatgaatcaa

SEQ ID NO: 29301 - DNA, 317 bp, Glycine max
  Clone ID: LIB3051-064-Q1-K1-C5
ttcttctcaccgacacgacagtcttcttattcctattgtttgcggcacagcaatggagccttgtcggtgaccgacggcattcgatctgcatcggaagagtctctttccttcacagtgtattctgtgatgccgccaccatgccttcagtgcctcggggaaacttctccaatcgccaaacccaattctgcgagcggtattctcctaaacccaattagggtatcacaatcacttcaacacgaatcataatacatgactttccaatatcttcttacgcatgacgcagaagattatacatcagaggaagtctcttccgatta

SEQ ID NO: 29302 - DNA, 338 bp, Glycine max
  Clone ID: LIB3051-064-Q1-K1-F1
tccgggtcgacgacgcgtacggttttgcttgttctacttatgttcttggccactatacttctgatctcctctgaagttgcacccgatggggcatactataattttgacaaaatagatgggaagcctagtgcatatggggtagatgaaagcatgtattggcgtggcggctatggtggccgctatggtggtggttatggatgtcgtcttctaggctatggaagtgggcgttgaggctactgagggggacgcgtgagatatggcggcagacgatgtggctatggcttccaacgatgatgctatggacgtgtatgatctggcatgctttgcggatataggcc

SEQ ID NO: 29303 - DNA, 282 bp, Glycine max
  Clone ID: LIB3051-064-Q1-K1-H1
caaagacactcatggttaatactcaagggtagataaggggaaactcggggcttactcatcattaatgccttatatgacacaactactttcataaggcttaacatttgcttactatagtctcacttagaataaatttactcgattatcaacatgagcaatacctagaacacatgactaccataatcataactcttaaaaccttcatcatttacctccacaggtatataatcctatctatcgcttcagaatggattgactagcatgaatgcttgaactaaaact

SEQ ID NO: 29304 - DNA, 407 bp, Glycine max
  Clone ID: LIB3051-065-Q1-K1-A4
acttgttctcgagcgatttctgaattacggacatcatgtaccggtttgggacctttatgggggtaaagctaatactgccaagagctgcactacagattgaagaaggtcacttgtaacacgaattatacggccaacgacattcagattggtgatgagactccaactctgatgcttaagggtgtcgaagagcttgctgatgccgttaaagtaacaacgggctcctaaagcgcgtaatgtgggtattgaacaaagttttggatcacctaaagtgacgaaagatggagtaaccgatgctaatagcattgaattcaaggacaaagtcaagaatatcagagccagacttgtaaagcatgttgctaatgctactaatgacgtggctggagatggaaccacttgtgctacaattc

SEQ ID NO: 29305 - DNA, 308 bp, Glycine max
  Clone ID: LIB3051-065-Q1-K1-C8
gctcgaacgactcctgcaaaaccgcgcccagtcatgtaactgtcatgcacttgcacgcatgacacggccttttcaaggggaagttcttcagaagagttgtcctcatgttactttgcttgctactgtgacctgttttatgatgaacgtcttgcagctgactctgttaggtgaactatgtatacggaggtacagccaaatagggatattgttgaacatacactggtacctttccttaagactctctctctatctatctatctcttagaatatgtctctcatttacttctatatctctgtcacacagtcac

SEQ ID NO: 29306 - DNA, 227 bp, Glycine max
  Clone ID: LIB3051-065-Q1-K1-H6
actgatggaaactcagcctctcgtcaacatcctgtaccccacctatgccacgggtgcaaaggtacagttcaacgctgcgctgcagtgcttgcaaaggaatgtaccaatcctatcggcatgaattcactctccgattaagcttgctacaattagcacacggtatacgaccagtctaaccatattgcgaactacacatggcatgaccgatatgtcattacgagattgca

SEQ ID NO: 29307 - DNA, 333 bp, Glycine max
  Clone ID: LIB3051-066-Q1-K1-D11
tcctgaattcccttatcgacccacgcttccaaccaatcctcaatacacgattcacctacattttttaatcatccaaactaaacttccccaacaaagatcttttcacacctaatctgtcatactaacaaattaaccacaccccatatctcacctatgaactatctatcaccatacatcatttaaaacctatttactactagataaactaattacactatataactaaatataattaaaaccactcaatcttataacattctacattatacaataccatttcattaatacatcaacaaaacttactctattaatcttacacataatccaaccaca

SEQ ID NO: 29308 - DNA, 253 bp, Glycine max
  Clone ID: LIB3051-066-Q1-K1-G2
aattggaattccgacgtagacgtacgcaatcagagtgagagttcactcaatctcactgacttgtgagttgtgtgcgagcaccaaccaacaatggtgtctatgactccgagacgttgctttaataccttggtgatcgctagtgcagacgcagaaagtgatccccaaacggagcgttttgacaccggcaggttgtacatagacacattttcaaaaggattattattatgaacaggcacgtgtgcttaccaagatg

SEQ ID NO: 29309 - DNA, 146 bp, Glycine max
  Clone ID: LIB3051-066-Q1-K1-G4
tcccaacaactcaatggccaaacctcatacacaaacaatactcaccctcaccatttagaatacacatcttaaacatactactcttctatatgaccaaccagtttacgtacctaaaataacccattactatcaaaataccaaaatat

SEQ ID NO: 29310 - DNA, 181 bp, Glycine max
  Clone ID: LIB3051-066-Q1-K1-G6
cgtacgaaacaaagtgagagttcagcggatattgctgacttgaaagaaatgtacagagaccaagtaaccttggtggttattaatacccagggcattggtttccttcattggttaccgcctagtttggccgaaaaaagtgctcccttggggaacggaatgttcactgttcattaactatttg

SEQ ID NO: 29311 - DNA, 395 bp, Glycine max
  Clone ID: LIB3051-066-Q1-K1-H2
gaatttccgggccgagcgtccgctttttttttttttctttttttttttttttttttttttttttagacattggagagtgctgtgaaggtctgcctcaacggatgatttacccatcctgactcttgctcgtttcacaaggggcaagtgttcatctccatcttgttcaaagcatctttcttttgaatttccacacatattttgtgagctttgactggcattctgcacaccagtctcttcctctggcctactgattggcttataagcatcattagctgccctctttctattgggttttctttttttcttattaactacagggtttatttcaagattaaaccctttggtcaactcaacttttggacattcaatagcttcagataggtcaaggttaaaat

SEQ ID NO: 29312 - DNA, 442 bp, Glycine max
  unsure (1)..(442): unsure at all n locations
  Clone ID: LIB3051-066-Q1-K1-H8
ttttcggtttcgggtatcgaaaaccaagaagaagccttgaggacccggaccccacgcaattggaccttttcctcctctttcgcaacttaaaatcggttcaaccatggccggaggttaccaccgttagggttcctttttccgccaaaacttccgcggccaacaatgcttggaaaacccggcaaagaaggaggagaaagtgggatcaaccggcgaagtcattgatgccagttgggatggcagttcctgaacactccctttgagcaatgccgtgtctctggaaggggttgcatttcctgccatggttccgatgatctccggagctcttttgaggaatcctctggcagcttcttctcagcttccgcaacacacangtgcagcttgctgtgccgcacaaaaatttgatcaacaaaagatccaagatgaattaataattgctcgagaa

SEQ ID NO: 29313 - DNA, 264 bp, Glycine max
  Clone ID: LIB3051-067-Q1-K1-A7
tactattcacactctaattaatatcctctatatccatccaaacatatttcattaccctacactatctcaacctcacaacaatacattacacattttcttaaatataactctatcttaatctatataacactaaccatatcttacatatacttcactataccactacttacatatatcacctattaatataacacatcatcttaaactattcattaacaactattaaatcattaccacattttttataactctttcttaactttc

SEQ ID NO: 29314 - DNA, 329 bp, Glycine max
  Clone ID: LIB3051-067-Q1-K1-E12
tcaaacaatcatatccattacaatatccatcataaccctcactataactaactcaaataaaacatatacctacccatcactaacataaaccccatcataaacaatccactacctactaatcataaaatcatcaatgactccaaataaactattcattaatccttatccccatcctataacatcatcctatcatactcatatatacatattcattaattacattcacctcatccaataatacatcattttatctaccaaaaaatttttcacaatccctcattttatcccatcttatcacatctcttttaaattctataaactaatttaaa

SEQ ID NO: 29315 - DNA, 150 bp, Glycine max
  Clone ID: LIB3051-067-Q1-K1-G11
atgcagtatactcatcttcttttaaactttcaactcaaaaatacttttcattaactttacttcaaacaaaaacaatccctcttcctttcataaccatttacaagactcctattaaaattgaaaatcattaatatcctcattacttacata

SEQ ID NO: 29316 - DNA, 355 bp, Glycine max
  Clone ID: LIB3051-067-Q1-K1-G4
tctcaacgtaaaaatgctgcaatgttggatagcgacgatgatagtactagtgtgagttcgtcatcaacttcacgaactgatcacatctccgtctcagggaacgaagaagtgcacttcgatcaagatggtctgctcgatcaagctctcgatgctttggacgaaaaaaggggttccacaagggagagagcgttgtcagtgatcattggggcattcactagcaacatgcagcatcattttgttgacaagaaatttgctactttattacatcagtgccttgcttcaataaaaaagggatccaaaaaggcatctgcaaaggagatagctttggcatcacatgccattggtttgttgaccc

SEQ ID NO: 29317 - DNA, 139 bp, Glycine max
  unsure (1)..(139): unsure at all n locations
  Clone ID: LIB3051-068-Q1-K1-A11
caacgcaacacaaaacccaaggagaggggaacgcagnagggcaaccagcaaaangcngcgcaccagacaaggaaagacaaagcagaagggcagaaaangggagcaccaaagncaagagcaaggcnncagacaccccaga

SEQ ID NO: 29318 - DNA, 177 bp, Glycine max
  unsure (1)..(177): unsure at all n locations
  Clone ID: LIB3051-068-Q1-K1-C11
gagggagagaccnccgacgcaaagaaccaagaccagaagccggggggaggcccagaacccgaaacggggcccanaagcaangaagccgagaacccggacaaaaggataggggagccccgncagaaaagcagcgaagccgngagggagagggcacggcaacggaggagaaggcgccaa

SEQ ID NO: 29319 - DNA, 111 bp, Glycine max
  Clone ID: LIB3051-068-Q1-K1-D9
ccacacaaggaagaggacaaaaggaagcagcggccaccccagaaaacgcttcaagaggaagaggagaagaagagagggagcagagaacccaaaaggggaaagcaggagggg

SEQ ID NO: 29320 - DNA, 300 bp, Glycine max
  Clone ID: LIB3051-069-Q1-K1-B1
gacctacacgtacgcccacccgtcctaatttctcccttttttgcttttctgcatatgtctcaataccaaggaatggatgaaacttatcttgtgcttgattcgtgaaataataactgaaagcatgaagctctccttctccgtcccatcatccaaaccccactcgaagcccatagccttcttcaacacctttgacgacaatttcacctcccaaaacgacaccggcttaaccaaatacctaattaccgaattcaacccttccaaaccccttccaacttccttccccaaaaccctatttccccc

SEQ ID NO: 29321 - DNA, 266 bp, Glycine max
  Clone ID: LIB3051-069-Q1-K1-E5
accggccgaattccgctcgcgccacgcgtccgatatcatattattatgattgctaatatcttattaacttatgggttattatatcattcagtgtatcactgatcctagaccattggaaccagaaagattgaaggcacttcggaaccagtagtgcaaggtcctattagaaagtgaaaatggaaactatgatgttagacaatcttgtaattgtagcttatatctacttacttaattgacaagccatgtctcaacattaaaaacaaaaa

SEQ ID NO: 29322 - DNA, 176 bp, Glycine max
  Clone ID: LIB3051-069-Q1-K1-E7
ttaatatacctcttaattcaacacgcacatgttacacatatttacggcaagataacaaaacctaatcacctctacttcctttcactttaatttcttatatatcgttccttgtcaaatattttcatcaatcttaacattcattatcaatatacataaaccctaatccaacttatatt

SEQ ID NO: 29323 - DNA, 68 bp, Glycine max
  Clone ID: LIB3051-069-Q1-K1-F4
aattccgttcgacccacgcgtacgtttaatcacaacatgacatattgtgtctggtattatctctctct

SEQ ID NO: 29324 - DNA, 82 bp, Glycine max
  Clone ID: LIB3051-069-Q1-K1-F8
aatttcctttcgagcaggcgtacctttaatcacaacatgacatattatatctgatattatctatctcttgataattaacaac

SEQ ID NO: 29325 - DNA, 421 bp, Glycine max
  Clone ID: LIB3051-070-Q1-K1-A9
tcctcaattcgcccgacgccccacgcgtacactgagctacttgcttacttcctgttttcagaatcaatagtcaccacctctggctatggagaattgcttgcagctgctcggtgcaacaaaccttgccttccctagcagtaccaccaccacccaccctggcattcttcatgtcgcgaaattcacaacataacgtatccatttcgactaaaaggcgacccaatcggctgccgcgatcaagattacgaattagattgcgttgaaaacgtgacagtaatgactctattttcagggaaattccacgtgcatgaaataaattacaagatgtacgagatccggttgaccgatgctggtgtggtggaggacattgcttgctcaattccctcgtatttctttaatctcttacaattcacttacatcggtg

SEQ ID NO: 29326 - DNA, 137 bp, Glycine max
  Clone ID: LIB3051-070-Q1-K1-C12
ctttaataattttcaaattcaaacttacaatataaaatacttccaaaacaccattttctatctctttaaaatacaatctaattaaacatcttcttcattcttaattactattaaatccttcatgctaatatattctt

SEQ ID NO: 29327 - DNA, 350 bp, Glycine max
  Clone ID: LIB3051-070-Q1-K1-D12
tccttaattccggtgtgcgcctacgcgttctgctgattctaaactcaaggcctccgattttcctggaaccatttttaaaattgcgacgtgagagtataagtctagatgtgaaggatacttggtggtaaattgttactttgcaaagcataagcttgtattggaagtccttgatgggtgtcttaagaataagattgaaatcccatggtctgatatcatggctatcaaggctaactaccctgaagatggaccaagcaccctcgaagtaaatcttggcactataccctttgtttttacggagatcaattcacaaccaatgaaactaactttgtgccaagcaacatcagacttta

SEQ ID NO: 29328 - DNA, 219 bp, Glycine max
  Clone ID: LIB3051-070-Q1-K1-E2
gattatcatcaaatcaagttaaccaattatacatacctccttcatctacccttttcgaccctcttcattacccttcactaactcctacctttttctcattatacatcacattcccaatataagaaggttcactacacaacacaacccttcaatgacatacattttccctatttatccccaaacctactttatctaacactttctatccaaaccttccat

SEQ ID NO: 29329 - DNA, 384 bp, Glycine max
  Clone ID: LIB3051-070-Q1-K1-F11
cctgaattccgaggggcgacttcacgcgtcctgctgtgcaactgtttgaaacccggtttttgtgccacacgttcctacactgtcttatgtgcttggaccttcttcgcggagctggcgctacattttgccgtttactacgtcgtcacgggtctatttggctcctccgacgatcaccatcaccgccaccgtcacgactaggatgacgaggacatgccgtctatgcgccccccggttacagtcgacgagatcacagcatatgagctcaaggcctacgacggcaccgatcccaacaagcccttgctcatggccatcaaggcccagatctatgaagtctcccagagcaggatgttttatggacctggtggaccttatgccctatttgct

SEQ ID NO: 29330 - DNA, 281 bp, Glycine max
  Clone ID: LIB3051-070-Q1-K1-H9
ccctttatctttttcttgtttcttattcaacaaaacttgtcaactatgaggaattttttccaacctatcatgacaatatattaatttcaatcataaattcactgaattttaagaaccactactcaaaatacactgttcgatttccccattttactcttcatatataggcatctaacgttcttccaaatctttttatcatatatacaatgaatattacacttatttttacattttggaagatttgctttttcttcattctaacattcccaccaaatacttcc

SEQ ID NO: 29331 - DNA, 254 bp, Glycine max
  Clone ID: LIB3051-071-Q1-K1-A1
ataatcactttttactagatatcattttcctcaacaagtcaaacattcatacctaaatcatcatccatcaatcactaccgattctaaattcaatcctataccaacataattaatccacatttacaattaacacgataacacttcctactttcaacttacaaaaaaattgactaccttatcaaaaatcacactctttacaacattcactttatattctttcttaattacacaatactcatatctatctttttcaa

SEQ ID NO: 29332 - DNA, 297 bp, Glycine max
  Clone ID: LIB3051-071-Q1-K1-D12
gaatttccggtcgacccactctttcgttacaaattcagaagtacccaacagtcaatccaaggtaaatggtgggagtgatatatcaactgatggggcacaatgttctggtgatgctaggaaccaatctcatttatatcaagattcgtccatattatatcattttagagacattcatagaagacaggttgagtttataaaaaagagggctcttctattggaaaaaagtctcaatgctgagttccttaaagaatactttggtgatccaaaatcaaatgaatcatctaatgaataacttaa

SEQ ID NO: 29333 - DNA, 197 bp, Glycine max
  Clone ID: LIB3051-071-Q1-K1-G3
ttcaaaccgcttgggggatttaatcatttccaaataatcaaccttactataaataccggccatgtgcataagtcaaatgaacctttggcaacttttagaacctacaggaggttaaaagttgtccaacttgtttttaacaatatttcacttatttatttgatctattttaatgctattaaatattctaatataaatat

SEQ ID NO: 29334 - DNA, 63 bp, Glycine max
  Clone ID: LIB3051-071-Q1-K1-G6
ccaaccctcccgtccgtccgaattcaacagactcaactgtgctttcacactctacaccaacca

SEQ ID NO: 29335 - DNA, 253 bp, Glycine max
  Clone ID: LIB3051-071-Q1-K1-H11
atttcctgtcgacccactcttcggcaagggattcaactatacccaattaactttcattttatatctccttgttgacttcgggctcggtatccctaggttggttctacattcacctattatttaccaattaagataacacattatcctttcaccattccacctactcttccataatcagttactctaacttttctctacacttttttcaccgtttttttaccctcacttcaaaaacatactgtcacatcttttc

SEQ ID NO: 29336 - DNA, 281 bp, Glycine max
  Clone ID: LIB3051-072-Q1-K1-C3
cgcgtccgaatggttactatgaagctgatattgatgcttaggagatattcaggaacttcttctttggaggaatggcccctgcagccaattggggaggatccagttattgaccagctaggttcaatgattacaatggtcataggcatgctgatgaacatggttctacttatgataaggaaaaccatttagttctttttctccaaaccctatttgcttattacatgatacactttgattgcacccttttggaatcctttcccccctaaatttactaccagctt

SEQ ID NO: 29337 - DNA, 225 bp, Glycine max
  Clone ID: LIB3051-072-Q1-K1-C6
ggaaggataacttcccgcttgtctgctctccttctactcactgatctgcattttcacatctgatcattcgtcactcacctcaccatctcccaacattgacatttccatcataatgctgttagtgggatcatcaatcaatttattaagccatgcctagcttcactgaaaataggggatcaatgaaattctgtcaagtcatgccattctatttctgaaatcacttgt

SEQ ID NO: 29338 - DNA, 65 bp, Glycine max
  Clone ID: LIB3051-072-Q1-K1-C9
cgtacgccacgcgttctgaactatatgttcaaacacttatgttctcatgccagaacaagtttacc

SEQ ID NO: 29339 - DNA, 61 bp, Glycine max
  Clone ID: LIB3051-072-Q1-K1-D4
cgtccgcaaagcacgacttatcttaagaaataagctttactttactaacccacatccaaac

SEQ ID NO: 29340 - DNA, 362 bp, Glycine max
  Clone ID: LIB3051-072-Q1-K1-E10
caggaaactccaactcatttgtttttacacctttctggctccattggctttcgccaaagtccatatccatctatatatatttgcacaattgttcaactatccttatctctctctctctctctctcaccactaagtttattagtattattatcactagctacctgctatcaaagcatcacaaatggcttctacagacaagcctgacgacgaccctgaatacagaacatcttcaactccagctcctgctggtgttgattactttaaatttgatgtcatcctaaggtttctattgtttgcagcatcactggtagctgttgtggtgatcgtcactgctaatcaaacagaggttattcgtgttccac

SEQ ID NO: 29341 - DNA, 142 bp, Glycine max
  Clone ID: LIB3051-072-Q1-K1-G1
cccggtcgctgcttcaaccttgtagttattctctttcttcttttttagctatctctctcttgaaaaatctagatcttgatcttgcttgatctaacattacgcttggagtgaccgtatctgtatggatctgaaccagaatcta

SEQ ID NO: 29342 - DNA, 145 bp, Glycine max
  Clone ID: LIB3051-072-Q1-K1-G11
cgcgtccggtggtggtggaggaggagggaatgaatagggttggtggaaatggtgttggaaacagtgggggctgactagggagctggagagtgaggctgtgtgtggtctgcggtcggtgctatatgtgggtgttgatggggctact

SEQ ID NO: 29343 - DNA, 399 bp, Glycine max
  Clone ID: LIB3051-073-Q1-K1-A11
aatttccggtcgaccacgcgtgcgctgtgactgtacatgatgatacaacccatattatgatttaccaatatggtctctatatgagggctgagactatatcttacatgcgatatgcttgtcctcctatggatacattggcaatacgccacagtcttcatactgaatctcaagctcccgaacctgtatctgttagtcaatactctataagtgtacagtgctattatctctcatacaagcactacaatgatcaatgacaaaacaataatctattgaacttgcatccaattctacaggactacatactaatggtcaatcatctaatgacctatatgcgtcaactacctggatttgatgataacatcccaccctttgcaaacactaacagttcaaacacactta

SEQ ID NO: 29344 - DNA, 116 bp, Glycine max
  Clone ID: LIB3051-073-Q1-K1-B1
catacttaatactcaacatataaaactaaaccttccaatccttccaacctccactattatatccattcctcatactatttaactaataatatttctcctttaattcataactaaca

SEQ ID NO: 29345 - DNA, 328 bp, Glycine max
  Clone ID: LIB3051-073-Q1-K1-B11
tattcccggtcgacgcacctccgctaaaaaataaagaatcatctcatataatatacaactatcttaatcctaggaacgtattcataaacacgagggacaaatcttagaattccatttcatgccattttcacttctactgaaacccaattataatccttccatcttattacttcttgctacaacatgttacacactctcactgtctttaacttcttccctttcttcatttcttatcataatttatttctgcaatgctttctctgttgttgcatgaaccataaatttcaagtctttcaacttaaagcctttattttttgaattaatttaa

SEQ ID NO: 29346 - DNA, 257 bp, Glycine max
  Clone ID: LIB3051-073-Q1-K1-D11
aaacatttgctatcaattaaaattgccttacgagcgaagatctaaaaatccttgccgcggtacattactaacacaggccgacattcaaataagacacaagcacagaacaacctacatatacatcgactggaatcaatctaccaccaaatcccttgtcacagctatggaacaacatgaatgatcatgattaatatgaagattaatagtaataacataaacttcctcacagcgcatctctaaaaccaccaaataatatt

SEQ ID NO: 29347 - DNA, 400 bp, Glycine max
  Clone ID: LIB3051-073-Q1-K1-D3
ttcccggtcgagcacgcgtacgtcacgcgttcgcccacgcgtccgcccacgcttccgcttttatgtggttggcttcctttcaagctcttctctgcaaatgcttgattccaagatggttaggactctgtaagctgataaagacaacactcataccgttggaaagaaagatgctgctggccatgttgcttaatttagatcttgcttcctttgacttcttgagttttatcagagacgggagtgcagggatcactaactctttcattcggtcagagtggccagcagatgacatcccccttgatcatgaagcatttacaattccaaagggttataatgcaccttaacaagggcacatcacgcaaggtgactattattgaaaagcagtaatcatctcatgggtgac

SEQ ID NO: 29348 - DNA, 70 bp, Glycine max
  Clone ID: LIB3051-074-Q1-K1-G8
ccttgggtgccatttatggaccaagacccttcaaccttttgtaccccccccccccccaaagaaccgcccc

SEQ ID NO: 29349 - DNA, 308 bp, Glycine max
  unsure (1)..(308): unsure at all n locations
  Clone ID: LIB3051-074-Q1-K1-H6
acgcgtncgcgacacacaggttccaaattaagaaattggagaacaagtattagggtgaaagattctatgctagctctggaacaatggatgctgcagttggcagaatttcatgctactgctcaggttcccaccaaacctaagaaaccttctctgaaagaaagaaagcataagttgcttaccttcttgcaagagaagtatgaacctggtcatgctaagtggactacagaacgctgtgctgtttggagatgggttgaagactgggactacaacaaaattatcatttgcaacagatgtcaaatagcagttca

SEQ ID NO: 29350 - DNA, 171 bp, Glycine max
  Clone ID: LIB3051-076-B1-K1-D12
gacgcgtacgctctgacatgtctgcatcttaagctttcatttgctgtgatgaggaaatgttgacagggcatgatgaatctgaaactttggcagcgcaagataatggatttgtaaaatctcttgaacgtatctatgaacgatcgcaagcaattgattcatctactgcacaaa

SEQ ID NO: 29351 - DNA, 308 bp, Glycine max
  Clone ID: LIB3051-076-B1-K1-E10
cacgcgtgcgccagcgacaccttcttcttagtctccaccattaagttccagaacctcaccacttttccctgggttggggtcttcaaccccaccctgcttgccaccaacctcttcatctgccatgacaccatcttccccatcttctgcaaatgcccccccaacagccaaggaacaaattacatgatctcctacgtcgtccaacccgaggataacatgtcgtcaatagcttcaactttcggtgctgaaaaacagtccatcattgacgccaacagcggtgagacaactctacatgactatgacaccatttt

SEQ ID NO: 29352 - DNA, 252 bp, Glycine max
  Clone ID: LIB3051-076-B1-K1-E12
tccaacgacaccttcttcttagtctttcaccattcaaatttacaacctcaccacttttccctaggtaagttcctttaccccaccctgctctccaccaacctctttcatatccatcacaccatcttccccatcttctgcaaatacccccccaacatccaatgaacacattacattatcttctacatcttacaaccctatgataacaatgccgtcaatatcttctacttttagtgcttaaaaacattacatcat

SEQ ID NO: 29353 - DNA, 234 bp, Glycine max
  Clone ID: LIB3051-077-Q1-K1-F1
cacttactcctaaattacattttaaaccatcaataatacttttgcgtctgggtttttctccagcgtgggtactcccatatcaaccataaccactcaaactcactagctaccaactattttataaacatctctgattgctccctatcccaacctatcatctcacaaccacactacactgattatataactccttattcgcctcttcaatattatctatctacataaatcaatcac

SEQ ID NO: 29354 - DNA, 199 bp, Glycine max
  Clone ID: LIB3051-077-Q1-K1-H1
ttcctctttctacccactcttcctaaaaaaaaaaaaaaaaaaaaaaaaaaaaaaaaatttaaataaaaaaaaaaaaaaaaaatattttaagaattggttatatttcataacacttgcattccatcttaatttcttttatataatttcacctaatttcattttcttttccttcattttccaaatttttatacttttaaca

SEQ ID NO: 29355 - DNA, 296 bp, Glycine max
  Clone ID: LIB3051-078-Q1-K1-B2
acccacgcatgcggtggacgagcgagcgagcagttacaaagagaggatctgggacttcaaaggcaagggatggcgcggtagtaatcacagacgtcttgcgatccttgcagagtcataagtgtgacaatacaacttcgtcatagacacactctcacttactcacagctgaactcgagtagtgcttcacacgtcttgaaagcgcattcgcagaagaataaaaggcttccttagaaacgaccaagttcgcgctgcgctggttcaagaacttaggacatctaacattggctagcaacgat

SEQ ID NO: 29356 - DNA, 174 bp, Glycine max
  Clone ID: LIB3051-078-Q1-K1-E4
taaatttcgactcaattcacttacatcttcttccaaaacacttattaatcatttaactcacttctattcaaaccatatactatcaattaacaatcaaaaatatattaacataattcttccaatatataatttacacacttaatatataattattaaataattcttccttttttt

SEQ ID NO: 29357 - DNA, 214 bp, Glycine max
  unsure (1)..(214): unsure at all n locations
  Clone ID: LIB3051-078-Q1-K1-F10
gaattaagggttacgattcacggagaagggagccatgagaaatcggctatccacattccataggaaggcatgcaggtcgcgtcaaattactccaatctctgacatcggggaggtcagtgacaatanaataatcaatactcgggcttcatgtgagtcatgcgtacattgtaatgaagtacatatcttaaatcccttaactgagtgatccattgga

SEQ ID NO: 29358 - DNA, 276 bp, Glycine max
  Clone ID: LIB3051-078-Q1-K1-G12
ttcttcttaacattttctctaatacgtttttttttcattttgttctaacacaataaagtccagttaaaatttctttcatcccttgataataatatcacacatcttatcacatcatcttttatcacctttatatacacatttttctcacatctttattattttttactttattaatactatacttataatcacaaaacatataacttcatcccaatgatattcattccatactctctaatcacacaaatttcactatcaattcctatccctttaatt

SEQ ID NO: 29359 - DNA, 323 bp, Glycine max
  Clone ID: LIB3051-078-Q1-K1-H3
cgacccacgcatgcgtccgcatcaagacacacatcattagcataggtattaatacgagggctgagtactcgcaggtggacgagacacgaacgctcgcacgaacgctcatctactggaccttagccttctcattatacatggccatatgctatatatggcctttccgaatgaatcacgtaacagacgctgaacatataaaccgcgcatagcttggaatgcctgctacaaagctgtggcttgcctgttactgtgtacatactcaaacaattcgacggaaccttcgactcagacgaccgttcaaatccagactctatcgccgatat

SEQ ID NO: 29360 - DNA, 131 bp, Glycine max
  Clone ID: LIB3051-078-Q1-K1-H6
ctttatgcaatttatgccataggtatggacttccagcccttgaaacctgcggtcgaagaacaaggactttcaactgaggacctgccattttggcacttatcggagacgtacgataggaactccttttccca

SEQ ID NO: 29361 - DNA, 344 bp, Glycine max
  Clone ID: LIB3051-079-Q1-K1-C11
tcccggctggacgcactcgtccgcttggcagcgcgaagctcggaggagcgccgcttgtcatggcggttccaccatccaaaagtgaagccgctgagaaaagaacattcctttcacaattttactctcactatctcggaaaccgaatccacgctctctatccctacttctccacaaatctcttgtccaccttcgctctccgcttcagatcaacgcatcatcggcaatgtctccctcttacgctaccttcctcttcactcgacgctcccttgttcatgaccaacagatctagagtgcatgacgttttggaggatatattagagcgtgtttcgataaatatgcatagc

SEQ ID NO: 29362 - DNA, 110 bp, Glycine max
  Clone ID: LIB3051-079-Q1-K1-D12
tcacacccttttaatctcgttatcacaatttagtgaaccatagtgcatctatcttacttgatctttatatctttttagttttctttatatattgttttacttaataaaaa

SEQ ID NO: 29363 - DNA, 193 bp, Glycine max
  Clone ID: LIB3051-079-Q1-K1-H5
accacgcgtgctccaactcctacgaacactcttcctcatcatacatatcatacataccgcgacagttatatctataaagcagggtagggtccacacttacagatatgtcatcctctattaatactatcatctcccagacatcacactgtatatatacacttagcctattatacacctaattttgacgcatttt

SEQ ID NO: 29364 - DNA, 234 bp, Glycine max
  Clone ID: LIB3051-080-Q1-K1-B11
ttcgacccactcttgtcgaacgcgatggttgacgttgactttggaacctctttctcgcctaatcgccacatccacaacgggtttatctgaacaatctcggcgatcttgtctctgttaaaaaatctcaaatcttcaattatatctatcaaatataattaatttaataattcgtctcggcctaataagcttcttagcaacataatcatcatatcgcttttcgtgcacaataataat

SEQ ID NO: 29365 - DNA, 222 bp, Glycine max
  unsure (1)..(222): unsure at all n locations
  Clone ID: LIB3051-080-Q1-K1-B2
atcgcatctggagtttgcgacctcgtcttgtgatttccatggagggtgctgggatggaagagatgtatatcattaatgatgatgattataattacatgtcttangctctttggaactttgtcgctggttgtgtggattgtggaattcatgacacttgtgataatgcttgcagtatatgccttgaagctttctgtgatagtgatccttccacggtgactagct

SEQ ID NO: 29366 - DNA, 260 bp, Glycine max
  Clone ID: LIB3051-080-Q1-K1-G11
cacgcgtccgataagttcacagtcaattcttaaaaatgggttccaaggttttgcttgtttgggttatttgcatagctgctatacttgtgatctctactgatttgtcacccaatgaatactaaaattttaacttaaaagattggaagcatgctccaaatgggttatatgatatcatattgtgttactgttgttgtggtgtgccttggtatggcttcttttgtgtcccttattattgtggctgctttggtggcccttattat

SEQ ID NO: 29367 - DNA, 458 bp, Glycine max
  unsure (1)..(458): unsure at all n locations
  Clone ID: LIB3051-081-Q1-K1-A3
cggaatgcgttaagtctccttacttgccgcactgtgttacatcatgataaagtggatagtgtgggagatacagatcttgatgatggcttgtgctgcatatgttatgcatgtgaagcaaatgctcaaattgcaccttgttcacacaggtcttgttatggctgcattaccaggcaccttttgaactgccaaagatgtttcttttgcaacgcaacagtgacagatgttagcaaaattggttagaagaccggctaaggaggagcttctattttatggttgcttggttccggttgaagtcagctagtcagtaactgattatttgcttatttatgaactacatatataaaaagtgacaagaaatgtaaaggaaaacaaagaaggaaaagatgggggagaagaaaaaaagagggggtggngtaatcgggtaggagttaatactgttccagatagtgaagtgtttc

SEQ ID NO: 29368 - DNA, 275 bp, Glycine max
  Clone ID: LIB3051-081-Q1-K1-D1
tcccggtcgaccagctccgattttgcagcctgggtcaccttagcttaaccggttttttagccttggtaacctgtgccaatggtctctaacctaaatctaaaaccggttagttactcaaattacctatttggcatgaatcctgccaatatcaaattatgcaataaattaaagttggggttggatattgtctttttggaaaatctggtgcactctgttctggtgggtggcaccttggagtcctatcatggaaaaaaaaacccattttatgcgggttc

SEQ ID NO: 29369 - DNA, 286 bp, Glycine max
  Clone ID: LIB3051-082-Q1-K1-A9
ggaattcccggcggtagctcacgcatcctgagggccatactgcttccacccatgagctggttccacagaatcatacgtacacgtgtcgtattctgtatatacattgcgagctccttaacacattgctaccttcttaaggtaggtactttttaatttggtacaagtttcagttttcggtgtgaattagtttaatcaatggaaactcacagattaatccttcttcaagtatgattaataatcatattcataattattaatctaatgaataaaattatttattaataat

SEQ ID NO: 29370 - DNA, 374 bp, Glycine max
  Clone ID: LIB3051-082-Q1-K1-D6
aattcccagctgcgacgcactcatactcaaaacttgctattgtattgcatcttatcttattgtatcgtattatatctcatgtcatgcgaattaaattcgtcgagtcgatctaaatctcacccgccctaactcgttctctttcttactttcaccctttgttcttatctttcctcactcaccctttatatttcattcctatcttatccaaactctttcctccacctccattctcttctcaatatcaatatttcctctcacttgctcccattcctatatctcttttctcctctccaattacccttattattattctttcttacttttctatctcctcacatttcaatattacctccaccttatcatctcgttcttct

SEQ ID NO: 29371 - DNA, 193 bp, Glycine max
  Clone ID: LIB3051-082-Q1-K1-H9
aagcttctttacaggtttacgttttcgcaataaataaaacttcatgagaagtgtagttgcaataaaagtggaagtctctcttctgttgtgatataaaggaataatagttttatataacaaaaaaaaaccaaaaaaatcaccaaaaaacaaaaaaaaaaatctaaaacataaatatatacaaatacaacactac

SEQ ID NO: 29372 - DNA, 326 bp, Glycine max
  Clone ID: LIB3051-083-Q1-K1-D2
acccactcgtccgaccactcattccctccaatcctttgatgctatcttcaactcactacaagacctctttataaagcttatacggtcccttacatcatcctaatccttcacacattaccaaatccttccacacaatagaagagctatactccatgctcaaccccaacctttaacccaatcccattccataattgaaaaaccccacttatcagataatcaacactatcatacttacccatccattccctagcaacaagtcttaataaaacatgttcatagttcacgacaagctctacagacacaaagcagacaacgagctcaccttc

SEQ ID NO: 29373 - DNA, 448 bp, Glycine max
  Clone ID: LIB3051-083-Q1-K1-F3
actaccaattcaaaccttgttgtcgccccaagccttttcaatcgagttatgcgtgaccgcaaccggagcccctactcgctgcttccatttcaacaccatgaaaccttgccttctgggcctgtgccactcttcccagcccaatctttcaatctccgccctaaggaaccgcatcaacatccactgctgccgctgcatcctaaattccgaccacacatttcttacctgggattggaaccgatggctccgacatttctgccaaatcgaacacgcctgaaacttcgcctctgttctcaaggttcaactcgatgatgctatcgataatgacgattacgaagaagcggctaatgttgatagacggctctaatggaaacaacgtccacggacactgatgctgaagttacggatcagttgaagagtgctatgtacgatgaacgatatcatgatgcat

SEQ ID NO: 29374 - DNA, 428 bp, Glycine max
  Clone ID: LIB3051-083-Q1-K1-G1
cccactcgtctcgctcgttgtctcgaatacaagttcatagaatcctattgcaattttacccgttgttacacttctttgcacatacgtaaacctttcaataactaacacttacacatgatcaatgccaatacatactatctcatataaacagtatctattatttaatctttgtttcttctctatctctcatttaacatttttcattactccaccaatattttttcataaaagcttgaatttttctcctaccctttacaatgatctcttcgcttaaacagcctgttatatggatcattgtttctgatcttcttttgaagcaaatacattcaactccaattaatgcaatattctttttaccctctttgtcaatataaaaagttcaaagatctcttgtttaatttaaaaaccactccacatttattcttctc

SEQ ID NO: 29375 - DNA, 262 bp, Glycine max
  Clone ID: LIB3051-084-Q1-K1-D10
tattattcaatttgattgccctacaatgatcgctccgtaaacctattatatcgctagctattacaaaacgacataccaaaagtcaatagagctcttcctaactctttattctcaaatgacgcttctcccggcttataagatatttaatcagttcaacacatctagtcatatttgttaatatgatattatatacaacgtctcttcctttagtgatccattctctcaagcataatacttagtgatagaaaaatataatttcact

SEQ ID NO: 29376 - DNA, 547 bp, Glycine max
  unsure (1)..(547): unsure at all n locations
  Clone ID: LIB3051-084-Q1-K1-H6
attcccgggtgcgacaccatcgcgtctcgtcccacgtcgttcccgttcgtattaggaaccacaataaaatggtcatatatttccttcgggtgggaagctgtgggaagccaagtgccnnntggaggttnnntccaagttagtgaattnntggttgtattttgggccttaagnntggagtgtaccatactgatcctttgttcnnccgaagaagggttggcattttctcttttgatnncaaacacgcatttcnnaccaaaggggtcactttnntctttgattctgcagaatttttaaatggagcatcgtgccaattgaagtnntttggtcggaaagtgcttctcagtggacttttcctttcgagaatcaatttcagaattggccacannaagtttgggaattgtcatataatggaaaatggtaatggtgaatagtgaacccggttcccctgaatttatgttcggtccttgtttgcgagggggtagccttcaaacgccttggggtgtcagctacatttgaatctctatntattcagcaccgtgtttgacac

SEQ ID NO: 29377 - DNA, 262 bp, Glycine max
  Clone ID: LIB3051-086-Q1-K1-B5
ccggctcgacccacacgttccgaaaacctttaccactgacgaattcccaggatcttcacctatattaatactgtgcaacacgcggcaagttaatcagtactccctctaccagacctggctatgttcactacctatacataaccctatgccaccgtcaatttattcacacttcactgacttcttgacacatagcttctgagtcatcgtcgtgatctaagaagaccggttgcttatacattggacgctttatgagatgctcagc

SEQ ID NO: 29378 - DNA, 313 bp, Glycine max
  Clone ID: LIB3051-086-Q1-K1-D10
caattcctgaatcgacccacccgtccacacaacatggaatccacaccatcatgtagtaaccctgtctcactatacagtctacattcccgggcgaatgcactaccaacaatagggctttaaattcatgactgcatcaactctacacactatctcactacctctcatcccttataactcttctttccacccatatgccctttactctctctctccaaaacccacttatttcaaccctcatcctatcttccatcacaccatgcacgcctcgcacatccaagattccgatggacggacactagacctcgtacaatcg

SEQ ID NO: 29379 - DNA, 469 bp, Glycine max
  Clone ID: LIB3051-086-Q1-K1-H2
cacgctcgagcgacgcgtccgattcgagatgcataagctcgagttcctcttcctactaatgaggttcaaacagtggggcaagcgcccaatcaattcattcagtggccgataagacttgtgaagtctatttcagttaagactattgtcgaatctagcaaagatgttcgacacaaaaggttggaacctcaacttggtccgcttgaacgcttgttgataatagttagcaaaattaggaaggatcatgtacagctaccttgggatcctgatgtactaagcaagccctctaccatgtcatttcatatctatcggaaggatatttttgaattatgtatgggtagcgagatgctaaacatctcagttatacaattgtggctgatgtatctgcataacttatgtactgataaggtgaatgcacatatctatggatttatggacccgcaatccattcaaagtgttgggaataatgcaa

SEQ ID NO: 29380 - DNA, 176 bp, Glycine max
  Clone ID: LIB3051-087-Q1-K1-B6
attcccgttcgacccacgcatcctcatctaaataaaaacactaacattcaaatttcctactataacaactccaaccagatacagatacttttaatcgttcacatacttcatctataactctctatttacttaatcaaaattttattcgactaactctttacttactaaattatttc

SEQ ID NO: 29381 - DNA, 143 bp, Glycine max
  Clone ID: LIB3051-087-Q1-K1-C4
aaaaaatcgtatttgtaggcgccacactcaactctactccaatcaatcagatcctagcgatgggggggaagctaaaggtaccaccgaaatctcttgtatccgccaagcccacgtttaagcatcaccaactaaaaccttaaaat

SEQ ID NO: 29382 - DNA, 295 bp, Glycine max
  Clone ID: LIB3051-087-Q1-K1-E2
aacttctgctactcactactttaacttttcattcttctcctcattcctcatgggcaagttcactatctgcatcagctgatcactaacaattttccgattgatattcataatatctacttatatctacgattcaacactctttttccctaactactctattacatccaccttacacatcatctacttttcaaataacaacgatcatccttatttacctgcttctttcacaattatccacttattaccaaaacaatttctttctacaacacaagtcattcactaatatttcacaaac

SEQ ID NO: 29383 - DNA, 455 bp, Glycine max
  Clone ID: LIB3051-088-Q1-K1-A10
aatacccgtcccgaccgcactcgtccgcccacgcgttcgcacataattatcattattttacttgaacaaagttttagtgtatggtttggtccttatagaaacagaacatatcctgttctttctttctctgtttgcatttttgttcacttctttctttctttctttctttcttattatctagttaatcatgacaacatttatggacatgtacaacactactagtagcatcatgacaccggatttcttataccattgtattgatcaacatctgattaaatcacttgatccttttatgaaaagtgattcatctatcactacttcctcatcaataacatcatacccttcattctcttctttctcttcttcttccaactttttcttaacaacatttatcacctaattttgctcctcattctaccaccaaaatggttcaacttcatctcattctattttct

SEQ ID NO: 29384 - DNA, 411 bp, Glycine max
  Clone ID: LIB3051-088-Q1-K1-C11
gacgcacgcgttctgcagcctcaatattgaacccttttgcattttacagattgatcaggaatccaaggtctaggaatgctgtgacattgttggcattatcagatttcttgtccttgacaaaaaatcagacttctatatcaggtgtcgctatcattgctgaggtgtgtgcttccatgcctattcattctttatcgtattcattctaccggctgctatttgaacatataattatttgtgatgaattagtacaaatttttgagacaatggcttatggtcgctcaagttatttaataattcctatcattgataccaccttgtaacaatatgtgaaatagttataataaatacctacactattattcattatttctatcaaattgttacaagacctgtcctatcacttgtttttct

SEQ ID NO: 29385 - DNA, 410 bp, Glycine max
  Clone ID: LIB3051-090-Q1-K1-A1
caaccttcggccaagcgttccgagctcttaaaatctgcaaccctttgtgagaagaatgggtctatcaaaggtggcattcttatattagtagggatgacaagccgcaaatcagaagatcttttcactgttgagaaagctgataaaacattggagaatctggagaaatgtgagagtaatgtgcggcagatggccgaaaatggcagattacaaactcttctgacccagcttcttgaaggtgcaccagaaaccaaactctccatggctacataccttggtgagctgcgttttaaacaatgatgttaaagaccttgttgctggaactgtgggttcatctctgatcaatattatgaaaagtggtgatattcaatcaagagaaacagcactgatggcactaaatcagatatcatcat

SEQ ID NO: 29386 - DNA, 145 bp, Glycine max
  Clone ID: LIB3051-090-Q1-K1-A10
acccacgcgtacggatgaaattgaacttcttgttgtctttgaacttgttctatgctctttgctaaaatattaagcttgttcataataaaaaaaagcccaccaaaaaaaaaaaaaaaaataaaaaaaataaaaaaaaaaaaataaa

SEQ ID NO: 29387 - DNA, 239 bp, Glycine max
  Clone ID: LIB3051-090-Q1-K1-C10
ttacccctcattcactatatttctaaactcacttctaccttctccatctcgctatttttacatattcggtctctcaacctacctaactcccttctcccaacttcaacccttactcattctcccaaatcaccctaccatctccctcttcatcacaaattacttcacaccaaacatcacattcccaaccatacccctacttcataatacaacaaccactaatatcataaatcttcaccaac

SEQ ID NO: 29388 - DNA, 376 bp, Glycine max
  Clone ID: LIB3051-090-Q1-K1-D1
cgggccgaccgacgcgtacggacccacggacaccgaactcaacgcacaggcttgcgcaataaataacacggcgatgatcgcgggactgatcaataaaaagcacgctcgtctgcatcacaaacacccaaataggatcaactgatataactgacacatcggaaccactaaaacaaggccttcttacatatggatcattgcctcttctatgctaccttatccaatactacatatctgctgatgcgagtcgatacgtcggaacgcgaatacgtgcccaatttggacactactcagcatgttacaatgatcacagttacctagaccgcgaacgaattggacacataatcctctgaataactacatgctctggcagttgaac

SEQ ID NO: 29389 - DNA, 351 bp, Glycine max
  Clone ID: LIB3051-090-Q1-K1-H1
aaatccctcatgagcctaacccaaatccagctcaacaatctttccatgagccaacaattctggcaagagctacattcttctgactgatctgtcctcagacaaattcccgacttggtccattctgcttattgggtccctacaaagccttatcagctatgagcatccattggcttcgcgacagccatagaattcaacctctgcgatactggcatatgatcgtactcctcatcattgatggcaacatcactacctggatgaacaccgtcgttctactcacatgcatacgcatctttcgccgcaacagaggccccgttttcgacattctcaaaagctttgtcggttttagcaccc

SEQ ID NO: 29390 - DNA, 436 bp, Glycine max
  Clone ID: LIB3051-090-Q1-K1-H8
acgcgtgcgtccacgcgtgcgaacgtctgaacaatgagtcccatggttgtgcttgttctacttatgttcttggggactatacttctggtctcctctgaggttgcacccgatgatgcatacgagaattttgacaaaatagatgggaagcctagtgcagatggggtagatgaaagcaagtattggcgtggcggctatggtggcggctatcgtggtggttatggaggtgggcgttgaggctattgaagacagcatggaggctatggagggggacgtggtggatatggctgatgacgaagtggctatagtcgcaggcgtggtggctatggccgcaggcgtggtggccgacgtggtggctattgtcctaatgaacataacgaggctagtgatgatgcttaccctcacaactaagaaagcaaactttctaaagcttatatat

SEQ ID NO: 29391 - DNA, 131 bp, Glycine max
  Clone ID: LIB3051-091-Q1-K1-B11
acccagagcgaccctaacagtgtgtagatgacttaatgtgatggtacagctgagctgactgatacctgtcaatgagcgagtgctccctacgaggacgtacttcgtactattctacaagacatttgtgccat

SEQ ID NO: 29392 - DNA, 101 bp, Glycine max
  Clone ID: LIB3051-091-Q1-K1-B9
acgctatgttcgcgaggtcgtatgatcaaactcccaaagactttgactggactgtccatcacctcgtatgctgcaagatctgatactacctataacgctaa

SEQ ID NO: 29393 - DNA, 274 bp, Glycine max
  Clone ID: LIB3051-091-Q1-K1-E10
ctcattcatgcttgtctataacacataccttgcaaagcactgaggcgaaaccaatccagagccagctcaacctatcatacacacaaaccttccttcaaaaccaagcacttcattcccaataatactgtctaaaaccctcggcttcgatgagccaccccaaaccaccgatttccacaccctcttcctcatgcacctctacttaaaccagcactcctgttgcttcaccgacgacaccgacctcggcttccgtatctataactgcgaccccttactc

SEQ ID NO: 29394 - DNA, 199 bp, Glycine max
  Clone ID: LIB3051-092-Q1-K1-F5
gtgggttaaatagcaccttagaaaaaataatggcccccatattattattttcgtaaaaaacaaaattcccatccttaggaaaccccacatgttacttgcccatgaaacttttacctaaaacatttaccttgcaaacacaattgtggtcacattccaaaaacactctcaacttaccaactattttacccattttacaacc

SEQ ID NO: 29395 - DNA, 193 bp, Glycine max
  Clone ID: LIB3051-092-Q1-K1-H2
tcgaccacgcgtacgacacgcgtgctcaggctttgaatgagctagtaaaataccaacgatgagctgaaaagtgctgcggaataggatccatggactgacatgtccaaatagctgtacttgccatccgaaatgctccggatgctcatgtaccgtgcacacttgcgcactgacctagacccatcaatgggaggct

SEQ ID NO: 29396 - DNA, 193 bp, Glycine max
  Clone ID: LIB3051-092-Q1-K1-H4
accggtctggaatgacccactcgaccgaccacacctccgcatgcttcattataactataaaatactaacactgagatcaacattaaggtgaaagagtaatacataaactcagctatccaaaataatgacacatgaccacctaaacgctatatcaatccatatcctctacagactaactaaaagattccttaac

SEQ ID NO: 29397 - DNA, 289 bp, Glycine max
  Clone ID: LIB3051-093-Q1-K1-F10
acccacgcgtcctaacaaaccaactccaacctttcactctctctgtttctgcaatcacaaatttgtataatataaatgttaacgtgtcctgaaaacctaatcactctctctacttaaaccgcatcaattactctaacaaataatctctctcctccatcactgtacacctacttaatatatataacaccaaacccattcactatctcaagttaaaaatcttatcccactatcttcattccaaggaacttcccatcacaataatccaaccctaccatctatgtttcattaa

SEQ ID NO: 29398 - DNA, 261 bp, Glycine max
  Clone ID: LIB3051-094-Q1-K1-C2
ctactatccatttgggagcaactgaactgcttggagagtatttttcttcttctagaaaaaattacagaccctcattccagagagttagctgtatgcattgcgagacatatcagaaattcattcaggtttctggatgcgggtggccaccttccattatacttgagggagattcttcaagggcacaagctaccttagaggctgaaattgcggctgcgtataatatgaattctggcatttgctgcatctgaatatctctgaaac

SEQ ID NO: 29399 - DNA, 457 bp, Glycine max
  unsure (1)..(457): unsure at all n locations
  Clone ID: LIB3051-094-Q1-K1-E1
cggtctaaaatattcctatctgaaatctattaaaaataaagaaattgtcttgctcataggggggaggtgtataacctggcggcattgaaaataacaattaatataaattgattgaccataagagtatcggtcagtgacaaatcaaaagcgtggagtgggtcttgcgttgtgtaggaatcccaaattcatttcttgttctcattctcaattcttcttttattctcattctgatttgccacacacgcataaaggtttaaaatattgggacttgattcactggaggtggataaagattgctaaaaacgtcatttgctttgtgcttgatatagcaactcaatgatattgcttcattgggttcaaacatgggcaattcaacataggacttgtngtgatattaattaatattgacccttgtgcaagccaaagatgcttttgatgattctcaaaaaaactcttt

SEQ ID NO: 29400 - DNA, 305 bp, Glycine max
  Clone ID: LIB3051-094-Q1-K1-E2
ccgggcgacccagcgtcggaaaagaacagctgatctgctttggtttataccaggctcttcattgatgacctattattatcacaactttccaaaaaaaaaaaaggtggagatgcacggcattgacgatcacaaaattcaacaggatgaacccgttggttcacttgctccaaggtatgaatctgatacgattcagcatatacggaatccatggagcactggactatttgactgtcatgagaatcagacaaatgctggtatgacagcattttttccctgtgtaacatttgcgcagatagcaaaagtac

SEQ ID NO: 29401 - DNA, 181 bp, Glycine max
  Clone ID: LIB3051-094-Q1-K1-E8
acccggggggacccaccgtccgaagggtttatggttcacggtctgttttgaaaaatgggttccaaggtttggcttgtggtaattatgttcataacggctatacttctgatccctgctgaggtggcacccaatgaataccaaaattttaacaaaaaagatgggaagcatgctccaaatgggt

SEQ ID NO: 29402 - DNA, 259 bp, Glycine max
  Clone ID: LIB3051-094-Q1-K1-F4
ctctgtggcagagaactgctaatcgttgctttgtccaagaagatgcaaaaagagctcccaagttggcttgttgccaatcttcatgtgcaacatcaaaatcagttgatactggacctgccagtacagcagatgaatctgatcataatacagttaatgttacccattttaacaggaaatcgtcaatttctaatctatcatcagactgtaggtggtggttgcattcacaacctaattatgggtatcaaaagggtttaacata

SEQ ID NO: 29403 - DNA, 247 bp, Glycine max
  Clone ID: LIB3051-094-Q1-K1-G10
atataggtgtagctgagtggtggctactggtggcttgactgttccggcatactgactgctcgtattcaccttctgacgcgcacagtaattaatgcagcatttaaaggacatagtttgggtaaaaaacgtagagcccctctgggcctggaccaaagatagagaccgaaccgtataaacaggaaaaaaacggaaaggaaaaaactatgactaaatgtactacagcagaaataatatggccttcgttttc

SEQ ID NO: 29404 - DNA, 360 bp, Glycine max
  Clone ID: LIB3051-094-Q1-K1-G2
acgcgaagatcttcgatttacggttttcaatttcgtattcagcaaggtcagtgagcgcctgattcgctgaatttctttcaattcttaatcatttttttgttttctgttacagtagaataccaacccccaaaagctgtttttcatttggtagtagtactagtatatgatgatgatgatgatgatgatgatgatgacgatatttgtgtgtgagaaagaagtgtgcttgttgtgtgcaggcggcgagtgtgagatttttagagagagagaggtgaggacgctgagtgctctgctgagagattccataaccccaagaggaacatgaggaggagaacgtggatagattttttttccttttttttt

SEQ ID NO: 29405 - DNA, 286 bp, Glycine max
  unsure (1)..(286): unsure at all n locations
  Clone ID: LIB3051-094-Q1-K1-G3
cggaatnnccggcgggagccacgcgtccggcagggtctaatgggtaactgcctagattcttctgccaaagttgatgcagctcaaagggccaggtccactggtgcatcaggaatctcaaaaactactccttccagggtatctattccatcatacagtgaaaaaagcaatgcctcaagtcttcccacaccaaagcccgagggtgaaatcttgtcttctgccaatcttaagcccttcacattcaatgagctgaagaatgccaccagaaattttcgccccgatagtcttc

SEQ ID NO: 29406 - DNA, 252 bp, Glycine max
  Clone ID: LIB3051-094-Q1-K1-G4
aacaaaaattatttgcattcttttgggcatcaaaagttaaggatgttagtatttttttaagttaatgcatggatcacaattcctaaggtggtggggggttaataattttaatatatttttgaacactgaaggaaatttttagatactcttctgcaaatctcgcataggtttttattctactgcgattggatgtttcaagttagaaaatagctagttcatcgtgcattatttagagctacttttccattcttt

SEQ ID NO: 29407 - DNA, 330 bp, Glycine max
  unsure (1)..(330): unsure at all n locations
  Clone ID: LIB3051-094-Q1-K1-G6
ttaattgcaatcaagaaagtcaaaatattagcatcctgtcaaatgaagcctcccagcatggtgatctgtcacaaacagactntgatataccaaacgtggaattcaaaattttcaaatttagtcatggtctatcacatggacagtcaatatttgatatgcctgaaagtaacttgtttgatcaaagttcagactcatcccatagctataacttgttcccaactatgcgtcctacaaaacgccctccggagtcagaaatgctatatgatagttttgaaagttgtacaattaatgctgccccgctatttgatcagtatgacaattatacttctg

SEQ ID NO: 29408 - DNA, 291 bp, Glycine max
  Clone ID: LIB3051-094-Q1-K1-H10
aaattatacatttaattccagtgcaatgcctgatcctgttattaagatcgtaacctagccatattacgaccaccttatgaagaactaaagcaaaacatcatgcagaagcatcaacattctcaagcatgtgacgatcgagaattattatttatcagcaaaggaagaagcaaaaccactagcgagaagcctctcaacatactagccgagaatatacacctcaagattcactttttgtccgacattcttcagaggaatcaccactttcttgtgagtgtaagcgaccaacatgaa

SEQ ID NO: 29409 - DNA, 343 bp, Glycine max
  Clone ID: LIB3051-094-Q1-K1-H9
tgcaacattagcccacctgatcccaacattttcatcggtgaagtacattggaatgcaactgctgaccctgaacttattctagacgtggaaacagaattagcacaggtccccaatgaggaactaaggaagaacgatcatgacattgtgatgatcggaggcgctctcttcttgaacgagcacaagctcacatgtactggatgggacgatgactatgctgccgaaggaccaaaggcttttgatccaaattctgctgtccaaggctggggggaaaatctgcaagtacacaatggagtagaatctggtaaactgaagcatgcttctgctgaacatgcaagtgaacatg

SEQ ID NO: 29410 - DNA, 372 bp, Glycine max
  Clone ID: LIB3051-095-Q1-K1-C9
gctcaaagttcaaaggggaatgaatgctttttctcacaacaacaaccttgatcgtttcgttgctgtttccccggaggccgcgaatagatataaaacacaacaagaatctcgtttcggggatacaatgattgggcgcagagacagagagggacccttgatgaggaacaacatcactaactctcttcgcaaatcacgggtcctaacctcagttgcaattggtgtccttattggatgcggcttcgctttcttgttccccaatggcttcttcgtttccgactctgttgcccctaatcgccatattcctctcgctggatccaagacccagaaaaattcatcttgatgtgaatccttggatctggtcaacatttttaa

SEQ ID NO: 29411 - DNA, 277 bp, Glycine max
  Clone ID: LIB3051-095-Q1-K1-E7
aaaactttccaattttggcttggccaatttttgtcctgaaggagatgacacacacgtttgtactatattcatgggcacacaatgctattctgccccataatacatcattacatgtaaataatttcacatcatgaattaaaaaacaatgacaggttgacttgaatttataatttttaactcattgctaactcaaatctcacacttgtacatttttttcttctttcctatatgacacttttacatcaattaattaatttttacattttttctaatcttc

SEQ ID NO: 29412 - DNA, 282 bp, Glycine max
  unsure (1)..(282): unsure at all n locations
  Clone ID: LIB3051-095-Q1-K1-G1
gtgattacatntctcgtggaagtgatgttggtggcagctcatattcatcagtgtattctgaaaggngtgtgggtggtggtagcagttatatgggtggtggtggttcaggatcttattattgaggatgaccgttgaagcattatgtctacaatttggagacaaaggattgctatttatagcttttatgagaatttgttacaaaaactagcttatctcaattagagatgggatgtatttatcaagttatggtggtgattacatntctggatgggatgtattatc

SEQ ID NO: 29413 - DNA, 136 bp, Glycine max
  Clone ID: LIB3051-095-Q1-K1-H6
ccaataaatactatcctaccctaacactttttttctcatcggagcttccaacaaccgggtgttttcttaaaaaagactatcttcaactccccttgtctctacctaccatctacattacttattacaaccataagtt

SEQ ID NO: 29414 - DNA, 506 bp, Glycine max
  unsure (1)..(506): unsure at all n locations
  Clone ID: LIB3051-095-Q1-K1-H9
accggntcgaataccgggtcgacgacgcgtccgaagacacactcgttcatatatctctctgctcttctcttctgttctacctctcaaggtgctgttcttctccctcggccaaatgctagattccgtggttcaatttcggatcttgcacttctggtttgctttgccttgctttttcctcaactgggtccatctaggatccatgtgaaactctactctttctttaatatctgcggaatacgcgtttgactttcagatctagtcgaaatcatttcataattgcctttctttcttttagcttatgagaaataaaatcactttttttttatttcaaaataaaccttgggccttgtgctgactgagatggggtttggtgattacagaattttagcgaattttgtaattgtacttgtttgtctgtagttttgttttgttttcttgtttctcatacattccttaagctttcaatttattcgagtataggtcacaataggaatttcaaactttga

SEQ ID NO: 29415 - DNA, 215 bp, Glycine max
  Clone ID: LIB3051-096-Q1-K1-B1
atatacttggtcttctctagaagtatatttatcagactttcgataccgcccggatatgatcggtcttgccttctcttgcactctgaacatagtgcgatcggttgcctattgcagattaagatctgcatattgacattggctgaacggagttagttcctagaatgctaacaccgatcccttatcattgggtattggttacagaggccagctcctaa

SEQ ID NO: 29416 - DNA, 124 bp, Glycine max
  Clone ID: LIB3051-096-Q1-K1-D11
gcgtcctattccttcccagcctgtatttttgtatcaacatcaacttgttcctggtatgatgccaggtgcagctccctttccaaatttgtgtgtgccaatggttcaacaaggacaacactgacag

SEQ ID NO: 29417 - DNA, 441 bp, Glycine max
  Clone ID: LIB3051-096-Q1-K1-E11
agatcttggaattttggttacgctagaagtggatccaactgaatctcaaggagggattctgtggtgtgactgatagaaaaatatatatttgagcgtagttatttacacatgcacttgttaaaaggctcacaagaaaatttaatgattgaatcaccattgaaatcttgagttttggctcaatagtttattcactttattgatttagagcttgctcaatcgtactctatccaaaaaaaagaatttaccttttgattttggagtgatatgactcattatgtcgatcgtattaataacaatacaccattcacctctgcatggattgaatctcttagatactgacaactttagttttgacctaagtttttgcagattggaattctttgccttctactttagttagtgtgcaccatctttagaaatatgtttataccatcagttgca

SEQ ID NO: 29418 - DNA, 462 bp, Glycine max
  Clone ID: LIB3051-096-Q1-K1-G9
ttaccgggccgaccgacgcgttcgcacagattgagagggccagtctctgcatctcactcctctccttctgagccatgcctgcttcgagccgtgctttatcaggcacttcagtagcccttgcagcttctttttcagcagttttacacctttcttggacctcatcaaatcttttgaactcagtatgatacttctgttctagatggttcttttcctgctgaaatactatcgcttccctttcatatgattgagccttagcattttcagctttcaacttctcagtcaactctttaatttcaatcctcagtgatgatatttctgtatcataactccttatctttgattcagcagccttcaactctaaattcagggttgttaaacacttctcagcatgctcaatttttgcagttttctcttttatttcattttttcagccaaagttccagaaaattcttctcttaaagg

SEQ ID NO: 29419 - DNA, 380 bp, Glycine max
  unsure (1)..(380): unsure at all n locations
  Clone ID: LIB3051-097-Q1-K1-A10
ctaatgacataaaccctggtngggtccacaatggatctccttcatcaatactcagacggcgacgatcccgactccccctctcaaaaccctagctccccgccgcgcctactcgccggccgctccgtcgtccccaaggtcgacgacaccatgctggccctcaccgtgacctacttcttctccgcggccctctctcggcccatcgacccgacccagcacctggtgggcttcaaccccttctacgaccagctctgggcccccatccagggcccggcccaccccttcgccaaggatggcatcgcccaaggcatgcgcaaccacaaactcggctttgtctaggacgcctccatagaacctttccttatttacgagcaatacaacaa

SEQ ID NO: 29420 - DNA, 463 bp, Glycine max
  Clone ID: LIB3051-097-Q1-K1-A9
cgtccgacttgttcagatcgcttcggcgtcccattcgtccgtccacgcgtccgctcaatctctgggttgtttgaggaagccacgattctttgaaaccccaatttctggtagttgatttgaaaaggctccagcaatcatatttgggatggtttttaagtaaataaatataaattccggtccaatcctccttgttgtttccctaactgagcacgttgcaactcttggccaaaatggtatccgagttaatcaatgcaaaccctatcatatatgaaaagaaagagcgtcgacctcgaactgctccatctgctccccatgatgagtatgctgtcgaactaatcgaccaacaagaaggttttgatcatataagagatataaaggaccctgagcacccatattccttggaagagcttaaagtgatcacggaagaagcagttgaagttgatgatcaacgtaattatttgag

SEQ ID NO: 29421 - DNA, 370 bp, Glycine max
  unsure (1)..(370): unsure at all n locations
  Clone ID: LIB3051-097-Q1-K1-B1
ctgccttcatgtangagggctcgtgcgttcatgctgcttgagctgctgatggccgcctgcttcaccttctgcctcagtcatcagaacctgaaggagtttgccctgaccaacccagagaagagcaacaccaaagaaacggatagaaaagataccaaagccgatgaggagctggatgccgaagtcctggaggtgttgcacccgacgcatgagtggcatgccctttaaccagagcaggcatgcccttgcagatcccacgtacagctgaatcttcagacttgggaaagagaggcaaaacttcaatatgaggacaagttccgaaataatttgaaaggcaaaaaggcttgatattaacaaccacacctaaacattt

SEQ ID NO: 29422 - DNA, 425 bp, Glycine max
  unsure (1)..(425): unsure at all n locations
  Clone ID: LIB3051-097-Q1-K1-B11
aattctgccatcaataatgatgaaagttttccgaganagttggcatcctgcacaggagctttgcagacgtcagttagtcaacacatggcaaaggaagaggagcagtattcctgtgaatatgatggccgaatttctaccatggctttcaacatctatatcacctgatgaatctcaggatatgcaaaattgcttaatcaagatagtgccacaggaaaaactccttcagaaggtcgttttctcctggatggaaggaagaagtagcattaacacaattgaaacttgtgtaaatcattctcaagttcaatgtagttctaggtcattaacccatcaggttgagaaagtaaactgtgcttgtgaatccacaacaacgggaaaaaggaaacattctgaatctatgatagatggttctgataccacttgaacac

SEQ ID NO: 29423 - DNA, 294 bp, Glycine max
  Clone ID: LIB3051-097-Q1-K1-B2
gcgtccgccctcgcgttcggtttgtgacttatagcgtttgtgttctaggccggtaactgaagagtgggtgggagcagaataagaaggaagaaggaatcgtcggtgttcgactgacgatcgcatctcaaaattgggttcggatcattcctttgcttgttcgacaattttttttcgcttgcggattttcggaggcatattcttagttgaattgtatggctgttagagttgtattctcgctgctgaaattatatatgcggctgagggcacacttttcatgggaggtgtgtaagatta

SEQ ID NO: 29424 - DNA, 172 bp, Glycine max
  Clone ID: LIB3051-097-Q1-K1-C6
acattcagcaaagaccggaaggtttcattgaaaggggatgctgtacagcaagccagtaagcaagatatttaagtttgtaaatagaggaaaggttttttgtctattcaaatgcaaaatggttctaaaaatggtaatttaaattaagacccgctttagaatactagaagaatgc

SEQ ID NO: 29425 - DNA, 277 bp, Glycine max
  Clone ID: LIB3051-097-Q1-K1-D5
aatcaaacaggggcgaactcgcgttcaagaacacatcgccatggcaaggaacttgcttcttgtgctttttgcagtagccaccctcctccatggctcagcagcccaaaccatacacatggtcgatgatgccacgggctggatcatccttgctggcggagctgccacctacaccgactagtctttcaacaaaaccttcaccgtaaacgacactctcatgtacaactttttcactatccaacacaacatgtccaatgtaacgaaatcagctttttactca

SEQ ID NO: 29426 - DNA, 398 bp, Glycine max
  unsure (1)..(398): unsure at all n locations
  Clone ID: LIB3051-097-Q1-K1-E12
gcgtccgcccttgcgtccggacagttgcagctggccttctagcatggntaggagtttttcttgcaagggttggtttggtgatgttttacaggtgtagcagcaaggatcctggttatatcaggatgaatatgcatgacaatcaggatacaaaagatgacgagcctctcttgaagattgagataaataatcctgctttgctagctggaaattggtcccagctttgtgcaacatgcaaggttctttgctttcttttgattgtctgacttcttgctgtaaagctgatcaatgtcttgcatacacagattgcagatgccggtctttcctttgctttgaattgttttgcacacaattttatgttggcttttcttcagattgtcaagccttttcgagcaaaacac

SEQ ID NO: 29427 - DNA, 205 bp, Glycine max
  Clone ID: LIB3051-097-Q1-K1-E2
cattctttcttcttcataatggtgtggttttcaattccactttttcctttcgtttttggttgaattttaaagctgctgatggcttccattttcattctattttttgcgattttggtttgggttctatttctttaaatggtctgattttatgaggttatattttttgaacaagttacatttacaacgactgctttggcaaagaatt

SEQ ID NO: 29428 - DNA, 330 bp, Glycine max
  Clone ID: LIB3051-097-Q1-K1-E6
acccacgcgtccggggttgaagagtatcattacgctctcttttagtcatctttagaggttgaggaagctgaaggctaccttatacccatagtcactttctgaatcgccttcactgtcactttccttggaagaggaacagatacatggtgaatcgtcttttgattatgcagcaaaagcagcacatgctctcagtgatgcaaataaatcatcacctattgtagtgaatccggacggatctatatggtggaaagagacaggaattgagctaatactctattgcttgatctgcatattgacaatgaccatatgtgttagttctgacatatctat

SEQ ID NO: 29429 - DNA, 398 bp, Glycine max
  unsure (1)..(398): unsure at all n locations
  Clone ID: LIB3051-097-Q1-K1-E7
acccacgcgtccgaactatcccttctnctttcctcagatccatatcccgcgtcctcacctaagccggcggcagcggaagatggaggacgacgagaagacacccttggtgggagaaatcgaggaggtggacgcgagtcccgtggaggaggagggcacgagcgagcgggagaagcgcgtgcggaccaaggtcccggaggcagagatccacctgtatcggcaggggaagggccccgtggcggtgttcaagtcggcactgggcggctgggagcaggatcagctcgagatcagggaggacatcctcgagaagtacggcatgaaatcggtcttcgcgttcaatccgaccgtctgggggcgcggttttcctgtccggttcaatcccagaaatgggaggtcgattt

SEQ ID NO: 29430 - DNA, 150 bp, Glycine max
  Clone ID: LIB3051-097-Q1-K1-E9
gaaattaaaaaaaaaaattaaaatttaaaattaaaaaatagggaaaaaaaaaaaaaaaaaaagaaaaaggggaaaataagaatgggaggatataagattaatatagtgtaaattaaataaaatttaatggataaaaagtaaaaaaaatta

SEQ ID NO: 29431 - DNA, 248 bp, Glycine max
  unsure (1)..(248): unsure at all n locations
  Clone ID: LIB3051-097-Q1-K1-F10
ttcgatctttctnttactctataatctctatgtttttaactccccgatctataaatcgttctcttactctgtaatctctctctctcgctctctctatctgtctatctctctcactcttacaaagcactgtctggcaattgtatgcatggaatgaaacttcgtcagtacttcttcttaagaactgagaaacatgtactcttatgaagaagcgcttgtttattcaaaatacaagttgttcatatgaaaac

SEQ ID NO: 29432 - DNA, 337 bp, Glycine max
  unsure (1)..(337): unsure at all n locations
  Clone ID: LIB3051-097-Q1-K1-F12
actnaactatgggggatnttgtttcaaatttagatgaagatctaaagtgtccaccaaatgtggattcatcatgtgctgactgccaaggttaaggatgttttgttttgtttccatgattgaattctgttgactgttagactttcacattttttaataaaacacttggtatgccataagcaagtattaaacaagaaaatataatgataacgtggcatatatgctaaagactaaagagagttggcttaattggtatgatcaaccatcattgacgaaaaaggtcttgggttcaaattttctgctagtggtctttcattggtatgtaatgttgacaaccttt

SEQ ID NO: 29433 - DNA, 385 bp, Glycine max
  Clone ID: LIB3051-097-Q1-K1-F6
acccacgcgtccgacttgctagtgttctattagttcacggtcttttctgcaaaatgggttccaaggttgtgcgtgttgtagttatgttcatagcggctatacttctgatctctgctgaggttgcacccaatgaatacgaaaattttaacaaaaaagatgggaagcatgctccaaatgggttatatgatagcaaatggggttacggtggttggggtggtccttggtatggcggctggggtggcccttattatggtggcggctggggtggcccttattatggcggtggttggggcggtccctgtcgtggtggtggctgtggtggcttgtgaggttggtgttgacctaatggcatccctcacaactaataagaaaactagctaaagct

SEQ ID NO: 29434 - DNA, 430 bp, Glycine max
  unsure (1)..(430): unsure at all n locations
  Clone ID: LIB3051-097-Q1-K1-F7
acccacgcgtccganctcgagcggcnnnttttnnncnngggtttcaactacatgcatggttggcggaaaacagtcaacctatgccagcccaagcacggatagagtccatgcttttatttcttatttcttacatatatactagttattacatggagtacactcaagtatatgagtgtgttcagttcatatatttgtgatttttacttcagcaacatttgcagccctttcgaccgcagcatctgcatcctccgccatgtccaccaccctgactcctcctgtctgtgctttcaattagctcgattgtgtacaaaaaccgttcactagtctgccggcctatgtggatgtgctcatttgaattctatcgatgaatccatatttgtaagtcaatgtaattagtgagagaacatgaaaactccttcgtttagcattt

SEQ ID NO: 29435 - DNA, 267 bp, Glycine max
  unsure (1)..(267): unsure at all n locations
  Clone ID: LIB3051-097-Q1-K1-F9
aacnatttgcatatatgtataccattccctttttctcctagtgcttaggctacggactgcttctcatctgtgttgtggcaactgagccatccaaagatgcgacacaagcataagaaccaaagacactgtcagatgcctggagaagttgtggaagtggatgacatggtataagttatttacatggatcaagctgtagacacagtatatgctgtagacatataatatgctttttacattgcattttacattatttaatgattcaaaatc

SEQ ID NO: 29436 - DNA, 466 bp, Glycine max
  Clone ID: LIB3051-097-Q1-K1-G11
acccacgcgtccggtgttctataagttcactgtcagttctgaataatgggttccaaggttttgcttgttgtagttatgttcatagcggctatacttctgatctctgctgaggttgcacccaatgaatacgaaaattttaacaaaaaagatgggaagcatgctccaaatgggttatatgatagcaaatggggttacggtggttggggtggtccttggtatggcggctggggtggcccttattatggtggcggctggggtggcccttattatggcggtggttggggcggtccctggcgtggtggtggccgttgttgcttggggaggttggcgtcgacctaatggcaaccctcacaactaagaagaaaacttgctaaagcttctttacgggtttaggttttcgcaataaataaaacttcatgagaagtgtagttgaataaaagtggaagtctctcttctcttgtgatat

SEQ ID NO: 29437 - DNA, 124 bp, Glycine max
  unsure (1)..(124): unsure at all n locations
  Clone ID: LIB3051-097-Q1-K1-G12
atgaatatgaaaattttaacaaaaaagatgggaagnatgatttaaatgggttatatgatagnaaatggggttacggtggttggggtggtaattggtatggttgntggggtggtttttattatgg

SEQ ID NO: 29438 - DNA, 430 bp, Glycine max
  unsure (1)..(430): unsure at all n locations
  Clone ID: LIB3051-097-Q1-K1-H10
cgtccggnatttnnctgcgttgtttcgtggttaatttttcgtgttcttgtgatctttctgttggagtatttagaacactcctttgtaagtttaactaaagaggctaattaattttcaattggaccacagcagatggctgaggagggtcacagggttactctaaatgtttatgacttgagccaaggtcttgcacggcagctttcaatgtcctttttggggaaagctattgaaggcatatggcacacaggagttgttgtttatggtaatgagtattactttggtgggggtattcaacactctnctgctggatcaactccatatggaactccactaagagtggtagacttaggtgtgacacatgttcccaaagatgtctttgaaatgtatttgcatgaaattaagtcgcaataccctgcttgaacatatagtc

SEQ ID NO: 29439 - DNA, 441 bp, Glycine max
  Clone ID: LIB3051-097-Q1-K1-H11
gcgtccggggctacatggagggtctcttcaaaggcctttcccccactggagacaaaattgaagtctatgggatggccattttcacgttggatgagaattcaaaaatcgtgaaggtggagttcttttatgatcctgccgaattgcttggaggtctcctgaaaggtcccaagtttgatggcagtgctgaagatgctgttgcaagctgtcctgtactcaggaacaccggctagagcagcacaagttcaaaaagtttaacctttgaagtaaaggtttaattgcagttgttgcatcaatggcttgtttaacttttagtttttacagttatatctgtaggtaatatttactgcagactctccaaatccaagcaaattaatgttgtaatcaataacacccccaccctccttttccccatgtaataataagcttggtcaattattaaat

SEQ ID NO: 29440 - DNA, 303 bp, Glycine max
  unsure (1)..(303): unsure at all n locations
  Clone ID: LIB3051-097-Q1-K1-H5
gtccgtgtcttaagccagagtttcaagcccccagaagaccaggaagggggagccangtctnanaggaaganaacgcctagctaacatagctaccacagagaangnatcattagatggtggaaatggcttcaaaattctaacaaagtagactcttctaatacagatagtgcatctgcacatcgtaaccaatataatcctaagaaaactgaagagagtgttggaaactgcccagtctgtcgcaagccttttcttgccaaggatttggaccatgtgcttgctctagtcggttcatattctttccaa

SEQ ID NO: 29441 - DNA, 206 bp, Glycine max
  Clone ID: LIB3051-098-Q1-K1-A10
ccacgcgggcgaaattaacaattgagtttggcttctacttacaataccgagattatcatacatggttcaggattcattctgagcgcaggaacaaaacataatcagtgaatagtgaagagtgtggaattggatcagatccgttatagagagatgtcacgggggagatctgattctggagggtggttgaggggctgtttggtggtgtt

SEQ ID NO: 29442 - DNA, 273 bp, Glycine max
  Clone ID: LIB3051-098-Q1-K1-A12
cgacccacgcgtcggataataacctaatgcaaagagaataccaagcccgcttctactggtgcggacaaagtgcctgctgctcagcacaggtgaggcaacagagccatccaaagatgagacacaggcagaagaaccaaagacacagccagaagcctgcggaagaggcggaagcggggggcatgaaggaagctggggacacggtggagactgagggcatggcggatgaggacacggtggaggacacggccgaagaggatacagcggaggacatgg

SEQ ID NO: 29443 - DNA, 408 bp, Glycine max
  unsure (1)..(408): unsure at all n locations
  Clone ID: LIB3051-098-Q1-K1-A6
tcgaattgaatcccgntccaatnnccaactgcgccggttgtttttaagtcgcttctgtgtcgttacaggtcattcttaaggtgacaatttctctgcacgacatgtctgatgaacgagctgtgcatcctgattgccggaatgctagtaacccttatcatgaatgcagtgattactgttttagagtaatagctgaagctaaaattaggtcacaacaacaggaatcagaagttggacaagctagtggtggaagcaactctaagcaagctatcccagatgaatcctatctcggtgaggaaatacacgacgacagacctgatcttgaagaaaactctgatagtgatcctgaccagcccgtccttcatgaagcagagcaagaagaggttgattacacaaaaacttttgcgagac

SEQ ID NO: 29444 - DNA, 244 bp, Glycine max
  unsure (1)..(244): unsure at all n locations
  Clone ID: LIB3051-098-Q1-K1-B11
aaaggacacattattaaattntgagtatggttatttttagagaaggcgttggagttacgatactctcaagaatttccgtgagatctctccgctggttcagaatcacatcaaacgggtttattctacgttatgttgcgctgtggtggctgctgctgttggagcatttcttcatgtactgtgtaacattgggaggtttctcaccacatatgcttccattagaagcatggtttgattgctatttaca

SEQ ID NO: 29445 - DNA, 406 bp, Glycine max
  unsure (1)..(406): unsure at all n locations
  Clone ID: LIB3051-098-Q1-K1-C3
gacccacgcgtncgggacgcgtggggttcatttgtcttaattgggtgtgaaaggagtggtatgtacaagtgtgggaataaagaattcgttagaaaagacactgggagtaggaaatgtggttgtcccttcaggcttcatgggaaacctgtgcatggaagggaaggttggatggtgaagttgatctgtgggattcacaatcatgaattggccaagtccttagttggacatccatacgctgggcgattgactaatgataaaaagaaaattattgctgatatgacaaagtcgatggtgaaaccaaaaaacatcttgctaacgttgaaagaacacaatgccaacagttgcaccacgaataagcaaatttacaatgcaagaagtgcatatcgttcttcaataagaggagctg

SEQ ID NO: 29446 - DNA, 355 bp, Glycine max
  unsure (1)..(355): unsure at all n locations
  Clone ID: LIB3051-098-Q1-K1-C6
ggaccactngcaaatttcacggtccgttccaaacaatatggtgctttccatgctaagttctcctgtttatcctactgtccattctccaactacaccaggtcaccagtcatattcgacaggaattacaaattggtctagttcatcttatattcctagcccacgttggcaaggcccttcaagttatgcacctttaattctaccttagggaatggtttcagtgtctgtgtggagtgcatacagttgttaaatgggatcagacatttcacatcttacaatgtcatatggcctaagctattgaacttctttacaatatgaaccatcttatttaggatctcaatggtcatattctcaattt

SEQ ID NO: 29447 - DNA, 308 bp, Glycine max
  Clone ID: LIB3051-098-Q1-K1-C8
gacccacgcgttcgaaatcctcttcttacactcacctttcttatcttccttctctttctatatatagtggcaaagaaaatttttgttgggtttgatttcgatggagaattattccatgttgttctctgtttccaattcctcaagctacccaattggagttggaagctctcaaattggttatagtggtcaaagctccaatgcgtttcttggtctaaggcctattaatgaattagctagtgatgatcatgagaagagacaaggtggtggtgatggcaatatgttaatgtctcaaatcagtggtggtagca

SEQ ID NO: 29448 - DNA, 250 bp, Glycine max
  Clone ID: LIB3051-098-Q1-K1-D3
acttacacattcaatcccatcattgataattcaacttagggttagtgaaccccttactactaaagcatccctcccataatcccaatataaataccccccacaaaattcggtgatgcaaaaaaaaaaaaaaaaaagaagaacacttaccttaatttcaccaaatcaaccaaagacaaaaaaaaataatccatatgaacataatataaagcttaaaactattggtaacaccattttaaggagtaaaaatgcc

SEQ ID NO: 29449 - DNA, 174 bp, Glycine max
  unsure (1)..(174): unsure at all n locations
  Clone ID: LIB3051-098-Q1-K1-D7
cccacgcgatcgacnctttgaatttgagattggccttgaggttgatacgcacgacgacgacaaggtggaggggcatacttcgacggagagcggaaccgattcttctcagacgatggcaaacgatcagataaagatgacagacgcagctcctgcgcaggcaccaacgcagaacaa

SEQ ID NO: 29450 - DNA, 357 bp, Glycine max
  Clone ID: LIB3051-098-Q1-K1-E12
acccacgcgttcgcgcacgcgtgttcaaactcagactcatgctttacagataagaagaagtcgtagggctaagttccatttagaacggataattaatcaaaaacacatcaccatttctgctctgcttggaaggcacatagacaaatccataatgtctgattctgagcgaatccaataaccctgattagcattccttcacactacccttgaagcaaacgccggaaccaagaaaagctatactattactcattactgcaactctaacaataactaaaacgatcatattaaaatcgatcacaaactttcttaaatcatcacgccccctgtctctccaacaacactgtcaatccactcaac

SEQ ID NO: 29451 - DNA, 111 bp, Glycine max
  Clone ID: LIB3051-098-Q1-K1-E5
ctttcaaagtgattccaactcatactcaatgagtcaattcttaatattgactatggagttaatgctttacaagcaactgctgtttacaatgtctcatacattgcttataaa

SEQ ID NO: 29452 - DNA, 86 bp, Glycine max
  unsure (1)..(86): unsure at all n locations
  Clone ID: LIB3051-098-Q1-K1-E8
gctgctttcttggctcnnccttctcntgnntcccctggtgggtgggcttgtgctccttntggtccttntgcgtgggggttttgttt

SEQ ID NO: 29453 - DNA, 107 bp, Glycine max
  Clone ID: LIB3051-098-Q1-K1-G1
gaatttgaaattggatttttcactttcattcgatcaatcaggataagtggaatctccaattccggctccaaattcgcaacccctaataatactccttctaataaatt

SEQ ID NO: 29454 - DNA, 328 bp, Glycine max
  unsure (1)..(328): unsure at all n locations
  Clone ID: LIB3051-098-Q1-K1-G10
cgcgtccggnctaaccagacacacttccacgtcaccattaccaccgnggaagggggagcgggaggctggtncctttaacctctcccggcggcgctgagtggtgatcaaggaaatgggtcagacgctgagttgcgtgcaacagcacgaggaccatggtgtgctcttccctgcacttgcaagtggagaattggaggttgttgaggccatggtggaggaagaccccactgtgttggaacacaccattggctgtgacaggctttctcctctgcatgtcgctgctgccaatggtcggatcgaggttctttccatgttgttggataggtctttc

SEQ ID NO: 29455 - DNA, 448 bp, Glycine max
  Clone ID: LIB3051-098-Q1-K1-G7
cccacgcgtccgtatttgattcacaccttccactctcttttcaccaatcccttatatcccccctgcactgagctgttcataattcaccacttcaccatcaatttcccctccaatttcccatttatgatccatttggcatttcatcatatttcaccacttgtcctactccacttggatgatttcctaacgtattgttttcacaaatccttgttcttcatcagctaatagtttgagtccaacgaattcagcaacactatagatatatgctatatcttcctttccctatacattttccttccaaagtatctctagttctctacaaatcaacgtggcacattttttagcctaagaaaagctttagctgcaactcaaattcaaagtgtaagcctttcttgtttttattagtttatcttcaccaatggaagagaaccttaagtgtgaacaagtt

SEQ ID NO: 29456 - DNA, 251 bp, Glycine max
  unsure (1)..(251): unsure at all n locations
  Clone ID: LIB3051-098-Q1-K1-H10
tgtgtatgttaggagcaaaggttgtaattattgatgtacgtgcagttaagagttttatntagactggttngatttatnttgatgttaggtaaagtattttttaattttagaggttatgaagttactaatataantatggtgtgtttgatttataggagagaaatagagtgaagagaaataaagttgagtttaatgaagtgtgagtaatattgttaatggtataaaggatattatttataatatgttatttt

SEQ ID NO: 29457 - DNA, 268 bp, Glycine max
  Clone ID: LIB3051-098-Q1-K1-H7
gtccgtgatttaagggctgcggtttcaaacctgtatactagctgcaagggaatgttggatttggatgctgattggatcgattcagactcattttgactgacatatgttagagaggtggaagaattgggacagaggaaagtggatgagctctgccctggtggaaaaaaccttgtagttaatagtgagaacagggacaagaatgttgatccttttatacaggagcgttttataacattcatatttgagtaggtatcacaatatgtcaaag

SEQ ID NO: 29458 - DNA, 345 bp, Glycine max
  Clone ID: LIB3051-099-Q1-K1-A11
tcctatcaacactaacctcattaactaaaatcacaatctcccaaatcaaaaacccacataccacataagcaatttcacaagatatgacgagactaccccctgcattctatcccaaacctatctatgcctccttccaccgaccactggacctttgacgccatccacaacggacccctccacagactcaacctcgactccgacaccaactgcttgaccttccatacctacgacctcttaatccttcactcccacaattatttcaccaaacaccataaatcacccaacgacgactaccacctattcccctccagcatagactagctcaaatcccaatccaaactctac

SEQ ID NO: 29459 - DNA, 343 bp, Glycine max
  Clone ID: LIB3051-099-Q1-K1-A5
acccactcgtccgtttacgcataaactgttacacaagcgttctctatcacgcacgccctaacaaaaacaacgctaatttatagtacactcaagctcactacgttaagagtagcacgctagcaccaaccaacaatagcgtctctgacatcctaatgtttcttaatcaccacattgatcaccggcgcagacgcaccaccacccccttaaacggtgcgacctagacacctcaatcattgaccatacacacctttcccaaaagactcttattcatcacgaccacacctatataccaacttcaacgaatggcccacataaacctaatgtactccaaacttactgaact

SEQ ID NO: 29460 - DNA, 108 bp, Glycine max
  Clone ID: LIB3051-099-Q1-K1-A6
aaaaacaaaaacaaatttttaaaacactcaagggcactacactaacaataccacactaacaccaaccaacaataacaacccacactactacatcaatcactaacacca

SEQ ID NO: 29461 - DNA, 259 bp, Glycine max
  Clone ID: LIB3051-099-Q1-K1-B1
aagttctgctatatcccatttgaaaagtaatgtgtcaccttaaagtttctttcatgtttgatcatgctactatccattttgtagcaactgatctgcttggatagtatttttcttctactacaaaaaattacataccctcatcccatagagttagctgtatgcattgctagacatatcagaaattcattcatttttcttgttgccgttgtccaccttccattatactttatggaaattcttcaaaggcacaagctacctt

SEQ ID NO: 29462 - DNA, 348 bp, Glycine max
  Clone ID: LIB3051-099-Q1-K1-B5
acccactcatacgctcacactatcacatgtttacctgcaatttttaacccccagaacaaattaccaatactagaaattttttaaaatttacagggcacctatacataaccttatctctcatacaaacgaataaatcaaacgacaaataaaactaactaacccacaaattacacttaaatttttacaccaattgaaaacaagcaaatcatattgaaatacatctttatacaaactctattccaaaaactacataaaacttacaatctctatgcactgtctaaaacacaactcataaaaaacacaaacctctccattacaaagggaactcaatccatacaactattccta

SEQ ID NO: 29463 - DNA, 293 bp, Glycine max
  Clone ID: LIB3051-099-Q1-K1-B9
actcagacttgaaatcaaaaagagaggccataccaaaattttgaaatcaattataccaaacaccggcattccaaacactttattttgtcgcatctttttgtctgtgctgcaaataacatgaatacgcttggacaaattttcccttatagaacgcatattagctatctattaaacatatattaggagtgcccgataccacctcctttgacgagatttaaacgtcgtttctcaaattgtccaaagagactcactatgacctatctgagttaatgaataattccactgtgtcttta

SEQ ID NO: 29464 - DNA, 312 bp, Glycine max
  Clone ID: LIB3051-099-Q1-K1-C1
tcttactcccactctttctattctctttttctctcccaatacctacatacattctcgtcgcttctctaaaatcgttggactctataccattattctaataatcatacctgatacatacattatttatcatttagtcaatatgctcaccaatttccatacccaaactcatatagacaatgtactaatactccacatcataataccctcaatcctctcaagtcttaacaatcacataatccaactataagattaccaaatagttactctcattaacatatcccattatcatcatactccttccacaagtatcca

SEQ ID NO: 29465 - DNA, 240 bp, Glycine max
  Clone ID: LIB3051-099-Q1-K1-C7
cccactcgtccgcattctcaccctaccttttttccatatttttacatcacatcaaatttacaataaattatcgctattttccaaactaggtaggactcaaaacactcatttaccactgcaatgtaaacccttatgtacgtgttaatatatcaatattcaatgatcataagaatccaacactaacaattactaaagtgcaactataaatcacatcaattattacaaatccttatccttata

SEQ ID NO: 29466 - DNA, 438 bp, Glycine max
  Clone ID: LIB3051-099-Q1-K1-D7
tccggtttcaaagtcctcagacttgaacgggtctttatatgttgctgatgcccacatgttagccgcttcttttctttctatgagtaataaagccaacaacccttttgttcttccttgtcaaacccttgtctctcatagtagtgtgagagatttgagcttcaaggtcagcatttcttggccttaccatgcttcttgtattgtgcaacgacaaaagaatagtaataacagtggttttgttgtggtaaggtgtgcaaaatggggtttggaagctgatatgaaaccacaagaagatgatgaggaaaaaggtaagaatagaatggcaaggtttaaacacaaatgtcgaaaaagaaaaggcgttttcgctctgttgtagtggttggaaaggcaagctataatgagtgaatatgtacgaaaagagcctactgattacaacctaat

SEQ ID NO: 29467 - DNA, 437 bp, Glycine max
  Clone ID: LIB3051-099-Q1-K1-E1
cgcgtacggcgaggtgcacctgggttttccagccggtttctccggaccctatatttcccttttctctttgtctactattctccaattcgagcaagatggtgaccttcttctccctcgacgacgcaccgctatgttcgaagcaaacgcacaacattcatttagtgtcagaatccagcataacatcacttcgtcaattccaaatgttggtctccaggtttggagagctgaactattattatctgattttatattgcataaagcatcttcttcctctcaacttcatcaagttattgcattagaacttggcgctggaactggcttggtgggtttattacttgcacgtgttgcaaatgcagtgttcctaacagaccatgggactgaaatacttgacaactgtgcaaagaacgttcagcttaattttggattattgaattatc

SEQ ID NO: 29468 - DNA, 378 bp, Glycine max
  Clone ID: LIB3051-099-Q1-K1-E2
ttttcacctatatttttcaaccagtttctacacaccctatatttcccttttatattcgatctatttataaacaatttgaccaatataattaccttcttctccctcaactactcacctctatattcaaatcaaacccacaacattcatttaatatcaaaatccatcataacatcacttcttcaattccaaatattaatctccaatattacatagcttaactattattatctcattttatattgcataaatcatcttattcctctcaacttcatcaacttatttcattataacttgtctctataactgactattttaaattattacttacacttattacaaatacaatttaacctaacataccatactactcaaatactt

SEQ ID NO: 29469 - DNA, 221 bp, Glycine max
  Clone ID: LIB3051-099-Q1-K1-E5
acccactcgtccgcactttttaactccctctttaccactcttttcaacccccaaatctaaaacatataataaactgactttaataatcatcgtgcaccatccaattcctcatcaaaaatatatactccaaaaaatcacacatacacacacataaatcatacatcaatcaatcaaactctatcattcctactatacttacataacaacaaccaaccaccaat

SEQ ID NO: 29470 - DNA, 152 bp, Glycine max
  Clone ID: LIB3051-099-Q1-K1-E6
aacaaccaaacacaaatatttaatcaagggcattttcataacctcatgtgctccacacatatctcactctatctcttcactacaaccctatcccattctcactaaaacaccactattcaagacatctccagaaactttaaactccaatacaa

SEQ ID NO: 29471 - DNA, 388 bp, Glycine max
  Clone ID: LIB3051-099-Q1-K1-F5
acccactcgtccggccttttttagaaatttttcagataccctttttcatggacataatcactgacctctccatgttcattactccaatatggatggccattatcgacagctaaaatcctagactagatcgtgaaatcccaaattggcctaccacccaaaatactctacaatcaagtttcactctcctcgacctaccaatccccaaaactacacctcttttacctactcccacaccaaatcctccgcacatgaaaaagactcgagtggcattactgtattgacgaaacaccatttaatgcatctgtaaaaatatcatcaagaaaaacacggaaacccgtcatagattcagatgatagaccgttataccccaaccatcacctatcaaacc

SEQ ID NO: 29472 - DNA, 192 bp, Glycine max
  Clone ID: LIB3051-099-Q1-K1-F6
ttaagtccactgacaactctcaaaaataggttcctttctactgcttggaggacctatcttcatagcggctatacttcctatccctgctaacgctgcacccaattaataccaaaattctcacaaaaaagatggcaatcatgctccaaatggaatatatgataccacatcgggttaccctacttgggctcctcc

SEQ ID NO: 29473 - DNA, 330 bp, Glycine max
  Clone ID: LIB3051-099-Q1-K1-G1
catcacttattttttcccctatgcacaacgtatatttatccgtcttttctttaaagttgttgggccattctatcctctttctagaataatctattcatatattccattccaaattccatcgctttattttattcatcttgctttttaattataatgttaaatattctattattgcctttatttaattgttaaacctaaatgtactatttattcgtactctttaatatattcttactatcactattaattctcatcattacaattaaaaactacaatcactaaaatacaacatcaattttctccctataaacctttaaaacattccaactt

SEQ ID NO: 29474 - DNA, 317 bp, Glycine max
  Clone ID: LIB3051-099-Q1-K1-G10
cctacataataaaatgatttgaaatctaaaggtgtctatggtcaatagataaaggagaaggatgagaaggttattaataagtgagacgacaattacaatgatgacaaaactgatgtatagaacgtcaacgtgaaagaaaattattgataggatgatcaatattatattgcaaatttcaaatagtataataaagacaacgatatcaaaacttatacatattagatcaatatcaaagaatatgatttgaacgatgatgaatataataacgataagaacaacaagtttcacaaaatttattcatagaaagtcaacgtgta

SEQ ID NO: 29475 - DNA, 154 bp, Glycine max
  Clone ID: LIB3051-099-Q1-K1-G11
tttcaatgcataataactattacccattcaagaacctttttaaattcggggtcaacgctacctaaaaatatttcatcatctcataactcaaccccatcttctcatcctattaacattcttcccttcacaaaacttttcacaatattacttacca

SEQ ID NO: 29476 - DNA, 163 bp, Glycine max
  Clone ID: LIB3051-099-Q1-K1-G12
ctgggaaatccaactccagagttaccaaacatacatttaaattacaaccccttttaaaatccctgaaaggatgattacatctataaaaataataacaacttgcttaaaacagacataattagcatacctatcccttttaaaataaaaacaattcaaatgaact

SEQ ID NO: 29477 - DNA, 266 bp, Glycine max
  Clone ID: LIB3051-099-Q1-K1-H3
cacataacttttacacacagtttatcaacccgaaacatctacactcctttacgaactttttaaactccaagaggagaatcacaatttatcacaaaagctaacacaagcataggaaaaactccaaaaaatccaagcaaaaactatccgaacctgataaacaactcactcctctcggacaacgaataaccatctaatctaaactgctaaccaccaatgaaacctctctgcaccaaacacagactaatcccaacgctgctcaacaaaca

SEQ ID NO: 29478 - DNA, 144 bp, Glycine max
  Clone ID: LIB3051-099-Q1-K1-H7
tttccaaaaggagggcgcccataacacactctccacctacaaagccgctcaacacattcctaataccgaattgcctccaactcaccctaccacgctcaatctagctctgaactattaacacaattactatcaaaatcttaaccc

SEQ ID NO: 29479 - DNA, 273 bp, Glycine max
  Clone ID: LIB3051-099-Q1-K1-H9
ttatcataaattaaaggcccttgtgggggtgaatataattccttcccttaaactggactttgaagggcttacttaccccctgaaattatggggtggagctgtcattaatggaattgaattgacctcggtaaacctttccatgactttcaatgaaattgaatcaaaccaatggaggttatagctttgggcctttggagtgaatattttttttgggtggcgttccaaaaaaccggaacgacccttttccctttgggattggggttgggttttcca

SEQ ID NO: 29480 - DNA, 177 bp, Glycine max
  Clone ID: LIB3051-100-Q1-K1-A9
cctttatcatccacccacccaacatactcatcctccctccattcttcaacatctccatccttaaaaatcgcagcttatccaaccttttccacatccagctaccaaaatacgatcccaactccatatacgactcctcattacacacctaacaccaatattcacaaacactctactcct

SEQ ID NO: 29481 - DNA, 340 bp, Glycine max
  Clone ID: LIB3051-100-Q1-K1-B1
cttctcacccttccggagacgggtccgtttagatttgaccgaggtgcaccaacatctcgaccatttcttgttcaagactgctcctactgggatcagaaccgaagaagggtatgaaaggaattccagggtattttaaatcttctgcaaaagctagatgcctgaatcgggcgtcccactcaaggctgctttgtgtttctgccatggctatggcagcactcgcactttcttctttgaaggtattgccaaaagaatagctgcttctgggtatggtgtttatgctattgactatccactttttggtctatcttaaagtttacatggttacataccaaattttgat

SEQ ID NO: 29482 - DNA, 291 bp, Glycine max
  Clone ID: LIB3051-100-Q1-K1-B2
aatctcgattattctatgggttttctttcctgtactacttaagtaacacttgaatggtttctttagagtgtggggcagcctaacattgcattaccctccacacaaaccagtactggctcaaagagacacccagagacattcatgggcaatcccaaactatttttctaatccgccgatacaccataaccacccaaagctgtaaaactagagggcacatctcaagggaacaacatcaaattctgagcatgaaacacccataacaccagatcctaacacactcataactccttc

SEQ ID NO: 29483 - DNA, 337 bp, Glycine max
  Clone ID: LIB3051-100-Q1-K1-B3
tcgtactccctttcgtccgcaccgtaaatcccgggttttaattcccgatcttatgtactcgctagtggatcggttttatatggacgaggatcatctccctttaaaactcttcacatatacaaataaactgtgaggcatctttaaaatgccttcacagcaagggatttccttgctattttcaaattaatgataaatctatagaacgctttacacaacttaacaatgatcctgtttctcatcctgcacaagatcttactgaccctaactttcacttaagcaatcagtaccaaaagccttacaattaatttcacaccaaacctacttatcaccaaaatta

SEQ ID NO: 29484 - DNA, 361 bp, Glycine max
  unsure (1)..(361): unsure at all n locations
  Clone ID: LIB3051-100-Q1-K1-B6
aacaaccatcatggtngggttgttttgataggagggatgctttctctgagcttgtgtgttccatggagggtttgaattttgatgaggcttcttcactgttgtctgctgcttctaagcctcattatcacaacaatttgtcttcttgacttgatgtttctaaggatcacaatcaaaaacagttcaatactcttaattcgccaaccatcactgcttgtggaagtttttccaataatggaaatgggggatttttgagagcagaaaatgtggttgttgttgatgatgtcattgccccatatctcgcatgggtgaatgaattgctgatgtagattatatgcaacatctgaagaagaaaatgatgatg

SEQ ID NO: 29485 - DNA, 353 bp, Glycine max
  Clone ID: LIB3051-100-Q1-K1-C2
ctcgtcctccctttcgttcggcccttgttgatgagatttatatgtccgagtattcataatgatgtatcgaaaggtcttcaaagagaatatgatgtttattttgtccctcgccgcactgttgtttgtgagaaaattcttgaagaaaaaaaattacataacatggttacaataggttttatatcccttgtataatgtacccattgattaggaattattatcatttgaacttgatctttcttacaaagaatgccaagttgattgttatacaagctcacttttgcacattgcttaagccattcaacaacttgagttttctcttggaatgataccaaattttaggtctaaatgtaaag

SEQ ID NO: 29486 - DNA, 287 bp, Glycine max
  Clone ID: LIB3051-100-Q1-K1-C3
ataattgtaatttctccaacagtgatgttttcacggcatgctccttcttcagccttggacttgattccaatttatgtgaacaacttcgtgataggttggggtttgaagttccaacgctggtgcaagctcaatcaattcccgttattctctcggggcggcatgcattggtgaatgctgcaacgggcacggtgaagactgttgcgtatttggcttcgattattcatcacttgcagggttattaaaatcggattcaacgctctgatggaacatttgcgttggttcttgta

SEQ ID NO: 29487 - DNA, 214 bp, Glycine max
  Clone ID: LIB3051-100-Q1-K1-D1
gtgcttaatcttaaagtttggttttctagcgaactcagccctacaaaatcgacttcatgtctaccactgtatgcaccagggcacccttgaaagctgtgatcatcaatacccaatacctagtatcctattccactagcttcaaatacgttctgcataatcttacaagtaaacattctgacatacacatatgctaaggttcagagcaacaggcatg

SEQ ID NO: 29488 - DNA, 173 bp, Glycine max
  Clone ID: LIB3051-100-Q1-K1-D3
accccgttagcacctcctctgcttaatcccaaggagagccttacgcctagatatttcatccacttgaaatccattaaaatctactaatatacagtccctttaaacaccacttttttgaccataaacagcaaacgcttttcttgaaccaagataagatccgcaaacacctacac

SEQ ID NO: 29489 - DNA, 408 bp, Glycine max
  Clone ID: LIB3051-100-Q1-K1-D4
cgtacgagatttcagaagaacattctgctgcgactttggaattcactggcagtcaccctgtcactggagaagtattgtatggtagtgacatgccccaaggccaaaatgaggaggttggtgacgctcaaaatgaagatggtgaaattgctgttgggaatgatgaggaatccaaagatccacagaacttggatgttactggtcaagaggaattacaaggtgacaaaactggaactttagaagagaattctgatcaacctgttgatgcaaaaatgctgtctgatgagatgcaaagggatcagacagacccagacaaccagcagtcaacattggcgcccagtggtgagagagaagagggagaattggtgccagatatcggtgatctagaaggtgctagtgatttgtctaaca

SEQ ID NO: 29490 - DNA, 278 bp, Glycine max
  Clone ID: LIB3051-100-Q1-K1-D5
agccatgaccaatactaacgtcttcgtcaacactctacaccgcactcaatctcaaatctaagttactcctctcgacaccgatcatcaactcaacaccgatctagaacactctcacgaaccagatgactaacctgccacacatcaccatctacacaaccaatgcaaaaatcttaagaagtcacttaccttctacaagaaccaactagttctaaatactaatacagctattatcctctacaagactaacatcaccatcgctaaactactctactacttca

SEQ ID NO: 29491 - DNA, 95 bp, Glycine max
  Clone ID: LIB3051-100-Q1-K1-D8
cactatacttctgatctcctctgagttgcacccatatcatactagaattttgacaaaatgatggaagcctatgctatttttatataaagcaagta

SEQ ID NO: 29492 - DNA, 406 bp, Glycine max
  Clone ID: LIB3051-100-Q1-K1-E3
agaaaaatcaagtcgaactacgtccgggtcgcttcggtaagcggttctgtggaaattcttcatcgttcttcgtcgttcttcaccgttcttcatccgttcttcgttcttcaacgggtaagttttcgaatccgagactttcaatccatttcttgttatgcgtactttcactttaatatcgtttactttcagttctcttttcttcagtctttaacgtgctttaaccatttatctaagcccgtttctcgtctaataaatgatcaaatgaatttcaaccgatcatttgtgttgtaatctcatttaatcactgttaaaacgaaatctaaccgatcgttcacgctataacctcgggtaaaccaaaataagtaaaataataataaactaatcaaaatatcttgataaataataa

SEQ ID NO: 29493 - DNA, 258 bp, Glycine max
  Clone ID: LIB3051-100-Q1-K1-E4
gagattcttctacatatggacacagctccactcgtcgtgatagaagagccatgacgaatgataaatcgcataacagttcatacctaacctatagcgaaaaactaaattcggttatagcatccactataagctccatctatccgagtgaaaaatctcataacagtccatactgaacctttagctaaatactaaattcacttttaaaaaccacaataagctccatccattcaattgaaaaacccaattcacacaaacata

SEQ ID NO: 29494 - DNA, 411 bp, Glycine max
  Clone ID: LIB3051-100-Q1-K1-E7
ccactggcaaatgcagttgcacattcaacttacgcagcagcagctgcaggccacggccgggccattctcgaccgccactccgcctacaccttctacttcctccggcggctccgcatccgaagcaccgacgaagcacgtggctcaagcaatggacaagctcatacaatccgaacgaatcatcgccgacatccgaatcggcgcctaccgtctcctctaagcgctcttcctcgctgccgcgcaaccctaccaaagcaacaagccttttcaaatcttcctcaaagaaaacgcatgcatgcgtcaatatcttcaagaccttccgtcgcttggtaaggagctagaatagtctggagttctcagcgaatcacttccatccaagaaagactttggggcttgcatatgccactggtttgt

SEQ ID NO: 29495 - DNA, 399 bp, Glycine max
  Clone ID: LIB3051-100-Q1-K1-F3
tctctctctctctctactgaacgaaaggttaaagtgggagttcggaatttttaaatctcacctatttaactacctcgcataaaaattcacgtaacattctcttctgtgtcctaatcggaactcgcacaaattttgttatagtgatgtgatgtcattttagggtttttgaattgcgatgggtctgggaaacgatgactatgactgagacacgcacaagtccttcggttcagtgccttgttcgatttgcctcgaggctgttaccgataacggtgatcgatcctgggccaagcttcaatgcggacatcaatttcatctcgattgcattggctcaacctttaatataaaaggggcaattcaatgccccaatgtcgtaagatttaaaaagggtcaatgctttat

SEQ ID NO: 29496 - DNA, 446 bp, Glycine max
  Clone ID: LIB3051-100-Q1-K1-G12
gtacgcaaattgctagtaatgctttacaagtggtttaagaagcccttgatgctatcgatgcccaggatcgtgttgctgcgggagatgaattcacccttgaccttgttgaacaatcttcatttcagaagcaaagggtaatgcatcttgtgatggcttctcggtaaggctgctgtaaatttttcttttctgctaaaagcatatacaatttatgtttctcatttctagacttgaaatgtttaacaggatggattataatgcctttgcttttggtctgtcgcatctagagattttgctttgatacttgatccactttaacgattcataagcagcagatttttgctattgaactaagaaaggcataatttttagttttttcatgttgcttcttttttatttttttaagaggtacacaatttattagatgtacattttatttactttttcaa

SEQ ID NO: 29497 - DNA, 432 bp, Glycine max
  Clone ID: LIB3051-100-Q1-K1-G3
gtccggctgtgtaatgaggagttctgatattcgttttcgtcttcatcggaaccctaaccccttcgaatgggtagatgagtcatcaatggaaggagtgctgtccgcgaacgagcaacagagcatggtctcttccttcctcgaggtcgctcagggccagaccgccgagactgctcgccagttcctccaggccacaagttggaagcttgaagaggctcttcagctgtttctgatagggagtgaaggtggggcggtgccgttgccggtgccgtcgtcgtcgttgttgcacactccgtctttggaaaatgtcgattcctggactgatcaacagcctttgagtgaaccaaagaaggacgccgcggcggctgcaagtgaaagtattgatctcaatgattcataagaaatgcgcccttccttgcctgtaataaaggaaac

SEQ ID NO: 29498 - DNA, 325 bp, Glycine max
  Clone ID: LIB3051-100-Q1-K1-G5
gtccgaaatcatacatttatactttaaacaatgaatttaaaacacaaaaaaaaaaaaaaaggacaggaataatttgaaaaggaacaaggcctgtcaaatctagaagacacaagcgtcattacaccctcatacgacagaaaactatagaacatactggtaccaaaactcaatgttaatttccgtcaaatacaacatgaggcacttcaaaacgcccttaccacccacaataatggctttaacgcgaataatgcttctgtcaacgatcttaatagcgaatatgccgactccaacttcaatgatgaacatttcaacaatgttgatagct

SEQ ID NO: 29499 - DNA, 381 bp, Glycine max
  Clone ID: LIB3051-100-Q1-K1-G7
cgaatgtctagcgtcacgatttttttagatcgggggcacagacattgctgcagcaggtaaagacactgcaactatgaagagagcaggcagaaagggacttccattcctgggcttccctattattatttctttatgtgctatttgaaaaatttttgttggaaacttaagactattggggagatgtgtctctccttgaatatatatatatatatatatatatatatataaatccaaagttttgctgctaggtatattttctctagaaccttccataatgattgttgtctgatatctctccccagaattaccaaacagtgctgtcctaacattttctcaatataaaaaaaaaaataaaactttgtgaatattgtaggcaatata

SEQ ID NO: 29500 - DNA, 322 bp, Glycine max
  unsure (1)..(322): unsure at all n locations
  Clone ID: LIB3051-100-Q1-K1-H6
actcgtccggattttacgagcaatattatggctctggtttttcaactcagacgatctnnnggggaactgacgaattttaatgaggttggggctgcacattctttcaataagctttgatcaatctagtcgaacctttctgccagaaccatcatctacatgcagggctaccaccaccactaccaccacgagaatgggttttcaaatagggtttttgttgaatcgtttctttgggttctgattctggaatttgaaaattgaagggaaaatgatcgaaaaaagagaggaagaagtaggagagcgtatgtagttgatttgggggaca

SEQ ID NO: 29501 - DNA, 317 bp, Glycine max
  Clone ID: LIB3051-100-Q1-K1-H8
tatcatcaatttcatctccggttccatctgttccagtttctgtggaaactcagccacctttactggcgttgccagtaacttcacggcccaatcacaggcctggtggagctcctacccaaactcatcatcatggctatagttatagaggacgtggaagacgaagaggaactgggggtttccgctcagtcacaaaattcactgaagattttgatttcacagcaatgaatgagaagttcaaaaaggatgaagtatggggtcatcttggtaaaaagtagtctcattcaaaagacaattacggtgaagaaaatgcctttgat

SEQ ID NO: 29502 - DNA, 351 bp, Glycine max
  Clone ID: LIB3051-100-Q1-K1-H9
gacccactcgtcctaaaaaacatactttaaaaaaaattttaaaaaacataataaaaaaaaaaaaaaatgtaacgtttaaaaacaaaaagatcatattcaaattctcctctatttacatttccaatcttctttcccttcctttctacctcataccactattttttttctaacttcttttaaaccaattccccatcttaaacaaccttataattttaaaatcccttcagttcccctactttatccttttgggacttaatccttttttccctaatccctttaaactttttaaaccccctcctttttccttttttaatatatttttctaccctaattttaattttcaccctccct

SEQ ID NO: 29503 - DNA, 236 bp, Glycine max
  Clone ID: LIB3051-101-Q1-K1-H12
aaagactttactcgaagcgatttcgatcgcggaagtacgattcacgggcgtcttgcattgattcaacaatggcacgggcttcagcttcatcaagcccgacaacggcaattagaatctcttccatcaccagtactccatcagatccgacggataccgcacacttctcgagggctaccgcttcgagttcgccatcgtcaccgacaacaacgacaagaacaatgccgtctacttcaccg

SEQ ID NO: 29504 - DNA, 182 bp, Glycine max
  Clone ID: LIB3051-103-Q1-K1-E12
cccactcatcctatctaattcatcttcattatatataatattcttactcaacattattcaatcaacactaggatttcttatttaaactaacactccatcttttatcatcactattatcaactacaacactcattacacttattaacaaattctactacacaatatatcctttcattctttca

SEQ ID NO: 29505 - DNA, 293 bp, Glycine max
  Clone ID: LIB3051-103-Q1-K1-G6
aagccacgcgtgcacacaaaactctcagagaactggttttgcatactaacctccttaataaaccaacggaacgttcacacacctagctcgatcatctaattcactcaaccatcattccatcaaacttggtagactaggctagcgactctctcttaacggactgtcaactaaccatcctacagaataattgcaaactgttcatagatcaaacataaaaacacatattctcacataactaatcaatgcatacatactcttcatatcgcctttattaatatgcaacttcttacact

SEQ ID NO: 29506 - DNA, 270 bp, Glycine max
  Clone ID: LIB3051-104-Q1-K1-A11
gcgttcgccacgcgttttaccaacggatcagaaaaaattctctgcagcaaccttgggggctggggtatactgtcggggcatcgaaaacgtgtaggtgaacggagcctgccttgattcatgttctagcatgatagggaagggaagagtgctagaaataagaggcactgaacgaacagtgacaatgtcaacatcgcagctgatgatcatactgatcattgcaaatctaaaccaggtggtttcaaagacactcttgctgatgatctactggct

SEQ ID NO: 29507 - DNA, 164 bp, Glycine max
  Clone ID: LIB3051-104-Q1-K1-A12
cccaacaaaagcccaaacataatttataaaaattacattcttattcacaaaaatatctcgattcatcttgttctcatatttgccccctttttactactgctctccctaatcataaaccctaatcattgtttgggatttcacaggaaagaaatttaaacacaaca

SEQ ID NO: 29508 - DNA, 426 bp, Glycine max
  Clone ID: LIB3051-104-Q1-K1-B1
cgcgtgcgcgctgtttttactcaagatagacggctgtgcagtgaatcacgggacgaatgcgtttctgaagaccgtgggcttcgtcaagatggtgttccttcacacatgttgaaagaagagtagagctgatataactccagtaattattagtcatcatgcttctatgtgatttattttttgctgactttttcctatgagacttaggtgagaactctagtactggtacatgtaatttttcttcctgaccggaggtaatattagtgatcatgatcatatatacttgtaaaacccactttatctttttccacatagccccatcatgattatggctgtatagcatgatggattatgatttaatgcagggactacttctagttctagttctaaaaaaaaaaaaaatagcataaaatttttaaatataagtca

SEQ ID NO: 29509 - DNA, 258 bp, Glycine max
  Clone ID: LIB3051-104-Q1-K1-B11
tcactaatgaatacacattaccatcatccgatgcaaaatgagacgtctaatatgctaaatgacacaaatataacctacgcataacttgacaaccaatatctgcatcaccataacaccttgctaaacagactttacactctatcacacaaatctcccaacattacccacaaacataaacttgcacaactcattaaccaaacaatctacagtccatcttaccaatggcatgtagtactcacaccctattcgaaccatcat

SEQ ID NO: 29510 - DNA, 445 bp, Glycine max
  Clone ID: LIB3051-104-Q1-K1-C5
cgcgtccgcccacgcgtccggctgttgataatttggctgctttctatttcaacaacatcactatgggagaggctccaaattgacctgcatctgtcaatcttgctcgacatattggagagtgtcccaatctgtttccagaaattttgaagaccctatttgagatcatattgtttgaagactgtgggaaccaatggagtctgagtaggccaatgttgagcttgatactcattaatgagcagatattctcagatctgaaagctcaaatcttgtcatcacagccaatggatcagcatcagcggctctcttcatgctttgataaactcatggcagatgttactctaagcatagattcaaaaaacagggataagtttactcaaaatctcaccatatttcggcatgaattccgtgccaaataattcaaatttatgcaagtaaatatgagagt

SEQ ID NO: 29511 - DNA, 357 bp, Glycine max
  Clone ID: LIB3051-104-Q1-K1-C9
tctacttactaatttatcctatatatttcagcttcacatccacaagattaatctgagtcatcgtgtacaagaactcgggagcgatcaacctaatggaatactctttgctcaacatacactatatcatatacaacaacaacttcctgtccatataaatacccttatcacattaacctgcaattttcaacttataatatgctacatggctagaatcaaaccaccgcataatgtgtaagctaatatctgcattgcaataacacatttctgataacgaactaatacttttcatttacaaatctatcacactttatcaccaacttatacacctaaacaacttaatatcccaaacatatttac

SEQ ID NO: 29512 - DNA, 441 bp, Glycine max
  Clone ID: LIB3051-104-Q1-K1-D1
accgacgcgtgcgtcgtttggtgaaactggctcaaatgtgctatttggtatacaggtacccacaagtgagatgggtaaggtccacaatcatgcgagcagacttggatatgattataaagtggtgaatactgatgatgacttccagcttctaatgcactgatgatggttctaggcacttgccattattgtgtattttaggcaacaagtttgccatatttaatatttgcacggtctgttataaaagttggatggggaaaaaaggtggaaaggaagtggccttcagacatgtcattagttgattatcaggaacaactagttctttttacctaatgcggcgtcttattacattatttataatctgtaatttatgtgtcattgatggtggttacattggaatcttataatgttgttaacatggtcttttgagtctgaaatataagt

SEQ ID NO: 29513 - DNA, 367 bp, Glycine max
  Clone ID: LIB3051-104-Q1-K1-D11
aggaaatatctttcatggtagaaaggtcaccttatgaggttcttgatatggacttgcttgcagaccaacgagtaaatctcttctttgcatggtctttgttgatatcacatctacagtcattaccttcatcatcatctcaaaagcagagactgatccagtacatacaagactctgctactccagttattttggattgcctttttcagcatattcctgtagagatttccacagttcagagtctaaagaaaaaagatgcagagctttctggtggcttatcaaaaactttaagtgctgcaacccgtgccaccacaactggttcacttttgttatctgtggaaatctctttggcctttttaattggggaaaa

SEQ ID NO: 29514 - DNA, 453 bp, Glycine max
  Clone ID: LIB3051-104-Q1-K1-D3
cgaccgacgcgtgcgcggactcgttcgcccactcgtcctgttgcattggccatatccattggccatcgtttcagaggcattgaccacattccgtggaagcagttgtgttataacaaccgttgcgaaggccaggtccaaagtgctgggcccgtggggtctctcctcaagtcccgttcggttattcatttccgcgggcctgacacactcaaattccttcagggcttgttgaccaacgatgtacgcaatttcagttaagccgttggtgacagaactgaaaacttgcccacgctcaacgtgcctgctacgtcggttcctcctatctatgctgctctattgacccctcaagggagattcctctacgacctctttctctataagccttccacgtgccacaccaagctcgatcactccggcactggccctgattccaaaccacactaaccctttcatatg

SEQ ID NO: 29515 - DNA, 422 bp, Glycine max
  Clone ID: LIB3051-104-Q1-K1-E1
gcgttcatattcctcagttcaacacatcgatctgcaagactcagactagtaacagagagaaagcatttcaaagaaggaacggagcgatgtcgtttatgcgaggggattttctttctcgaacgaggaagctcgtgaagggtttggccaaggcgcaacccgcgtggctcaaagccatggaacagttaatctctctaatttctgattcattctcttcaatctttgtcttttgcattctgattttgcatttttcctttgccatttgagaatcccccttctgggtttttatcacttttgaaaaaatggcacctttttcggtttcatgatttcactttttaaaaattcatttttttatttatgtgtgctgactccaattaagggttatgggtgtgatattcatttttcaggtattggtctagatttca

SEQ ID NO: 29516 - DNA, 365 bp, Glycine max
  Clone ID: LIB3051-104-Q1-K1-F11
acaataccccgggcccagttacaaggcacatggccatcctcaaactcccaataacattctcttgaagacaatttttatattaccttacaccctacttccacctatacaaacaccctttatccttcaaaccctctcataactccaatactgtcaacaataatactcttacacatctaaactatctccatccattaaatcccccattcttaacactgtatttactacgaattaaacacaataaacccaaccttatatgctaaagaactacgtaattatataattcatctcacacatacttctttatactacctatcatctcttatattttattcctgaaatattagctgtttaactcgattaattta

SEQ ID NO: 29517 - DNA, 319 bp, Glycine max
  unsure (1)..(319): unsure at all n locations
  Clone ID: LIB3051-104-Q1-K1-G9
ctcctcccattttttccatggcttatatctccacgatcaagaaccacacccatgtnccttttttcatagattggggggcaccattcagaccacgacaatagcttctctataagcatatatatattcaaagtattcacattcatacctacttaaacggactttattgataatatcacatcctaaatcataccactggctttgactgctacttccatttacatgattgcactattgatctataatatctcacatctaattttaaataaagaataacctactaattcatgattcacaagggtttacctacacaaacctacct

SEQ ID NO: 29518 - DNA, 391 bp, Glycine max
  Clone ID: LIB3051-104-Q1-K1-H2
ttcaggcgattttacggtcgatttgaattacgtcgaatcgacctactatactgattaggctcaatttatagggcaaacaaaaccctaactccacatcacaaccatgacgaccaaacaagatgtaaacgctaaacctataaaaaaacccaagaccgataagataaattaccacgaaatacatatgactaacattcagaagaaatagaaataagagaagacactaaagaaattgaaatccaatactcatcaaaaggtaatcattttaatccacacgactaaagacaaaattaaataaatgactctctctttatcatgataatattcatacaataatgagccctctaattacaagttataccatcataacttccactaataattatgcctacaa

SEQ ID NO: 29519 - DNA, 296 bp, Glycine max
  Clone ID: LIB3051-105-Q1-K1-C1
acctaaccctaaataatctctatgaaactgggtttgaattttataatctgctccatcatttcggcattgtttataactcatgtcgattatgcaaccaattatatatcttattaaagcttttgaattaaccttcccttcaattaaaacttttatacaaacttgtctaacaccaataaattcttcgttggtgacaatctcattttcatcatagacagactccattatcttataattataacctaggctacttattatgacaattgcaacaccagcttattaactggtttcacgttcat

SEQ ID NO: 29520 - DNA, 431 bp, Glycine max
  Clone ID: LIB3051-105-Q1-K1-C11
attccctgctcgaccgcactcgtcctacctttccttccttcatgtcttccactgtttctttatcactcaactataaatccatagggtaccttatctcctggtgtcatctcatatctaccaatcaattaccatatactattactttcaataaaccaaagtttatcattaattattacgactcatattgatcactactaacattcataataataattctaattttattcctctaatacactttatatctcaaacacaccataatgtaaactcttcatgctctaaactcaatataattgtaaattactaacttctctttatcataattacattcatacaatattcatccctgctactacaattctaccatgataacttctcttatcattctcacctactttattcctaatgtgtactgaactaatctatttcat

SEQ ID NO: 29521 - DNA, 151 bp, Glycine max
  Clone ID: LIB3051-105-Q1-K1-H12
actcttcatcttatctctctctttatttttcaaattctaaatcaattttacaatctggtaatatctatacggtaacctataacttcctctttccccattacccttcatcatctccctattcaaaacctattcctatatatccttaaatcat

SEQ ID NO: 29522 - DNA, 401 bp, Glycine max
  Clone ID: LIB3051-106-Q1-K1-F9
cttagatctacagggccatctgaggctttacatgtcggtcaataaatattcatcacccaaggtaaaatgcacaacgatatgaattttcattttaatattgagaagaaaatgactgaggaaatctaaatatgttgactcaagttggcaacaatctgagaaaatgtcaaaaagtgactaaataataatcttttaagagatgctgcatcatgatgacaatgttaaactctttaaggcatttgtaagttcacgaaacttgtcaggagctctctgcttgtaatctttctccaatactttggctgctacagattgtaactgggacccttctttgtcctgcttgcttttccctttcgtaagctgggtaatagcagacgtgcacatgcatataccaaagagtgctctgg

SEQ ID NO: 29523 - DNA, 276 bp, Glycine max
  Clone ID: LIB3051-106-Q1-K1-H7
aaacccacagaaactctgatgaaaagtctcgttgctttctgcttggcttcgaagactaacaggggcccatctggtttcacaaatgctctcttcacaaaggctttcatcatcacttttgcgctttttacaatcttttttttgatccaaggccgtttcatcactctggggatgtcgtatcaatatatttttggaaagcttctccctttgaagtatatcatttccatatttttcttttcttaaaacacccaattttttgtttgcattgtatcttctata

SEQ ID NO: 29524 - DNA, 344 bp, Glycine max
  unsure (1)..(344): unsure at all n locations
  Clone ID: LIB3051-107-Q1-K1-B9
tgatgaaataagtagcaaagccagagattacatgccgctgtataaacttgtggagaagtgggatattgccatggctgcactgttcctagtatcagatgcangaaaattcattaatggcgacattatgattgttgacggatgactgtggctgagtcggcctcgccatttagcaaaagaggctgtgaagcaggtatctcgatcagtagaaaacagatccagatatgcatctgtcagtgttccaaaaagcaagctgtgaaccatcagattcacgtgttagcccctctacacagccaggatacacatataatgtgtagaatactatggatttggaagatatcatctgt

SEQ ID NO: 29525 - DNA, 328 bp, Glycine max
  Clone ID: LIB3051-107-Q1-K1-E11
ctgagtctgtccatatattatctgaaacccttctcacagaatgggatgtgctggatgaagggactatggtgcatacacttatgagaatcttgagagagagcgctactggccattagagaagcttaagatttccatcactggtgctgggggttttatcgagtcacacattgactcgtatcctcagagacagatgggcattacatgatggcttctgaatggaagataaatgagcacatgactgaagacatgtactgtgatgaattccatgttgctgatctcaaggccatgaataacagcatattggtttcagaaggggttgatcatgcta

SEQ ID NO: 29526 - DNA, 218 bp, Glycine max
  Clone ID: LIB3051-108-Q1-K1-A7
aattcccggtcgacgacgcgttcgccacgcgttcgaactcttaagaaaatattccaaactcttaagaaaggaaaagtggaattctaagtttcagaaatttcagtttccatttcaattttcggttttctcaaaacccattttcaattttttccaattaatcttattttccacgccaattaaacctaaagaaaacctcggcatttcccaattttccattt

SEQ ID NO: 29527 - DNA, 245 bp, Glycine max
  Clone ID: LIB3051-108-Q1-K1-H1
ccactcgtccgcccactcgttcggcacatcgttgaaaaaattaaatatcagtctataaatggagaggatgggtcgggtcccaaagctggaggtgacaatgatgcatatgctgatgatgaggacattgaaaatgtttcttaaactagtgaagatgtctcacgcaatgaatatgctagtcataaatgcttactcgaagatcatgattaagatgaaaatatataacatgacaacttttatggtaaagc

SEQ ID NO: 29528 - DNA, 354 bp, Glycine max
  Clone ID: LIB3051-109-Q1-K1-A2
cggttcgaatcccggtttttccacgcgtccgggagactacctaacataatatggtgtgaagacgcgagagtgtttatcatattgggcatattcaaaggaaaggaagatgttaccaacataaaacagtggaatcaagaagctgctgcgactaaactcaccaagctgaagaggccaaaggctaaaactgattttcatgaaagaaagctaggaaacagttccaaccttgataatagtggagaactactaacctcatgatatggaacaaatgcatggcctgacttgtctttattcacttcagctaacattgatcaacggtccctggggactgtacgttttgaaaatttaaatgaactt

SEQ ID NO: 29529 - DNA, 285 bp, Glycine max
  Clone ID: LIB3051-109-Q1-K1-C2
agaaaatactttctttttataaacccataattcaatggcgcgctttctgagcggggtaccttcaacaccgtatctgcatccatctccaccaccatcaccacctttctctctcttttacaaaacccatcaatacctaaaacttagaactatcgagtgatctacttaacaatcacatcctatatcttcattattgagactcaataacagcgaaatgattattcactcctaaactcattaagtataccactgccgccacaacatgcctcagaactacaactgcaatcg

SEQ ID NO: 29530 - DNA, 203 bp, Glycine max
  Clone ID: LIB3051-109-Q1-K1-D9
accgattccgaattcccgcccgcgccacgcgtccggtttgcttcaatggaagtgatttccgcttcgagcttgaatcccaacactccggagtgggtgcctctcgcctatcctacggttcaggatttctccgaccaatggtgggacctcgttcactccttcccctggatacgcgactactggcttcgcgagagctttcaagatcc

SEQ ID NO: 29531 - DNA, 421 bp, Glycine max
  Clone ID: LIB3051-109-Q1-K1-G1
gaattccgttcgacctcgcgtccgccacaaaccctctcaccaaaccttcatcgatctctttgtttttttataaattataatggtgatgcgaagttgtttctgtaaatagcaattcagagaccttaaaggtcgtgagtattttcctccttacttaatctattgtgtgatcaaagtcgttattattaaattagataattgataaccatgtcgatgaagctgctattagcttccctatccatttcggtgtggcttttcatggcaacattattccttgcccaatccaacaaccgctacgtctttgacacacatggcgaccctcttgaaactgacgatgaatattacatcaggccggccataacagacaacggaaggcgtttcacattgatcaacaaaaacaggtcgtgccctttgtacgtcggtc

SEQ ID NO: 29532 - DNA, 285 bp, Glycine max
  unsure (1)..(285): unsure at all n locations
  Clone ID: LIB3051-109-Q1-K1-G11
cattgtttacttttcattnattggggccaagctttgtattgtctgcgataattttccattgggtggaagaaagtctcaacctttattcgaaagagcaacgatctgagttgagttgagtgatcatgtgtggtggtgcgattatctccgacttcataccggcaggtcccgccagcggggcgcggcgcgtgaccgccgacatcctgtggccgagtttgaggaagcgcttctcgaatccgctgcttgacgatgatttcgacgctgggttcaaagaattcaaagattatt

SEQ ID NO: 29533 - DNA, 230 bp, Glycine max
  unsure (1)..(230): unsure at all n locations
  Clone ID: LIB3051-109-Q1-K1-G12
cgaatcccgctcgagccacgcgtccgcccaacgtccnnccacgcttccgtattcattgtccactttccattaatttgaccagagctatgtatggtgctgccacaattttccatctagtcgaacaaagcctcaacctttattcgaaagagccacgatctgacttgaatcgagctaacatgtatggacttgcgataatctcctacttcataccggcagctcccgtctattac

SEQ ID NO: 29534 - DNA, 104 bp, Glycine max
  Clone ID: LIB3051-109-Q1-K1-G2
agatacccatccaaagaaccccaagctaccaagtgatctcctccttacttaaacaaacgtgcgatcaaagtcccattgaacaaagaaatggatcgaactccatg

SEQ ID NO: 29535 - DNA, 394 bp, Glycine max
  Clone ID: LIB3051-109-Q1-K1-G9
ccggaatgcccgggcgggccccgccgtccgaaacaaccaccctaaataattcctggggctttttcattaccaaaaaaaccgtgttcgcgattgaatttgaaaaatccacttattcctccacacaaattttcccaaaccttggggggaaacttgggttcaatcctctgctttgttgcccacattcaaaactcttaaacacttaattaagggttactctttagggtcttggttctggcagcaggtgatctacaactgggaattggtgacaaggatcactttctcctacaagatttaactagattccttggactttcattttcataagaaattacattcatctattgatgggcttagctgggatgcctcacaactgtggggtactattcagcaacca

SEQ ID NO: 29536 - DNA, 342 bp, Glycine max
  unsure (1)..(342): unsure at all n locations
  Clone ID: LIB3051-109-Q1-K1-H1
acgaattccnaattcgagccgcgcgcccggctatccaaacacacacttacaaataactactagttctataagactgaccaaaaaagctgtctccgggtataatttggaaaaagcagcccatgctacaacacgacaatgcacaaccttagctgaacatcatatagacaatcctctcatctgttattccattggacaactctataaactataactgcatgatatccttattgtggaattgctatttctgcagcatacctacatatgaaaaatgttgacacagagtccattgccctacaggactcaaatgaatctcaagtacactcatcttcataaagaagtgca

SEQ ID NO: 29537 - DNA, 267 bp, Glycine max
  Clone ID: LIB3051-110-Q1-K1-D1
gtccgccacgcctccgccacgcgtccgaagaatttgaatgaggcggccctggagggtcaccagggtgggaaatatgttaatggcatgcttttgatgtccggtgaaaataaatttggagaaagaaagcaaggttttgatctctttggttccttgaaagcgttgaccacttctcttattagatgcataaaaagggttaaatctttagcccaaaatatctgggtcaataataaccctgcatttaaagatcacaagtcataatctttatgt

SEQ ID NO: 29538 - DNA, 319 bp, Glycine max
  Clone ID: LIB3051-110-Q1-K1-G1
ggaaacaaaatcctaggattctttgttccttggggatttcctaatttcccaggtttctaaattaccttttgtttcaaattgacctgaaattcaaaccacaatttttcaatgagcgacaagttgttcacacaatcatttttaaacaatttattttgaagccaaaaggctttcattaagggatttgaaaaaagcaaaaagtggttctttatgaggaaagaccttttttacaaccaggtgggttgacaaacttttggttccttttaaaagcttttgaaattttttactgggggaatatttgcacccttgttattttttgaaa

SEQ ID NO: 29539 - DNA, 153 bp, Glycine max
  Clone ID: LIB3051-110-Q1-K1-G2
ggaaacaaaatcctatgattcttttttcctttgggaattcctaatatcccatgtttccaaattcccttttttttcaaattgcccttaaatttataaccccatttttcaattatccaccaatttttttccacaatttttttttaccattttttt

SEQ ID NO: 29540 - DNA, 259 bp, Glycine max
  Clone ID: LIB3051-110-Q1-K1-G3
ccactcgtccatctatatcgcttatcaccgccctttttttttttcaaggaaggttttcaattttaggttgcgagacttaacttttttttttatttttatacaaacaaaatcctataattattttttacctccgtaaaccctaattttccacgcttctcaaatacattttatctctaatttccatcaaatttctcccccctttactcaatttcccattttttttttccccattcattttttaaaaatttttttttaaatc

SEQ ID NO: 29541 - DNA, 245 bp, Glycine max
  Clone ID: LIB3051-110-Q1-K1-H3
cccctactgctctctctattcctctacctctatctccaaattctccctaattctcacgctccggggtaggttccgacggccgctactccctatccaccgatcatccatactactaccctcatctcccttttctcacaatacagacaagatcaaatatttatcctaaacactcactattatcgttctcaatcactgcatcatgcagcgctgttcatactaagattctattgcgaccaatcacaata

SEQ ID NO: 29542 - DNA, 233 bp, Glycine max
  Clone ID: LIB3051-111-Q1-K1-B11
acccacgcgtcctcccacacttgctcccactctttcaacttaatactttaaaataatttatatacaatacgataactgtaacttttaaacccccttatccaaacaacctaaatacacaacactcaccgcccattttcacatatcttaacacactattactttacaatgtacaatacctacatttacaaatcatttacctacataaatcatcgttaatatcaacccaactatat

SEQ ID NO: 29543 - DNA, 433 bp, Glycine max
  unsure (1)..(433): unsure at all n locations
  Clone ID: LIB3051-112-Q1-K1-B3
ggatagtctaatactggtctgnngtggatgttgcagtcaatcaaagggttgggtgctgggactagagatctgagtcttgagggaatcggaagtctccgtaatagtaggatgctcaagaatgcaacattttgcatgccattganggaaggtattgtacactggggtgtggcaactgcacttggttcatnctctccacttcatgtccgcagcatatcaaggacaatgcttgagtgatgcgagatgaagaggcttaggagtctgacanttgtgcaataaggcatctgtatagctcctggcagcattgattgctcaannaatgctgagaatagaagggttgaagttgttggtggaagaaaaatataagaagtggtgaaatgggaagggtcggttacaaattgccatggcaagacaaggtattgagaaatttaagtgg

SEQ ID NO: 29544 - DNA, 443 bp, Glycine max
  Clone ID: LIB3051-112-Q1-K1-C6
gtgttctaactctgaaactctactatggtttctcctccggagaaccttaacaaccaaaagcaatcattacaattgccaatttcacataaacaccataattgatcaaaacacataacaaaaaaaaagtgaaaatggcgagcgctgtataaaaagaaggtggcgcgagagaggaaactttctctttggagcttcctgcttcacctggttggaaaaagcagttcatcccaaagaaagctggcacccccaataaaaatgatattgtgttcactgcatcaacaagaaaggagatccataacaagaatcatcttgaaaaatattttaaagcacacccttgtggtccaactgtatcaaaatttgactggggcactgtttataccccaagaagatctacaagaattattgagaatgcaaatgcaattccttcatttttaagttagccccca

SEQ ID NO: 29545 - DNA, 400 bp, Glycine max
  Clone ID: LIB3051-112-Q1-K1-D12
tcctgcttcttaacatccttactgtccgtcatacaattgtactcacatagtgtcggttaaatgctgagccctaccactgtcaatatacttctcactctccaaacgcctcaactgctgcttacgtacatttaaactcagtatactactactatcaccagactaactaacacacaattcttccattccaactcactattccagcatccacttctatgtattgatccccacctggtaattctaagtgcatctaagtattataccaattctaatcctcaagttaggactatctacagacacatccacatgtactaacgctatcgtaggaatataagaccacatcacttgaatatctcagttgctggagacaacagatctcttagaagaagcctatcatcatgtg

SEQ ID NO: 29546 - DNA, 357 bp, Glycine max
  Clone ID: LIB3051-113-Q1-K1-A3
atttccgaatcgaccgcacgcatccacgcacgcgtcgtttcagattaaacgcgaaatggtcaatggaaaaatgagaactgatctaggggtcaggggataaataatggactgaatatagaaaacttgcatcaaatgaaatctgagcaaagaattgcaccaatgcaatattatcactggacgcaataactagctgaatatttatagatgtaccaggacaagatgctcgtacatgcttcttctatacaccatcatgggtaccttagatcctactgaagagaatattatggatagcatacacagacagtaactggtatgatgctggctacacatttgatggatttagtctgcatgatagca

SEQ ID NO: 29547 - DNA, 419 bp, Glycine max
  unsure (1)..(419): unsure at all n locations
  Clone ID: LIB3051-113-Q1-K1-B3
aatagacggacgcatccacgcgctactttcacgcttcctactagcctagggcccaatttctgaacatgaattcataggaggtgagatgggcggttaaagtggccatgatggtccgcatatctgctatactgctgcaagtatattgaggctatacctactgataaaggagaatgctatcaatgtacatctgaagcatgcatgatataaattatatgatagcgccatgttatcaagatatggtgtggctgtaaagaacatgccacctgatgcactgacaagacctgcaaaggtcatgaatgtgacattatgcacttttcgataggaagtgctattccaggacgactgtacngtggcaatcccatagacaatagagatgggaatggtggctataggcttggacacttggttgatctatatgc

SEQ ID NO: 29548 - DNA, 298 bp, Glycine max
  Clone ID: LIB3051-113-Q1-K1-C1
caatttccagattcgacccacgcatcccacatacaaactcacttaccactaactagtctttcattatcccacatctaaaactgaaatgaggtcctgttatatttatcgtgttgagataccatacatctcgttatctatttttacacatttgctgaagtcactcacaatgaatacgaatattttaacaaaaaacatatcaagtattcttcacatgcgatatctaataacaaccctcattactatgactgctgtactcctggatatcaatcaatacaatgaacactactactctcccata

SEQ ID NO: 29549 - DNA, 328 bp, Glycine max
  Clone ID: LIB3051-113-Q1-K1-E7
cacgcgtacgattacaaatagctctacagagtgcagtgcataatcgggaagaagtgcgtatgaaggcgatacctctggtggcaaataagctttatcctttgacatccatttctaagcaaatagaagattttgcaaaggaaatgcttttctcaatgatgagtggggatgcatctgaagctactgatattgaatgttccattgctgattcagaaaagggacctgatgttgacaaggttccaaacgaacaatcatcattgagtggcatcactaaagatgtcacctcagatgatcgggaatcatgcacatcttagagtgtctcaccggattc

SEQ ID NO: 29550 - DNA, 443 bp, Glycine max
  Clone ID: LIB3051-114-Q1-K1-A12
actcggttcggaataccacggctgcgagccacgcgtcgcgtcgcacgcgtacgatccaaagtatgctctcttcatcattagacaatcactataggagcatggggttgtaagaccatggaattgtggtaacactcggagagggaaatctgattctatgacggatcagagtataactattagttttggaactttgaagagacttgctatagaaactattacttttaagctctttctctgatatgttgacagctactttgactcaatgtaccataatgtcctcaactgaatactgctcactaccatgcactccaaggcacagtatattacggactgaaagtacatatattaatcacctttttgatcagtgacattggaattcggattgactattaaaaggatatattaaaattagatattgccacattggtttatacttcattatg

SEQ ID NO: 29551 - DNA, 106 bp, Glycine max
  Clone ID: LIB3051-114-Q1-K1-D12
accttcaatcccttccaataccatttatcataacattaacattaatctaaattacttatctaacttatcattttcaaccccctcttatccctcccaaaacaatccc

SEQ ID NO: 29552 - DNA, 265 bp, Glycine max
  Clone ID: LIB3051-114-Q1-K1-D2
caagagcctaatcccatatgcatcactgttagttatttaaggcacaaagttcacaaaaagtatcgctctaaattttgtgcatccgcccacacttcatagcatatgaaatactgcaaattttccctcatctgtaacgctaattaaaaatctacctatattcattatattgttgaatatattgtacatatcccttccactctgtctaaaacacatatacctaaattttaaatacattatgcccatcacatgttaaatctcaattttt

SEQ ID NO: 29553 - DNA, 115 bp, Glycine max
  Clone ID: LIB3051-114-Q1-K1-D7
atacccgagccgacccactcaaacgaaaaaacctacaaacacacacccattcaatttaaaaacaaacctaacaatacaatgcactgttaaatacaaaactcacactacccaaaaa

SEQ ID NO: 29554 - DNA, 198 bp, Glycine max
  Clone ID: LIB3051-114-Q1-K1-F10
tcgaccacgcgtacgagcacatgactcatcacctttacaccttcactggcaatcaattcaccaactgaatacggtctcatttctcactttcacatttctcctaacaaacttgtcttcgacgaggacgtctacaccatagatctcaataattgtcatgtcaccaaccgttcatctaaacttggaaagcctgatacatct

SEQ ID NO: 29555 - DNA, 297 bp, Glycine max
  Clone ID: LIB3051-114-Q1-K1-G11
ctatcaagattaacttttactccctcttctacataaatacgggaatgttctttatcatttgacatttactgtcatagcacttctaatattaactcaaactttatatactgcgatgaactgcatttccatgtttcagtgaaacatcttttatttaactgctacactctgcctgtactccatgataaatatgaagatcatctagactcttttggctcgaagtcaattgccaacattaacaaccaatattcaaatgatgatgctaatgtgttgatcaagatacccatacgacctttaaaa

SEQ ID NO: 29556 - DNA, 229 bp, Glycine max
  Clone ID: LIB3051-115-Q1-K1-E1
attcattcaaaactacaaccttatcttcttcaacatattctactatctaaccttcctattaccccttttttctcatcaataacaccttaacttctcttgttctcatacatacttctccatacccactttcttcataatatttcatcactatacaatcataacatacctttccctttactacaatacaacttttacaatcttctcttcaatacttacaccaacttttttt

SEQ ID NO: 29557 - DNA, 316 bp, Glycine max
  Clone ID: LIB3051-115-Q1-K1-G4
aattcccgtcgacccacctccggacctcgcacctcgagttatttatatatctgtaaatagtcttaatcaatccccatccaactatgcatgactctaagtcaatacattgtgaaaatttgatgaccttacgtattcactatcaacaccctgacttaagcttatagctcatctgcacatatcttggcattgactattcatcttttcccttttgatggattgcagttaagaataagcgttatgctaaactagtatatgatcattaactctttttatacttattttaatatctgatatgtgttacgatattattgtgagg

SEQ ID NO: 29558 - DNA, 189 bp, Glycine max
  Clone ID: LIB3051-116-Q1-K1-A12
ttaaaccttttttaaaccaaggccttggtctttctggcacccaaaaaggttctggggtaagttcttaagattgttcaccggtccaaccaaggaacccaatttgggccagtgaaactaacaagtgatcttggggggggctacttttgggtgaactgggaaaaaggctttgtctaatcaaccttaaaacca

SEQ ID NO: 29559 - DNA, 225 bp, Glycine max
  unsure (1)..(225): unsure at all n locations
  Clone ID: LIB3051-116-Q1-K1-D6
cggtgaccggctgaatggtgaaatatngnngttatggacccattgatgatggnntagaggtgagtggggnngtgagtggttcatctagtggttgaactttgtaaccaagtggatgcaaccaagggtgagggttacaaacgcaagggaggtacctttaggtttcaggggtataacaaggggtgatcccagatttgagaagaaaatggtttccgcttttgacacatg

SEQ ID NO: 29560 - DNA, 450 bp, Glycine max
  Clone ID: LIB3051-117-Q1-K1-A3
cacgcgtccgccagccctttctcctttcttcgattatcttcttttctattcactctctgatgatcacccgttccggtgttcgttttcatttgtcctcccaacattctatttctctctttttgcatttcattttcgatcatccgcagatcgcttgcgtatttgctctaccactctgatcgtatctttattttttattatatttttctttccttctgctacttcggttctttcttttagaaatatatatatttcttattcatttattttcgttgaactcctgctattatgcatatggaatttgtaagaatttgattcattaatgagttttgcaagtctagtttggagtcattagactgaactactgaataaccagctagtttgagtatttgcgaatatacatgataatctcgtgttacttacagtcaacatcatcggtaacttctcctattt

SEQ ID NO: 29561 - DNA, 366 bp, Glycine max
  unsure (1)..(366): unsure at all n locations
  Clone ID: LIB3051-117-Q1-K1-C11
caaaatggtctaaccatggcctacaattgggcagccatgtgagttgtctgatgctgcaaaatggtctatgtactgcagaaactagtgttttgtgagggaatccaagctacagagtctggtactaagatgtatccgatccaaggaacanattgatggattatgcaaacttcttgctcaacattgtagaatgttaacgtctctggaatttgttcactgcacactctcaacagattttattaatgcaatatttggttctttagtcatagagagagtacaaaaacatgggatccaacatttgtcaatcatcgccacaagttttctttgaccatgtgcagtttctttacctaatggactcatgtcattttt

SEQ ID NO: 29562 - DNA, 406 bp, Glycine max
  unsure (1)..(406): unsure at all n locations
  Clone ID: LIB3051-001-Q1-E1-A1
agctgaaacacattatcaagtctacaaatatgaagtgcctgactccaccatcggcattggaaggggattgtggattccttgctgcaaacctttatgctaagagtgtttttggggaagatgctttggtgaatgtgagcattgaaaagcaatcagatggtaagttgagtggatacatcagaataagaagtanaactcacggaattgccctcagtcttggggataagataactttgaaacagaagggagccgcctaatangagtaaatgcccgtttttctctgatggttcttcgcttatatcaactttgtgtaacttcctgtggcgggtaacttcaagcttggttattgcttcaaattctgcggcttttggtggcaacccggctgttagtattaaattttttttcccct

SEQ ID NO: 29563 - DNA, 165 bp, Glycine max
  Clone ID: LIB3051-001-Q1-E1-A4
agaaaaaaaatcaagaaaaaaaaaaaaaccgtcaaaactctcatctcaaaacgtcgatatatcaaaacgtatacctactgacatcctttcgccgcttgtcctcaggttcttgtcgaacttgtcttaaatgcaatataatggttctgcatttagataacacacatt

SEQ ID NO: 29564 - DNA, 395 bp, Glycine max
  Clone ID: LIB3051-001-Q1-E1-B2
aggtggagtgtgagtgagtgagtccttggtccgaagcaatgcaagaagaagaagcatagcagagaagcagcaatgacaagagcaatgctcctggtgttattccctcaagacaacaaagccaagttcaacttcccttctccttctaagtctcttgtctccaaagcacaatccactatctcaatctgcctccttctctttttcacaactctcctcctttttactctctccaccctcccaaacacccctcacacacctcccactcagcctcctaaacccaccccccaccacctggctctccagcgcatgggcactctccaccgcagaggcaccaaatccatgtccgacctcctcatctgccacgtgcctgacgaaactcccctccaagacttccgcat

SEQ ID NO: 29565 - DNA, 267 bp, Glycine max
  Clone ID: LIB3051-001-Q1-E1-B5
aggccctagactacactacacactttgcaatggcggttgttgcgcaaacccctgacatcgccggcgagcgacagtccggccaagacgttcgcacccaaaacgttgtggcatgccaagccgttgccaacatcgtcaaaagctctttaggccccgttggcctcgacaagatgctcgtcgacgacattggcgacgtcactatccacagcgacggtgccacgattctcaagaagcttgaagtggagcaccctgctgccaacgttctggtgg

SEQ ID NO: 29566 - DNA, 413 bp, Glycine max
  Clone ID: LIB3051-001-Q1-E1-B9
aaagtaatggcaatggcaacgatggaagagattccacaaagcccagaagcgaagttggggatgcgagtggaggatctttgggacgttcaggaggcacagttgagtcccaccgagaagctcaacgcttgttttgaaagcatccctgtctctgcttttcctttggatccttcaaacacagaaattgagattaaatcagacgccaccctagcagatgctgttaagatattggcaggacacaacgttttcagcgcgcctgtggtggatgttgaggcgcctgaagacgctagttggattgacagatacatcggaattgttgagtttgctggaattgttgtatggattttgcatcagtctgaacctacgtctccgaggactccgtccactccatccagtgcaagggctattgcagctgc

SEQ ID NO: 29567 - DNA, 411 bp, Glycine max
  Clone ID: LIB3051-001-Q1-E1-C11
cccacgcgtccgtgttagaccattattttcaaaattcactatgagagcacacaaactcttgttgttttttatacaattctgcttaataaactatagtgccaacatctttccagcaaatggttattttcttggccatcagtgttccattgtcctccatttgaaaaataacctaatattcaactctacaaaatccaaaaagcttaccctttggaaccaaactgaagattgttgccaatggcatggggtgacatgcaacgaggggcgtgttatagcccttgatctcagtgaggagtctatctcgggaggactcgttaattcaagctctcttttcagccttcaatatctacagagcttgaatttggctttcaataacttaagttcggtgattccttcggagttgtacaagctgaa

SEQ ID NO: 29568 - DNA, 398 bp, Glycine max
  Clone ID: LIB3051-001-Q1-E1-C12
agcagactttctctctctctctctagtttccatagcacacacacacgctaatcattcgacgaggccgcaagtgagtgagagagaagaatcactcactgatccacacacaaaccagaacaaaaccaagcacagacagcgtgcgctcttcttgtgatttgtgttacaagcaaccaaccacactcacacacacccctccataataaaaatcacttccatgctctcttcttcaccccaaccaaaacaaacaggtttgcatttgcttaactggagccagattctgtagctgatttcatcccaataaatctaatgatgcttaagtaactaacactcttcgattggtttctgggttctcttgaagatttggtctttaatcgagtcgaattggatcttgtgattta

SEQ ID NO: 29569 - DNA, 397 bp, Glycine max
  Clone ID: LIB3051-001-Q1-E1-C2
agattggacatcaggctttcaagcagttcccattgggataaaaaaaaaaaaagatgtaagagagagaagaaggaaaccccaacccaataatcatactcgtacttgggatgatattggatcatctcaacctcaattttctacaatattaaataaacaatcaccttcattttttttttctcctcttcatttctgatctcatccccatggatccctttgatttaatacgcgaagggtttggttgaggctgactggacatgcgctgttactacttttaaagtctgtttatgctgtagttattttgtccatattttagttaataatgaacttatccaagaaaggacccctaagggatgcaaagctattaagcccaaacaaggcaacaactctgaatccaaat

SEQ ID NO: 29570 - DNA, 349 bp, Glycine max
  unsure (1)..(349): unsure at all n locations
  Clone ID: LIB3051-001-Q1-E1-C6
atttcattcaacaaaaccatttttttctctctcactcactcacttcacacaatgaagcacccaaggggctgaccctgtcgtccgcaacgcttgccgcgacaccgtgggtgccctcgctgcacagtatttgaagggctgactctgccgtccgcaacgcttgccgcgacatcgtgggtgccctcgccgcaatttttgaagggaaacgatagagggggtggcgggggaggtgtagggacggtggtggggctgttcgtgaagccactgattgaggcaatgggggagcagaataagggggtgcaagcggnggcggcggtgtgcatggccaagatggtggagtgtggcggtggcg

SEQ ID NO: 29571 - DNA, 383 bp, Glycine max
  Clone ID: LIB3051-001-Q1-E1-C8
gttccgatgaatcggaggtttctgatgtgactactgtgggatccaatgttcggaaggatctaaacgagtttcaggaaaagcatgccactctcgttttaactactgttaaggaaatttcaagattgagatatgaactatgtccacgtgctatgaaagaaagacacttttggaagatatatttcacacttgtcaacactcatgttgctccgtatgagaaagaatatatggaggaggttcagcttagagcgggggcagagcagaatgtggatactaaggtagagcaacctgctgttactggaggaactggaaaggcagaagcaacagggaacaatttgaagggtagaccttctaattcatcctctactgaacaagacttggacaca

SEQ ID NO: 29572 - DNA, 403 bp, Glycine max
  Clone ID: LIB3051-001-Q1-E1-C9
gataggcaccgtgctttacaggagcttcttgagcttgttgagtcgattgataatgcaaatgatttaagcaaacttggaggacttctcgcggttagagaagaactttattgctctgatcctggtataaggacaattgctgcatgggttcttggaaaagctagtcaaaataatgcaattgttcagcagcagatcttggaacttggagtgctctcaaggctgatgaaaatggtaaactctaattcgatggaagaagccaataaagcattatatgctgtttcagctttgattaggaatgatttggctagtcaggggttgttctatgctgaagctggaggttggatgcttcaggatattttgagtaatacaagtcttgatgtcagactacggaggaaagctgtacgtc

SEQ ID NO: 29573 - DNA, 411 bp, Glycine max
  Clone ID: LIB3051-001-Q1-E1-D1
agcccacgcgtccgctctttcattatttaataacaattattattctcaatgggcaagactcctttctcctttcgtcgctccgcctctcgccgccgccccaagaagaccgccgccccgccccctcctccctctccgccgcaacatccctacgcggccggattcgccgcctcacccgacgacaacaaccgtctcatcgccgccgccgccggcagcagcgccttgacgaaggcgaagaagaagaccggcaacgtccgcttgtggatgaggtttgaccggtccggccggtcagaactggtggagttggagaagaacgccatcgtccgccacgcagcgattcccgctagagacttgcgaattttgggccccgtcttctcccactcctccaacatcctcggtattccaatccccccc

SEQ ID NO: 29574 - DNA, 285 bp, Glycine max
  Clone ID: LIB3051-001-Q1-E1-D11
aggtcacacggccgtaaaagttctgtcacatgcatatgcgtctgttttgatacaagctgcatatcgcggtcatcaagttagaacatgggaagcattgacgacgttgacgcagatacatgaagtcaggaacgaggtgactgatgttcgagaccgtgttcaagcctttgagagatcgtctgatcttcaaaatgatgacaagcaagaaattgcaattggtgagaccaatatgacacccctagcgaagttggatactaataatggtttgcatccaagtaacaaggagat

SEQ ID NO: 29575 - DNA, 398 bp, Glycine max
  Clone ID: LIB3051-001-Q1-E1-D12
agattttcctttttcttctatctttctgttccatcgatcacctccaaatccaattatatatttatatttttcactccgcaacccaacactacctgaaccaacttcttcatcaatttattctccctaaagcttcgccaacggccaccccaactctctgctttccagcttcttcctttcttttgctatttcgaggcacagatgactggaatttcaaaggaagaagggtcagctagtccaagttggggtgcttcattttttatgcagacaagagaggaagtggctagagctgttgcagctgctgttaaccctccaatgtcgtcaaaagatgataatagtggtagccaacttcaaaggctgcagtatcaagttgcaaaaatgttaaaaggcttttctcaccc

SEQ ID NO: 29576 - DNA, 410 bp, Glycine max
  Clone ID: LIB3051-001-Q1-E1-D3
agtgctcctctgattcattcacccaatttttttctgtcctcttttcctctcagaagagcctctgagtctgctcaggtgttccttgtcaagagatccttttgtttttgaggtgtgaagggaaagagaaaaaagatgaatcagtgtggttatcagcagaagaaggccttgacaagctgtgaggagatgaggatggaatctgtggtgtgtcctaaacctcgaagattgggcctgttgaaccactcaacctttgataaccacatcagacccttgaggccaccctttatcaactaccaatcagaaattgaagattcaggagttggggctgagcttatggacattattctccccaagagatctggggggcaagtggcttcatcaccgccatttttctgtggatctccacctagcag

SEQ ID NO: 29577 - DNA, 400 bp, Glycine max
  Clone ID: LIB3051-001-Q1-E1-D4
agtggcatatcagcgccaactggccttgagtcacgctgctgtatctggtctttcaggtcaaactcttctgcaaatgactggacaacatggcctagctccagcttcgatgggcgtaaactctggggcatctcaagccatgtatgatggatataccggtaattcatcgagacagcagcttatgtactatcgttgacacactggccagcgcagattcacagttgcattgttatcttctgggggctttgatgtgcatcacatttctctttgcttccccacagcatgtccttttcatactgggctttttttattgaggtattatcgtggcttgatatttaattaatttttacgtcgtgttgtaattttgtattgtttgatctaatgaagatttgatggctctaaa

SEQ ID NO: 29578 - DNA, 384 bp, Glycine max
  Clone ID: LIB3051-001-Q1-E1-E10
gggtaaggtcgcgttgtgttgcgtcgtgtcgtgcgctgttcctctgtgtctcggttttgtgttcagaccgaaccctaactccgcatcgcaaccatgtcgacgaagcaaggtggcaaagctaagcctttgaggaagcccaagtctgataagaaggattacacgagattgatgtggctaacattcataagattaacgcagatgataaggcgctaaaggagttgaaagccaatgcgcaacagaagggaagctttggaggttctgggctcaagaaaagtggaaagatataagggctccttaacatgagtgtatgcattcaatattgagccctgtaattacagttgcgagcatgacaacttctcttattactgtggcctactttattgc

SEQ ID NO: 29579 - DNA, 394 bp, Glycine max
  Clone ID: LIB3051-001-Q1-E1-E11
gcgacgcatccgctgtacttcatctctggtctctggcatccgtggtagcggaagaattcaatcctgtcgaataccctttagcttttgcatctgcaatctcatcgaattcgtttctaccagtctcattaacattgctgattttcatagctagatgcctctcagtagagggttactctagatatggtttgaattacaatgtctgaagctgaaaagatatcaaaacttgagagcttgtgcccctcagtatgataaatgtgtggaagtggagcgaaagtctcactataaatagatacaacaaatcataattcaactaatatgaattatcacaaagcttttaccataaacgtgattatgatacgaatatgtcaattgacagtgttggaagcttacacac

SEQ ID NO: 29580 - DNA, 406 bp, Glycine max
  Clone ID: LIB3051-001-Q1-E1-E2
agggtgactctcgggttttacaacgcagcttttcatcgttcagtctaaggcacacgcacaccatcaagtcatcttctggtctgctgatatctatggcatattacagagatgatcgatttgcaacatttgaacagttttatcgttgttaccctgtctccttcattgagaaggtacgatcactgatttagccttatgtcaataataacttcctttgctagtttctttcagaggaaataaaagaagaggtgagaaaattttgaaatttgaattgaggagaaaaattttctcttctatcctcctattttctttcctctcatccaaacatgtcataaactatttctattcacaaagtcaacatattccttgggatttatatttgggcctgtgattgatcaaaggggtctga

SEQ ID NO: 29581 - DNA, 403 bp, Glycine max
  Clone ID: LIB3051-001-Q1-E1-E3
agcaacaatgctcctccgtttccttttcacgtgtcaagggtagacaaatctccagcagcatatagtcatagtcacaggcaacaacaaccaggtggctggcagatgaatcagaacattcctcttgttcctcccaacttttcttgtttttccaattccaattccaattccaattccaatgtcctccaaaacgccttcaataagaatgttgttcagccttcagcctcatatcctcaatgcttggctattgagtttgatcaacagagggagattgatcaccatatcagatcacataacgaaaaattgaggattttgttgcaagagcaaatgaaacagcatgtggcagagttattgaagaacgtggaatcgaatgctcttcatttgttgagacagaaagatgaagaaa

SEQ ID NO: 29582 - DNA, 407 bp, Glycine max
  Clone ID: LIB3051-001-Q1-E1-E9
ccgtcaccgtcgccatcaccggtgaaaaagggcggtgaattggggaggagtgaggaagattcgcgtttgaagagtgtgaatttgagtaaggagctttctgcggaagaagctaatcaattgtttggtatggtgtttgggaatgaagtttctaagggcattcttgcacagtggagcaaccagggaattcggtttagctctgatcctgtaacatcaatgggcctagtgcagcatgaaggcggtccctgtggcgttttggcagctatacaagcatttgtgcttaaatacattcttttcttcagtgatgagttgaaagatgtgtcatgcatgtcaccggagggtctgggtgcgtcatttaaaagtcagtctattccatcatataatttttcttcactcactgaaggtgaaaa

SEQ ID NO: 29583 - DNA, 416 bp, Glycine max
  Clone ID: LIB3051-001-Q1-E1-F10
agaaaaaaaaaaaacaaaaaaaaaaaaaaaaaaaaaaaaaaaaaaaaaaaaaaaaaaaaaaaacaaaaaaaaaaaaaaacacaaaaaacaaaaaaaaaaaaaaaaaaaaaaggggcggccccccaacaggttcaaaccttacttacccttgcatgcaacgtcacaccccttcaacactgtcacctaatttcaattcacgggccttccttttacaacttcttcaccggaaaatccctggctttacccaccttaaccgccttccaccaaaaccccctttcgccacctgcccttttcccaactaggccttcatcgatccccttccccaacatttgcccacccccgaatggacaacgggacccccccttttgcggcccattaacccccctggctatcccgctcatgcctcttcctccccc

SEQ ID NO: 29584 - DNA, 407 bp, Glycine max
  Clone ID: LIB3051-001-Q1-E1-F11
ctcaagtaccaatatttgtttttattataaaagcatgtaccttttgttcttcctaccaatacaaggttctccacaacaaacacgctgatgaatcaatactgggacttcttcaatggcagatgaagctatctctccacattgaatttgaaaaagccagttagtgctacagccagattgtgcaaaaccttggtgtaaaatctgtgttcaatcctctgttttgttgctgacattgaagactcttaaacaattaatcaagaattgttctagtgttttggttctggcaccagttgatctactattgggaattggtaacaaggatcactttctactacaacattcaactagatttcttgtactttcattttcatcaaaaattacattcttctatggatggtcttagttgggat

SEQ ID NO: 29585 - DNA, 401 bp, Glycine max
  Clone ID: LIB3051-001-Q1-E1-F2
agctcaagaggtggagttttcaagtggcggtgtaaatttgggttgatttgcgagttcttttcatgcccagcttgtcttggagggaatttaagtaaacaaggattgggattcaagcttggtggttaacattatgttctaatggttgtgatggcccacgacgtgaagcataactggtttctgatttcgaaaaatgttatcaatgattgcagtcatcaaaattggactgggtttgtagtattagattcagggtgctccgaataatttagagttttctatttttttaggattcttatatttgcacgttacaattttcctatattttttatcgggtttgatataaaggataatgatgtacaagaatttcccttgtatttatgaagcattagctattaatttccttt

SEQ ID NO: 29586 - DNA, 402 bp, Glycine max
  Clone ID: LIB3051-001-Q1-E1-F3
agtaagttcacggtcagttctgaaaaatgggttccaaggttttgcttgttgtagttatgttcatagcggctatacttctgatctctgctgaggttgcacccaatgaatacgaaaattttaacaaaaaagatgggaagcatgctccaaatgggttatatgatagcaaatggggttacggtggttggggtggtccttggtatggcggctggggtggcccttattatggtggcggctggggtggcccttattatggcggtggttggggcggtccctggcgtggtggtggcggtggtggctggggaggttggcgtcgacctaatggcaaccctcacaactaagaagaaaacttgctaaagcttctttacgggtttaggttttcgcaataaataaaacttcatgaga

SEQ ID NO: 29587 - DNA, 399 bp, Glycine max
  Clone ID: LIB3051-001-Q1-E1-F4
agcccacgcgtccgcccacgcgtccgcggacgcgtgggccaacatctatctcacttcttagttctttgtggctctttccatgatggcctctcctacatctccaagagttctcttcttgagtctctttgtaactctttccatgattttacatttgagttcagccaggaagttgtctgagtcagacccccaattgcagttccaataccacagaggccctctcctcacaggcaaaatctccgtaaacctaatttggtacggtaagttcaaaccttctcagaaagccattgttgctgatttcatcacctctctctcctcttccaaacccctcaccgcccaaccatccgttgccacgtggtggaaagccaccgacaaatactacaaaaactcgttccccaaact

SEQ ID NO: 29588 - DNA, 273 bp, Glycine max
  Clone ID: LIB3051-001-Q1-E1-F7
agattaaagaaaacctcccagaccatgagaaaatggtggcttttgctaagtttattagagaaaaacgtttggcatgtacctaagaaagtaatcttatatgagatcaagtatgaatcactttgtatctgtctgaatcgttttgttatgcgtgtttctttagtttccactccattattaggatgtcttgacatatctgtgaaagcaataaaagtttaatgggaaaaaaaataaataaaaaacaaaaaaaagtaaaaaaagagaaaactacgagaa

SEQ ID NO: 29589 - DNA, 408 bp, Glycine max
  Clone ID: LIB3051-001-Q1-E1-F9
gtttaatttactctcctcgccaaggcagaaaggtgggctagtccagtcgtctcaattctcttcaggtaattctgctggacaatcactgcaaggaatgcaagcaatgggtatgatggggtcgccaaatctcacctcgcaactacgagcaaatggagccatggcttatgcacagcagctgcgtatgagtcagggtcaaatcaggcagcaactatcccagcaaggttcacttaacactgcacaggttcaaggtttaccaaggtcatcatcccttgcttttatgagttctcagttgtctgggttgtctcagaatggacaacctgcaatgattaactctttaacacagcaacagtggcttaagcaaatgccagcaatgtctggccctgccgcaccattgcgtcttcaacacca

SEQ ID NO: 29590 - DNA, 417 bp, Glycine max
  Clone ID: LIB3051-001-Q1-E1-G4
gcgtgggcgagaccgtgggcggacgcgtgggccgtcatgaagagcttgcatgaggagatttccggcgtgacgtcagattactgcgagtctcacgcgcagatcggatacctcctggaggcctccgacgacgatcttgggcttcctcccgccggaaactcgtccgggccacaggagaaaaacgtggaagccgagttggttcgagtcgcgtctgactcgtccgggatcggcgagttgtgggaatttgaagaccagattccgagatacgactcgttcgatttgggaatggggttcggttatgactgcgatgctaccgaatacgctgcgtttggtgaacttttcgatcattctgatgtgtagtatgactcgtggcggcaatagacatttaaggaaaactaaatggaaaaaaaggttttagag

SEQ ID NO: 29591 - DNA, 392 bp, Glycine max
  Clone ID: LIB3051-001-Q1-E1-G6
caattttgggacgattgggaaggagaagacgaagaaggagagcagcgagactctgaattcgtgtgtctcttctgtgaatcccggtacagctcgtgcggttccttgttcgaccactgcgcctcccttcaccgctttgatttccacgcgattagaacaactcttagcttggatttctatgcctccttcaagctcattaacttcatccgctctctggtggcagagaacagatgttggagttgtggattaacatgccagtccaaccgtgatcttcagaatcatttgcatgatttagttgactttaatgagataaagactttgtggaatgatgataggtatctgatacctttcatggaagatgattcactgttgttcagttttggtgattgtgacca

SEQ ID NO: 29592 - DNA, 395 bp, Glycine max
  Clone ID: LIB3051-001-Q1-E1-G8
agctctctcccaaattgctttctctcatttctctctcccgaattgttatctcccccttctttgttccttctttccatttttttcattcttcccgtttttctgtattttcttacatctaaagctgtgattttttacatcaaaattgtgatttttatctcagattccatgacaacgatatcatatttgcgttcctctctaagtttgtatttttatttgaccgtgactaactattgttcttcctttgcaacacaaaagcttcaatttttttgtgttttctgtttttttgtgttataatgacttttcgcaggacaagaggttaaattttttggtgtttctgagccttctccgacgtacccaaaggctggagcttttttgctgggtttgctagttctttg

SEQ ID NO: 29593 - DNA, 382 bp, Glycine max
  Clone ID: LIB3051-001-Q1-E1-H3
aggggcaaagcaaaggcaaatctttctcacaacctacaagttatcttctttgaatagtaacacttttggggagccgacacaaaagcctaagctgaagctgaagaaggttgctgttaaggttaagaagattgtggcctcggttttgatgttcatgcgagttggttcttttaggtcatgcagttctaggtctcagatttctgccacctcaccaaataggaagaactcttgaggatgttgttctgacgtgggtttaggatggtttataattctctctataatctttggttctttcacactcaggagttttagtgtgtgtttgtgaaagcgaacgcaggcgtttttgtattggaacgcggaatttttccgttttcaaacacatcct

SEQ ID NO: 29594 - DNA, 387 bp, Glycine max
  Clone ID: LIB3051-001-Q1-E1-H7
tgaccatttcccttgcttttggttagggtttccagagttttccaacttatcaatccacacaacttcattcattcagagaaagaacaaaaatgatcgagctgttcctgtcggaaccgaattggaacgacgtcgtaaacgacgacgattcaactcgttcgagaatctccattctcaacgacttggaaaccgttatttggtctacggtgggtcgctccgaggcgcggttgtggctctgcaacactgtcgcgggattgaactgcgtaacttccctcgatcagcgtgacctgtttcggaatttgctcagaaccagtggggtgaagcgggatttggcctctcagctcctgcatttgatgttcgacacggcgccgcacaaaccaagttccgttt

SEQ ID NO: 29595 - DNA, 347 bp, Glycine max
  Clone ID: LIB3051-002-Q1-E1-A10
cagaaatatcattttccgagacaatcccatcttccaattccatcttcaatatttcgtcgcatcgacaatcttcgcgaacgaaaacacagaaccctatacagatccattccatatccatgtcaggtgttggccctctatctcatgattgggaacccgtcgtcctccgcaagaatgctcccaccgccgccgccaagaaagacgagaaagccgtcaatgccgcccggcgctccggcgcggaaattgaaaccctaaaaaagtataatgctgggacaaatatagcagcatctagcagcacttcattgaacactaagatgctggatgatgatactgagaatctagctcatgat

SEQ ID NO: 29596 - DNA, 416 bp, Glycine max
  Clone ID: LIB3051-002-Q1-E1-A8
gaaatattttacttgcaaaaattgcagagggtgtttcccttcttccaatgtggaaagagtggggcttttatgtctatcttgcgtggaatcaaggaaatctgaaaaaagttctattcatgctgttggcaaaagaatcaggtcccctcggccagtattattctcccgttcatgttcatgttgtgcttctgaatctgaactatgtatcactcctcaaactaagaaacagtggaagacaagaacaaagtcatcaaaactgtcggtaaaattgaagactgcaccaattacttcaaagtgtttatctccacaaaataaaagtcagtggaggatctctaaaaagtatcaacgattaaattaattaaattttgaagacgatggattgcctaatggagctgaagtaacttattatgcacgtggac

SEQ ID NO: 29597 - DNA, 373 bp, Glycine max
  unsure (1)..(373): unsure at all n locations
  Clone ID: LIB3051-002-Q1-E1-B2
ttttcaactttgctattctcaggctacttcaataaccatatagtataagatttctcattggtaatagaattccaatggtcttgaaaactacttatttagacatggttttatatctgcttctatgagaatatgagattctgaagtttggtaatgtaggataatgtgtcaactttttacttattttggcaaacctcaatttaacaaccagctaaggcatcttttagccaacttttttctgtttgcaacttgtggattacgcagagatgctacctgtatacgggtcctttttttttatcttgccaaataaacttcttttctaattatgcaagctgcaaccctgtttaaagttataaaggagacccttntatacctg

SEQ ID NO: 29598 - DNA, 408 bp, Glycine max
  Clone ID: LIB3051-002-Q1-E1-B3
atttctgtttacattcaagagagagaagaagaagcagagcattggcagcaaagacagagagcgtggctcgtcgcttcaaactcctctgcggtttccccttcttgttcatcttcacagaaatggaggtagcagtggccacagcgttgcaaccgcattgaacgttacagttgatagttgatcgactactccgtaattgacagtctagactgcatcacctacacccatctccgacggcgaatatttctccgtcgacgacctatttgacttctctaacggctctcttcacaacgaacaacaacaagaatacgacgaacggaaacaaagtttatcggcttcaaaggaccgcggagaagacaattggaactccaattccaccggcggtttcctatgattcacttttctccaccg

SEQ ID NO: 29599 - DNA, 261 bp, Glycine max
  Clone ID: LIB3051-002-Q1-E1-B4
ttgcacattgcactttgcactctgcacagcgcaatggcgtgtttgttgagagcgagaaacccctgttactctctgatgaggcgcattcgaatccggtgcatgagcaacgttcccgacaacacggtgtattcggggcccacctcgcagagctcgaccaagcgcgtcacgctgagccagtttcgccaaaaacaccggtctcccaagccatcaacatggtcaacgcctacaactaccccgccgcggtgcacctcgacaccgccg

SEQ ID NO: 29600 - DNA, 390 bp, Glycine max
  Clone ID: LIB3051-002-Q1-E1-B5
atttctgtttacattcaagagagagaagaagaagaagagcaatggcagcaacaacagagagcgagaagaagaagcaagaagaagaagaggtacaagaacaagtggtgaacccatgggaagtctccgccaaaggcaaaatcgattacgacaaactcattgaccgtttcgggttgccagaagctcgacgaagccctaatttcgcgtctcgagcgcatcacctctcgcactccccacgtctttctacgacgcggcgttttcttcgcccaccggtacctccatccatttcctcccttctctccttcccttattttcttaaactataatttgatgatgtcgtttctttgtgtcgcagcgatttcgcggagattctggacgcgtatgagaggggag

SEQ ID NO: 29601 - DNA, 227 bp, Glycine max
  Clone ID: LIB3051-002-Q1-E1-B8
agattggttgttctctcaagtctcaactcccaccccccctctttgacttttctatcagaagagcttgttggagttgaaaactgagaagaaaacatggcagcacaagggcctgtggtagtagcatcacttctaattttctgtttagctggaagttgctatgggaagggtcacttctcttccttgaaaagaacccttgatgtcactgcttcccccaagcaggaaccaat

SEQ ID NO: 29602 - DNA, 273 bp, Glycine max
  Clone ID: LIB3051-002-Q1-E1-C1
cggacgcgtgggcggacgcgtggggatttgggtctgattctgctatctgtgatagtccgggaagacaaacgagccttggctctaaaagacaaaattcatctgtcgtatccgctttgcttggcatgagagaaagtgcaagccatgaattggaagaactgaataagaccattggggatctttgcattaaagcttacaacttgtggattttacggatctcaaatgaactttctgccaatgtctctcaggatgttaaccaagaatgtgcatgaactt

SEQ ID NO: 29603 - DNA, 319 bp, Glycine max
  Clone ID: LIB3051-002-Q1-E1-C10
accacgcgtccggtggattaagagatcttctgagggcttgggttcctctaggaattatgttagcagtaggtatagtatctaagaatacatccctggtaagggtgtggtcttcttattctgcaaatggtaaattattctaaaatttcaaccaatctgtactcaagttcaagtgcttccatctgctgttagctgaatatttagttgagcatagcaatgattaacatcatgccttttggccttttggtttcaaacaagagagaaaaagagactgaccctgttgtgttccttttctgcactgggtaaaatacactgggagtat

SEQ ID NO: 29604 - DNA, 289 bp, Glycine max
  Clone ID: LIB3051-002-Q1-E1-C2
cacccaaacccagaaacttatgttcatgaccatcctcaatgtcccaataacatttgcttgaagacaattttgagttgaccttacagcctagttccacctatacaaacacccttgatccttcaaagcctctcatagctccaatactggcaacaataatactcttgggcatctgaactatctccagtccttttttccccctttctttgcagtggatttgcgacgttttaaagacattaaatgcgtctttatgtgctaaagactaggtaattatagaattcatctcacacat

SEQ ID NO: 29605 - DNA, 406 bp, Glycine max
  Clone ID: LIB3051-002-Q1-E1-C6
cagctgcctgcatggacagtactaatgttccttcaagaaacacacaccctttgagaagcaactcttcaaaagaatttagacgtaacgacagggttagcttctttgattggttttaccaattcagaattcttctccagagaagcctcaaggaaagaaaacacgaatccttcaacactctgagagtctgtcaagttattgctgcagcactgttagctggtttaatgtggtggcactcagactacaggaacattcaagataggcttggcctactcttcttcatttccatcttctggggagtcttcccgtctttcaactcggtttttcgcattccctcaagaacgtgccatcttcatgaaagagcgagcttctggtatgtacacactgttcctcctatttcattggctcg

SEQ ID NO: 29606 - DNA, 421 bp, Glycine max
  Clone ID: LIB3051-002-Q1-E1-C7
aaaaaagtaaattttaataaaaagatgtgtagaagagataaagtaggatttatttactatcctctaacaaaacaattgatttagattggattagacttaaatttagaatcaaactaattgatgttattgaataagatgattttgtccttcaaaaccatttcatttcaatctatgaacactcctatgagtggctattcacatatagtcgatgacaatatgtcacatcagacacaacttgtgcaatgtgtacagtataggcctctggtgtgtgcattaggtgtcttttatgttatcattttgtcttttatttttctctgctctcgcttcgtatgtatgtgtgtgcgtgtgtgtgaaaaacctactattctcctttgaaaaatttttaatttggcaaataaggcaattccaattgagcctggat

SEQ ID NO: 29607 - DNA, 403 bp, Glycine max
  Clone ID: LIB3051-002-Q1-E1-C8
accacgcgtccgcccacgcgtccgcaaagtccaaccaatacaaatctctagctctccctccctctctcttgtatccctttatatgaatcttctcagacacgttttcgagagcccctttttccttatcatagcctcgcagcagctgatatctcatgttgttcttgttcctaacaaagtagcattaagaaccatggcatcttcaccggacaccagcacaaccataaagctgatgcgttacaacagctacctccgcagactcaacagcttcagactccttaagacatccttcatcctcctcctcctcctctacaccctctccacccagcacctcctcctctcctccgccttccagggccccgcatgggagaatcaggtccgcgactccgccctcgccggccgcccc

SEQ ID NO: 29608 - DNA, 376 bp, Glycine max
  Clone ID: LIB3051-002-Q1-E1-D10
acagtttttgtcatcactctctcagctgatcggtgcttatagatccagcgtcagcagattcaatttgacactggaagcaatttctcatttcaaagattaagtgaaaacatggttgtccttgctgcatccattgtgagcaaatctggcaaagttctagtttctagacagtttgtggacatgtctcgtatcagaattgagggtcatctagcagcatttcccaagtttataagcactggcaagcatcacacatatgttgatacggagaatgtgcgctatgtttaccagccaatggaagcactatacctgcttcttgtaacaaacagacatagcaacatactgggagatttgacaactctgagacttctctccaaacttg

SEQ ID NO: 29609 - DNA, 417 bp, Glycine max
  Clone ID: LIB3051-002-Q1-E1-D12
tgacggtggattttgtgttttttgacagttaaaggaagaaatcgctgtctctgtcgcgcgcaacgatatctgcagattagagtgtgaagtccaaactctgaaaccctcaactcaaatccaatcctttggttggtttcgaattcgactccaaccaaattcccaacacatggactcggttctcttgcacttgcatctccacactctccctcctctctcctccgccactcaccgccctctctgccaccctctcgccgcctcctccgcttctttccaccgctcttctcctcctctcccacgcttccgcttctcgccgcttctcgccgctaacaccctcaccgctaataacatctcgccaagaagtggactatacacggttggtgactttatgacaacagaaagaggatttacatgtggtga

SEQ ID NO: 29610 - DNA, 140 bp, Glycine max
  Clone ID: LIB3051-002-Q1-E1-D2
cacgacccctccggcttggaatgcactggaaagagggtggaaaagagtggtaaaggggacggcggcgccccttgaaaaaaaatccacaacaacaaatataacaacaacccccaataaccaatccctaaaaaacgggccgc

SEQ ID NO: 29611 - DNA, 342 bp, Glycine max
  Clone ID: LIB3051-002-Q1-E1-D3
aggaaacctttggactttaagttaggagagaggaatttcgactcgggacgcgcttgaattgtgccctaggtttgcattttcgcgctcagattctttggtagatgaaaagtgacactcttagatattaagagtgggatgcatggatgtaactcaggatctgctctccttgtaaatgctgaggttgattctatgggaggtgttgttgatggcggagttggtattggtttgaaaacctctccacgccgagcagcaattgagaaggctcaggcagtgctcagactggagtatgatgcgcgtgaagaaagaagaagggaactagaattctctgaaaaaggagggaat

SEQ ID NO: 29612 - DNA, 374 bp, Glycine max
  Clone ID: LIB3051-002-Q1-E1-D4
attgtactgttctattagttcatactaagttctgaaaatgagttccaaggttttgcttgttctacttatgttcttggccactatacttctgatctcctctgaggttgcacccgatgatgcatacgagaattttgacaaaatagatgggaagcctagtgcagatggggtagatgaaagcaagtattggcgtggcggctatggtggcggctatggtggtggttatggacgtgggcgtggaggctatggacgtgggcgtggaggctatggacggggacgtggtggatatggccggggacgaagttgctaatgttggcggcctggtggctatggccgccggcgttgtggccggcgtggtggctatggtcctaatgaac

SEQ ID NO: 29613 - DNA, 418 bp, Glycine max
  Clone ID: LIB3051-002-Q1-E1-D5
accacgcgtccgaacaaactcatttttcttttccccatttttctctttctttttatttattttttttcattttcttttccccttcgcttcgtctccacagttcacaccattctcgtctccctctccaacaaaccgtttcctcgggaattgagaattccaattctgcccctcgcggctccgcgaatttacctatccgagccatggctactgccaccaccaattcttcgccctcggctcagcgccacgtcggcttcagccgccgcacgcaggcgccgcgccagctggacgacgactcgccgccggtgaacaagtaccggctgctgtcggagataatggcgcgcgcgccgtacgcggtgctggagagagaaacatacagcgacctcttgtgcgaccaatgcggctccggcgagctggcgga

SEQ ID NO: 29614 - DNA, 418 bp, Glycine max
  Clone ID: LIB3051-002-Q1-E1-D6
accacgcgtccgcccacgcgtccggtgaaaccagcaggagctggagccagttggggagaaactttaacatcccaatcatacccatccctatcagtcaatagacctcacagtatgaacctgattagcaactacatgccagatttctacatggcccaccaacaacagcagcagcaacaacaacaacaacaacttcagtcttttgactgcttgatttcagctagcaacagcaacacagacatcacttctgttgaagatgatgatgggatctcaatgattttatctgactgtggaaacctgtggaacaacttcagttatggcagtgctgcgtccacaggtgagtctgagagcaatgcttccaatggtagaaacatagacaatgcagtgtagtccagtcaatattgaagtttgatgaaacagt

SEQ ID NO: 29615 - DNA, 431 bp, Glycine max
  Clone ID: LIB3051-002-Q1-E1-D8
atgaacttgactcccaaaatgatactgatatttgtacataatgatccaattgatattgaggttctaattatttggtactatttatcttctgtgtatggcccaaggagtgtcatcacagttgtcggcatgttgaagtgaaatatggtgattttgctacaggcgtacactttactggcggttctttcagtggaatgtactgtttctattgagacatatcactggtttgaggcatcccttccatgcttagatgcttaaaagcaacccaggagaaggcaattccactggatgtgtttcgctgtgttcttgaagcgaattcatttcatggtcgtgcatcttgggcctgcaatttgtatggggtttaagtcatcatttttgtggtagggttctgtgccagtgttgtttcttctgattaaacatgctgttcctgggct

SEQ ID NO: 29616 - DNA, 308 bp, Glycine max
  Clone ID: LIB3051-002-Q1-E1-E1
aattgctactctcaacaacctaaaccccaacctattaagtatcgtggtgtggaccatttgtctgatatgctggttcactacaatcagacttcggatatattgtactatgaagtacttgacatccctctgccagaattacaaggattgaaaactctgaaagttgcatttcaccatgcaaccaaggatgaagtggttattcataccatcagactcccaaagcagagcactgtgggagatgtccttgatgatctgaaaacacaggtggaattgtctgatcctgaagccgagcttaggttgcctgaagtttt

SEQ ID NO: 29617 - DNA, 428 bp, Glycine max
  Clone ID: LIB3051-002-Q1-E1-E11
agtttattcatctaccgtcgggagggaggggatgaccacggcgccccgtgcgcccggcctcctcgtcctcgcgacaaacacaaaccccggcgcttcgtgcgccaaggaactcaaatctgttaagtgcgactcccgggggcccggagacggtgtcccgcgggagtcgtcacgacacaacatttacatacaatgactctcggcaacggatatctcggctcttgcatcgatgaagaacgtagcgaaatgcgatacttggtgtgaattgcagaatcccgtgaaccatcgagtctttgaacgcaagttgcgcccgaagccattaggccgagggcacgcctgcctgggtgtcacacatcgtttccccaacgcaaacatgtaacaatgttgctgccccgggtgtatgctgaactcccgcgagcaaccgcctcgtg

SEQ ID NO: 29618 - DNA, 251 bp, Glycine max
  Clone ID: LIB3051-002-Q1-E1-E7
accacgcgtccggtggaatacccaataccccaaatcactcttacagcaacagacaatgacagtgaacaatatctggtgacatttccacggactaattcccttactcagcttttggtaatggattacttgggtccaatatcagatacattatctgatgccacatacaattcaccctttgattttcacattaacactgccaatggtgtaatacacacgttcgtagaagcagagccggttgaaatcccttaagg

SEQ ID NO: 29619 - DNA, 445 bp, Glycine max
  Clone ID: LIB3051-002-Q1-E1-E8
ggtttttgaacttgtattgatctcattaattatgatttcaattggaataagttagctcacctaccatagggatgctgctaggaattgatatttgttgtatcttgatgcactgttgcatgcctatttctcctaaatgtcatgttatttcagttaacctatagacacatggatagatttacaatgcatgttttttgtatctttgttctttgatggaaagaaatttaacatgattgcaattgaaacatggtatataataaataaaatttccattggctcaaactcacaggaagtacaataccatgtactgaaatgctctgatattgtttcctgtagaagcagtttgtactgtcaccagtctttgttgctgcatatttggtacttatgatgtctatctaatgcttgcaaacctgcagaaagaacaagtcaaggttatcagcttgaattt

SEQ ID NO: 29620 - DNA, 343 bp, Glycine max
  Clone ID: LIB3051-002-Q1-E1-F12
atatttgcaggccgttgagtgaagatgaaacgaggctgcacacgccggttgtgatttcgtgtaacgaagatagaagagaggttttagctgttcagaatatcgccaacaaacagatcgatagaaccttcgcatttgacaaggttttatccagcttcagatacctgaaaagagaagagcgagatggcgtcggtggtgaagaacgaactcaaatccgtcagagaaaagggtttcggcgctttcctcagagagctcaaggatggaggctacctgagatgccttccggatggaaatctctttgttagaggaactatcgataggtacaagaaagcatgtgctgcctcac

SEQ ID NO: 29621 - DNA, 334 bp, Glycine max
  Clone ID: LIB3051-002-Q1-E1-F3
gggaatccttatcgtggactggaatattgggggccttttccataatccctaggcaccactttttgcagcaccaaatcgggatgattggtgggaaacgaaacattaggtggaattgttggtgggtagctctaaggtggacaatttggcaccataggaataagatcatcttctcgaataaatcattcaacgctactaagctgatggattatgcactgtttttgctatggacttgggttcaagcaatcgggaaagacttttcaatgcactttaactattggtctaccaaactaacaataagtttttccgtacattaagagggctcactaactgtggg

SEQ ID NO: 29622 - DNA, 442 bp, Glycine max
  Clone ID: LIB3051-002-Q1-E1-F5
aacgctcagaagctctcttctctctctaaccacacatcgccggaagctgtttaccggcgcagtggctggccggccatgggtggcggcgccgccgcgtcggaaaaagaaactcctccctttttttaaaaaacaacatgttttgattcccttttttcccctagttccaaaaccaacggtaattttttgaaaaccaacactgataaagccaaaatcaacccttgaaccttagaaaaaaggtgaactacctttgttcttaggttatcgtttaagcttcagaaaacggttacagcttgggttgtgtgggtgtgggtgtttgacgcagtgcttgtggttggtggtgtttggtgtgggcttgggcgttggtggtggttttgatgtaggttttaggccgcgttagtgagtgggttaccgtgtttgccgtgtccgtggttcacggaggaag

SEQ ID NO: 29623 - DNA, 379 bp, Glycine max
  unsure (1)..(379): unsure at all n locations
  Clone ID: LIB3051-002-Q1-E1-F6
cccacgcgtccgcccacgcgtccggggttcatgaggccaatcgcgttttctattaaggagtcttacgttgaagacaacattgatttcgacgatgtggagaacaaccaggaggaggaggttacaatgaggaaacctgccaggccgttttacaacgcgttcgagataatatcgtccttgtcgcacggctttgatcttaggagtttgtttgagacgaggaagcggtcgccgtcgatgttcatatgcaagttttcggcttcggcggtgttggcgaaggtggaggcggtggcgaagaagctgaactttagggtgacggggaagaaggagtttgtggtgaggatgcangggacggangaagggaagaaggggaagctggcgatga

SEQ ID NO: 29624 - DNA, 448 bp, Glycine max
  Clone ID: LIB3051-002-Q1-E1-F8
gacaaaagttagacacatatacttttgtcattttactttttgtcttcctggtctctccggacatgtgtgatgtattttctgcaggtcgtaatcttgtgaaattggttgtgaggaacgcgtggttatccgtggatggtttgtgtttgatgccaacgctgacatatttgacccttgagtttgtgagactagatgatgaggacttaagcaggattaatgcctgtttccctaacttgacacaactcaatcttattggggttggtggactaaaggagcctaagattaatctcttacacctcaccacttgtcaatggtcagtctcaaatgctccactttctttgattatatgtgcaccttgccttgttgattttgatctcagatgcatcaaaccaaggttggttgtccttgaagccccttccctgtccaattttagtctatcccttgagaatac

SEQ ID NO: 29625 - DNA, 350 bp, Glycine max
  Clone ID: LIB3051-002-Q1-E1-G11
tattttggtgaagagaagactgagttagtaaacacgctcgctcggtcttcttttccaatggcgatttccgatgagcctgaaactgtagccactgctctcaaccactcttccctgcgccgccgtcccaccgccgctggcctcttcaattcgcccgagacgaccaccgacagttccggtgatgacttggccaaggattccggttccgacgactccatcagcagcgacgccgccaattcgcaaccgcaacaaaaacaagacactgatttctccgtcctcaaattcgcctaccgtccttccgtccccgctcatcgcaaagtgaagagtcacgcgggcctcttcaacctctgtat

SEQ ID NO: 29626 - DNA, 416 bp, Glycine max
  unsure (1)..(416): unsure at all n locations
  Clone ID: LIB3051-002-Q1-E1-G8
gatctataaatcattctctctctctctctctctctcttacttacaaagtaaagagtagagtttgttctgtgaagaactgagggaggttcaggtccatgatattttgaaatctctctgtagtaggaagaccatgggacgagcttcatcattacttataatttttttggttcttggttcttcctttgccacctataatgtggtaacgatgataaggcactacggatcttcagaaggtgtggctgttaatgatggtgcattgttttttgaccctattactgagatgcctgatcatgtaaagaatcggaagacatctaaagtgccctttcatgtcgcgttaacggcgacggatgctccatataacaaatggcagtgccgcgtcatgtattactggtataaacaacanaagaagttacctg

SEQ ID NO: 29627 - DNA, 259 bp, Glycine max
  Clone ID: LIB3051-002-Q1-E1-G9
ctgcaagaagatgaagttgaggatcacaacggccaatggctaaattgctgtcatgatagctgcacatcacctgattctcctaattttgcatgccttaggcgacatgttagttagggagcactagagaccatttgtggacagatctccaaaactgagcagtttatgagctgtaaccatcggtgcccgtagatgcactgcagctgataatgacgcgaccaactcaactatctgaattgggtattggatcacttgtccatga

SEQ ID NO: 29628 - DNA, 426 bp, Glycine max
  unsure (1)..(426): unsure at all n locations
  Clone ID: LIB3051-002-Q1-E1-H11
ggaaaattgtaaactaacctttgtcaattgtccattatctgcaaagttttaaaaatcggtgtttaattggacaaactgtgaacctgttcgatcatatttcaactcctgttggatcatcaatttaactagtttcaaactatgatccaaacccctgttcaatctctgcttcagtttttgaaacattggattgttgtgcattgtgataagaaaccaagccaagagtaaggcagaatgtagtttgcggttaaagtaataagatagttggaaacttggatggatangaatgatctatataggtctctgagagaaaattttaggagacttgatcggttttggttctacgtaaaagaagtctcttgcangaaaatgcaatttgcatcccaaagggaacaaccaatttcaaaaaactcctgctgcattgatact

SEQ ID NO: 29629 - DNA, 304 bp, Glycine max
  Clone ID: LIB3051-002-Q1-E1-H3
gttctataagttcacggtcagttctgaaaaatgggttccaaggttttgcttgttgtagttatgttcatagcggctatacttctgatctctgctgaggttgcacccaatgaatacgaaaattttaacaaaaaagatgggaagcatgctccaaatgggttatatgatagcaaatggggttacggtggttggggtggtccttggtatggcggctggggtggcccttattatggtggcggctggggtggcccttattatggcggtggttggggcggtccctggcgtggtggtggccgtggtggctggg

SEQ ID NO: 29630 - DNA, 449 bp, Glycine max
  Clone ID: LIB3051-002-Q1-E1-H5
cccacgcgtccgattttttttctctcacacactcaaccaaagacgaaggaagaagaagaattacaaagtaccaccaaacaggctgcgacgacgtcgttctttgcaacttccagttcttgttcttgatgaatatgacaccagtttgcccctttgtcaaagctgctcgccccgatgataacaatgcctctaagaaatctggcgaaaactctatgaaacatcaggctgagtctgagagtaaggtgaagaaagaggttaatgactcagctagtacctcaccaaagtgcccttttggatatgattcacagtcgtttaagattggtcctcttagctgtacggtgtgccaagcacttttatttgacaccagcaaatgtgtaccttgttctcatgttttctgcaaagcatgcatatcgcgctttaaggactgcccgttatgtggggctgatattgtg

SEQ ID NO: 29631 - DNA, 442 bp, Glycine max
  Clone ID: LIB3051-002-Q1-E1-H7
aggacgcgtgggagaagattattcgttaattgattttgtctattcgatttcaaaagctttgttctttattgaaaaatctatgactcgctatttttctgaaatatatgttttaaagcattgaagaaattctagaacgatatgttaatctttcggagggtgaacacggaaggtaagagcttgtgtatttttaacttctgatacctgatactagttaatcagtttatcctaatgttgccacctttgatttatcgaccatgtgggcttaatttaaactcttgttgccgtgaaactctaaaagatgcataataaagagcaaaatcaaaagttgcttagtaagttgaaagatgaagctggtcaaatatgtcaagcccctagctcaatgacttcagattcccaaattgaggatcttcgaagagaaattttcacttgcaagtctcaattg

SEQ ID NO: 29632 - DNA, 319 bp, Glycine max
  Clone ID: LIB3051-002-Q1-E1-H9
gaggtcaatggaccagtaccctacaccaatcctgaagcataggctgatgctcaccgatagtcagcttcatgttctgtgtaataccgttaatggtgattccatccgctaacacttgacgcatcattggatatccatagaactcggattgcaatctaagcaccttttaatttcatttcataaccgtcgcactggcaggtataccaatcataccacatgtgactatcattcctccatgcttagtacatagatatcacagctaactaatagatccttctcaaggaaaaggagctgctcttagcataggtagcacagctcacat

SEQ ID NO: 29633 - DNA, 354 bp, Glycine max
  Clone ID: LIB3051-003-Q1-E1-A12
aatgactacgaaaattttaacacaacatatgggaagcatgctccaaatgggttatatgatagcaaatggggttacggtggttgcggtggtccttggtatggcggctggggtggaccttattatggtggcggctggggtggcccttattatggcggtggttggggcggtccctggcgtggtggtggcggtggtggctggtgatgttggcgtcgacctaatggcaaccctcacacctaataataaaacttgctaaagcttctttactggtttaggttttcgcaataaatagaacttcatgagaagtgtagttgtaataaaagtggaagtctctcttctcttgtgatatagaggaat

SEQ ID NO: 29634 - DNA, 103 bp, Glycine max
  Clone ID: LIB3051-003-Q1-E1-A4
gacccttctgccctccccagccattaactgaaaaataataaacaaagaaaaaaaaaaaaaaaaaaaaaaaaagaaaaaaataaaaaaaaaaaagaaagcaaaa

SEQ ID NO: 29635 - DNA, 379 bp, Glycine max
  Clone ID: LIB3051-003-Q1-E1-A5
ggctaccttaattccacatgctaaaattttgcacccctttattatataaccgtttcattctctatagcatctcaaagggtgtccaaagaaggaatcacacaagagaaattttgggtggatcttggtaatttaaatttggtccaaaaatagtaagaaaaaaaaaccatagttcatttaattttcatgtccttgctaacggtggcgcaccaaagggggtcaggtgagtttatccggttcacggaaagtcatggcggtggtggcgatgacgtcagtggtgacggtgaacatggttgtggacatgatgatggaagtggtgctggaggttcactagggttgaattttaacaaagtgatgcaacaaggtgaggtgacaatgcaag

SEQ ID NO: 29636 - DNA, 446 bp, Glycine max
  unsure (1)..(446): unsure at all n locations
  Clone ID: LIB3051-003-Q1-E1-A8
attttcatccatgcgtgaacgacgcagttattgtagggttccggtcacgggagggaccgattacacggccggtgaagaacgccgacaaagccggcacctgaattctggagttggttgttttttgtttcgtttcgtttcttttctctcttcaaggaagagaaaaattgtgcataagaaaaaaacataaacaagaaggaagggggtagtgatcacgtgcggaggggtatacgataagcgaaagagaggtatacctttacagttatgtgtttgacatttgattaattagttcttaggtgactataagcaattacgcataataatatatagacgatcttgccctaaggggaagaaggggcttttaattattgagcttttgtagagagggttgttttggaaatttcacttatcagttggattgctttggtccaacgtcaaaattggngtgc

SEQ ID NO: 29637 - DNA, 440 bp, Glycine max
  Clone ID: LIB3051-003-Q1-E1-B11
gtcaagctctaattacgggtctctgtcagttctacggagtacctgtcacctccagcaagggcatcaggccccctactaatcgagctttcatcaagaagtactgcgcccccaggcaggcgcagggcgaaacaccacagcagcattgggatggccggtagcgggcaatagacacaccgccaccacctctagagttcacctcagctcatccgcaaaaaggttagagcgttgcctacgacacatggccgaccagcaggcgaccaagtccaaagccaaaggtaagcaaagtactaggtccgtgacctacaagccatcatgcgtccagctcaagacgttaaagaagcgctactaggaggcaacctagtaacttttaaatttctgcttactattttatcaccttttgtttctcaagtcatagtaggacacacctagttgctcatgat

SEQ ID NO: 29638 - DNA, 442 bp, Glycine max
  Clone ID: LIB3051-003-Q1-E1-B7
tttcttttcaattacaataccccaatcccagaaacttatgttcatgaccatcctcaaggtcccaataacatttacttgaagacaattttgagttgaccttacagcctagttccacctacaaacacccttgatccttcaaagcctctcatagttccaatactggcaacaataatactcttgggcatctaaactatctccattcttttttccccctttcgttgcagtggatttgcgaggttttaaagaaattaaatgcgtttttatgtgctaaagagctaggtaattatagaattcatctcacacatacttctttttactaccttttatcgtttagattttatttttgaattatccttgtttaatggagtaatttaattcgttgacgggttgtggaatttgtgtagaagattttcctataagaatttttaattcgctaaagaaa

SEQ ID NO: 29639 - DNA, 406 bp, Glycine max
  Clone ID: LIB3051-003-Q1-E1-B8
ggcgaacccaagcagcaacaggggatctttgccatccacggttcatgcgaattgcaaaaggacaaaaccataaaagaaaaattcgcaaaagttggtatcttcattcttccttctttaaacgcaacgaagtttctttccactttcaaaattcccaacccctcctttgttcgctctgtacatctgggtcatttaatccccgaatttcttcgcatcttgcctcatattccatccaattctcgctgtttcaacgatcacggtgttgatccttgatgggtttttctcgtcgatcataaacatacccgggtttgtgaaaaaggtttttcctttccacgcgtcgcttcacttgtcatcgatcctgagttccatagcttgaaacgctgtgggaaggtgaactttgtttgcccgt

SEQ ID NO: 29640 - DNA, 429 bp, Glycine max
  unsure (1)..(429): unsure at all n locations
  Clone ID: LIB3051-003-Q1-E1-B9
ctgctgcagaagaattcaccagattcagtggagacgcactttctctcttttgaattatatatgagaaaacagaggattttgcttgcattccaggctgtgaagcagttactgaggttggatgctgaacaccctgattctcatcgttgcttgattaaattcttcaataaagtgggatccatgaatgctcctgtgaccgacagtgagaaactcatttgtaatgtcttagaagctgagcgccaaactattagtcagctgcatgggaaatctctgtttgagacaaataactctttcctagaaaaacatgaagattctttgacacacagagctgcttttggagaaatgttgtatattttggatcccagcagaaggtccgaggctgtctagttgattgaggggtcagcanataatcttgtgccaagaaatggagcg

SEQ ID NO: 29641 - DNA, 414 bp, Glycine max
  Clone ID: LIB3051-003-Q1-E1-C10
aaagcagcaattatacattttggtaaaaagtggtataggcgcatctcattcatttggaggcacaccatgcagatcatcggaagttttcagaagctatggaatattgctggtgtacacttaaatcttgatattcccaaatggatgcatatccttcgtttggacaggcttaacaccaatgcagtgcaatggcttaacaagaaaggaaagttatttgaacccacatatctttatactatggaaaaggggtatttcttgttacctgaaagtgctaaatctcatcataatatacgtactgtgaatgttagcatatcagcttggcactcctgctttggaaacaggtggcagcaactactcataaacagatttgtcggatatgatacgattttaatcaatagtttattgagttctcctggt

SEQ ID NO: 29642 - DNA, 119 bp, Glycine max
  Clone ID: LIB3051-003-Q1-E1-D1
gctagaaatgctatctggcagcattgaatctaaagaactgtcactgtcatccctggttaaactagcaaaattgcagtccaataatgtgattattgcaacatctggaggtgtgcctcttg

SEQ ID NO: 29643 - DNA, 414 bp, Glycine max
  Clone ID: LIB3051-003-Q1-E1-D10
aaaaaagtaaattttaataaaaagatgtgtagaagagataaagtaggatttatttactatcctctaacaaaacaattgatttagattggattagacttaaatttagaatcaaactaattgatgttattgaataagatgattttgtccttcaaaaccatttcatttcaatctatgaacactcctatgagtggctattcacatatagtcgatgacaatatgtcacatcagacacaacttgtgcaatgtgtacagtataggcctctggtgtgtgcattaggtgtcttttatgttatcattttgtcttttatttttctctgctctcccttcgtatgtatgtgtgtgcgtgtgtgtgaaaaacctactagtctcttttgataattttttactttgtcaattatgctaattcgatttgag

SEQ ID NO: 29644 - DNA, 436 bp, Glycine max
  Clone ID: LIB3051-003-Q1-E1-D11
ggagactagtttaaaaaagttacagatggagtttatcaatcagatgatcatttccacccaaaaccaatgaagtgctctgctacaagcaaacaagaatagatttacaagacaaagaccattggaaaagagaacaataggagttccaaacttttggaagtcatcaatggcaaacataatgcctaatcactagctaacaataagaaattgtaattatcattgaccatacattctaacatgagatgattatgttagaatatatgttagaagtcaacaatggtctttgataaatatagatattatttaagcataaatcattgtctttctttgcatttttttttctccagggaaaagttttaggattaaggagactagtttaaaaaagttacagatggggtttatcaatcagatgatcatttccacccacaagccaatgaag

SEQ ID NO: 29645 - DNA, 165 bp, Glycine max
  Clone ID: LIB3051-003-Q1-E1-D2
cacacacgtccgctacgtttactcttttgagttttacgtgggtagacctactgtagagaaattttgatgattggatatattgtggcgaaagccatcacaattggaggctttgctctggaggtcaccgtgttattttgcaaacccgcaaatgtttgggaacgcttt

SEQ ID NO: 29646 - DNA, 400 bp, Glycine max
  Clone ID: LIB3051-003-Q1-E1-D8
accacgcgtccgggactataaagagtttaaaggctaagtaggaaatcctaacactacagggtgtcaagaattgaggcaagaacatttatgatactgtacagatacggtagagacacactattcaaagatgaaaaaaaaaaaaaaagggcgggcatgctttatttctaaaaggaatagtgtttctctgggagttatgatggaatttcttcttaacttgcaagtgaagcaatattgacattggggtacatgacaggtcagaagaaagatgaagcaacttattgtgttttgtacacagatgagttgtgaacaacattgtggtgcgtaagaagcatatagtttaagtggttgagtacagggtatgagttatggtaaacccttagttcagttttatggataaaaa

SEQ ID NO: 29647 - DNA, 411 bp, Glycine max
  Clone ID: LIB3051-003-Q1-E1-E11
cagccatgttcttaaccagaagcgcgctttttcgcttttcaaagtctctcccttatgccccttcactctcccttaaaccctccatggtcaccttctcctctactcccaattcaggctggagaaatgcagcagaaggaggaagaagagacggaagaaccaattggacgtatgattctgccgaggcaagacgcgaggcagatgaaatgtctgagagtgccaaagaaacgatgaatgaaggctatgacagggccaaggatcaagcgcgggaagccaaagacagaacaaaggatttcgcacacgacgcaaaggagaagacgaaggacgctgcggggtcgatgagggacagggcggagagtgcggcggagaagacgaaagagtatgcttacgacacaaaagagagtgccaaggacg

SEQ ID NO: 29648 - DNA, 243 bp, Glycine max
  Clone ID: LIB3051-003-Q1-E1-E3
gttttctttctccttttcacgggctttctcttcttttcgtctggcttcatcatcatctctctatctgcaccccttttgagaacttcaacttgttacttagttatgcgactctcccctttctagcttctgtgttcttcttcttcggttctctcttcatggcgtgctgcttaagtgccaggatcaaatctgagagacctccacgcaatggtttgagttcagatgatggtaacatggaagaagatg

SEQ ID NO: 29649 - DNA, 333 bp, Glycine max
  Clone ID: LIB3051-003-Q1-E1-E9
ggaaagtgggtcatcatcttcttggggaagtaaagggagcgtgttgagagtgagagaccctttgttggtgaataaaaatggttgtggtatctatccccttaaaggtgctttgtagcatttgcatgaacatttaatacctttgtatgattaagtaaaagtacagacttggtatgcaatcaaagagactactgtttgtactgctaaaacatgaatctgttgaaccaagaaaaaaattgaagtcaaaagcttaaaaaaaaaaaaaaaaaaaaaaaaacacaactcacaaacacacaaaaatctcccgaagcaacacagacaagaaacccaaacgca

SEQ ID NO: 29650 - DNA, 296 bp, Glycine max
  Clone ID: LIB3051-003-Q1-E1-F1
ggcaaagaaagaagggttgtggaacttatggattcctattgatagtgctgtgagagcaagaaatcttctctttgatgggagcaataattatcgctctagtgatgcggatgacttgttattgggagctggtctcacaaatcttgggtatggatacctttgtgagatcatgggtcattctctttgggctccacaagtgtttaattgtggtgcacctgacacagggtaatatggaggtattactgcgctatggtagtgaaggacaagtacaagaatggctaattcctttgcttgatggg

SEQ ID NO: 29651 - DNA, 439 bp, Glycine max
  Clone ID: LIB3051-003-Q1-E1-F12
gcggaatcaaatattcctgaaaacaacgcattcctttcactgccccttcccaattcccttccctgattgtcaattggatcttcatgagttcaacaaccactggagcatacttcgtttcctgtgttgcgggaaacaagaacaacgatctcttctgctgggttttgctctgcttgctgccaaaatttttgggaactccatttgccttcatcaactttctcttgattcaggccattgacaggagtccatcggcggtgggagttttgggaaacttcggggtggttaacctatagtctttattagtttggtcatcatcagcagcagcatatttagatcccttattgttgagtggtgtgagaaatggtgtcctctcagttttctggtttgactatggctggctacaaacctgcacagactcagttactctttcctgcaaaccttc

SEQ ID NO: 29652 - DNA, 212 bp, Glycine max
  Clone ID: LIB3051-003-Q1-E1-F4
aagacgcgtgggtgcagttgtgaacaatattgtccgtcaactgttgcgtgcttgcctctcaaaatgttgtcagatatagaacatgttatccccatcagtggtgcaaagctaacaatcaactgctaaggttcctggtcatcaagagcagttacgcgtattcacagattaggtcgttaaaataatcgaagcaaactggttttgaattctttaaa

SEQ ID NO: 29653 - DNA, 293 bp, Glycine max
  Clone ID: LIB3051-003-Q1-E1-F5
accacgcgtccgcccacgcgtccgcccacgcgtccgctcttttcttctcctcctcctccctcaccaagttaaccaaagcaatgaagagactaaaacacgaggattcacaccaccaggacaactcctccgaacaacagcagggaaagtgtaggttcccattaatagccattatctctcttttctctctcttcgtcggcctcctctttgctctcacgcggagcgcctctctccgccacacgcgtcgtcgacgtgccgatctcgaccggcactcctcctcccacctccagcttcgg

SEQ ID NO: 29654 - DNA, 116 bp, Glycine max
  Clone ID: LIB3051-003-Q1-E1-G3
ggaaaggacttaaatcactagaggctgttgacccacatgttaggatgattgctgaacgacaacatattgattaccaattcagtggcctgcaggatgatggcggtgcaaatgataat

SEQ ID NO: 29655 - DNA, 99 bp, Glycine max
  Clone ID: LIB3051-003-Q1-E1-H1
cacacgcgtccggttacgccactgactcattcagatactccatgatagtcaccactcgaattatgttcactgatgatcccaaagcacaatccgttgatc

SEQ ID NO: 29656 - DNA, 342 bp, Glycine max
  unsure (1)..(342): unsure at all n locations
  Clone ID: LIB3051-003-Q1-E1-H10
ggagctgaagaaaaagttgccagagtatttgaagccccattatcatttttgaagacattaagtaatgccactttgcagaagtcctgttcttccgatgatatcatgggagatgttcagattttgggtgcaaatatgtcagctcttggactatcacagaaacctatttatgttcaagctgtgcacgaggcccctgaaagaagtggggtcaatggcctcgacacccttgaaactattcctgacgcagttccaactgtgttcactgaaccaccaattgaagatcaactagcttggcatacactttggcctgaatcacacanactctatggtcatggaaatgaacta

SEQ ID NO: 29657 - DNA, 437 bp, Glycine max
  unsure (1)..(437): unsure at all n locations
  Clone ID: LIB3051-003-Q1-E1-H11
ctttttgagcaggctaatgatccttgcgaaccctccctcagtacagaatttcgaacgcaaactcaaacggagtttttactggaagcatttcggcttcaactgggagcatctgaaactggacagaagctaatggcactgcaaactgaaattgggaagagccattatatttatagggatgagttaagcgagactacactgaccacaagacggtctttcgactctattaggaacaacttcaaagaaatccagcgaaatctggagatatggttggccagaattattggcgatcttgaggggattcttgcgagggaaggtgcatctcgtgtaagagaatattacatttccaaataacctttttgtcaatagaatatgagagactggtggtagctagctgtangaaaagcctcacctctcaagctaacaagttatctcttgtg

SEQ ID NO: 29658 - DNA, 441 bp, Glycine max
  Clone ID: LIB3051-003-Q1-E1-H12
gcaacagcaagcacaaacatcaaacagagtcattgttattgtaacgtaaaatcacatggagaaggaagctttgaaggaccaaattgaaactccaaagcactgaacgaactcaattgaaaccctagcacagagtcatacatagatagtagcgtggatagcagtgtgtgatgcggtgatcgcgatcacgatgaaaaatgcaaacggcttgatttcgacgacgtcgtctaatacggcacagtcacaatccactggcctcaagacgtatttcaagactcacgaaggccggtacaagctttattacgataagacttacccttccactcttcttcactacgctcatggcaaaaccgtttctcaggttactctggcacatctcaaggacaagccggtgccttcgacgccgactgggcagtcttcaactttcagtgccaccagtggggt

SEQ ID NO: 29659 - DNA, 238 bp, Glycine max
  Clone ID: LIB3051-004-Q1-E1-A1
accacgcgtccgcctctccccatttgcgtatcctttcattagaatatccctcccttcaaatatttttgaaatcctacggtttcacattccggatcccaatccgcggttctagctgcacttgtatttcatattttctcaatttaatcagattattatgtatctcgatttttttttgggggttacgatgccgccatttttgtcgacctcgaaagccctttgctccctaacatcgcgcaaa

SEQ ID NO: 29660 - DNA, 442 bp, Glycine max
  Clone ID: LIB3051-004-Q1-E1-A10
aaccactcggaaatttctctgcgtctctcctattttttctgaatctaacattaacaacaagaatggcatccaacaggggtcaaggtggaattcagcagctgttggctgctgaacaagaggcacaacggattgtgaatgctgcgaaaaatgaaaaattggctaggttgaagcaagccaaggaagaggctgaaaaggagattgctcaataccgagctcaactagaggctgagtttcaaaagaaagtgtcagacagtactggagattctggagctaatgtcaagcggcttgagcaagagactgatgaaaaaatccagcacctgaaaacggaggctgcaagaatatcggatgatgttgttgccatgcttctcaagcatgtaacaagtgtgaaaaattaagaccctttgatatatattggtgctgaggacttctaaattatgatgat

SEQ ID NO: 29661 - DNA, 440 bp, Glycine max
  Clone ID: LIB3051-004-Q1-E1-A11
atcttgatcaatcagatcctggaacaacagacagctcagaaggtaacaatgatgacgttggaggagggcctcctgtgcgaggtgtttggcgaaaagggggaggtcataaactttttccctagttttgcttcaccgtgactttgaaaacgtgaagcatcaaacgcagttgaacttgctggctaaagccatggttgaactgcaatataaacatgaatttggttttcggcttagggagtggtattggattatatcggatttaagttagatttaaagtatatcaagctgggatgtgactttgacgttttgttgaaggccaaacgccattgcctgaatgggcttatattttatttttggtttggggtatacttcgattttgatcaaagacagaagtgttcatatgccaagtgtactgtttgctttttacgaaagtggcactgttt

SEQ ID NO: 29662 - DNA, 419 bp, Glycine max
  Clone ID: LIB3051-004-Q1-E1-A2
aaacgatcaacattcccaacgaggtccttcttttctttgtgttggtgaggtcccatgttggcacgcagtctctgcacgtgtcacatggtgttctccgtcgaccggatcactcccaccttcgtgtctgtgttttctggcaacgccagagtgttggctttccgcttccaattgcggaggaacacacacctcgtcaccgcccaactttccaactctttctccttcaatttcggtttggattctcagagtttgaattccattcagtcccatgctccatcacggttgccatggactggtccagttccaggtgatattgctgaagtggaggcatattgtaggatctttaggagttctgagaggcttcattctgcgttaatggatgccttgtgttaccctctcactggtgaatgcaatgtttccta

SEQ ID NO: 29663 - DNA, 447 bp, Glycine max
  Clone ID: LIB3051-004-Q1-E1-A4
ttatttatcaaaaaccttctcttttctcaattgggtttccatctttgatttgatttcattgccatggctccaaaggatcccaagcaagttgctgatgctgcttcttctggtggtgggggtggcttttttgcttctattgcttccagcttgtccaatttcggtagtgccatgtccaaatccgttaatggtttggtgggctacgacgggctggaggttgttaatccagatggaggaactgaagatgctgaagaggaagcaagaaagggacgatggaaacaagaggagcgagatagttactggaaaatgatgcaaaagtatgttggctctgatatcacatcaatggtgacacttccagttatcatttttgaaccaatgacaatgcttcagaaaatggctgagcttatggagtactcttacctgttagatatggcggacaacactgatgat

SEQ ID NO: 29664 - DNA, 424 bp, Glycine max
  Clone ID: LIB3051-004-Q1-E1-B1
aaaaaatagctgaaactctaaacctcccattgctactctcagtctgcatcatcttcacaaccctctctcttacaacctctcgcacgatcacaaccccatcacacaccaatgttctcgatgtctcttcttctctccaccaagcccaccaaatcctctccttcaacccacaacttctagaagagcaatcttcagaaacagaaactcccacttcaccatcttcttcttcttcttcattctctctccaactccacccaagagaaaccctcctcaacgagcaacaccccaactacaaaaccctagttctctcccgactcgcccgcgacacagcccgagttaactctctcaacaccaaactccagcttgccctctccagcctcaaccggtcggatctttacccgaccgaaacggaactgctccgacccga

SEQ ID NO: 29665 - DNA, 370 bp, Glycine max
  Clone ID: LIB3051-004-Q1-E1-B3
gaagaggtgcctcttactccgttacgagttcgagccctcctctcgctcttcgcttctcttctcttcgcttcatagcaaagcaataatcctattagaatatggaagagagcttcgttttccagtggagcgttatcagatctctcttgtccatccttcagtggtgggccttcaatgtcactgtcatcatcgtcaacaagtggatctttcagagattggatttcaagtttcccttatcagtttcctgtgtccactttatctgttcatccattggagcatatgtggtaattaagttgctgaagcttaaaccactgagaactgttgaccctgaagatcgctggagaagaatctttccaatgtcatttgtgttctg

SEQ ID NO: 29666 - DNA, 299 bp, Glycine max
  Clone ID: LIB3051-004-Q1-E1-B4
ggaatagcgctaatatgccatgaggccgagatgcatatgaatcaatcgtggtgacgaagaccttccttactcgaattcaaagggtgactctttacacgctttccagccctatctgaatgtatgaaaaactacctataggtcttagtggacgagaacctgggagaaagcattgaatagatattacaccagttgatgttgaagtacgctggaacgtttacctaacgacactgggtaaatctcggtgatgagctgaccttagcgaatatagatattcaataccaaactggtctgaatgaagt

SEQ ID NO: 29667 - DNA, 436 bp, Glycine max
  Clone ID: LIB3051-004-Q1-E1-B7
cgtaactgtacgcgatacactcctagaaatctgtctctttttcgggtctagtgaggattttgttttttcccatcattttcaatgcttttcaaattctactttcctaattccgaaacatttttttatttgtgaattgcagaatcaaaatttgatcaaagagaatgggaaaaacatcaagcagagagtggacacggatctacctcatctacggaatggatcagtggcaaaccttcgtcttccttctatgtcaagcggttctcttctcagttctctcaatactttaccttctctacttcaatgacatctctcacactttccaaagccttctctccatcgcctccgtgccctgcagcgccgcccgcttcgccgccgggtttatgggctccgtcacggcgctctccgcgctgtgcctcttctacgcggcggcgaatttctt

SEQ ID NO: 29668 - DNA, 410 bp, Glycine max
  Clone ID: LIB3051-004-Q1-E1-C10
ggaatagcgctaagaggccatggggccgggaggcatagtaatcaatcgtggtgacgaatagcttccttacgcgaattcaaagggtgactctttactcgctttccagccctacctgaatgtaggaaaaactacctataggtcttagtggacgaaaacctgggagaaagcaatgattagatattagaccagttgatgttgaagtaggcgggaaggcttccctatcgccaatgggtatatctcggtgatgacctgaacttaacgaaaatagaaattcaataccaaactggtctgaatgaagtccctattatattcaagttgagttggaacttctctcgcttaaggtcgcattactaattcttttttttactccagactttccgttacacgaataaaaattctctttggtttgt

SEQ ID NO: 29669 - DNA, 402 bp, Glycine max
  Clone ID: LIB3051-004-Q1-E1-C4
atctctctctcaggcgttctactgtggaaaaaaggtgattttgaagatgaactgttatggtcttcagcagaacgcctttgcagcctgtgaagagatgagaggctctgtgaatttcgttgatcagaaggagcctgtcatttgccctaagccgcgccgagttggggttgcatctaacatgcctacgaggcatttcagatggcatttcaatccacaggctgagggttctgacacaaaagctggggcagaactattagagataatgtttaagaaggagagtcatgggcaggaatatgcaaatcaggtagcttcatctcctccatttttttgcgggtctcctccagtccgggctgcaaatcccttggtccaggatgctcattttggtgatgaaaaacattgtccgtc

SEQ ID NO: 29670 - DNA, 403 bp, Glycine max
  Clone ID: LIB3051-004-Q1-E1-C6
accacgcgtccgtcataacataaataaatccttgtgttgtggtcatagtcctcaattcaacttttcagctatatctcttgaaagaagaagaagaagaagaagaagaatgagaaatgggatccaacggaacatcttgggctgaccagtgggataacgggcctgacccagtgactgtctccaacgaatcgaagaaaaagaataacgccctcggcaagaccaaggcagtggcttccactggcgtcaagaagttgaaggagggtacctccgttggcttccaatggatcaagaccaagtaccacaaaactacccagaaacattaaactaacctatctttggttccttcatgtacatatttatcatatctatagtctccccttttgattattatgtgtgttttttcaat

SEQ ID NO: 29671 - DNA, 424 bp, Glycine max
  Clone ID: LIB3051-004-Q1-E1-D2
cccacgcgtccgctgagtttgttttttataatctgagagataatagaatagaccgaattcaagattttgattcctacaagttttcatttctctctcatgattatgttccaagcttggttttgccatataaaaattaaggggatcattgctggcctgggatttggggttccaagaagtggtctgcatttctgtttccgactccagcaatgacatctccctcatcacacaaccttttgtgtgttttcaccgttatgctgctattatcgcttgtgttaagtaactagcaagtaggccttggaacctgcaggttggtcgttttctctgggagggaaatcagtgcgtggacaagatggctaaacttgggctgaactctggggtgggttttcagctggttgagtctccccacaggatttgaagcctctct

SEQ ID NO: 29672 - DNA, 399 bp, Glycine max
  Clone ID: LIB3051-004-Q1-E1-D3
cccacgcgtccgcgattccgattccgatcccgatggcttctacagagggtctagtgcccataactagggcctttctggcctcttattacgacaaacacccttttactcctctttctgctcatgtctccacgctttcttctcagattcgttcaatggctaatgattttctcactcagcatcctcctatccaaggagagagcatcttaataaatgaagctgaccagcaacctccgcacaaaatggatgagaacatgtggaagaatcgagagtacattgaagaaacaatttttttacttcagagttctaattggccagaggcgctgaagcagcagtccacagctgacagtgttgaatttgccattacgcttgggaaactgaaagataaacttcatattacat

SEQ ID NO: 29673 - DNA, 232 bp, Glycine max
  Clone ID: LIB3051-004-Q1-E1-D4
cccacgcgtccgatacacttgtactgttctattagttcatactaagttctgaaaatgagttccaaggttttgcttgttctacttatgttcttggccactatacttctgatctcctctgaggttgcacccgatgatgcatacgagaattttgacaaaatagatgggaagcctagtgcagatggggtagatgaaagcaagtattggcgtggcggctatggtggcggctatggtg

SEQ ID NO: 29674 - DNA, 397 bp, Glycine max
  unsure (1)..(397): unsure at all n locations
  Clone ID: LIB3051-004-Q1-E1-D5
agctattccgcttactattgatggagttgagttggatttacgtatgcgtgggtttgaattcttcagtttggtttctgcatacgctatggattccccaaggcctttgcatttgaaagcatctggaaggatcaagtttcagggaaaggttttaaaacctaatggcaatattagcgaacaaaattttgaaatgacaaggcagcatgtgcaaatgttggagaaaggaattgcagatagtctcattggcgaggtttcaatctctggtctcaaactgaatcaactgatgcttgcacctcagttgtctgggttgctgaggctttctcctgngggtatcaagctggatgcctctggtagaactgatgaaagtcttgcagtggagtttgttgggccactacagccc

SEQ ID NO: 29675 - DNA, 444 bp, Glycine max
  Clone ID: LIB3051-004-Q1-E1-D8
cataaataaatccttgtgttgtggtcatagtcctcaattcaacttttcagctatatctcttgaaagaagaagaagaagaagaagaagaaggagaaatgggatccaacggaacatcttgggctgaccagtgggataacgggcctgacccagtgactgtctccaacgaatcgaagaaaaagaataacgccctcggcaagaccaaggcagtggcttccactggcgtcaagaagttgaaggagggtacctccgttggcttccaatggatcaagaccaagtaccacaaaactacccagaaacattaaactaacctatctttggttccttcttgtacatatttataatatctatagtctccccttttgattattatgtgtgttttttcaattcatttattgttcaagtgttatataggtttactttgtactattgagtattgatggatat

SEQ ID NO: 29676 - DNA, 424 bp, Glycine max
  unsure (1)..(424): unsure at all n locations
  Clone ID: LIB3051-004-Q1-E1-E1
accacgcgtccgctggatgatatcatttgtaaagaggggaactgttatgtacttatgtaagatctagtctttgaaaccttatattagtggaatttagaaaatgaattgtctgtctattaacacattctaatatgaattatggaaatttgtttcaagactcaatttttattatgctcccgataatttattgtgtgtactggattcaccttgtttaattcattgtcagttttttttgggttatattctgaggtggtggtgagagcataggttgagttaatgacagtgggatgacgttttgtttttaactatgagtggtacatgaatggatggctgtgtgtaggctcangtangattgttttgtggacaagatgttgggactatttcaagctttgctccttcaaagggtccctcagaannatacact

SEQ ID NO: 29677 - DNA, 381 bp, Glycine max
  Clone ID: LIB3051-004-Q1-E1-E11
aaaaatttaaaattttatgtggtttccatcattttttttctatcaaatatttttttacatttttttttatttttttctttcacacaattaaattcaccttaaccgtgtgtttggtagtgaaaaaaaaaagaaaatttgaaaattttgtataagccccacgtctattgtttttttattttaattcaaatatctcttggataattgttttttctattttttctcttccatctaatcaaattcatcttaaaagatccgttcttaatcttaggttcgggagtcccgaagctggaggctgctgtcccttttcctttatccacttttttttttccattgcgttatttatttgcccgtgtccctcactcagtcactcactcattctct

SEQ ID NO: 29678 - DNA, 393 bp, Glycine max
  Clone ID: LIB3051-004-Q1-E1-E3
cgcatctcggaatcccctttcttcatcgcatagatactttcgctagcccaccaagtaacccttattccaattcaccctcgccactccttagatcgaaatcattttttttcgcccggcacagtgagttaatcttattttcatccactctctaacctgtttcacctttcataactcgattttaattagccactgattgcattattgtttcatcttctgtttccagtggatcgagatcctctcttgtttctctgtttcaatttggattcgaatttgaatttcagttaatctcgttttcactgccagggttgtgttttatttttatttttttgatttgatatttctgcagagttgggtttttttttatataactgataatgggtgatagcagtgttc

SEQ ID NO: 29679 - DNA, 439 bp, Glycine max
  Clone ID: LIB3051-004-Q1-E1-E4
caaagttgatggacaggatctaaatctgagttttgacgaactgggaagttacggcggaagaaaacctcttgcagttgttgacttgttggtgcacgtagttgaatatagtacattttgtcacacgaaagtttctgtgttacaatggacgagctgaaatctgctatggaggagcacatagaccttatggcagatcttgttcagaagctctcttcagatcttcgcgctggctttcgccccgcttacgataactttatcggttttttccatgccattgactggaaggaaccttggctaatgggattattaagattccatgttgtgttgctgcttgtagctatcatctctaggaagaagacaaactttcaaatgttcttgttccttttgacattggctggtgtatattttgcggagagtctgaacagatttttgggtaaaaact

SEQ ID NO: 29680 - DNA, 195 bp, Glycine max
  Clone ID: LIB3051-004-Q1-E1-E7
aatccgagcaaggcctgcttctaatatggatccatatgtaatcacctccatgatcgcatagactaccatcctctggacaccatgagagacaatcatatagtctctagacttggagcactaaacagtgtgttcaatagtcatttgatcgagacatttatacctgcaaggtgatgtctagataagcacttctaagtg

SEQ ID NO: 29681 - DNA, 443 bp, Glycine max
  Clone ID: LIB3051-004-Q1-E1-E8
gtttgtccgtgtacgcaactttttactctcaatttatttcttccaatcccaatgatcccgccgaacagaaaaagagaaggtgagagaattgttgctctaataaagtttcgttaaactgcctgtaattctcttcctctttcaatcccctttctcaacacaatcaaaatttcttctggtttcttcgaatccgagatccgcttccaatctcgttaatgggtccattttattttggaacattttaatgggttctttcgcattgcaaacaatttagtcctcaaaagggtgttgtttcagatcctaggtttttctacatttcttcacatcccaacaatttattaaccaggtgaagcataagaatggatgatgcgatgggtcctgacttgatcagtgatcttcctcaaagcattatagagagcattctggtacagcttccaattagagat

SEQ ID NO: 29682 - DNA, 388 bp, Glycine max
  unsure (1)..(388): unsure at all n locations
  Clone ID: LIB3051-004-Q1-E1-E9
cccacgcgtccgctctgacctctgatatttctatattttggttctctgtgtctctacgatcaggatccaacggtccaaaatgttcggggcttgtgctgtttgttttcccaggttttagagctccaaaccttcagatccacctcattcgtctccagatcttccttcctggataacgttttcgggttcgagaaggcacttgtgttgtttttcgtacgaaatggagactaaacagagttcggtgacggttacgctcagttacggcgcgttgacgtgcgccgcggaatttctcgcgactttgctagcttctgctgtcgtcaaagcctcgcttttggccccggatctctaccggctgctattgatcaacacgcctactgccanaggagagagc

SEQ ID NO: 29683 - DNA, 301 bp, Glycine max
  Clone ID: LIB3051-004-Q1-E1-F1
cgaatgccaacaattatttgctcgagtctggtgggttggaggaggagtcttcatatccctacactggggagagaggtgaatgcaagtttgatccagagaaaatagcagttaagatcacaaatttcaccaatatccctgctgatgagaaccaaattgccgcatatttagtaaaaaatggtccacttgctatgggcgtgaatgcaattttcatgcaaacatacattggtggtgtctcatgccctctcatatgtagcaagaaaaggctgaaccatggtgtgttacttgtgggatatggtgcaaa

SEQ ID NO: 29684 - DNA, 362 bp, Glycine max
  Clone ID: LIB3051-004-Q1-E1-F11
gttgctcgcagctctatttttcatgtgattgggacctgttagaactatggttgaatgatatgtttggagaaaacattatggaaatatgcatctgataaaatgatttctgctgccttacatgttgattctgttgtctttattcctgttttcaggtccttgagcgggacgatattatgaataagttctacgaggtgacagctcagttggaacagtcattgggtggtatttcccatgataaacttgatatatcagatgaagttaaagagcaggtataaatatttcaattatatataaactattgtatgcatgcaagacagtgatattagtctgccaaatctgattcgttgaacgttccttcctct

SEQ ID NO: 29685 - DNA, 334 bp, Glycine max
  Clone ID: LIB3051-004-Q1-E1-F4
cacacgcgtccgcccacgcgtccgcacagcatcatcatgattttctgcacactttttttgctgacaaagcagtttttattcagaacctctggagattgcgagcaattttttttggaatgggaatcattccaatccatcctggccataaactaacataattgaataggaaaatgaccggcataggacacacttaggttttatgagctgtttgttattattaatgttttttctttttgctgcttttgacaagcagaaattttgttacacttgggatgctcccctgaactataactgaataaataaaaatatgaataaattgagttccttacctccc

SEQ ID NO: 29686 - DNA, 256 bp, Glycine max
  Clone ID: LIB3051-004-Q1-E1-F5
aaaagatgtaaataaagaaaaaaaaaggaaagaaaaaaaaagaaaaataaaaaaattaagagcaaaaaagaaaacgttaaaaaattgcaacactgaaatcaaaagttcataaagcctgtggaatgaatcgtaaaataaggggtggaggcatggcaggcattttgcatagtgttggttacttgagagtaataagtcactccaagtaagctcactagatattcgttaatcggcagttccttttcaattccgttacagg

SEQ ID NO: 29687 - DNA, 405 bp, Glycine max
  Clone ID: LIB3051-004-Q1-E1-G11
atcgtcttcaatcctttcgttattctcttattcatccttctcttctgaataatccagatctctttctgcccttttctccgtcacgcttttcgtgaccggatctgtatggatttgatccagatctacacgccgatggtggttttggccgggtctttcatagatctggtgcgtagaggctcagatctacggtaccgaggtgtgtgattcatgttcgtcttgcttttggaatctgtttcgtagaaagtcgtttggtcttgcatatggcatggctcttgaggtatttttttgcaggtacaacagagaatcgatgacaagaacgcagatccgacggtagatccagccgattccgcttgttcgatcgctacagacccctgtatcggatcaataagcaacgtgtctcgcgcg

SEQ ID NO: 29688 - DNA, 411 bp, Glycine max
  unsure (1)..(411): unsure at all n locations
  Clone ID: LIB3051-004-Q1-E1-G3
agaaagaaagaaaganagcactctttctcgctcgcggcgagtgtgaacaccaaacggcggcgttcgcagcaaacagagtctcgaaaccctagttccctattcctcccatgtcctccgaagacatcactctcggtaccgaccagaggatcgagaacggtctcaattcccctctcgtcttccaagacgaccctctccgcttcaattgccccaccccgcaccagcgtcgggtcggggacccgcctccgaagaaccgcgaacttggcgccttcatcgacgacaacaagatgttcatcgaccgcgaccgcttcttcgccgccgcccagaaccccgaattccgccgctacgccgactgctccgcccgccgcgacccgctccacgcacgcaattggagcgccacagacgatgacgaag

SEQ ID NO: 29689 - DNA, 400 bp, Glycine max
  Clone ID: LIB3051-004-Q1-E1-G7
accacgcgtccgcccacgcgtccgcccacgcgtccgcagccattggcatgtcaaattgcaagtggataggaactggagagaacattttggaggatttggatatcaattcttgtcatggtctcaaatcaaaattgtccgagcattggatggatgtctacaggacagctggaggcaaagatattagttcacctaaacagaagatatttttctccctttgcagcagttaccgggatatactttactgtaacaagaggcctttctatctcaaaggtcttgaagacacaagcatcatggatgcatacataatgcattctctcaatcatgtcttcagaactagagactgcgtgaaaaaaaatgattccaaactgaccaagcttaaagagaatgctgatagtgataa

SEQ ID NO: 29690 - DNA, 424 bp, Glycine max
  Clone ID: LIB3051-004-Q1-E1-H1
attccaaatctcttcctctttagtctttataccgaaatggaatgcgttgaatcacgattcattaccttctcgactgttgctaggttatgttaactgttaccttttattcttcgtttacttcacactgcgcgttacttcatcaccaatcgtgccacacttagaactccggggtcaattcggatatgtcttctgatagtgcaaaggaaaatgcatcagtagttgattcatcagtcactgaagggaggaatgacattggaaattcagatgatccaggttttgataatatttctcttgtcacatgcatatcatgtgaattaaggagcttaaattgtgggggcaagaaatggaattagaaaagttataaaggcagaattacagaacatttcatataaaataaagttgttggaaaattaaagtaaagtca

SEQ ID NO: 29691 - DNA, 334 bp, Glycine max
  unsure (1)..(334): unsure at all n locations
  Clone ID: LIB3051-004-Q1-E1-H4
atttgtcacgacattcactcttcagcaaccaatgagtcactcacatgccgaaaataagcccgcggagaaaaagcccgcacagaatgctccggcggagaagaagcccaaggacgagaataagatatcgaaggaaggacgaagcgagaataagaagaagagaacaaagaagagcgtggagacctacaagatttacatcttcaaggtgctgaagcaggttcaccccgacatcggaatctcaagcaatgccatggggatcatgaacactttcataatcgacatcttctagaagctcgcccacgagtcgtccccattggctangtataacaagaaccct

SEQ ID NO: 29692 - DNA, 345 bp, Glycine max
  Clone ID: LIB3051-004-Q1-E1-H6
aggacgcgtgtgcggacacgtgcgcggccgcgtgggctgagctgcgtacctacctgcacggaaagaacattctgcactcagggctgtgattaaatgcattgcagaactacattcttgaagatgagttccctccacaaaatcataagaagcgacttgaccagttacagaatgtgaagaacggataaaacgaaaccacatggcagttcctgccagtaaccagaactacagcaagcaacggcaatggatgtccaatgccaccatccaaagctgggcgtttgactaatgcgtatgtatcatcattccctgcatgactcagatctgtcaagtctccatcacaccggcaat

SEQ ID NO: 29693 - DNA, 433 bp, Glycine max
  unsure (1)..(433): unsure at all n locations
  Clone ID: LIB3051-005-Q1-E1-A11
aaattctgtaggcgtgttgtgattatcagaagaccaaatcgaggaatccggaaagggaagaagaagaagaagaagagagtgggttgggttgcgtgccccgttccgttcgttcttcccctttcctttcaattctttcttttcaattctttttcttctgaacacagaanaaacagaagatgggaatgaaacaagtcattaaaaacctcgacgcctttcctcgcgccgaggatcacttgttgcagaaaacccaatctggggctctcgtatccgtaattggtctcattataatggccacattgttcgttcacgagctcggttattatcttacaacttacaccgttcaccagatgtcagtggacttgaagcgaggggaaactcttccaattcatattaacatgacgtttccttctttaccttgtgatgttttgagtgt

SEQ ID NO: 29694 - DNA, 380 bp, Glycine max
  Clone ID: LIB3051-005-Q1-E1-A2
aggatccttgcacttcagagatcttaccatggtgacacattgggtgctatggaagcacaggcaccgtcttcttatacaggcttcttgcagcaaccatggtacactgggagaggtctttttctggatcctccttctgtctttatgcacaacagtacatggaatgtttccatacctgaagggtatcatttggaaagtctgaaagggaaaagtatcacctttgcctcacctgatgaaatatttcacaagggcagagataagtctgagcttgctacagtttattcatcttacatatcaaaagtattatctggatttagagggtcgaataatgttggagcattaattatggaaccagttatccaacgtgctggtggaatgcatat

SEQ ID NO: 29695 - DNA, 275 bp, Glycine max
  Clone ID: LIB3051-005-Q1-E1-A6
agtccaagcgtccggtcggtatccatctattcccagaatcaccaggtgcaatcaacttctgtccctgactcaacatcggtaccgtatccacccgcgacattgacctcgagaattaaaggaacacatctcataaagatccggctcaaacttccgaatgccatggctcgctcttctcaccatgcgcactcaatcatatctcgtcataatacgcctgtgatgaactccgactacacatgtgaatagacacggcgtccaagtaaagtatattctccccg

SEQ ID NO: 29696 - DNA, 323 bp, Glycine max
  Clone ID: LIB3051-005-Q1-E1-A8
acggcagaggccaatgaggaagctgcctctgtatctgggagtagtaatcttgagatggggaaaggttcccattgaaaggcttctcatcaaatttcccacgatactgtacatttatgtatctaaaatttgtgttaggactacatgtaccatagtgtttttctccctcccacttgggccatttattgattattggaatgagtatgtagggtagaacagtctgcaaatgcaccaatcgggtaaacataataaacggctgtttgtaataaattggaaagagcttttactaacgtgttttattttttataaaatgagaaattaacgat

SEQ ID NO: 29697 - DNA, 302 bp, Glycine max
  Clone ID: LIB3051-005-Q1-E1-B10
accacgcgtccggagtttctgtgtgctcttggactggttgttaaaatggacggtcacactaagggtagttgcaatgtgattcaaaggagtgacggcaatagaatggatttagtggtggataagtctgcatcaccaacaatggtaacttgtgaattggttccaaagattttgagccgtctcactaaaccttgctacgctgctgttacttcctgggacagataatcaaactgccactgttacgttcacgcttgtggatacgatgccaactttgtaccttcctgttgcacctaagtgtcactaca

SEQ ID NO: 29698 - DNA, 431 bp, Glycine max
  Clone ID: LIB3051-005-Q1-E1-B11
acaagaatttagaatcaattggagttccttttccgaagaggcaaccgatgaggatatactcaagcctatggaacgctgatgattgggccacaaggggtggacgcatcaaaaccgattggtccaaagctcctttcactgcatcctacagaaacttcaacgctaacgcttgtgtttggaacagaggaaaatccacatgcaaatcaaattcaccatcctctaatgcatggctatcacaagagctggattccactgctcagcaaaggctgagctgggtgcagaagaattacatgatttacaattattgctccgacaaaaacagatttgctcaaggccttccactcgaatgcacacattcgtagaggacttcatcttccactagcacaagtgttacattaaaatttcatttaccattcttttaatttaattttttt

SEQ ID NO: 29699 - DNA, 396 bp, Glycine max
  Clone ID: LIB3051-005-Q1-E1-B2
agcacacgcgtccgcccacgcgtccgtggagttcagagactgcaggatggagaatttattgttcaagcaactaaagattgtgttgccaaaacattgaaaagattagaggagaagattcatggccgtgtgctgaaccatttgttatatctcatgcgagtttcagaaaagggttgtcaaagacgagttgctttggctcttgcacatctttgctcttcagatgatcagagaataatttttattgatcactatggtcttgagttgcttattgggcttcttggctcatctagctctaagcagcaacttgatggtgctgtggctttatgcaagttggcggataaagcctcgaccttgtctcctgtggatgctgctcctccttctccaacaccacaggtctat

SEQ ID NO: 29700 - DNA, 394 bp, Glycine max
  Clone ID: LIB3051-005-Q1-E1-B3
agttatattttcaaaaaccttctcttttctcaattgggtttccatctttgatttgatttcattgccatggctccaaaggatcccaagcaagttgctgatgctgcttcttctggtggtgggggtggcttttttgcttctattgcttccagcttgtccaatttcggtagtgccatgtccaaatccgttaatggtttggtgggctacgaggggctggaggttgttaatccagaaggaggaactgaagatgctgaagaggaagcaagaaagggacgatggaaacaaaaggagcgagatagttactggaaaatgatgcaaaagtatgttggctctgatatcacatcaatggtgacacttccagttatcatttttgaaccaatgacaatgcttcagaaaa

SEQ ID NO: 29701 - DNA, 397 bp, Glycine max
  Clone ID: LIB3051-005-Q1-E1-B4
agcagacgcgtgggtctttccacacacactgagaattgtgttagaatgatcgaggccggggcagtgacagctcttgttagtgctttggggaatgaaggagtttcagaagaagcagctggtgcactggccttgatcgtccggcagccaattggggccaaagcagtggtgaatgaggaatcagcagtggctggattaattggaatgatgcgttgtggaacaccgagaggtaaagagaatgcggttgcagcgatgctcgagttgtgccggagtggaggtgcagctgcaacagaaagggttgtgaaggcaccagctttggccggattacttcaaacccttctttttacggggacaaaacgcgcaagaagaaaagcagcttcacttgcaagagtttttcaga

SEQ ID NO: 29702 - DNA, 419 bp, Glycine max
  Clone ID: LIB3051-005-Q1-E1-B5
acgtacgttcgttgtgaatttttcagaaagccagtgaaaaaggtcggagcatattgttggctctctcttgccatttgcattgtggaacttctgatttgcattaagtttggacacggcttgtatccaaaatcaatgcctatatggctggtaatattctggtcaggtgttggagtgaccatttttacatttttgcttttgtggtcttggcaactccatcgcactttagggaacaaaaagagacgataatttcacaattgcagcagttgcaatgctgcattattctttgattgattccttcctcatttttatgggtaccaatccatagccatacacatggtgtaaatacatcaacctcataattaattgtaaatgaatattaatttctcctagcttagtatagtggaacagatcacagtttc

SEQ ID NO: 29703 - DNA, 374 bp, Glycine max
  Clone ID: LIB3051-005-Q1-E1-B6
agcccatacgtccgcccaagcgtcaggtgataaataatgaagcaataataattgtcatggtggtgcactgtgttttgccaaataatcgtcttgccataatcacaataccatccttcttttttgggtttgatgaacactatgccatcacttggttaccaatgggaatctaattcttcagctgctgatgttattgttcaattgcaaaaccatggattttttaatcaagcagatgtacacagcatcgatgtcgttccatctccgtcaacactagctctatcaactgggaatagtactaatactaccatcatctctcaaatttaggtgtgtcctcctgctccgggatcaacatcacagccatactttccttcgtcaca

SEQ ID NO: 29704 - DNA, 418 bp, Glycine max
  Clone ID: LIB3051-005-Q1-E1-B7
acgtacgtgaatgattatgacaccatccctgatgggatggatcatcgtggtctcaagcgtttatagtgtgtgtgggtggtggtttaagtcaagcttccccgttttttgatttcataattatggcttaaattatcatcctgaaggatcatactgtcaattgagcttattgatcatgcatgcagaagagataccggccgaaccagataacttgaaggagcagggtacaacaactataggtcattcaagggagaccacaagtcaatcaggatctttaggttcagttggagattgtcctctgtatcctcctaatgtgtatgctccccaagcccaggctttctactatagaggttttgacaatggcaatggtgaatgggatgaatattcttcatatgtcaattccgaaggtttagacattgga

SEQ ID NO: 29705 - DNA, 425 bp, Glycine max
  Clone ID: LIB3051-005-Q1-E1-B9
accacgcgtccgatgctttctctttttagttgcataaatttctggagtttagagcccccacagcacagttgggtctggaagtctgataaattctctagatgagtataaaatattgctatagtttggtactcttatcagcaatcctgcacagattcttggaattgtattcttcctgagttgctgcttttctagttgatgacatgatctgtcatggtgggaacatatgctaagttggtgcctcggatggcttcggagttctctgtggcttcaatttaaaccccatcatattgctgctggagctgcatatcttgctgccaagtttctgaacatggatctcgcagcttatcagaacatctggcaagagttccagacaacaccatccatacttcaagctgttccgcagcaattaatggagctcttttaaa

SEQ ID NO: 29706 - DNA, 417 bp, Glycine max
  Clone ID: LIB3051-005-Q1-E1-C4
aagcaaaaatactccgtttcaccaaaaaagaaaaagaaaaacccttcttagcttagcttagcttagcttcatcttctccgatcaacagtcacctcctctcctccttattttgcgtcgcctcgccggaaagacagaaaacagagagagagagagagagattcgtgtaaattagggtttctttcgccaaagagaggcttcaaacctgacctcttttttcttatcttttttccctttcgcagagcgagcgactcgcgaaaagaagatcctgctcctgatctagttcgcaaaatcgtagaatcattcgaatttgcgattcagatctccattttttactaccttgcttctcaggaaggatgttcggttcaaacccttttgggcagtcatcgtcgagccctttcggctctcaatcggtttttg

SEQ ID NO: 29707 - DNA, 395 bp, Glycine max
  Clone ID: LIB3051-005-Q1-E1-C5
agtacggtttgtaccgcgaaagagaaggcaagcaaaaaacgtcatcctcggcggaacaggcgcggaggctaatcgttaaccaaaccaacacagatcccataacgcttcgtctagggtttcgctgaatccccaattttcctaaccccgaccggacatgctccttccccgatggccgtcgtaaccagcaacggcaagcgccgccaacattggccatccgcgaattaccactttccatctcccaattccaaaagacccagagtttcaacaatgtcccaaaaccacgcgcaatccttgttatcctcgactagtatcatttcaagaatctctaagtaccccgaaaccaagccaccactgcatagggaggttcacgccccgtgtagaccaagtaagtttga

SEQ ID NO: 29708 - DNA, 417 bp, Glycine max
  unsure (1)..(417): unsure at all n locations
  Clone ID: LIB3051-005-Q1-E1-C8
aagtacgcccacgcgtccgagcatcgctattctcttcattccatggctttgcccaaccagcaaaccgtggattaccctagtttcaaactcgttatcgtcggcgatggtggcacaggaaagacaacctttgtgaaaaggcatctcaccggagaattcgagaagaaatatgagccaaccatcggtgtggaggttcacccattggattttttcacaaactgtggaaagattcgattttactgctgggatactgctggacaggagaaatttggtggcctcagagatggatactatatccatggacaatgtgctattatcatgtttgatgttactgcccggctaacatacaaaaatgttcccacctggcaccgtgatctttgcanggtctgtgagaacatcccaattgttctttgcggtaac

SEQ ID NO: 29709 - DNA, 220 bp, Glycine max
  unsure (1)..(220): unsure at all n locations
  Clone ID: LIB3051-005-Q1-E1-C9
ctttattcttgagcattagatggctctggagaaagacttttaggcttagttcaagggaagactgttcgtctgatgctgaacatanggcactcttagcaaaacggggtgagagtgggccaaacctcaatgaaagtagaggggaaagagcacgcaggaaagctgangagaaaagacaggctaggctagaaaaagaacttttggangaagaagagagaaaaca

SEQ ID NO: 29710 - DNA, 426 bp, Glycine max
  unsure (1)..(426): unsure at all n locations
  Clone ID: LIB3051-005-Q1-E1-D11
agaaaaaagggccctataaaactaaacgctccccttctcgaagaggccgctcgctctctagggtttttctttttctcttctcactgcatcgcttcaggttcttctgaaaagatgtctcgcgtgtatgttggtaacttggattcacgagtcactgagagagatctcgaagacgaattccgcgttttcggagttattcggagtgtttgggttgcacgtagaccacctggttatgcttttattgactttgatgaccgcagagacgcacaggatgctatccgtgaattggatggcaagaatggttggagggttgagctttctcacaactctagaggtggaggtggtggtcgtggtggtcgctctggtggttctgatttgaaatgttacgagtgtggtgaanctggtcattttgcccgtgaatgccccatg

SEQ ID NO: 29711 - DNA, 424 bp, Glycine max
  Clone ID: LIB3051-005-Q1-E1-D12
cggacgcgtgggtttacaaacccatccccgacctcgtatttgtttttccaagcatggacctttccatcaacacacgcaccccttacacgctgcatcatcatcgctccgccggttgagatgttcccgccgccgccgcagacgaccctcccctccctgccggatctactcctcacggccctctccgtctgcttcctagtctcgtcctcgaagccccacatcggcggctccacccgctgccccttcccgcgtcgcttcctcaaaatccccgccatgtccctcacaaacacaacaacgtcgaaatcctcgaaaaacaacaatctcaacaacaccctcctccctccgcgccgccacagcttcgcgtccccgcagtcgctctcggagtggctgaagccgcggctcccttccgagtcgttcgcctcgtggg

SEQ ID NO: 29712 - DNA, 369 bp, Glycine max
  Clone ID: LIB3051-005-Q1-E1-D2
aaaaggtgaagttggaggttcaagatgaaatcccccctcttcacacccacaagcgacccaaattggaatctccacccaagtgtggttcaagcgatgaatccctttcaatcccaccagcttcgtataaccccttggatgagccaagccctttgggtttgcgtctcaggaagagtccttcccttttggatttgattcagatgaggctctcccaacaagaggaatccaaaaagaaagatcaaaaggcttcttcttcttcttcttctgctgctgctgctgctgctgctgctgctgcggattctaaactcaaggcctccaattttcctggaaccattttgaaaattgggacttgggagtataagtctagatatg

SEQ ID NO: 29713 - DNA, 419 bp, Glycine max
  Clone ID: LIB3051-005-Q1-E1-D3
ggcagttcctccgctttgggcgacggaggctgcaacagtctcattctcaactacactacacgacgccgctttactttttccaaacctgtcaagctgtactattactatagtttcatttcatggagacggaatcacatgaagatttacagcacccgtcggtttcttcgaatgacacgcacagtgatgatgcgtcgaaccacagagacgctgagcaaaagcaagatgtttcgagggaagaagttgtgcagattctacaagttattgcatctacggggaggttctggcatgactgggataagttgaagagtatgctatcatttcagctgaagcaggtactgtcagaatatcctgaggcaagaatgacaagtgagcagcagtacgcgtcatttggtgaatcctacattgagttggtcaacaaa

SEQ ID NO: 29714 - DNA, 305 bp, Glycine max
  Clone ID: LIB3051-005-Q1-E1-D4
ggctcttatttcaagagttttgttattggttcattgtgttgtgcaatggaacttcaggatgtagttgcttgctgctgcactttatttgacatggttttcagtgatggaatgttgatgcttcatgctgccatggatgatacatggagcatgcaggatttagtttgaactttgaagtcaggtttcaaggtagcttctttcttggcctgacttcaaggcttgcttgttggaagaggtagcaatgtacagtcagtatactgtttgttaacattgtgcttcatgatgagttgatgactgatgaggcattt

SEQ ID NO: 29715 - DNA, 331 bp, Glycine max
  Clone ID: LIB3051-005-Q1-E1-D9
gtggtgctgggtattctatggcgacacccaacaacagcaacattaacaacgcgacggcgaaaccaggaaccctaggcgttggcgtaggtgcagctcctactccgcccaagtcccagcgcggccacaacaagcccaagtgcaaacagtgtggcaatgtcgctcgttcaaggtgcccctatgaatgttgcaagagttgctgttctagaaatcaaaacccctgtcatatccacgtgttaaaagctaattcaacttttcctgacaaggcatcctcttctggtgcgtctccccttgaccagcaatccttagattcacatccacctcaatcaactgc

SEQ ID NO: 29716 - DNA, 364 bp, Glycine max
  Clone ID: LIB3051-005-Q1-E1-E10
atcaaattactgaattaaagtttatgtttttttcaataattgtattaaactgagtgcactttaaagaaggaatccaagcataattttcaacataaatggttaaaggacaaaattggttccaatttacctgaacaaaattaattgcccttgggttgagataaataataatccattttccggggtgggtggtaaaggcctcgtgtatttgacacatgacgggaacacacagatgtaaaaaaaccccagagaattgaagggaaattacagtcgccggtgtgacttgcctcatatctaggaaacctcccttattcccttggcctgttctttcttttttttttcccttttcaaacgacccatttccccc

SEQ ID NO: 29717 - DNA, 403 bp, Glycine max
  Clone ID: LIB3051-005-Q1-E1-E2
aagcattctctctcttcagcgagaagaaaccgccagaaaataaagtgtgtgtgtgtaagtgtttgtgtggtgttgttgacctttggaattgaatgtgggaatggccatgaataatggcgatggaaccgacggaggggcattgcagagggtgctttacatgtggggttaccttcccggagctctgccgcaaaggacgccgctcttgacgccggttgccgttagggttccgccgtgtgattattcttggaatgatgtttgcggcggtggctgtggattcgctattgctatatcagaatcagggaagctcatcacatggggctcaacagatgatctaggccaaagctatgtgacttctggcaagcatggggaaactccagagccttttccctcttccaaccgaaac

SEQ ID NO: 29718 - DNA, 401 bp, Glycine max
  Clone ID: LIB3051-005-Q1-E1-E3
aggaaaagagaaagaaggaaggcgaagcccacaaagaaagaaaacaatagtttcagaagcagaaagaggttttccgttccgaaacgatgtcctccatggccatcaccaccagagacagagatcgagagcttctcatccccgtcgccgacacccccgccggcgatgccgccgtctccccttcccccaagccatcgtcgtcggcgtcgtccccgcatcattccggacgcgaggtgatctcttcccccaattagggttttcaattctccaccgcaattcgtttttgattcctctttttttctccaattcgctcaatctggactctgttgaatttgttgggtttggggatttactcgaaagtttctcccttcacttggattgaggtttttttggggatgaaccag

SEQ ID NO: 29719 - DNA, 418 bp, Glycine max
  Clone ID: LIB3051-005-Q1-E1-E7
acggtgaaagtaaaacattgtgcaattaatcatcaactgcaagtagccagtgcataagatcaatggcgtcaagacagcaattcaaggaagacagagccgaggcagctgcaaaactcgcagcgaaagacatcggcgacatcaacagaacaaacgagcgcgacgaggggtacgacttgcacgacgaagccaacttcaagcaagcacgagctgaagcagctgcaaagctggcggccaaggatctggaggacgctaacagattaagagacaacactttcaacacatggaaagagcaacatcagcatgatgagaacaaacccggtgtgatagggtccatgtttagagccgccaaggaagccgtggttgggaagcctcaccacgaggaagtttatgcaaaggaaacaaagatgggtgaatattc

SEQ ID NO: 29720 - DNA, 372 bp, Glycine max
  unsure (1)..(372): unsure at all n locations
  Clone ID: LIB3051-005-Q1-E1-E9
ctgaggatcttaggatcccatttgagcgctatggtcctgtgaaggatgtttatctacctaaaaattactacactggtgagcctcgaggctttggatttgtgaaatatcggtatggtgaagatgcagctgaggaaaagcaacatctcaatcatactatcattggtggacgtgaaataaggattgtttttgctgaggaaaataggaaaacttctcaagaaatgcgtgttaatactcgaggaagtggtcgacatggaggtggtagaaggaggaatcgtactagatccccacgaccccgatcctattctcggtctccatcaccagctagggatgattcaagggatggcangggtanggatgattattattctcctg

SEQ ID NO: 29721 - DNA, 368 bp, Glycine max
  Clone ID: LIB3051-005-Q1-E1-F2
agcacacgcgtccgcttggattggttgttagaatggagggtcagagtaagggtagttttaatgtgatggaagggagtgagggcaaaggaagggagtttgtggtggaaaagtctgcatcatcaatagtgggaacttgtgatttggttctaaggattttggcctttttactaacccttgtggctgctgtagttattgggacagataagcaaactgccattgttccaatcaagcttgtggattctatgccaactttgtacgttcctgttgcagctaagtggcattacttgtctgcctttgtctattatgtgggggcaaatgcaatagcatgtgcatatgcaatactgtctctcttgctcactcttgcaaat

SEQ ID NO: 29722 - DNA, 404 bp, Glycine max
  Clone ID: LIB3051-005-Q1-E1-F5
agcccacgcgtccgaggcacttcactccatataaacttggatgagagaaattttgaactgacaaagtcccctgaaggtaagaatcactacagtgataaatatggaaatagaggtgaaaaatcagagcatcaaaagaaaaccccatctaaatcaaaatcaggacaatttgatgggagtgggcccttacgaggaaattacaaggaggatgattcaaaaggaaaatcaccttctgattctggatctgctgaagttaagcatcatttgaatgatggagaaagtgctaccagtgaagaaaattctaaactctttggagatgtgtttcaggaaccaattataaatgcgaaagactcagcaatcctgaatgataatgggacactgacttcagtgaatggtaactacaaatc

SEQ ID NO: 29723 - DNA, 380 bp, Glycine max
  Clone ID: LIB3051-005-Q1-E1-F6
acgcccacgcgtccgcaaacactcagaagctgtttccactggcacccttactttgggtttagctacaactgttctatctgtcgtttattctgctgtgcgtgctggatcttctgctgcagtgctttccccaacaagctcacctcgtgctggtaagcctctgcatccattggatgcaaaggaggatgaagagaaggagaaggcaaatccagttacatattcatatgccttcttccacttgattttctcacttgctatcatgtattctgcaatgcttctgactggttggtctacatctgttggagagagcgggaagttggttgacgtggggtggccttctgtgtggattcgaatcatcagttcctgcgcaactgctctgctgt

SEQ ID NO: 29724 - DNA, 390 bp, Glycine max
  Clone ID: LIB3051-005-Q1-E1-G10
acacacgtccgaacagagagagcaaaaccctagagcatccatcacaagcagaggaagaagatggtgaagttcctgaagcctaacaaggcagtgatcgtcctgcagggccgctacgccgggcgcaaggcggtgatcgtgaggaccttcgacgagggaaccagggagcgcccctacggccactgcctcgtcgccggaataaagaagtacccaagcaaggtcatcaagaaggactccgcgaagaagaccgcgaagaaatctagggttaaggccttcgtgaagctcgtgaactaccagcacctcatgcccacgcgctacacgctcgacgtggatctaaaggacgctgttacccccgatgttctagccaccaatgacaagaaggttaccgctctc

SEQ ID NO: 29725 - DNA, 366 bp, Glycine max
  Clone ID: LIB3051-005-Q1-E1-G12
acacaactacgcaaactaacaacaaccacaacaacgtttgtgtcaggtcgtgttgtgttgttggggatttcatgacaacaataaacccttgattcctctccccattctcccaagagaagggccattctgttacaatgttggatactctcaaatggatttagaagacaagttccttgccaaggggagggttctgggctctagtgcaggtggtctagctactgctgattgatgcatacatgataacaagtttctggtgttcaaagcctttcattcagtgctcaaagtactccagaaaaaaatggccattcagatgatgcttcaaaaagttcagaacttctttaggagttcctaaaatctggtcctaag

SEQ ID NO: 29726 - DNA, 369 bp, Glycine max
  Clone ID: LIB3051-005-Q1-E1-G2
agcaggtggacgcggcgtggaggcgtgccccgctgcggacgcggaccacatgccgtgcgaggatccgaggctgaacagccagctgagcagggagatgaactactacagggagaggcactgccccaggccggaggactcgcccctatgcttgattccgccgccccatgggtaccgggtgccggtgccgtggccggagagcttgcacaagatatggcacagcaacatgccatacaacaagattgctgacaggaaaggtcaccagggatggatgaaactagaaggtcaacactttatattccctggtggtggtacgatgtttccagatggagcagagcaatatattgaaaaacttggtcaatacattcctat

SEQ ID NO: 29727 - DNA, 422 bp, Glycine max
  Clone ID: LIB3051-005-Q1-E1-G6
acggtttggtgaactctggattaccatgactattgtcaagttaaatgcaatcttttcaaaatgatgctggtagactcagtctaaagaagaacaagaacgacagcttcttgaaatgatatagaagtttcagcaatcgtacaagcataatttttcagcttcaagtaaggcaagctcgaaggaatcaaaacgaattgatagtctattctattcatatgccaatgggtctaccgggttgattgagtaagtgtgcttcatccaagactgtttgttttctttcctccattcaatatgcatatatcaaattgcattatcctgttgttgttttcttaattcaagtttcaaaccttggacatggatccagtggcagatctaggacaatctatttaaagaataaaaattaacaagtattatcatgaaaagag

SEQ ID NO: 29728 - DNA, 392 bp, Glycine max
  unsure (1)..(392): unsure at all n locations
  Clone ID: LIB3051-005-Q1-E1-H10
accaagcgtccgaaggggtggtggctgcttcgaaagcttaataatttgtttatttccagaacatcatagttttcgcagcagcaaactaacaaattactcatatcatataataagatggcccgttctctctcgcaagccaaacgtattggtgtccttgttgctcaatctatctccctaattcccgttcatcggcgaggttacgcagtggcatccgatgtatcggtaagagttggattgggtaatattgggcgaacgaatggaatcgtgggaggtgtagaagagaagcctgatacaagagatggttcanaagcctactcaactgattgggccccagaaccagtaacaggttactataggcccattaaccacacccctgaaattgacccggtgga

SEQ ID NO: 29729 - DNA, 426 bp, Glycine max
  Clone ID: LIB3051-005-Q1-E1-H11
accacgcgtccgagcatgtttggactagctccttctaggcttcaagttctatacagcttgcgtgactatagaactgaaggggcatcagaaccagagtggaaagaagtaaccgtcagatcaagtactgagatagtctttcagcctgaaaatgcttcaaaagttcgaaagtttaagctctcttcagtgagctctatgcttcttagcgcttgaagttgcccaaactaaggaaagttattctagggcgctgatttttgcagatggcatccatcgctcgtctatttatattcctcttcaagcatatgtatattcttcgttaagctacatgaaatggatacattactagccttagaaaatatcaatacagtcagatgtctttttccgcgagcttgtattatgtatattttaatataattaacagttttattt

SEQ ID NO: 29730 - DNA, 323 bp, Glycine max
  Clone ID: LIB3051-005-Q1-E1-H6
cccacgcgtccgcccacgcgtccggaagaatgagaaatatgtgcctttgtttaccggcggtgatgattcggagatagttgaccggagaaacgggctgcgcaaacagattgaagataggttggttgcagctgctgcaagtggcaaggatttagaagagactggcagtgaggatgatggtcttttggatctgagtgatgatgatttttttcttgccgggagttctagtgacgaagcagatgcggatgatgaatggacagacaaaagttcaagagaacaagcttccaatgcctccgggaaaagtttgttcggcatgtccagtgacg

SEQ ID NO: 29731 - DNA, 412 bp, Glycine max
  Clone ID: LIB3051-005-Q1-E1-H7
agcccacgcgtccgctggtttctctctctctctctctctctctcagaaatccaccttgtgatggtgccctagatccatggcttctctgtccaacctttgcatgtgtttcactgttgctgagtttcaaggctaccgtttatcctctcttccctctctgggtcctgggaaaccctttggtgggtcccacattcacaactttgcaaactcacttccacccaaaagcttgtaacttgtgaacacccttccagttagtatttcacgctctcttaattccaaatttggaatctttgatgcttccccgttcataaataactggtatttcattggataaatcattccactgagttaaaagtgttttttttgttggtttaattttaccattttgaagatttccgaggtttggtttgtggaa

SEQ ID NO: 29732 - DNA, 424 bp, Glycine max
  unsure (1)..(424): unsure at all n locations
  Clone ID: LIB3051-005-Q1-E1-H9
agntaacaacaagaaaagaaaaaaagaagagttgagattccctttgaagaaaagatggcatcccataggcaaagctatgaagctggtcaaactaagggccgaactgaggaaaagacgaaccagacgatgggcaatattggagagaaggctcaagctgcaaaggagaagacccaggaaatggcccaagctgcaaaggagaagacccaacatacagcccaagctgccaaggacaagacttgcgacacttcccaagcggcaaaggagaagacccaacagaatacaggagctgctcaacaaaagacctcagacatgggccagtccacgaaggaatcggcccagtcagggaacgacaacacccaagggttcctgcagcatacaagggacaaggttaagggcgcaacccaaggtgctacagaagctgtta

SEQ ID NO: 29733 - DNA, 297 bp, Glycine max
  Clone ID: LIB3051-006-Q1-E1-A1
actggaattaagcacgttatttcattagggttggttttgttgaacagaaaaaaagagaaaaaaaaattatgggaagcgatggcgtgaggaaaccaagattcctatgccttcatgggttccgaacaagcggagaaatattgaaaacacagttacataagtggcctcaatcggttctagacaacctcgatctagtatttgtggatgctccttttccttgccttcgcaaatccgatgtagaaggcatttttgatcgcccttactacgagtggtttcagttcaacaaggaatttacagagt

SEQ ID NO: 29734 - DNA, 426 bp, Glycine max
  Clone ID: LIB3051-006-Q1-E1-A10
atccactttgattcccattactcatttccaccatttcaccttctcaatctgtttctctgctttactaatttgtcccaaatcagaaccagattgagcttctgcacaaccagaccagagattcaacgcagaaactgtgcttatccctggtccataggatctgatttggttcataagagagtagtacacgtttcattgctcgaaatagagttgaaaaatctggagtttccatgtctgagaaaccatcttcatcgttgacatctaccgtagctgctcgagaagttgatcccttgttgcaggatttgaatgaaaaaaagcagagctttaagcgcaacgtggtgtcgttagcggtggagttgaaggagccacgttgtcgcccagcttcccaagaacaatcctatgccaaggaaactcaaaacagacaggaag

SEQ ID NO: 29735 - DNA, 427 bp, Glycine max
  Clone ID: LIB3051-006-Q1-E1-A12
atccgagttagagctgcatcctcatctccggagtgggatgatgccaagatcgctcctcttcagctggagtccccaattgggcagtttctttctcagattttgaaagatcacccgcatcttgtgcctgctgccgtcgaccagcaactccaccagctccaaactgaccgcgatgctcatctacaaaaccaacaacagccttcttcacccactgatttagttttgtacaggagaattgctgaggttaaggctaatgaaaggaggaaagctctggaagagatcttgtatgcattggtggtgcagaagttcatggatgctaatatttctttgataccctctgtaaccccagatctgtctggtaaggttgatttgtggccaaatgaagatggtaaacttgagcagcttcactcagatgaagcatatgagatga

SEQ ID NO: 29736 - DNA, 407 bp, Glycine max
  Clone ID: LIB3051-006-Q1-E1-A4
atttcatagatctgatgcatggaggctcagatctactgtacagaggtgtgcgattcatgttcgtctctcttttggaatctgtttcgtagaaagtcgtttggtcttccatgtcgcatggctcttgaggtatttttttttgcagatactgtagataatcgatgagaagaacgcagatccagccgcttccgcttgttcgatcgctacagacgcttgtatcggattattcatgattgattcataagcagcatgtcttcctccggctatagttgttgcagatctcggatgttgtaaaattagtgtatgatgtgaagctatgggctgggaaatgtggatgtaggagatttcgggacgagagggctcaaaacgcttcgtcgtttgtggttacggagtcctgaatgatcttgtca

SEQ ID NO: 29737 - DNA, 309 bp, Glycine max
  Clone ID: LIB3051-006-Q1-E1-A5
agcgatttgcagatacttacaagatggagtgccctgcagcgattaaccgtctcgtggtttctggtgtgcctgccaccgtggagcatcgtgcaactgcggctgcctctgcttccacctctgccgctactgtggccgagtgtgttcagaattttattacttcaatggattccttgaaacttaacatggtggctgtggatcaggtgcacccattgctctcggacctttatgcttcgcttaataagttgacgatcctgccgcctgattttgaggggaaaaccagaatgaaggagtggagtgcaaggttatcta

SEQ ID NO: 29738 - DNA, 379 bp, Glycine max
  Clone ID: LIB3051-006-Q1-E1-A8
atgcaaactgtttttctctcttagcttaaaagttctctcttgctatccctcctccattaaccccattaataataagcaccatcaatttccttaattgcttcatatataggagaatacaatgaccaagatctttgtgctgttatgtctgctcttcttagcttcttctgggtttgtccatggctcttctaagaaggatcatattaggttatttgagctcaagagaggtgatttttctataaaggtcaccaattggggtgcaacacttgtgtccgtaatacttcccgataaaaaggggaagttgggtgatattgttcttggatgaggattctcccagggcatacacaggtgataaatcatactttggagctactgtgggccg

SEQ ID NO: 29739 - DNA, 312 bp, Glycine max
  Clone ID: LIB3051-006-Q1-E1-B10
acggcggacgaggtggctatggtggcgggcgtggtggctatggcggcgggcgtggtggcgggcgtggtggctatggtcctaatgaacataacgaggctggggttgatgctaaccctcataactaagaaggcaactttcgaaaccttatacatgggtttaagttatcgcaataaataaaacttcatgagaaggttagttgtaatagaagtggaaaactttgtaaaggaataatacctttcacgaacttccttatctttgtgttgtctctggttctgttttgctaaactcaactttataaaattgtatactatt

SEQ ID NO: 29740 - DNA, 429 bp, Glycine max
  Clone ID: LIB3051-006-Q1-E1-B11
aatatatatatatatataaataaataaatgataaaattattaatttttataacaattactttaatttatcttatccaataacgaggtcgcgtaaattattttatgtcttgaaacctctcacctccgatccctctaattctcacccaaactgtagtcccattcttccgcaggtgaattgttccctttccttttgctcctttccacatgtgctgaacttatttccataaatcataattccacgcttccacctacatcttcagcaaccaattattttatttgctgaacttttcttttgtttccttttcttcactacccaacctttcataagggattaatgccaaacaataaacaacgttttaacatatgcgtaagtgaatcagaatggaagaggcaacggagcaagtacaaaccagagaacgtggtgtaaca

SEQ ID NO: 29741 - DNA, 432 bp, Glycine max
  Clone ID: LIB3051-006-Q1-E1-B12
agcgatagctgataagagagataccaacaagaaaagaaaaaaagaagagttgagattccctttgaagaaaagatggcatcccataggcaaagctatgaagctggtcaaactaagggccgaactgaggaaaagacgaaccagacgatgggcaatattggagagaaggctcaagctgcaaaggagaagacccaggaaatggcccaagctgcaaaggagaagacccaacaaacagcccaagctgccaaggacaagacttgcgacacttcccaagcggcaaaggagaagacccaacagaatacaggagctgctcaacaaaagacctcagagatgggccagtccacgaaggaatcggcccagtcagggaaggacaacacccaagggttcctgcagcagacaggggagaaggtgaagggcgcagcccaaggtgctaca

SEQ ID NO: 29742 - DNA, 277 bp, Glycine max
  Clone ID: LIB3051-006-Q1-E1-B5
acccacgcgtccgcgctcccacccttcgttgacctcctattctcccctcatcggagctcaaatctccgatcccttcatccatatcgcttcaccgcaactttctcttcagcgatcgcaagatctagttgaatctcaaccgcgctcctccgattcgaagctcgagtcagtgggatcctcgtcagatctggggggtttgattgcgattctcactctgctgctcggatttgtgcgtctgagatgtcgatttgaccgagatgcgattcggttcagatcaggg

SEQ ID NO: 29743 - DNA, 396 bp, Glycine max
  Clone ID: LIB3051-006-Q1-E1-B6
atatcctttcctgaaccttcttgtgatctcaaagcttaacgaatcaatcaaccgctgacatggcagaagaagaagaagaacgcaggatcctggtggccgtggatgaaggcgaggagagcatgtatgctctctcatggtgcctcaagaacctttcttttcaaaattcgaaagacacccttattctcctatacgtcaagccccctcgagtcacttattcagccttcgatggcacaggatatttttttgcctctgacataacggctaccatggagaggtatagccaacaagttgccgattgcgtcttggagaaagccaagaggttgtgtcgagatattgaacatgtggagacgagggtagagaatggcgatacaacggatgtgatgtgtcggagggttc

SEQ ID NO: 29744 - DNA, 241 bp, Glycine max
  Clone ID: LIB3051-006-Q1-E1-B8
aagcactcttccgctcaacgtcagtgttgcatttacatgcaccaatcacaagcgaggaattcaatctagtagctaacaaaaaaaggcctcttgattgcgtctacacgtgtttgtgaccagttgcaaaacctatatagaagaacggaaacgatgtttaccagagattactccactaagggaggaggataaaccatgcagaattctcaaagcgatctctcggtatccaaagggagatggagat

SEQ ID NO: 29745 - DNA, 419 bp, Glycine max
  Clone ID: LIB3051-006-Q1-E1-B9
atgattatgtgctcatgacaaatagctgatattgcatgttttttatgctataactatatgagcaatatagtatggaaagactgttaatttgtattgtccttattttatatgccctacgtccgatgaggtgtcattttgttctttatcgggattgaaatttcgacactttgtagtagggagttccctttaaattgtaatctctaactaactttcgtgtgttgactgtattgtatagcctcctaaactttttatacctattttctgcaacttcttaatgcataggaaatagatgactgcaccttgaagtattttacttttacttatatgccacttaaatttcactgtgtggctaaaattggtacttacctgagttggcactgcgaattctctgggttcactgcattatagtggcacaattc

SEQ ID NO: 29746 - DNA, 372 bp, Glycine max
  unsure (1)..(372): unsure at all n locations
  Clone ID: LIB3051-006-Q1-E1-C1
atctattttaagtaattcaatggcttacactgcaagtcttgtgttcttagcttccactttccttatcataaactttcctcttctggcaaacgctatcggatgcaatggaccatgcagaaccctcaacgactgcgacggccaactcatttgcatcaacggaaggtgcaacgacgaccgcgacgtcggaacccacatctgcggcggcggaatgccgccaaatccgccaccaagcggcggaagctgccagtcctcgggaaccctaaattgcggcggaaaatcgtatcctcagtaccgttgctctccgccggtaacttcctcgacgccggcgatcctgacgctgaacgacttcagcgaaggcggcgacngagggga

SEQ ID NO: 29747 - DNA, 435 bp, Glycine max
  Clone ID: LIB3051-006-Q1-E1-C10
cccacgcgtccgcccacgcgtccgcccacgcgtccggtctgcaccaataacccctagaacagcttcagtagtaggaacacctgttgtggcatctccacctgtgtcatgtccaccctctcagcttcactcaccatctctaacaaggtcacctctacttcaccctgaggatggagatgcaccacgtcgtaaaacatctaagactccaaagactccaagaacccctagaacccctagaaccccacttagaatctctaatttgactccaaagttcatcacccctttgggaagccctatgagaaaagctctgaggttcaccaagcttgatcctcaggatgcttggcttccaatcactgagtcaaggaatggtaacaagtactatgctgcttttcacaccctttgttctggtattggaattcaggcccttgttctccctgt

SEQ ID NO: 29748 - DNA, 410 bp, Glycine max
  Clone ID: LIB3051-006-Q1-E1-C11
atccacttccaattttcaataattcacgactccttccgagatctctctctctcgcccacaatccaaccatggcgaatacggggaatttagacgcggcgatagagcaattgctgaacgtggagaagcagatgaggctcgccggtgacgtggcgggtaccagaaaagcagccaccgatattttgcagctctgcttcgatgcacgagcctggaaaacactcaatgaccagattgtcgttttgtcaaaacgacgtggccagctcaagcaggctgtaacagctatggtgcaacaggctatgcaatatattgacgagacaccagatatcgaaactcgcatagaactcatcaaaacgttgaacagtgtgtctgcagggaagatatacgtggaaattgagagagctcgattgatcaaa

SEQ ID NO: 29749 - DNA, 441 bp, Glycine max
  Clone ID: LIB3051-006-Q1-E1-C12
aatccactggaaggggtcttgtgactggtgcttttgttggtgccacagcttcacacagcaaaagtctccatgtgtttccaatgggtgttttagaggggctccggttcatgtgttgtttccggttcaagttatggtggatgactcagagaatgggaacttgtgggagggatgttcctctggagactcaattcatgcttattgagagcaaagagagtgaaactgatggggagaattctccaatcatctacactgtcttgcttcctctcctcgaaggtcaattccgagctgttcttcaaggcaatgacaagaacgagatagagatttgcctcgagagtggggataatgcagttgagactgaccaaggccttcacatggtttacatgcatgctgggaccaatccctttgaagtcatcaatcaagctgtcaaggctgttgaaaaac

SEQ ID NO: 29750 - DNA, 360 bp, Glycine max
  Clone ID: LIB3051-006-Q1-E1-C4
aggcaatagcaactgctgctgcaacttccatctttcctgctattgagccagggactgtatgtctcattattgagggtttattgtttacatggtggatgtgtggcattcacactggtcaagtgcgccaatctttacagaagaaatatcacttgaagaattcaccgtgtaatgcatgttgtgtgcactgctgctttcactggtgcgccctgtgtcaagaacacagggagatgaatggacggctctcggacaacattttttcagaaatgaccgttgtaaaccctcctcgcgttcaagagatgagatctaccgatgacaaggaaactcctgaaacgtcttcacctaacaacatcgagcatactg

SEQ ID NO: 29751 - DNA, 268 bp, Glycine max
  Clone ID: LIB3051-006-Q1-E1-C5
acccacgcgtccggtcccagttaaaaaagacgcttccaccctccaatatattactcaaatcaagcgaagaagagcactcgtcgcagaaaacctagtacttgacatcggtggccagttcctgtgggtcgagtgcgagagcagcgacgtctcctccacgtaccgcgccgcagcggtctggcgccgcgcagtgctctctcgggacatccgacagctggggaaactgcgtctccgcgcgaaaagccggcggcagggacaggcgtgcggcctc

SEQ ID NO: 29752 - DNA, 351 bp, Glycine max
  Clone ID: LIB3051-006-Q1-E1-C9
atcagatagaaggccagctgacatctgtaaagaaggcactcattgctgtctctcatcggcttcaagattgtcctcctcctgatagaacaaagatgacaggaagcagacattatgaagtggttcagtctgagacattttcagttccacttgagtctttaactaatctgcatatagatcatcatctgcaaaggagctctacattatccactttatccaataggtctaatggcaatgcctctggagctcataaattatcagctgaagttaatagagtctcagccctggatccaaaagcatatcagcaggaagttacctttagaattatttgttccaatgatagggttggtgccc

SEQ ID NO: 29753 - DNA, 372 bp, Glycine max
  Clone ID: LIB3051-006-Q1-E1-D1
atcaaacaccaatactgccattgccagtaacttcacggcccaatcacaggcctggtggagctcctacccaaactcatcatcatggctatagttatagaggacgtggaagaggaagaggaactgggggtttccgctcagtcacaaaattcactgaagattttgatttcacagcaatgaatgagaagttcaaaaaggatgaagtatggggtcatcttggtaaaagtaagtctcattcaaaagacaataacggggaagaaaatgcctttgatgaagattaccaagatgaagacaatgacgatttatcaaacattgaggttaaagtaatgttatctaatgtgcaactttatatgcatccagtttttaccgacatgt

SEQ ID NO: 29754 - DNA, 395 bp, Glycine max
  Clone ID: LIB3051-006-Q1-E1-D11
agttcactcttcctcccttgccgcaacggttttagcgcatcttcatctagatttaccgaatatgggtacggaaaaggttcacatcattattgtggtcattggccatgtcgactctgggaaatccactaccatctgatcaccttgatttataagcctggaggcactgacaaacgtgttactgataggtttaaaaaggaagctgcttacatgaacaagaggtccttcaactctgccttggtgctcgacaatcctacggctgagcgtgacagatgaatcaccattgatattgctttgtggaactctgaatcaacatcgtagcattgcacagttattgatgcgcctgcacatacggatctcattaagaatatgactactgggacatcccaatctgactg

SEQ ID NO: 29755 - DNA, 440 bp, Glycine max
  Clone ID: LIB3051-006-Q1-E1-D12
atccacttctctgtcctttgagtttttctatactctagttcgcgtcgcccaatgctcaacagcatgacaaacgattgacaactcggcaaggtacatagtgctgaacgcacgctttaatttattttaatttcgttgtttatacttaccgtattcaattttacaatatataaattaacatgatgactcgcatgtaataagtttatagtctggtaattaaagcaaaaggcaatcgatacaatttacttcatatttaggtatttgttcatagtatatttttattttatggttttagtaaacaaatggtttatttgctcgtatgtatattgtcatgttgtttaatatttttgtgattagaattgaattgacagtcttacaattaattgactatacaatcaatttccttcagaagagatcaatgtagattactactagctgtataa

SEQ ID NO: 29756 - DNA, 281 bp, Glycine max
  Clone ID: LIB3051-006-Q1-E1-D2
aggacgcgtgggtagccagtgagaaactcctcattctccttcttcttctgctacccatggctttgtcttcttctgagcctcctccaccttcagttcctgctcccgttcaatctaaccctcctccacacttgatgtacaaaaatcgtttacaagagtttacttcaaagtcaggcattaactttcctgtgtatcagaccattaatgagggacaggatcatagtccaaaatttaggtcgactgtgtgggtcgctgatatgggttacacttcccaatccacattt

SEQ ID NO: 29757 - DNA, 279 bp, Glycine max
  Clone ID: LIB3051-006-Q1-E1-D3
atctatctccctctctctctctccctctctctctcatacttattctccctcgcgcgaaagataaacacatttttagttgcaactaatgggaactgttgaagctgcaaacaaggatgcaaatggaagcctcctagagaaaaatcctacagttgtttttgtgttaagtggcccaggcagtggaaacggtacccagtgtgcaaatattgtcgaaaattttgggtatactcacctcagtgctggtgatcttctgggagcagaaatcaaatctggttctgaaaa

SEQ ID NO: 29758 - DNA, 266 bp, Glycine max
  Clone ID: LIB3051-006-Q1-E1-D4
atatcctttcctgaaccttcttgtgatctcaaagcttaacgaatcaatcaaccgctgacatggcagaagaagaagaagaacgcaggatcctggtggccgtggatgaaggcgaggagagcatgtatgccctctcatggtgcctcaaaaaccttccttttcaaaattccaaaaacaccctaatcccccaatacttcaacccccctcaagtcacttattcagccttcaatggcacaggatatttttttgcccctgacataacggctacc

SEQ ID NO: 29759 - DNA, 349 bp, Glycine max
  Clone ID: LIB3051-006-Q1-E1-D6
agtgaaggacactggcggaaatagcagcggtggtggtggttcggaacgagtcagtgctaaagtcgcgcttgagaaggttgttcgtcttcgattggcagttaccgaaaaacaaccacacaaattttgcagaatttgaatcgagctaggtctgcttggtgaaaacggtgcagaatttcatggaggagcagccactggcgcgatgctcgtcatggaagaggatgaggatgaggagactcttctggtgagggttgtcgcgcgcggtgatgaggatggtggtggctgtcacgtgcacaccgagctgggtaggtagagggtcgtgagtggtcgcagaggaggggtggcggtgcaa

SEQ ID NO: 29760 - DNA, 282 bp, Glycine max
  Clone ID: LIB3051-006-Q1-E1-D7
accacgcgtccgcccacgcgtccgcaaaaccctagctcgcgttctgctttcgtcttttacatcagcaggatggagtctcaggtgaagcacgcacttgttgtcaaagttatgggtcgtactggattcagaggacaagtaacccaggttagagtgaaattttgggatgatcagaatcgtcacagcatgaggaatgtgaaaggacctgtgcgataaggagacattctcaccctagtcgagtctgaaagggaagcaggaagattgcgctagacggtttcttttggc

SEQ ID NO: 29761 - DNA, 290 bp, Glycine max
  Clone ID: LIB3051-006-Q1-E1-D8
aagcagaccgagctagctagctagcaagcaagcacagagatggaggcaaagcgaggccatgccctcatgtgcttggcacgtgtttcactcttcctctgcgctctaaccctatccgctgctcacggaagcaccacggttcaagacatcgcgagaaagttgaaactcggggacgacgagcttctgcgcacggagaagaagttcaaggttttcatggagaattacgggaggagcgacgccacagaggaggagtggttgcgccgtttggggattttcgcccagaacatggtcag

SEQ ID NO: 29762 - DNA, 340 bp, Glycine max
  Clone ID: LIB3051-006-Q1-E1-D9
agtttgtaagggagaggtgacacttaaaagtgttaccccaatatatggccgtgcgaacaatgtccgtggtcctgaggaggattctgcacttaagatccctcccaggccccaagcgaagagagttgagagtctgagacaaaccattcagagaaatgcatttgcactccctgtggaagagatgattcggcgtcttggaagcagaattgagcttacacgcgatttggttcagccacctgaaccggatgctgcccgtgaaacagctgagagaaccacttccttgctaaggttcttgactgcgccagggatacgtgcagagcatcagaatccagtgggcaccccc

SEQ ID NO: 29763 - DNA, 373 bp, Glycine max
  Clone ID: LIB3051-006-Q1-E1-E1
accacgcgtccgcgagttggctggggacttcaaaatccattttcatgatcgccaaggagatttttactgttggttgaacaactatgacagaaaataggaaagtattgaacaccagtgatctggatggctttgacaagagaaaattgccttctccgggatttatggttgaggttgtgctggtggattataatggcaatgatgtaacttctaaaactgaaactactacaaagaaatcagatgagagttcaagtaacaatcctgccagttccgccccagtggaaaggagcaccacccctgcagagaatgcagacaaagaatcaaatagtcatgaataagatgacgtgttttcagatggccaggcagagcaatctgc

SEQ ID NO: 29764 - DNA, 320 bp, Glycine max
  Clone ID: LIB3051-006-Q1-E1-E11
agcgactctgatggatacgtacacggtggcatacggggttcctcgctcgaagtggttggatttggcgggtcatcagaaggacctgaatgcacccgctgacgaaattgataaactagtcattgactggctggacgagcaccttcagaacaaacctttgggtgaatacgttgaaagtgatatcacactttatgcacgtgatgatatcagcacctactagttcacaggtcgattggtctgatgctgacaccatatcctcagcgacaaccttgaagtcgatcctgtcaggaactgatactgctactgcgattctcacacgggca

SEQ ID NO: 29765 - DNA, 425 bp, Glycine max
  Clone ID: LIB3051-006-Q1-E1-E2
gaaacattttcacccccttgataccgcttcaattcaccaatggcaagtcgaggaaaaacccagggatctggcacaaccaaaaagggcatctcccgaagcaacaaagctggtctccaattcccagttggtcgtattgctcgatacctcaagattggcaagtatgctgaccgtatcggttctggcgctcccgtgtatctcgcctctgttcttgaatatcttgctgctgaggttttggagttagcggggaatgccgcaatggacaacaagaagactcgtattatgcctcgccatatccaattggctgttaggaatgatgaagagttcagcaggcttctcggagatgtgactatcgccagtggtggtgtgacacctaacattcacaacaatgttgctgcctaaaaaagtttggacctcgaactcaacct

SEQ ID NO: 29766 - DNA, 223 bp, Glycine max
  Clone ID: LIB3051-006-Q1-E1-E3
acgaaacatgtaatgacttgatggcatattcgttaattttgtcctggtgttggcaaaacttccgccttaggaagaaacctccgaaaaattttaacaacccaaggggaattaatcaagaattcctcccccaatttaacttctgccgccgttccccttttccaaaaataaaaacaatttaaaatccttggcctaaatggtcctaaaaccaaacaaaccctccaac

SEQ ID NO: 29767 - DNA, 110 bp, Glycine max
  Clone ID: LIB3051-006-Q1-E1-E7
aatccgaccacgcgtccgcccacgcgtccgtttttttttttttttgcgttttttttttggtttattcggttctgcgggtctctttctttctttttttttgatcccgggcg

SEQ ID NO: 29768 - DNA, 268 bp, Glycine max
  Clone ID: LIB3051-006-Q1-E1-F10
agtttcatctgctgaggaagtgtcagcacctgatgcccaatctgatattccatctggcgtgtcgctatcagaacttcattcaaaaatatcatcagtcctttaattcaagggcaaaggatgctgatctaaaacagatttctaaagaatataaaacccttccttgaaaaggctatatccacttcaagccatacatctgtatctgccattcaccatgagatcaatccttctaatactacttgtgataaccatggtattactgaaaatcctg

SEQ ID NO: 29769 - DNA, 419 bp, Glycine max
  Clone ID: LIB3051-006-Q1-E1-F11
agcaaagatgctgctggacaagttcgtggttctccaaatgaatttgctggaataggctccacatcagcccttctttggctggctagaaggtttgcaattctatctgggcctaccattcctattattggcgagggtgatgaagaggcaaatgataggtatgtagaacaattagttgcaagtgcagaggctgctgtggaggaagttatccagcgtggggtaagctttatttttactgtatggagaatatgaagtttttagtcagaaatatgatgactcgtgatattttgggttgtcacttgtcacatctaggtggctgatccgaagaaaatagctgttggtggacattcctatggtgcgttcatgactgctaacctgctggcacacgcacctcatcttttttgttgtggaattgctccttc

SEQ ID NO: 29770 - DNA, 312 bp, Glycine max
  Clone ID: LIB3051-006-Q1-E1-F2
agaaaaactcacacaccagatagagagaatctaatcagaacagagttctgttccttttcatctgattcgcgaagaacgcaacgatccaagcgcaaccggaagcaatcgatgagtgagtcaattgcatccggcaaggagaacaagagtaacctcggagttagaaatttctccggcggacactcgcaaggctcccggcaaggagcatcaagccgccggcgtcggaatcctcctgcagatcatgaggctggtcatgtccttcgtcctcggccacgtcctccgccgcacgaaagtttacatgagcgccgaagccag

SEQ ID NO: 29771 - DNA, 204 bp, Glycine max
  Clone ID: LIB3051-006-Q1-E1-F5
aaaattagttcattctctttgcgcagttccctacctctcctttcaagatgcagatcttcgtcaagaccctcaccggaaagaccatcacccttgaggtggaaagctctgacaccatcgacaacgtcaaggccaagatccaggacaaggaaggaattcccccggatcagcaacctctcatcgtcgccggaaagcagctggaggact

SEQ ID NO: 29772 - DNA, 426 bp, Glycine max
  Clone ID: LIB3051-006-Q1-E1-F9
agcgcgatggaaaaggtagctttgtaaggcttgaagttgtcacagcttcactgggcttcctaactaattttgaggatgtgtataaattgtgggcttttgtggccaagtttctcaacccgacatttatcagagaagggggtcttcctactgttcaagaaggctccgagacatgagatggcagagttgcccgtgactttattcaattttggaaactgaacatgaaatgaaagattatgtgacaggttgccaaaaggggccgcagccgaagctgcaggaagaatggattggttcatgatgatctgtaagacccctagatagacacaaacttattttctgcatcaaaagaagaataagcaagccgggttgatttgttaattcatgtttcctgttgcctacaattttaataattttccccttttggttttt

SEQ ID NO: 29773 - DNA, 110 bp, Glycine max
  Clone ID: LIB3051-006-Q1-E1-G3
accacacgtccgcccacgcgtccgcccacgcgtccgtacacttgtactgttctattagttcatactaagttctgaaaatgagttccaaggttttgcttgttctacttatg

SEQ ID NO: 29774 - DNA, 366 bp, Glycine max
  Clone ID: LIB3051-006-Q1-E1-G4
aatacacctcccaacccaatcaaatcaaatcttcgttcgaatccttttctctttatcgttcaccgcatcgcaaactcaccagatccgtcgtcgattcggttttcccgctttctatttttcgtttcccattttctcccggaacgtgaagttctcgctctgatctcacgtgagagttttggaacctgatgagtgcgtatatgtgggtgtatcgtagtgaaggcgtgttttgagttatcgtcggttttgaaggaatgatgttctggagggaccgtgagagagagaacagagagttgaccggtggggtcctatgtggcctggtcagagtcttcggtgttggtgattccggtgttgggaagacttctttag

SEQ ID NO: 29775 - DNA, 346 bp, Glycine max
  Clone ID: LIB3051-006-Q1-E1-G7
tgatgctagcgtcgcatccaactcagtacatatcttctattgaatcagacgagcgaagatggattttgaaaaatatgtgctgcacaataacagcactgaggcacactttactgctgagacttatcaaggaatttctgccatagcacgtaaaaatgagctcacgacagcactccaccatcatatgttagttgattctgtcgaggtccatcgtgaggggaattgcaatgcagtccagaagcacaactgactgttacgttgccgagtaaattatctgcgtgccatgtagcctaacatcgaaagccacagttacatacatggacgtgtgcattacaatacgagcggctga

SEQ ID NO: 29776 - DNA, 424 bp, Glycine max
  Clone ID: LIB3051-006-Q1-E1-H10
acttaatgggaagaaagttgatgataaggagtggtatgttggaaaagcccagaaaaaatctgagcgtgaacaagaactgaaaggacggtttgagcagagtataaaggaatctgctgacaaatatcaaggtgtgaacctgtatctcaagaacttggatgatactatcagtgatgaaaaacttaaggaaatgtttgctgaatatggtacaataacttcatgcaaggttatgcgagaccccactggaatcggtagaggatcaggatttgttgcattttcaactcctgaggaagcatctcgtgctctcggtgagatgaatggtaaaatgattgctggaaaacctctgtacgttgcccttgcacagagaaaagaagacagaagagcaaggttacaggctcagttttcacagatgaagcctgttgcaata

SEQ ID NO: 29777 - DNA, 432 bp, Glycine max
  Clone ID: LIB3051-006-Q1-E1-H11
cccacgcgtccgataaggaagacctaaaacataattctttaaggttctggtcgaattttcttttgtggagaaaataaagggttcaaaagtatgttaagtttgggtattgcggaaagaaaggatagaaaatcgagttaagagcccccacctctgccacagcagcgtaatagcaaatgagggagattttttttactcagtttttcctatttgttttggcccagatctgaatttttgggttcctcagctggattaatttatatagttcttttacttttatatgttccccaggtagcaaagtaacgaaagccattttgtcacgttgagtttgatatcattctcttgatactgttttgtattgtatattgtcaagtaagcgtataagactcatctcggtgcaatggatacttttgaatgctcgctgtttttgtcctt

SEQ ID NO: 29778 - DNA, 323 bp, Glycine max
  Clone ID: LIB3051-006-Q1-E1-H2
accacacgtccggtgggacatgtgcacgactattcaaatctgaagtacaatttggtcatgcaggagccaaaagtggtggtgagttggagtctgctcaagcaaagaatcaggcactaagggatgctggagctgttgttcccacatcatatgaagcttttgaagtttcaattaacgaaacatttgataaattggttgaagatgggaagatcacaccaatcaaggaaatcacacctccaccaatccctgaggaccttagtactgcaattaagagtggaaaagtccgtgctccaactcatattatttccaccatttctgatgacaga

SEQ ID NO: 29779 - DNA, 238 bp, Glycine max
  Clone ID: LIB3051-006-Q1-E1-H3
cacaaattcagtgaggataaaacggaagttcaatttggcagacccatgctagtggttgtgtctctgtccaacagttttttagatgagttgcccaacgcttgctctgacacggaatggatgctgcctgagctttgtatccttctaaaaatgtcttataattacatagccaagcaaaatataatgttctcaacatgaaatggagcatctcttcctctctctgtcggtgtgtgtgtgtgtg

SEQ ID NO: 29780 - DNA, 417 bp, Glycine max
  unsure (1)..(417): unsure at all n locations
  Clone ID: LIB3051-006-Q1-E1-H5
accacgcgtccgcccacgcgtccgcccacgcgtccgggatagaggaggagacgtangaaactattgttatacaaattcattcaaatatattttataacttgtgattttttccaacagcatctcttgtaattttaattgaaatttctccttaagttgaaattttctgtattcatctagaatttatttttgaataggccgactaaggttgagaatttgtatcaaagtggaaatgctgtacgaactactttgggtccaaaaagagacattagagcagagaaagggaaagagtcttcaaaacaaatagaagaaaaatctaacacaaaatgggtggaaagaacacgtcttcaatcaaaagtgaaggacgaaaaagaggcagagatgaaaacgctaaaacataatgtcaaaggcacatcctca

SEQ ID NO: 29781 - DNA, 383 bp, Glycine max
  Clone ID: LIB3051-006-Q1-E1-H6
aatccgatcaaaagcatataagagatggggttagaagggaaggaaacgccgtcgtttatgagggattttctcgataagtgtggtggctgcgccgttattgacggtggttttgccactgaacttgaaaggcatggggcggacctcaatgacgaactctggagtgccaaatgccttattagctccccagatcttgtccgaagggttcacctagattacctcgatgcaggagcagacataatattaacagcatcttatcaggccactattcaaggttttgaggccaaagggttctctagagaagaaggtgaaactatgcttagaagaagtgtggagattgcacgtgaggcacgagaaatttattaggataggtgcaccagagattc

SEQ ID NO: 29782 - DNA, 378 bp, Glycine max
  Clone ID: LIB3051-006-Q1-E1-H7
cccacgcgtccgcccacgcgtccgcccacgcgtccgtgacagagtaaatttggagaagctcaagcaaaagagcacaaggccaaacaagcacagttggcaaaggcaaaggctgctcctgatataaatcctaacttaatagaaataacagagagagttgtaattaaagaaaagcccaaggaccaaattccagagattgagtggtgggatgtgcctcttctgcattctggaaattatggtgatgttgataatggaatcataggcgaagataaactgaaaatagaaaaaatcaatttttatgtcgagcatcctcgtccaattgagccacctgctgagcctgctcccccacctcctcaaccactcaagctaactaagcaagag

SEQ ID NO: 29783 - DNA, 359 bp, Glycine max
  Clone ID: LIB3051-006-Q1-E1-H8
aggcaaattggatgccgagaagctgcgagataagatcgccgagagaaccaagaagaaggttgacatcatctcagctccgcccaaaaaagaagccgccgccacggaaaatccaccggagaagaaggttgaagagaagaaacctgaagagaaaaaaccagaagaaaaacctaaagagagtatggtggttttgaagatcaaactgcactgtgacggttgcattgcgaaaattcgaagaatcattatgaggttcaaaggtgtacaatcggtgagccttgacggaagcaaggacttggtgacagtgaatggaacaatggacgttaaggagatggtgtcgtacctgaacgagaagctgaaacgaa

SEQ ID NO: 29784 - DNA, 329 bp, Glycine max
  Clone ID: LIB3051-006-Q1-K1-A10
ctttgattcccattactcatttccaccatttcaccttctcaatctgtttctctgctttgctaatttgtcccaaatgagaaccagattgagcttctgcacaaccagaccagagattcaacgcagaaactgtgcttatccctggtccataggatctgatttggttcataagagagtagtacacgtttcattgctcgaaatagagttgaaaaatctggagtttccatgtctgagaaaccatcttcatcgttgacatctaccgtagctgctcgagaagttgatcccttgttgcatgatttgaatgagaagaagctgagctttatgcgcaacgt

SEQ ID NO: 29785 - DNA, 420 bp, Glycine max
  Clone ID: LIB3051-006-Q1-K1-A11
caacaacatcgccttcacggttcatatcacaactaacagtcgtggatgctgatcattctcttctgttcactggcacttgatagatccctctctcgcagcttccattcgtaatccagattctctttgatcggatgcatcttctgggttttgaacctgttactcctcatcaacattatttgtagagggaaaggaggtgtcctttcagtttgaacagctttagattctcaaacaattaaggaaatcagttatggctccttctaggaaatctagaagtgtaaataagaggttttctactgttcgtgaagctgcatctagtaaagacaaaattacagagaatgctagcaaaaataggctgaagaagagaaaattggctgacatgttagggccacaatggaataaggaggagcttgagcctttcta

SEQ ID NO: 29786 - DNA, 367 bp, Glycine max
  Clone ID: LIB3051-006-Q1-K1-A12
gttagagctgcatcctcatctccggagtgggatgatgccaagatcgctcctcttcagctggagtccccaattgggcagtttctttctcagattttgaaagatcacccgcatcttgtgcctgctgccgtcgaccagcaactccaccagctccaaactgaccgcgatgctcatctacaaaaccaacaacagccttcttcacccactgatttagttttgtacaggagaattgctgaggttaaggctaatgaaaggaggaaagctctggaagagatcttgtatgcattggtggtgcataaattcatggatgctaatatttctttgataccctctgtaaccccatatcttgtctggttagggttgatttgtg

SEQ ID NO: 29787 - DNA, 402 bp, Glycine max
  Clone ID: LIB3051-006-Q1-K1-A4
ctttcatagatctgatgcatggaggctcagatctactgtacagaggtgtgcgattcgtgtgcgtctctcttttggaatctgtttcgtagaaagtcgtttggtcttccatgtcgcatggctcttgaggtatttttttttgcagatactgtagataatcgatgagaagaacgcagatccagccgcttccgcttgttcgatcgctacagacgcttgtatcggattattcatgattgattcataagcagcatgtcttcctccggctatagttgttgcagatctcggatgttgtaaaattagtgtatgatgtgaagctatgggctggaaaatgtggatgtatgaaatttcgggacgaaaggcctcaaaacgctttctcgtttgtggtttctgggtcctgagtgatct

SEQ ID NO: 29788 - DNA, 397 bp, Glycine max
  Clone ID: LIB3051-006-Q1-K1-A7
gccccttctgccctccccagccattaactgaaaaaaaaaaccaaaaaaccaaaaatactacaaatttttttcagtttctccgccgccgcacaaccaccacctcctccgttcggatctccggcggacctactatccctactactactctactctatttacacggaagaacaaaaaactatccccctcccccaaaaaaaaccccaaagcggctcggttagggtttagttttgtaccatttcgtgtaatctaatttttcatccgtaaaaatctaattttgaggcggcgagatggcggagattcaggtgcagcatcagagtccggtgtcggcggcttcttctccaaacggctgcttggctaacgcccattatctactgcttaccaattagtgacttctttt

SEQ ID NO: 29789 - DNA, 406 bp, Glycine max
  Clone ID: LIB3051-006-Q1-K1-B1
gaaagtgaaaggcccttgttgtcctctcccctccccaccagcaccacgagacacagccgtgtcccccgtccactacgcccgcttcctggacttcctgaaatcccactgggccccacctttcaccccggacaccctcctccactttttgaaatccaagctccatcaccacccttccttctcccacttcgacttccacctcttcacatgggcctcctcctccctcgactctttccgccacacccacctcaccttccactggatggcccgctccctcgcctccacccaccgcctcccccaactccgcaccctcctccacctcatctcctccaacccctgcccctgctccccctccatcttctcctgcccccaaacccaacccatcttctccctctccatccacgccttc

SEQ ID NO: 29790 - DNA, 437 bp, Glycine max
  Clone ID: LIB3051-006-Q1-K1-B11
atatatatatatatataaataaataaatgataaaattattaatttttataacaattactttaatgtatcttatccaataacgaggtcgcgtaaattattttatgtcttgaaacctctcacctccgatccctctaattctcacccaaactgtagtcccattcttccgcaggtgaattgttccctttccttttgctcctttccacatgtgctgaacttatttccataaatcataattccacgcttccacctacatcttcagcaaccaattattttatttgctgaacttttcttttgtttccttttcttcactacccaacctttcataagggattaatgccaaacaataaacaacgttttaacatatgcgtaagtgaatcagaatggaagaggcaacggagcaagtacaaaccaaaaaacgtggtgtaaccaaacgtgtg

SEQ ID NO: 29791 - DNA, 396 bp, Glycine max
  Clone ID: LIB3051-006-Q1-K1-B3
cccacgcgtccggcagtttattctatcatatccttgttcaaataattttcttttcagttagcggtaccccaatcccagaaacttatgttcatgaccatcctcaaggtcccaataacatttacttgaagacaattttgagttgaccttacagcctagttccacctacaaacacccttgatccttcaaagcctctcatagttccaatactggcaacaataatactcttgggcatctaaactatctccattcttttttccccctttctttgcagtggatttgcgaggttttaaagaaattaaatgcgtttttatgtgctaaagagctaggtaattatagaattcatctcacacatacttctttttactaccttttatcttttagatattatttttgaat

SEQ ID NO: 29792 - DNA, 428 bp, Glycine max
  Clone ID: LIB3051-006-Q1-K1-B4
cacaagagcctctttaatttccccatcccctctagattttctctctaaatggttttcgaaagatctctcacaatggcctttaatctcgtgcttttgttctgtttggttgcggtgatcaacaatgttgtcattccaactagtgctagacaactcatgatgactgcatcaccaaatgagaaagaagtgatgaatattggcactgaaaatagaggacatgatgaacatgatcatcaagcacaagtactagacgatccaacaagcaagaataacgtggaaaagaaagaagaaagatttgacaagaaccaactcttccctccctttttcccacttccgccatttactcttccatttccacgtgctgcttttccatttccacgttttccacttccagggcttccatggccaataggcccaactggggcttcttt

SEQ ID NO: 29793 - DNA, 82 bp, Glycine max
  Clone ID: LIB3051-006-Q1-K1-B5
tcccacacttcctctctcacacccttctttgacctcctattctccccacatcagatcgcaaatctccaaacctttcatccat

SEQ ID NO: 29794 - DNA, 239 bp, Glycine max
  Clone ID: LIB3051-006-Q1-K1-B6
ttatcctttcctgaaccttcttgtgatctcaaagcttaacgaatcaatcaacgggctggcatggcagaagatgaagaagaacgcaggatcctggtggccgtggatgaaggcgaggagagcatgtatgctctctcatggtgcctcaagaacctatctttttaatattccaaagacacccttattcttctatacgttttgccatctctagtctcttattcattcttctatagctctggata

SEQ ID NO: 29795 - DNA, 340 bp, Glycine max
  Clone ID: LIB3051-006-Q1-K1-B9
tgattatgtgctcatgacaaatagctgatattgcatgttttttatgctataactataggagcaaggtagtatggaaagactgttaatttgtattgtccttattttatatgccctacgtccgatgaggtgtcattttgttctttatcgggattgaaatttcgacactttgtagtatggagttcccttttaattgtaatctctaactaactttcgtgtgttgactgtattgtatttccttctaaactttttattcctattttctgcatcttcttaattcctttgaattatatgactgcaccttgtagttttttatttttacttatattctatttttaatttt

SEQ ID NO: 29796 - DNA, 425 bp, Glycine max
  Clone ID: LIB3051-006-Q1-K1-C1
ctctattttaagtaattcaatggcttacactgcaagtcttgtgttcttagcttccactgtgcttatcataaactttcctcttctggcaaacgctatcggatgcaatggaccatgcagaaccctcaacgactgcgacggccaactcatttgcatcaacggaaggtgcaacgacgaccgcgacgtcggaacccacatctgcggcggcggaatgccgccaaatccgccaccaagcggcggaagctgccagtcctcgggaaccctaaattgcggcggaaaatcgtatcctcagtaccgttgctctccgccggtaacttcctcgacgccggcgatcctgacgctgaacgacttcagcgaaggcggcgacggatgggacccgtcgcagtgcgacgagaaattccataacaacacggaacgtgtggtggcac

SEQ ID NO: 29797 - DNA, 138 bp, Glycine max
  Clone ID: LIB3051-006-Q1-K1-C12
ctggagagatcttgtgactggtgcttatgttggtgccacagcttcacacagcaaaaggctccatgtgtttccaatgggtgtattatagaggctccgattcatctgttgcttaacgtctatattctgattaagctctcc

SEQ ID NO: 29798 - DNA, 144 bp, Glycine max
  Clone ID: LIB3051-006-Q1-K1-C5
cccactcgtccggtcccagttaaaaattacgcttccaccctccaatatattactcaggtcaaacaaagaactccactcgtcccataaaacctattacttgacatcggtggctaattcctgtttggtctattgttacttctactt

SEQ ID NO: 29799 - DNA, 100 bp, Glycine max
  Clone ID: LIB3051-006-Q1-K1-C7
agttgctgttcatagtgatacatgtttacttgcccttgccttttattttatagccgggattttatataatttatgctctcaagaatcttactattcatta

SEQ ID NO: 29800 - DNA, 355 bp, Glycine max
  Clone ID: LIB3051-006-Q1-K1-C9
atcagatagaaggccagctgacatctgtaaagaaggcactcattgctgtctctcatcggcttcgagattgtcctcctcctgatagaacaaagatgacaggaagcagacattatgaagtggttcagtctgagacattttcagttccacttgagtctttaactaatctgcatatagatcatcatctgcaaaggagctctacattatccactttatccaataggtctaatggcaatgcctctggagctcataaattatcatctgaagttaatagagtctcaaccctggatccaaaagcatatcagcgggaagttacctttagaattatttgttccattgatagggttggtgccatttt

SEQ ID NO: 29801 - DNA, 434 bp, Glycine max
  Clone ID: LIB3051-006-Q1-K1-D1
ctcaaccaccaatactgccattgccagtaacttcacggcccaatcacaggcctggtggagctcctacccaaactcatcatcatggctatagttatagaggacgtggaagaggaagaggaactgggggtttccgctcagtcacaaaattcactgaagattttgatttcacagcaatgaatgagaagttcaaaaaggatgaagtatggggtcatcttggtaaaagtaagtctcattcaaaagacaataacggggaagaaaatgcctttgatgaagattaccaagatgaagacaatgacgatgtatcaaacattgaggttaaggtaatgttatctaatgtgcagctttatatgcatccagtttttaccgacatgtatttctgtaatttgggttcttgtcttcctatcgtgtttgggtctctggtattcatgggtttt

SEQ ID NO: 29802 - DNA, 420 bp, Glycine max
  Clone ID: LIB3051-006-Q1-K1-D12
cttctctgtcctttgagtttttctatactctagttcgcgtcgcccaaggctcaacagcgtgacaaacgattgacaactcggcaaggtacatagtgctgaacgcacgctttaatttattttaatttcgttgtttatacttaccgtattcaattttacaatatataaattaacatgatgactcgcatgtaataagtttatagtctggtaattaaagcaaaaggcaatcgatacaatttacttcatatttaggtatttgttcatagtatatttctattttatggttttagtaaacaaatggtttatttgctcgtatgtatattgtcatgttgtttaatatttttgggattagaattgaattgaaagtcttacaattaattgactatacaatcaatttccttcagaagagatcaatgtagatta

SEQ ID NO: 29803 - DNA, 409 bp, Glycine max
  Clone ID: LIB3051-006-Q1-K1-D2
cggacgcgtgggtagccagtgagaaactcctcattctccttcttcttctgctacccgtggcgtttgtcttcttctgagcctcctccaccttcagttcctgctcccgttcaatctaaccctcctccacacttgatgtacaaaaatcgtttacaagagtttacttcaaagtcaggcattaactttcctgtgtatcagaccattaatgagggacaagatcatagtccaaaatttaagtcgactgtgtgggtcgctgatatgggttacacttcccaatccacattttcccataaaaaagctgctgagcaagatgcaactagacttgctttggaaagtatccttaataggaccagagatgaatgactctctcttgtcaatcagatttctccattttccaagtctatcatgaatg

SEQ ID NO: 29804 - DNA, 254 bp, Glycine max
  Clone ID: LIB3051-006-Q1-K1-D3
ctctctctccctctctctctcacactctctctatcatacttattctacctctagcgaggggtttacacatttttaattgcaactaatctgaactgtctaatctgcatacaaggatgcaaatggaatacttttagaaaaaaatcctacaattatatttgtgttaagtgtcccacactatctaaactgtacttaataagcaaatatagtttcaaaatcttggtatactcatcttattgcctgtgatcttcttttat

SEQ ID NO: 29805 - DNA, 224 bp, Glycine max
  Clone ID: LIB3051-006-Q1-K1-D6
gtgaaggacactggcggaaatagcagcggtggtggtggttcggaacgagtcagggcgaaagtcgcgcttgagagggttgttcgtcttcgattggcagttaccgaaaaacaaccacacaaattttgcataatttgaatctagctaggtctacttggtgaaaacggtgcacaatttcatggatgagcatccactgtcgctatgctcgtcatggaatatgatgatga

SEQ ID NO: 29806 - DNA, 291 bp, Glycine max
  Clone ID: LIB3051-006-Q1-K1-D9
gtttgtaagggagaggtgacacttaaaagtgttaccccaatatatggccgtgcgaacggtgtccgtggtcttgttgaggaatctatcactttttattttttttaatcttctatctgatttttgtttttaattattaatcttttttatattttataatattttgttttttttatatttatattttatatttatttattattatataatatattattatattattttttattatatattattttattattttaatttattttttttttatattattatttatttattattttt

SEQ ID NO: 29807 - DNA, 407 bp, Glycine max
  Clone ID: LIB3051-006-Q1-K1-E1
tcgcccacgcgtccgcgagttggctggggacttcaaaatccattttcatgatcgccaaggagagttttactgttggttgaacaactatgacagaaaataggaaagtattgaacaccagtgatctggatggctttgacaagagaaaattgccttctccgggatttatggttgaggttgtgctggtggattataatggcaatgatgtaacttctaaaactgaaactactacaaagaaatcagatgagagttcaagtaacaatcctgccagttccgccccagtggaaaggagcaccacccctgcacagaatgcagacaaagaatcagatagtcatgataaagatgacgtgttttcagatggcgaggcatagcaatctgcttcttcaagaagcaagcaaacaaaagcacct

SEQ ID NO: 29808 - DNA, 143 bp, Glycine max
  Clone ID: LIB3051-006-Q1-K1-E11
atgaatttgatggatactttcacggactcatatgggcttcctcgtttgaagctgatgggtgaatggaatcattcgccggagcttattccacacgatgacagagtggtgaaacacttcatggacattctgttaccgctcatcac

SEQ ID NO: 29809 - DNA, 337 bp, Glycine max
  Clone ID: LIB3051-006-Q1-K1-E4
ccgattcgttgcaacgcattccaacatgtctctaccttttcatcttcagactttcatgatgtatgctcaatgtctcggatttaagggcatatctcactatgagggacctgattcagataatcacacagccttgccatgccctggggaactactagttgaagagcaccatagcaactatggtgaaccttgggccgggggaagagatgtgtttgagtttcttgctgaagccagtcaacttagatcagactcacaggtgctagagataggctgtggcactcttcgagttggtttgcatttcaatcgataccttaatcctgaacactttcaatgtcttgaa

SEQ ID NO: 29810 - DNA, 432 bp, Glycine max
  Clone ID: LIB3051-006-Q1-K1-E6
caacaacaacataatcatgagccaattcttgttgctaccaacaacaacaaccctgagtcctctgcagttccggctccaaagccaatcctcaaaagtgccctcaagcgccccaaccctactcaacccgacacccaagctgcagcacctaagaaaagcttgaagttcaaaaccacaacggatgcttctgaagcacaagttattgaggccatgcagaagataacttcacacatcaagaaccctgcaaagttcagcaaggctgcaaagcttgctatacagctgattcagatccttcagttcgggcagattatcattctctgttctccgtagctcaaaacaccaaagagcacctcaataagaaacaaaagaatcaactggaaacttggacaattaatgctgtggtggcgaatgatttatatacagatgaccagcttt

SEQ ID NO: 29811 - DNA, 94 bp, Glycine max
  Clone ID: LIB3051-006-Q1-K1-E7
cccacgcgtccgcccactcgtccgtttttttttttttttatttttttttttttgtttgtttttttatatttttttttttttattttttttttta

SEQ ID NO: 29812 - DNA, 355 bp, Glycine max
  Clone ID: LIB3051-006-Q1-K1-E8
gaaaaactcacaaaccagatagagagaatctaatcagaacagagttctgttcctttgcttctgattcccgaagaactcaacgatccaatcgcaaccggaagcaatcgatcagtgagtcaattgcttccggcaaggagaacaataatgacctcggagttagaaatttctccggcggacactcgcaaggctcccggcaaggagcagcaagccgccggcgtcggaatcctcctgcagatcatgatgctggtcttgtccttcgtcctcggccacgtcctccgccgcaagaaagtttacatcatccccgaagccagtgcttctcttctcatagggttaattgttggcatactagcaaaca

SEQ ID NO: 29813 - DNA, 165 bp, Glycine max
  Clone ID: LIB3051-006-Q1-K1-E9
cccacgcgtccgcccacgcgtccgtttttaagaatttattaaacataagctttctagcgaaaaagagaaaatataaaaagaaaaaaaaaaaaaaataaaaaaaaaaataaaaatgaagataaaataataagaaattaatataaaataaataagaaataaaaatta

SEQ ID NO: 29814 - DNA, 421 bp, Glycine max
  Clone ID: LIB3051-006-Q1-K1-F1
caccaatgaagtctcccatgcatgacttgggataagtcgtaaaagcatgtaagatagggtgtataaaaagtctctgttccctttccctccttttagaagactcccaatcaaggggaaggctaaccagaagttttaccttccctttccctcccaaatccctcatccaaacatgcccctggtgttctgacatcttcaatatgaagtttacttctctaattcacaatttatacaacatcagatgttcttggaaaggggtattgtgccattatggttgttgggcaattttaaatggagtgtgtcttattaatttatatatatttgagacaaatatttataaaaaggacggatgtaatttcaaattttatgcattcattgggctgaaattataaaaagtaaattttataataaagatgtctatttg

SEQ ID NO: 29815 - DNA, 353 bp, Glycine max
  Clone ID: LIB3051-006-Q1-K1-F10
gttgcatctgctgaggaattgacagcacctgatccccaatctgatgttccagctggcgggtcgctagcagagcttgaatcaagaatatcatcagtctttgagtccacggctaagggtgctgacatagagaagatcctgaaggatattaaacacgttcttgaagaggcatgctgcacttccatccagaactctgtatctgccattccccatgatgtcaagccttctgatactacgtgtgatgagcagggtaatactgaagatgctgctggctcaaatgcagaaaaagaaattatttcgtcccagcgacctatataatatgtgcagatgacttctgatttagaagtcgcaacttc

SEQ ID NO: 29816 - DNA, 365 bp, Glycine max
  Clone ID: LIB3051-006-Q1-K1-F12
ctccagagaccgtggccaatgaccctgttgtgtccttcaagacagccttgtggtactggatggaacatgtgcgtgctgtgatcaaccagggttttggtgcaaccattagagctatcaatggccgacttgaatgtgatggtgcaaaccctagtactgttcaggctcgtgttaattactacacccagtattgttcacaacttggtgtttcccctggtgacaatcttacttgctaatttatcagtatagatggttccatatgatgacatcatacattcatacagtatatcttaacatatatcagagaataaaccattcaaggcttacagccttattttgattattaatgtaattaactcttttgggaa

SEQ ID NO: 29817 - DNA, 433 bp, Glycine max
  Clone ID: LIB3051-006-Q1-K1-F2
ggagaatgaagatctttcagtgaaagcaaggtcaaagtttagcacatctttacgcaggttatcacaacctatgtcacttggggagatagcaaggacttgggatgtttgtgctcgcagtgttatttctgagcatgcacagcagagtgggggaggaagcttcagctctaagtatggaacttgggagaattgtttgaccaccaactaatgttccatgcaggcctttttgtttcgacccaaacattctgcttctattaatataagtaatttattggatgtagataaaagcctagttatgaagtagcataccatggagtttgtcaatctgtatatactggttttgctattggcaagggaattatcatgattaggaagttatacttaaattatataaagcataatcccatattaagtggaatattgtttcaaataaaaa

SEQ ID NO: 29818 - DNA, 283 bp, Glycine max
  Clone ID: LIB3051-006-Q1-K1-F4
ggatagagtacctaggataaccgagaaactcacttgggcttcttcccttattgcaagagcggctcggattggctatcattattagccagttttttgggtttcatctgtattaagtattaaaacatttttaatcagactttttttggtatttagaaaaagtagagacgttggacagaaatttgggttgtttagaggaagtacaatccaggaaacatgtgaaattgattgttgattatttactttgcacttgaatgtgtgtaggtatatgtaagttccatgattc

SEQ ID NO: 29819 - DNA, 312 bp, Glycine max
  Clone ID: LIB3051-006-Q1-K1-F8
cccacgcgtccgcaactggtttggtgagatgaagggtgttctttccatcagcggctggttttgttgcttgctgctacttttggattcttcagtttcacttcctctatgcgttgattcaagggcaccctttaccttgaacaagacacttgggttttgtccttacaatggaagcacgtgttgcaactccacacaagatgcacagattgataagcaattccgagcaagcaacgtttcagatcctggctgtgccttggttttgaaatcaatactttgtgctaagtgctacccattttcatgggagctatttactat

SEQ ID NO: 29820 - DNA, 283 bp, Glycine max
  Clone ID: LIB3051-006-Q1-K1-G3
cccacgcgtccgcccacgcgtccgcccacgcttccgtacacttgtactgttctattagttcatactaagttctgaaaatgagttccaaggttttgcttgttctacttatgttcttggccactatacttctgatctcctctgaggttgcacccgatgatgcatacgagaattttgacaaaatagatgggaagcctagtgcagatggggtagatgaaagcaagtattggcgtggcggctatggtggcggctatggtggtggttatggaggttggcgtggaggcta

SEQ ID NO: 29821 - DNA, 370 bp, Glycine max
  Clone ID: LIB3051-006-Q1-K1-G4
catacccctcccaacccaatcaaatcaaatcttcgttcgaatccttttctctttatcgttgaccgcatcccaaactcaccagatccgtcgtcgattcggttttcccgctttctatttttcgtttcccattttctcccggaacgtgaagttctcgctctgatctcacgtgagagttttggaacctgatgagtgcgtatatgtgggtgtatcgtagtgaaggcgtgttttgagttatcgtcggttttgaaggaatcatgttctggagggaccgtgagagagagaacaaagagttgaacgggggggtcctatgtggcctggtcagagtcctcgttgttggtgattcttggggttgggaatacttctttagttt

SEQ ID NO: 29822 - DNA, 236 bp, Glycine max
  Clone ID: LIB3051-006-Q1-K1-G7
ggatgccgtcgatgcatattactcagaacctatatactatagaatcagacgagtgaggaaagatattgaagatgaggtgctgcctaataatttcactggtgcacactttactgctgaaagttatcaaggaagtgctggcatatgacttaaaatggagccatgtgacttcaattgaacatcatatgttagtggattctttcaaggtccatgtggatggaacttggtaatgatgcata

SEQ ID NO: 29823 - DNA, 186 bp, Glycine max
  Clone ID: LIB3051-006-Q1-K1-H1
tcgcccacgcgttcgatcagaacatcgaggaaatagcagcattggatgccattgatgcagggaagttgtaccattggtgcaaggctgttgacattcctgctgcagcaaatactattcgttactatgccggtgctgccgattaaattcattgggagggtttaaaaaccttttagggagttcaatgct

SEQ ID NO: 29824 - DNA, 429 bp, Glycine max
  Clone ID: LIB3051-006-Q1-K1-H11
cccacgcgtccgataaggaagacctaaaacataattctttaaggttctggtcgaattttcttttgtggagaaaataaagggttcaaaagtatgttaagtttgggtattgcggaaagaaaggatagaaaatcgagttaagagcccccacctctgccacagcagcgtaatagcaaatgagggagattttttttactcagtttttcctatttgttttggcccagatctgaatttttgggttcctcagctggattaatttatatagttcttttacttttatatgttccccaggtagcaaagtaacgaaagccattttggcacgttgagtttgatatcattctcttgatactgttttgtattgtatattgtcaagtaagcgtataggactcatctcggtgccatggaatactttgaatgctccctgtttttgtc

SEQ ID NO: 29825 - DNA, 243 bp, Glycine max
  Clone ID: LIB3051-006-Q1-K1-H12
ctactttgggacctgtagttgtgatctcttggatgaaaagggaactacttgagttgtgggaaggagacaccccaaatctcaatgataaagatcgcgaaatagaagtttagtctagtgacaggtggtttatagccaaacagaaagctgtaaatttactgagaatctttaatcgtcagactcatcaagaaaatttacattaaaaaaaaaaaaaataaaaaaaaaatagaatatgtgtgaaaaata

SEQ ID NO: 29826 - DNA, 417 bp, Glycine max
  Clone ID: LIB3051-006-Q1-K1-H3
ctcaatttcagtgaggataaaacggaagttcaatttggcagacccatgctagtggtggtgtctctgtccaacagttttttagatgagttgcccaaggcttgctctgacacggaatggatgctgcctgagctttgtatccttctaaaaatgtcttataattacatagccaagcaaaatataatgttctcaccatgagatggagcatctcttcctctctctgtctgtgtgtgtgtgtgtgtattaatcttgatattagtttccttaatccaacaaagtattcagttttagtgttgttggtgatcttagtggagctgggatgtgcagcctttatattttttgacaaaagctggaaagaagttagttgtcactggcattttatgatatgaaattcaagaagttatttttgtatatttataa

SEQ ID NO: 29827 - DNA, 395 bp, Glycine max
  Clone ID: LIB3051-006-Q1-K1-H5
cccacgcgtccgcccacgcgtccgcccacgcgtccgggatagaggaggagacgtaggaaactattgttatacaaattcattcaaatatattttataacttgtgattttttccaacagcatctcttgtaattttaattgaaatttctccttaagttgaaattttctgtattcatctagaatttatttttgaataggccgactaaggttgagaatttgtatcaaagtggaaatgctgtacgaactactttgggtccaaaaagagacattagagcatagaaagggaaagagtcttcaagaaaaatagaagaaaaatctaacacaaaatgggtggaaagaacacgtcttcaatcataagtgaaggatgaaaaagaggcagaaatgaaaaggcttaaaca

SEQ ID NO: 29828 - DNA, 421 bp, Glycine max
  Clone ID: LIB3051-006-Q1-K1-H7
cccacgcgtccgcccacgcgtccgcccacgcgtccgtgacagagtaaatttggagaagctcaagcaaaagagcacaaggccaaacaagcacagttggcaaaggcaaaggctgctcctgatataaatcctaacttaatagaaataacagagagagttgtaattaaagaaaagcccaaggaccaaattccagagattgagtggtgggatgtgcctcttctgcattctggaaattatggtgatgttgataatggaatcataggcgaagataaactgaaaatagaaaaaatcaatttttatgtggagcatcctcgtccaattgagccacctgctgagcctgctcccccacctcctcaaccactcaagctaactaagcaagagcagaagaaactccggacgcaaagacgtatagctaaggagaaag

SEQ ID NO: 29829 - DNA, 417 bp, Glycine max
  Clone ID: LIB3051-006-Q1-K1-H8
ggcaaattggatgccgagaagctgcgagataagatcgccgagagaaccaagaggaaggttgacatcatctcagctccgcccaaaaaagaagccgccgccacggaaaatccaccggagaagaaggttgaagagaagaaacctgaagagaaaaaaccagaagaaaaacctaaagagagtatggtggttttgaagatcaaactgcactgtgacggttgcattgcgaaaattcgaagaatcattatgaggttcaaaggtgtacaatcggtgagccttgacggaagcaaggacttggtgacagtgaagggaacaatggacgtgaaggagatggtgtcgtacctgaacgagaagctgaagcgaaacgtggaagtggtggcctcttcgaagatagacgacaatatgaaagagaaagaaggtgac

SEQ ID NO: 29830 - DNA, 393 bp, Glycine max
  Clone ID: LIB3051-007-Q1-E1-A1
aagcgtgtaacattagattctttggtggttcaatatttgaagcatcagcatcgccaatggccagctcctattaccactcttcctccactgtctcttctgcatccacatgtctgtcctgaaccaaagcgaagcctagatgccccttctaatgtgacagctcggcttggtacacgtgaatttaaatatatgtatgggggagtgcatgggaatcgcagggatcgtcaatttgtttacagtcggtttaggccgtggcgtacttgtcgggatgatgctggtgccttgttaacatgcattacatttgttggggactcttctcatattgctgttggaagccataatggggagctcaaattttttgactccaacaacagcaatgttgtggagagcttcaca

SEQ ID NO: 29831 - DNA, 423 bp, Glycine max
  Clone ID: LIB3051-007-Q1-E1-A10
aatataattaaactaattgcaaagatgaataccaagccctttttctccttgtgcttactctgcgcactgcttctcatctgtgttgtggcaactgagccatccaaagatgcgacacaagcagaagaaccaaagacacggccagatgcctggagaagtggtggaagtggaggacatggtggaagtgggggacatggtggaagcgggggacacggtggaggctggggacatggtggaggctggggacatggcggtggacatggcggaggatgcaaatgctgcggtcgaaagggctgcaaatgttgctgaagtaaaaaaacacaaacatgaactgaagacacacatacgtgtgtactccatgtaataagtatagtatgtagacataagacatacaagcatggaatctatatccgtgctagggctgtc

SEQ ID NO: 29832 - DNA, 200 bp, Glycine max
  Clone ID: LIB3051-007-Q1-E1-A4
agtaagcgtcggcgtctttgggaattaaagctgcaaatggagttgtcattgctatggagaggaaattgcgatctatagtggttgatgaggcatcagtctagatgattcagttattaagagcaaatataggtgtcgtatatagtggcatgggtcctgagtttcgagttttggttggggaaagcaggaaagaagccgaggag

SEQ ID NO: 29833 - DNA, 272 bp, Glycine max
  Clone ID: LIB3051-007-Q1-E1-A5
aagtcagggaagtacttgaaaaatcaaaagatagtctcggtggaccatggcaatttgttggtctgctaccattgtttgatcctcccaggcatgatagtgctgaaagcattcgaagagctcttaaccttggtgtcaatgttaagatgattactgtggatcagcttgccattggaagggagacaggcctaaggcttggaatgggaacaaagatgtacccttcatcggcattgcttggccaagacaaggatgcttctatttcagcgcttccagtt

SEQ ID NO: 29834 - DNA, 270 bp, Glycine max
  Clone ID: LIB3051-007-Q1-E1-A6
acggacgcgtgggcggacgcgtgggttcgaattcttcaatttactccagagccgattgacctttcatttgtgtttcatacacatttccaatacatccaatcccaccaccataatgctggatgagctcggaaataagtccttccaatgtcaattctggtgttttcttctgtgagaatggtaaacagtgtgctacccttcagactgatgaagtccatctgaatctttgaaggcttgaccttgcagagctgttgcacttaaaaagctgagagt

SEQ ID NO: 29835 - DNA, 309 bp, Glycine max
  Clone ID: LIB3051-007-Q1-E1-A8
agacacgcgtccgcccacgcgtccgcccacgcgtcagaaacatacttgcgatgcaggagtttatggttcttcccgtgggagcttcctctttgaaggaagccatgaagatgggtgtagaagtatatcagaatttgaagtctgtggattagatgaaatatggtcaagatgcagtagatgttggtgacgaatgtggctttgccgctaacatccagggataaggaggaacgtttggaagtgctgaatactgctattgccgtagctggttacacaggcaaagttgtcattggaagtgatgttgcagcttctgaa

SEQ ID NO: 29836 - DNA, 349 bp, Glycine max
  Clone ID: LIB3051-007-Q1-E1-A9
agcttaacctctctcaatccccatttcctcacctccttcaaccgctgctaaattctagggttccgaaatggacgctggcggaaagatcaagaagggcgccggatgtacaaagggcggcggcccaaagaagaagccggtttcaaggtccgtcaaagccggtctccaattccccgtcggaagaattggccgttatttgaagaaaggaaggtacgctcagcgtgtcggtaccggtgctcccgtatacttggctgcagttctcgaatacctagctgccgacgtgcttgagttggctgggaatgccgcacgtgacaacaagaagaacacgactattcgacgacacctgcttttg

SEQ ID NO: 29837 - DNA, 399 bp, Glycine max
  unsure (1)..(399): unsure at all n locations
  Clone ID: LIB3051-007-Q1-E1-B12
agcataatgtttccggcgaagaagccttgaagaagcgcgctgcgatgaaccgggccgggttcgggtcgggggccgtgtttggtgcgacgtccccgtcgccacccccggggaatgtggacgggtttacaatcgggaagtcggagacggngggattgggggttggggctggcgggcagatgacggccgcgcagcggatgatggcgaagatggggtggaaggaanggcaggggctggggaaacaggagcaggggatcaccacgcctttgatggcgaagaagaccgatagacgagccggggttattgtgaatgccagtgacaacaacaatagcagcagcagcaagaaagttaagagtgttaacttcaatggtgtgcctaccanggtgctgctgctcaagaaca

SEQ ID NO: 29838 - DNA, 103 bp, Glycine max
  Clone ID: LIB3051-007-Q1-E1-B6
aatatcttcttagatcttcaacacaaatagctcttttacttctaaatttgattccttagttcagcattctaatagtagttacgggcgtcatcaccattcctca

SEQ ID NO: 29839 - DNA, 238 bp, Glycine max
  Clone ID: LIB3051-007-Q1-E1-B9
agtaaaacctcccacgatgtcttcaaatttgcagtcgaagatgttaattagtctgatttgtaaggaattcccatctcgtttccatgatatccattgtctgacgaatttgcgaggtgctggactccgatttagatccttcaggtgttgacctgttggcagttcttgatgtcgctatacattacgttggcgcttcgtggaaaaattcaacccattcactatcaggtttcttttcctgcac

SEQ ID NO: 29840 - DNA, 437 bp, Glycine max
  unsure (1)..(437): unsure at all n locations
  Clone ID: LIB3051-007-Q1-E1-C11
agtatgcttggaccagtgaaggcctatgcctctgaactttttcgagaagaacaccaagctataggactctcaactgtcagtgcagcttggggcataggtttgatcattggcccagcattggggggctatttggctcagcctgtagagaagtacccacatatatttacaaaggattctttttgggataagtttccatacttcttgcccaaccttataatttctgcattcgcatttgtagtagctattggctgtatctggattccggaaacacttcacaaccacaattgtagcaatgaatccacagacgatgccaaagctttagaaagtggaaacagtggagctggcaatgaaaagataatccaaaagaatgataacctcctcctgaattggcccttaatgtcatctatcattgtttattgtgtnttctcacttcatga

SEQ ID NO: 29841 - DNA, 235 bp, Glycine max
  Clone ID: LIB3051-007-Q1-E1-C2
aaattaggttcttacttcttacccgcagacagaggaaggaagggaaatagatggaagctgtgtgtggaagtggaagcagtgtttgggtcagatcctcccttacacgctcacccaagatcagactccctctattccgcgccagttaccagcacctaacagcatttccttcacaatcccgtcttttctcctatgacccttcgcgctatgctaatgctagaaccctgcgggccagaac

SEQ ID NO: 29842 - DNA, 177 bp, Glycine max
  Clone ID: LIB3051-007-Q1-E1-C3
actttatcttcgctctctctagctctttctcttctcttgatttgcgatgttgcctcaattctcagtagacggagttcgttggtaggatacatacagacgaaacatccttctctttcttttggcttcgatttctctctcctcttccgcgtcatgtcgatggcaattcggctaggggat

SEQ ID NO: 29843 - DNA, 338 bp, Glycine max
  unsure (1)..(338): unsure at all n locations
  Clone ID: LIB3051-007-Q1-E1-C9
accacgcgtccgcgctgacgtcatcctcaagtacatgcccgacgaagccaggctcctcaaagcctacggcgagctccccgacnacactcgcctcaacgagggcatcggcgccggcttggacgaagaggacgacgccaccgccaacgactacatcgagttcgaggatgaggatattgataaaatctaatcaccctcgcaatcgcaattatcattcatatctgtctctgtctgtctctagtagtatttcgctctctgcttgtttgcaactccccgtgttggatttcattttataattgtgcactattattcaataactcagatatttccgattctcgtct

SEQ ID NO: 29844 - DNA, 350 bp, Glycine max
  Clone ID: LIB3051-007-Q1-E1-D1
aagaattcagagagaggcttttgtgttaacctttctgtcgatgctccgtgttggtgctaccaaggctcagtcggagaggacggtttcattgttaaatgctctctctcttcactctctgctcacccttttcccctttcatgtcttcaatcaccgcctctccttcagggtctccaaaaagcctactttttaatttccatcggaagccttttctttttttccatactgggaatttaatattcaattttagcctcctgggtttccaacctccatctcctgacgagaaggagtgattcaaagatgtttctatttgggtcatttagtgaagatgaaactcaatcattgctggtcaa

SEQ ID NO: 29845 - DNA, 375 bp, Glycine max
  Clone ID: LIB3051-007-Q1-E1-D10
acgatcacgtgtcattgatcttcttgtattcgttgccaagaagtctctttaaggtgttacatcaaagtagcttgtcttcacattattaccgtatgttgaggtgtagcggcgatttactgtcctgctcgagcgagacatgagaggtctgaataaatcggtttctgaaaccagtggtgttacttgttggaggagcattagctcttttttggacttttgatgttttctcttgtggagggggatcgagtttttggatttttatatactcgctgatgtacttggcttgaatacttgctaatgtacttgttattgattgttatagtagatatttgtccgtcctttttttcaaaaaaaaaaaccaaaaaaaaacaccccaac

SEQ ID NO: 29846 - DNA, 437 bp, Glycine max
  Clone ID: LIB3051-007-Q1-E1-D11
acggacgcgtgggaaagagaaagacgttgctgcagcggcggaggttattaacaaaatggaatatatgcaccagatggcacctccgtcgttctggtacgacggaggacactttccaggtcaaacaaattacgctatggaggttcacccaggatatggtgctagtgctaataatcattacgtggagccagggtacgtgaaccagggttatcctctgcagccacctctaccgtactacatgcacccgcacgcacctccgccacagatgttcagcgatgagaaccccaatgcttgttccatcatgtgataatcagtgattaattttcgttttcggtgtactcttacacacggacggaatacgggatacggaatatgcacgcacgttgtaatttgtaaataaaaaaactggaaaaaaaaatcgacctgcgtgtaaaaaatga

SEQ ID NO: 29847 - DNA, 336 bp, Glycine max
  Clone ID: LIB3051-007-Q1-E1-D12
aatgttcaacaactgctgcacgacttccttaatggaaaacagctttgccaggggagtaatcccgatgaggctgttgcatatggtgcggctgttcaggctgcaatcttaagtggtgagggcaatgacaacgttcaggatcttctcctcctgtatgtcacccctctgtctcttggtttggagactgccggtggtgtgatgactgtcctgatccctaggaacactacaattccaacaaagaacgaacaacttttctcaacatactctgacaaccagcctggtgtgcttatccaggtctttgacgggtaacagacacggaccagagataacagtttgttg

SEQ ID NO: 29848 - DNA, 164 bp, Glycine max
  Clone ID: LIB3051-007-Q1-E1-D2
agccaaatcagagcgcgtgagaaaagcagaaatggcggcggctacggcgatttctcagcgagggtgtttttccgccgtcgagcggagctgagacctccggcgccgctcgtttctggtggcttcgcctcgctcgaagttatcggttgttatgagtctggagaggc

SEQ ID NO: 29849 - DNA, 156 bp, Glycine max
  Clone ID: LIB3051-007-Q1-E1-D3
agagaaactagattaaataattcatcagcaccagcaacatactcatatggctatagtagcaagaatccaagctacgttgcacgttagcccatgtcaaggaatttaaaccctatggtggattcatcagcctcaaactccatgtctatgattgttaac

SEQ ID NO: 29850 - DNA, 250 bp, Glycine max
  Clone ID: LIB3051-007-Q1-E1-D4
agggtagaaggtcctctgtggtggatgtaagaagtgttgaactacatgaacccaaagagactagtgagaagaaatctaagaagcaaaaatcttctaaatctcagtcttctgataaggttaagggattgctaaaaaatgtgattttgcagcagtcaaagaagtgagaatcttgggagtggaagtagagtgagaggaacaaaggtgaaggagcgcatgagacatgtctgcgagagacaatggataagggtaa

SEQ ID NO: 29851 - DNA, 353 bp, Glycine max
  Clone ID: LIB3051-007-Q1-E1-D6
acttccgcaccagggaacaacttcccctttctttcttcttcttctctcttgcctgaatcgaagtcgaaaaacacagattcaattccaccatcacttcttgttcttcttctgttcgtctttcgttttataaattctaaaaattccaaaacacagtttttccacgcgtgacacttcaccaacctctctcactctgcgtcttcgagctacatatgcctcctctcccaccctacgtattcttcctccttgctaacctcacctgcctctccgtcacggtccaatccaaaagagagcctgatccttaccgcgatcgcgtgctcggttgttagtctccacacgcccccgggtcgcgtcgc

SEQ ID NO: 29852 - DNA, 270 bp, Glycine max
  Clone ID: LIB3051-007-Q1-E1-D7
acttcttccataattctcatgtttctgatccaaggtttaagatgttatagtttccgtgaattctcgtctgggttcaacctgtttgatgtttagactgaatcagtttgaattagtggagaatatctgataccgaaaaaaagattcagctctttttcttgtttctttgtcagagtacttggatttttgagaatctggatacatgggttgttgtgtaagtaaagagtcagagccagaagacaatggttagagacatggtcgaactggtggagt

SEQ ID NO: 29853 - DNA, 368 bp, Glycine max
  Clone ID: LIB3051-007-Q1-E1-D9
agtaaatgatatagatgtatacatacaacattgtcacaagtcctgagttaagcatttttagtggtgaaaacatttttattttgtataaattgttgcagtttcgttattagatatattaaatgataaaaggctagtctttattcctaattttggccatttgtttggttttcaggtgtgatatttttttctgctgaaaaagttcacttcagagagattgttcaaagttcaaacgtgtacgagtggaagaatgacttccaaaacactatggtcgaactactctttagaaaagtacaatgttaatgtaaacatcttgcttgattctgtgaagtaactatgaaatgccttgcatgggactgttgatatgtctt

SEQ ID NO: 29854 - DNA, 421 bp, Glycine max
  unsure (1)..(421): unsure at all n locations
  Clone ID: LIB3051-007-Q1-E1-E12
accaacgcgtccgattttcctggtaaatatcaagattgggcagccacagatccgttagatcnttttcaagctcaagttataaagaatgaatcaaacccaaaggcacatatatgtagacatttaagtcaagaagctcgtggatgtcgttatttggtattgtggttagattgtgatcgtgaaggagaaaatatatgttttgaggttataaagtctactggtttccatataaatgatacttaccgtgcacggttctcttctgttactgagaaagatgttgtgaaggctctagacaaccttgtcagacccaacagagatgaggcgctggctgtagatgctatgcaagagatagatttgaaagttggagttgcctttactcgatttcaaacgagttatttccagggaaaatatgggaacctagatt

SEQ ID NO: 29855 - DNA, 76 bp, Glycine max
  Clone ID: LIB3051-007-Q1-E1-E3
atggagtgttgcgtcttgcggcaaactgagtgaggtacaagagggagagggaggaggaggagagaaagagaaatta

SEQ ID NO: 29856 - DNA, 423 bp, Glycine max
  unsure (1)..(423): unsure at all n locations
  Clone ID: LIB3051-007-Q1-E1-E9
aattatcatttcattcagtgagaaactttcccaaacaacaataattgcattcccaaacggttcaaactcaaacctcaacaacctcctcctcaaaaccatgatgggcaggctccagctgcgagctccgataaacaaccccttggtcacacagtccctcgaggacttcctattaaccgatctcggcgacgacgacgacgacaacgatggcgaggaaaccttcgagggacagtctgagctcgcgagagaggaggccaagctagaaagggaagtcatcaagatcatcctcagcggaaacggagagtctgttctcatgcccaattcggggcaagccgtgtcngttcgcgaccaccacatatgcgtggggtttcaagacgaagagggttctgggtatcgcatgtgggagtggcatggccacatcatggc

SEQ ID NO: 29857 - DNA, 423 bp, Glycine max
  Clone ID: LIB3051-007-Q1-E1-F10
atttacaatgcaccgagtccctcgtcattctcactagtagccagacaaaacccaaaaccacacgcaataacaaaaaaacaacatgcggtgttgcattccgacgttgttgctcgtaaccaccgtactattgtcggcggtgcacggagttttcctccctctggagcggagcattcctccgacgggccaccgcgtggaggtggcggcgctgaaagcccgcgacagggcccgccacgcccgcatgttgcgcggcgtcgccggcggcgtcgtcgacttctccgtccaaggcacctccgatccaaactccgttggattgtattatacgaaagtgaagatgggaactcctcctaaggagtttaacgttcagattgatacgggaagtgacatattgtgggtgaattgcaatacttgcagtaattgccctca

SEQ ID NO: 29858 - DNA, 432 bp, Glycine max
  Clone ID: LIB3051-007-Q1-E1-F11
aaacagttagcctcgcagtccatgttacccgtgatcaggtctcaagagcacgtgaacgcgaatggcagtttttatcatcataatcatgtcagctagcggtgtagcagacacgatacatagtgatcaatcgcgtcgaaaaccagataattgttctgacaaatttgatacatgaacttccatcagatcttagcactatcgtgtgttgctacattaatcatgattcacacttgtagtgaacggcaataccctccagctgatgtggctcatatattagattctgccgttaccagtcagcatccatgctgttcacagaaccttcctatttatagagaagttcaaatgtgcatgggatgaatcattccgcatatgttagctcttaacactacgtgacttacatcttttcttctgcatatctccctctaatgtagctgc

SEQ ID NO: 29859 - DNA, 369 bp, Glycine max
  Clone ID: LIB3051-007-Q1-E1-F12
atgagcttctttcttattgtcatagagctggaagcatgcttttatggttctcacatttttttgttttacttcagaaggattttctgcagctgcaagcctgctagcaatgttttttgaagttactctcctttatattgaagtttttttttgctgcaaatttgttaattgacaataaaatatgaatgtcttttcctttggcctgcatctaatctttagatgtaatgtccttatcaatacctgatatcatgaaacctttcaactagaaacttacttttcttgtttatgattttcaactgaatttattgttaatgtctttggaatacatgtaatgcttaagtgacaattgttagtatttataattcttaattt

SEQ ID NO: 29860 - DNA, 311 bp, Glycine max
  Clone ID: LIB3051-007-Q1-E1-F2
accacacgtccgcataaatcctgaaaatcaggcacttttggttagtatgaagtagttaatcttgcataccaatgattctatgctaattgacagggatcttaaatacaattttattctatattcctcttctatataaataattagctacagtacatcattatgccataaacaatttattgacgaagaattcattctgtactttgcattttatagattaacttaactttcagttccagtaggacaaaaccgtgtgtcgtttgtaatctgtgatctaacttcgtgtgctttctagggtcatgagtcagggcttt

SEQ ID NO: 29861 - DNA, 237 bp, Glycine max
  Clone ID: LIB3051-007-Q1-E1-F4
accaaacgtccgctttaccaggatacacatagtcagcgcaatattgcaaaattgaatgatgaagtctatgaagttcacgagataatgactcggaatgtgcaggaagttcttggtgttggtgaacagttggacgaggtcagccaaatgtcgagtcgcttatcagcagaatctcggatgtgtgctgagagggcgagagatttggatcgggaggcgttgattcggaggtgggcgagtgtt

SEQ ID NO: 29862 - DNA, 96 bp, Glycine max
  Clone ID: LIB3051-007-Q1-E1-F7
actcaagcgtccggttcagacctctctttctgtcgtgttttcgacctctgattccaggacaacccttcgtttggtcgtccgcgtgttcaccttttc

SEQ ID NO: 29863 - DNA, 395 bp, Glycine max
  Clone ID: LIB3051-007-Q1-E1-F9
agtatcactttctgttctgttttggatatttctcaacataaccaagctaaagcgttttactattttgttttctaatttcctccatctctctctcatagtcaccttctctctgggtcactgcaatctaagtccaagcttgactgcttcctctggcgtatgacacctgttgtgccgtctcagtttcttcccaatcacgagattcgaaaacttaaccgattgtagcatccgtgggagagagaagctgttgagtacttcactttgggttatctatggaatcgtttccatgaatggagtgcttacggagctggagttcccatcacgttgtccaatggggagacacttgttcagtactatgttccttatctctccgcatttcagatattcaccaacaacac

SEQ ID NO: 29864 - DNA, 397 bp, Glycine max
  Clone ID: LIB3051-007-Q1-E1-G1
acgaaattttacaaattgaggaggccaatgaagaagtaaaagacattccaaataaggaagttgacatgagtgttctaagggggaaaaggagtacatatatcagatcagaggtagaacatgctctagaaacattagacaaagccatttcaatggttcgtgaacagcgacttcattctcgggtggcatcttctagcgttgccgatgaagagtcccattttctgaaaaatgatgacagagttgatacatattccttaaaactcactcaaccaagttccaaaaatgaggttagtgttgaggtaccaaatggagatattccggagggagcttcacaagaagcgcttgggaataaccctggcatccaaaactcacagtgtacaggaacaaatccaaactcaaa

SEQ ID NO: 29865 - DNA, 425 bp, Glycine max
  Clone ID: LIB3051-007-Q1-E1-G10
acaaacattataatttctattacatacattttgtagctaggatgagcaagttactactcattcgtgttgctgggttcgtggcaacctttgtcaccatggtgatgatgatggtgcccaaaaacgtgagtgcccaaaacataggtgatgacatcgtcacacaagacttcttcaacagcataatcagtcaggctgatgatggttgtgcagggaagaacttctactcacgagatgctttccttaatgctcacaattcctacaatgagtttggtaggcttggtaatcaggatgactccaagcgtgaggttatttttgctacatagaagagattaacggtgcatcaggggactactgtgacgagagcaacaccgagtacccatgtgcccctaacaaagcgtactatgggcgtggaccaatccaactatcat

SEQ ID NO: 29866 - DNA, 344 bp, Glycine max
  unsure (1)..(344): unsure at all n locations
  Clone ID: LIB3051-007-Q1-E1-G11
actagcattgtgtctaaaactaaaacaatgattctctactttggttcttaatttgatttttaaatagtaccaagtaatctgattgtggaaagtagaaattcggcaaggttaaaaaatgggacgaaatcatcgaacatgctgaaaaatgtgcagttgacgatgatgggttctacatgtatcgctatgatgcaaccgtttcccttgtcttgaactgcatctataaggttgaggcgattttttatgggcaacactatcggtctctgcaatctctgaatttggaggagcagcgtttggtggaaagagttaagcaggaagcaatacanaatttgcagaatctggtgcca

SEQ ID NO: 29867 - DNA, 255 bp, Glycine max
  Clone ID: LIB3051-007-Q1-E1-G12
acgatgatgtcgatgctttgcaaggaagatttagagactgtagcaacataagccatgcttaacacgtagcatgcctctctgctcgcatcaaactagtgtggttctagcgttgtgcactcagtatatgcagccttacctctcgtatggtccctcataaagcgctttgagtatccacagtggctcaagctcgcttgtgatgaactgtatccttcatgatggcggatggtggcattggaagcgtgcgtgaggtcatga

SEQ ID NO: 29868 - DNA, 312 bp, Glycine max
  Clone ID: LIB3051-007-Q1-E1-G7
acccacgcgtccgcccacgcgtccgatctctcacatcatttcccactctcgcgtttcctttatcatatttatattctttggttattcaattcatattacgccatgtcccagttgaacggagcctactacggcccctccatcccgccgccgaaaacttcctaccaccgtcctgggcgcggcggaggcctcggctgctgccgcgggtgcctcttcagcctcatcttcaagctcatcctaaccgtgatcatcatcattggcatcgccgtgttccgtttctggctcagagtccgtcccaacgtggtgaaattccac

SEQ ID NO: 29869 - DNA, 378 bp, Glycine max
  Clone ID: LIB3051-007-Q1-E1-G9
aaaaaagctcattcacatagtcctattcctccttctggtgtctcgttaatctcatcgctgtcgcgcatgcggaatctcagcccgatgacttctccgatgcatatctcagcgagttcagcccctctatatccagtctcatagtcacacttgtcggcgcgcttttcctcatggcttttttctccatctacgtacgctactgcgccgattccgcttcgaacaccgttagccctctcactaccgcacgctcccggacggtcgcgcgtgggcttgacctacctgtgatctacacattcgcaatcctcaaatacaccgacgttaagattcacaaaatcggataacaagtgttggaatgagcggtgtgtttgtgcgagtacgagg

SEQ ID NO: 29870 - DNA, 406 bp, Glycine max
  Clone ID: LIB3051-007-Q1-E1-H1
aggggattctctcgctaaccaagaaggaactagggttttacagaatacaagctctctctctctctcgtcggttttcgtcaatcagatccaatccaatatcaaatatgagtcgtcatcgcgaggttaagtgggctcagaggcttgacaaggtctatatcacggtgcaattggctgattcaaaaaatgcaaaagtggatcttacgccagatggtatttttaccttctccggtagtgctggtgctgaagaccatcagtatgagctaaaactggagctctttgataaggttaacgttgaggagagcaaaattaatgtacgagagcgaagcatattcattgtagtgcagaagggagaggatggatggtggaaaaagttactgcgtggagaaggaagactccacattatgtg

SEQ ID NO: 29871 - DNA, 378 bp, Glycine max
  Clone ID: LIB3051-007-Q1-E1-H10
agaaagagtgaacgttaatgagacacgtgaatcaagtaaatcattaggatgatactcgcggtgttcaaatggctgatatgataatccagataacggtatacaaaccaatgattggaacgacttataacgcgttactcttaaacgaacatctcgtgaaacacctgaaaaggaaccgtctctgcacattcgtcaagatacacaggcaaagtcatgttattagcagaatgttatgtcagctgcatgccagatgaatggtggagaatacgtccatgaaactcaggagaattgagtgcaggtgcttgagtgaaaatactctcaagattgcagagtaacatatgctgacgatgaaatgtatcagtctcatatatctatctgaca

SEQ ID NO: 29872 - DNA, 432 bp, Glycine max
  Clone ID: LIB3051-007-Q1-E1-H11
acccacgcgtccggccaccctttaatcttcgtcaacgttacttttccacctcgtacgagggattcaattgagagggaaagggactgatggcagacaacacacagtcttactgggaaggctacaaagcgttttggtcagagaggttttcctttttgagcaactattcgaggttcatcaaccgtgataaacccatcccttcctggtcaagctctgatgtcgaggagttcattgcttctgatcctgttcatggacccgtcctgaaaagtgctagagaagcagtgcaatttggcctcacaggaagtgctttgggagcattatttactgcaggctatgcctggaaatattcaaagagtttacatggcgctggactgtcatttttagctggaggtatatttgggtggacttttgggcatgaaatcgcaaatcacacac

SEQ ID NO: 29873 - DNA, 88 bp, Glycine max
  Clone ID: LIB3051-007-Q1-E1-H3
accacacgtccgtacacagacgttatccccagaagcaccctttgcaatactttttggtccttatgaacgttcttcaacatctcagagg

SEQ ID NO: 29874 - DNA, 361 bp, Glycine max
  Clone ID: LIB3051-007-Q1-E1-H5
aattttcaggtgatcttgctctgcaggctcgtctattaaaggctatatctccccattaattgccgaaaatattcaaaaatgccttgtcttctaccatactaattgagatcatcaagtgtcttgcatctcttttcactgaagacatggatctggttgtcagttatttggagcatttgaccaaggtaccaagatttgatgtgattgtaatgtgcctttcatcaacaaataaggatggtttgtcaatctgattgataagttggttacattttgtgcggacatacgcaagatctgggatgaagtgttcagcggagaggcaacaccaattgagtatgcagagattctggacaaccttcaatcaaag

SEQ ID NO: 29875 - DNA, 400 bp, Glycine max
  Clone ID: LIB3051-007-Q1-E1-H9
acaaacggttcgattcctacatgcttcggattgactacagacgatgtgcatatgattgttgtgtttatgtgagaagccttgatgatgctcgggaagattcacacttcagagtatgcaatcacaactgacaagttcaagcattgcttggacttgtcgaatgttgctgagtgttagatgtgataggaccctcaacccaagaaatcaaggtggagattgttgtgcatggctcatattttatgggttggacaaatgttagagcacagcgtaaaggccacctattgttgggttatgaagcacgttgggggtgcgggtaaagcccgtagtacgcttaatattatatatcgtgatgtaactctattatttatgaataagatatagaaacagtcacagtactcattag

SEQ ID NO: 29876 - DNA, 393 bp, Glycine max
  unsure (1)..(393): unsure at all n locations
  Clone ID: LIB3051-008-Q1-E1-A1
agtctctccccacaccagaaatcccaaatgaacccaaaacagctcctcctcctcttcttttctctctttctcacaatcactttctcgttgaacgaaagatttgaagcctgcgatgccaagacatgtgggaacgggcagaacataagctacccattctacatccaaggcaagcaaaaacccttttgcgggcagccaggcttcgagctaacgtgcagccacaagggtttcccaattctgactctcatgtacaccccatacacaatccaccaaattttctacgacaaccaatctctccgagtgtccaatcccgtcttttcacaaccaaacctttcttcctgtattgccccgactcagaanctcacggtcggaaggtacagattccgagtcgctccg

SEQ ID NO: 29877 - DNA, 405 bp, Glycine max
  unsure (1)..(405): unsure at all n locations
  Clone ID: LIB3051-008-Q1-E1-A10
accacacgtccgcccacgcgtccgcagaaacgctctgctggtgaaccccagaagtctttcaatcatgatgggcaaggtgaccttcatttttcgctgacttcatatcctgtacaacatgatgtgaatcatcctcatgatgtgaagatgttttcagttccaaatcaagcaatttcagtttccttggggaatccattcctgaagaatcattttgcagctgctggtcagaagccgttacttgggggaatacctgttaccacatctcattcagttcttccctctgctgttgctgttgctggaatgaccgaatcatgtgtgaaaccatctgctcaacttaccatcttctatgctggtactgtcaatatctttgatgatatctccactgagaaagcacangctatcatgttg

SEQ ID NO: 29878 - DNA, 379 bp, Glycine max
  Clone ID: LIB3051-008-Q1-E1-A9
aaaaatacatagcacaagatataaaaaattaaaatttataaaaaagaaagaagagagattatagaaagcgaaagagagagggttcaagttcaacaagcctctcttctttgtgttcttgcgaagaagaaaaatccctccgagtcaactcggacgagttgcctcatcgtacggttccttcctcggactctttcctcttcttccccttccgaatcaccgttcgcagggttttgctctctctctctctctgtctctcgcttcgtttctagttcagatctcgcattggcttcagctgaaaccacgcggtttaatttcattcccttaaattagggatttatcttatgtcgaaacacttgaagtgatgatggtgtggctgttgtga

SEQ ID NO: 29879 - DNA, 368 bp, Glycine max
  Clone ID: LIB3051-008-Q1-E1-B10
accacacgtccgaaaaaaaataaaaaaataaaatagaaaaaaaataaagttataattaaaaaaaaaaatttctactcagagttttatcggaaaaaattctgtcatatataaaagtaaatcttcgatttgttataaaaattttaaattcaaaagattatcgtgatataatcaaatgatcctagtgtgggaattgttagttgatacagttatagtgctgtttcatttccaattgatgttccccgcataagtgatcttggtgtcagtgtggtcatcacatttaaatattcatctgatgataaaagtcctaacgtaccttatattatgctcatgtaattgataatcatgttagtcatatgagatattaatgt

SEQ ID NO: 29880 - DNA, 420 bp, Glycine max
  Clone ID: LIB3051-008-Q1-E1-B11
accacacgtccgcccacgcgtccgcccacgcgtccgaaagaaacatggttttattttcccgggaaaattctcctcccagttttctcggccaaccttctgtcctatatatcattccttcttcgatttgttgtagaattccaatttcctaggttttctcgatcgatctattgatccgccaatttcaatttgggttcatattgttaggtgctgttccatttcctattgatgttccacgcttaaaggagcttggtgtccgtggggtcatcacattgaatgaatcatatgagactttggttccaacgacattatattatgctcatggaattgatcatctggtgattcctactagagattactgttttgctccttcattgaatgacattttccgtgctgtggatttcatacatgaaaatgcattgt

SEQ ID NO: 29881 - DNA, 421 bp, Glycine max
  Clone ID: LIB3051-008-Q1-E1-B3
aggaagcgtgggggcggggaagagttagtttcttctctcttcgatggaaggcgggaaagaggttctcccttcggccactgccacctccgccgccaccggcaatcccaccgcttcgcctcctccgctcgctgatcttgtcggtgctcccgatctcgctgctgcctcggacgacgtcgttacccaacctgaaattcacgcgctgatttcagacgaagagcacgatcacgagcatgaacatgacgatgacctcgagcacgagcacgatcagcatgagcatgaccaccaccacgaggaccgcgatgatcacgccgctgtggccgctgtctccttggaagatctcaaactcaagatcattaagcaggcggagtattatttcagcgatgaaaacctgcctactgataagtatctgttgggtttcgtc

SEQ ID NO: 29882 - DNA, 366 bp, Glycine max
  Clone ID: LIB3051-008-Q1-E1-B4
acatacttctccgatacgatctcataaacttaagctattaatatcggttgaatgagacattaaaatgattgtcggtggttcaattaatcctcagaacatctcacaattctcagctgctttattaggaggtgttgtacaggatcaagcggttatcggaggtaacaatggcgatgatccgctcataataaacaatttgctatccgatctatcaagggaatagtactacatttatacacaattaccttggctgcagttccaggccattaagctctggagataacatgacgattggtcggataagctatacgacctgaatatcatagttatctatgtgattaactcactgcatcaatctgggtctactaa

SEQ ID NO: 29883 - DNA, 378 bp, Glycine max
  unsure (1)..(378): unsure at all n locations
  Clone ID: LIB3051-008-Q1-E1-B6
accacgcgtccgcaaacattcgtgttctggtgggccatattctacagagaatcctatgtcattaagagcaaatcttgatgtatagagagcagtcaaataccttacattttgcgtataacatgatgatgaccttgatgacatttagagagcatacgcagaagggcggatgccaggtgcagcggtaatgcaacggtcatgtcaggtcttgacagacctcctcgagatgcacctcagagcccgggcttccgtgactgacgacatggtggacgcattcatggctatcagatcacttccccagatgtntcgactgaactcatcataccttcatcatcccaattaatgcgctgatattactggatatctggattcatcttgctt

SEQ ID NO: 29884 - DNA, 431 bp, Glycine max
  unsure (1)..(431): unsure at all n locations
  Clone ID: LIB3051-008-Q1-E1-B7
agtttaatccttttcacttcaattcatcattgccttttcgtttaagcacaaaagctatgccgaactgggagctcaggaactgttgtgaccacgaccagaaggtcttcattgcttgtgttgctgccttcaccgttgtaatcctcgtgctatggaggacctttctacttacaccttttaagctcatcaccgtgtttctgcatgaagcaagtcatgccattgcttgctggctcacttgtggcaaggtggagggaattcaggttcatgcaaatganggtggggtaacccagactcgtggtggcatatactgggtgatcctgcctgctggatatctcggttcatcattttggggaatggctttgatacttgcgttcacaaatcttctcactgcaaaaattgctgctggttgctttaatgctgctttaattgttgtg

SEQ ID NO: 29885 - DNA, 375 bp, Glycine max
  Clone ID: LIB3051-008-Q1-E1-B8
cccacgcgtccgcccacgcgtccgtatagacaagatcgagatagttgataaatgtaaaacataatatactgctccagagcatatatagcgacaaacatacagtgttaaatgtgtctctttatgtgctatggatcagtatcctagttgttacattgatatacaagatcgagatagttgatcatctgtgttcttgggagatatttgcggtcggatcctgtactagcaggctgacgtctcgtgaagtgctttggatgtggaagtacaatacttataggaatgaggtaaacatgtgtaatataataatagttgcttcgttcgatatttgagataggatcgtgtaagattaatcgtgaagagtttcgacgtattcctgaa

SEQ ID NO: 29886 - DNA, 430 bp, Glycine max
  Clone ID: LIB3051-008-Q1-E1-B9
atcttacacttcacaaaaatgaaaaacatgaaattgtgttcggtgatgctatgcttatcactagcgttccttcttggggccacagcagaacaatgtggcacacaagctggtggagcgttatgcccaaatagattatgttgcagcaaatttgggtggtgtggtgacacagattcctactgtggagaaggttgccagagccaatgcaaatctgcaacaccctcaacaccaactccaacaacacctagtagtggtggagatattagcagactcattagctcttctctctttgatcaaatgcttaaataccgaaacgatggccgctgttctggccatggattctacagatatgatgctttcattgccgctgctggctctttcaatggctttggcacaaccggtgatgacaacactcgcaagaaggagattgctg

SEQ ID NO: 29887 - DNA, 412 bp, Glycine max
  Clone ID: LIB3051-008-Q1-E1-C10
aggaaatgcttgatatcacgccaggagaggccttggctgtgaattttcccttgcaactccatcacacagctgatgagagtgttcatgtgagcaacccaacggatggacttctgagattggtaaggtcactttctcccaaagtgaccacactggtggagcaggaatcaaacacaaacacaacccctttcttcaacaggttcattgaaaccttggattactacttggcaatctttgagtccattgatgtcaccctcccatgagatagcaaggagaggattaatgtggagcaacattgtctggccagggatattgtgaatatcattgcttgtgaaggcaaggaaagggttgagagacatgaactgttcggcaagtggaagtcgaggttaacgatggccggcttccgtcagtgtcc

SEQ ID NO: 29888 - DNA, 411 bp, Glycine max
  Clone ID: LIB3051-008-Q1-E1-C3
accaagcgtccgactgtctccctcttcctcctccgacggcgtcggcttcgagacggaggagccgcggacgccgctgggcgtgcgccgcgcgctgcagctcctcaactccggcgatcccgacctgcgcctccaagctgctcgcgacatccggcgcctcacgaagacgtcacaacgttgtcggcgccagttatcccaggctgtcggtccactcgtttccatgctccgagtcgactcgcccgagtcacacgaacccgctctcctcgccttgctcaacctcgccgtcaaagacgaaaagaataaaatcaatattgtggaggccggtgcattagaaccgataattagtttccttaagtctcagaatctaaatctgcaggagtctgcaactgcatctttgctcactctatctgcctc

SEQ ID NO: 29889 - DNA, 298 bp, Glycine max
  Clone ID: LIB3051-008-Q1-E1-C5
agctatcatcatggcacgttaacgtttatggaactcatcactcacagtatccatcctgtcataattcttagtactgaggagcatcaaactcatgtcaattttgagaatcttggtcagacatcgcatggccatcaaccattcacaggcaaccttcctactaacaagtactgttatgctttccatgcctctcagtatccgacagaatggaatgttcctactctcaaagcatatagcattacatctgcacatgacatatctgagatgaggatctctattatctatttgagcgccattgtca

SEQ ID NO: 29890 - DNA, 424 bp, Glycine max
  Clone ID: LIB3051-008-Q1-E1-C7
aggaatttcaattcaaaaatcatatgtagatccctccatcaactatccaaggaattttcgaagagcactaatggtctcatggtcccatcttatgctttgtagaatcaaaaaaaaaaataaaaaaaaaaaaaaaaaataaaaaataaaaaaaaaaaaaaaaaaaaaaaataaaaaaaaaaaataaaaaaaaaaaaattataaaaaaaaaaaaaataattcaaaaaaaaaaaagattatcaagtaaaaaaaaaaaaaggtcagaaatatgggtgcaattcgtaattaggcttagcacatttgacagagcatcttttcattattatgtgcagtcacacattcaattttaatgaatatcgtgaacgtataatcatgccttctgcatcaaacaagcaggggagacctattatcacttgtataaaagttt

SEQ ID NO: 29891 - DNA, 426 bp, Glycine max
  Clone ID: LIB3051-008-Q1-E1-C8
atatcagtatcttcatcccaatcctgagttatctgcatgttgctatcatctttttgtttttgaaaagtaagaagcatggttatactgaaattacctttgaaaaagaagactttagctgattgacatataaaataatgaaatcgtctttcatatgacatttttttcatttaagaaagaatataaaaataaagtcatctttacaacaacgatgattccttcacatatgaaatcgtgttcctaaacacaaatcactcatttctcgtaactcatttgaaatttacatacttatgtgattaattagaaaaattgcacaaatgtggtaaaaaaaagactcattaatttcaattttgaccaaactaacaagaaggaacacaaaacaaccttaaattactagagacaaaaaaattaaattaaaatttgaaggac

SEQ ID NO: 29892 - DNA, 430 bp, Glycine max
  Clone ID: LIB3051-008-Q1-E1-C9
accaaacgtccgctcaatggaaggatcaggatccggtgtggttacagtctacggcaacggcgccatcaccgagacgaagaagtcccccttctccgtcaaagtcggcctagcccagatgctccgcggcggcgtcatcatggacgtcgtcgacgccgagcaggcccgcatcgcggatgaggccggtgcctgcgcggtgatggccctggagcgtgtccccgccgacatccgggcccatggcggcgtggcccgcatgagcgattcgcagctcatcaaggatatcaagcgggccgtcaccatccccgtgatggcctaggcccgcatcggccacttcgtcgaagcgcagatcctcgaagccatcggcatcgactacgtcgacgagagcgaggtcctcaccctcgccgacgacgccatacacatcaacatacacaac

SEQ ID NO: 29893 - DNA, 439 bp, Glycine max
  unsure (1)..(439): unsure at all n locations
  Clone ID: LIB3051-008-Q1-E1-D1
atccaatcttctcttctcacacaatctctgttcaacaacgctagagaataatatctcaagtatcatgtgatgagatgaaccaagcacaacaacttcaagaagcttgaagtttgaactgtctcaaacatgttctcaaagcttcagccacaacaccagcaacagcatcaaccttttcaattctctcgtgaatgtcaaacgtccgaggacgatgacagccgaagcagcggtggccctaacaccgccgtcgcccaaaaatcagttttaggcggcggaggatgcagcgatggggccacaattgaagtggtggggcgcccangggccgcccgcccgggtccaagaacaggcccaagccgcctctcataataacgcgcgagcccgagcccgccatgagtccgttcattctagaaatcccgggcggaagcgacgtcgtcgaagccct

SEQ ID NO: 29894 - DNA, 431 bp, Glycine max
  unsure (1)..(431): unsure at all n locations
  Clone ID: LIB3051-008-Q1-E1-D10
aagaaacagangtcatggatggtttgcaaagatccgaaggggccttcaaggaaacaggttccaacaggccttgtttggaacacagttaatggcaagggaaattgaacaaagtgaacaacaacgaagaccaaaagggtggtggttctggtggtgaccttaaccttaaagttagaactacaccacccaacaccaccatccagagaagccgctccaacggcggctaccgcaccggaaaagtctcgccggcgatcgagcctccctctcccaagctctctgcttgcggcttctgcagcgctttcgggaaaacaagggaaaagggccgtgctaagcatcgatcaaggtangttttttctcgtcgccggagacggtggttcatgcagctcttcaacacgttctgtttatgtccacttaagatttaaggtttgagtttg

SEQ ID NO: 29895 - DNA, 413 bp, Glycine max
  Clone ID: LIB3051-008-Q1-E1-D11
aacacacgtccgggcaataataggtctgatgatgcgttacacgttctgggccgcaccgcgcaaactgatgtaacaacgagtccatatccatggccgacaagtccgggtaatctttgaaatttcatcgtgatcgggatagatcattgcagagttttctagctaatgtagataacgaataactgtgcccattaaagcagagtttatgctatgtatctcaacgagctagacattactagtcctaagtgttatccctattttctaaaacactgacatgttgtgcatccgaagttcaagttttttagtgctacatacgatcagtgagtgcctattagtctgtacgttgactgtctaaattgttctccgaatgaggttgcctttcagtacaatactttcttgggaagcaagtcatcttc

SEQ ID NO: 29896 - DNA, 429 bp, Glycine max
  Clone ID: LIB3051-008-Q1-E1-D3
atctattaaaccctcctggaaaagctacaatccatgttgaaaacgttgatgattataagtggttgaactcatcctactgccctgtcttgcggcagcttgaatctgctacattgaaagagttttatttcaaggcaggccatccaaactcactttcttccggggcttccaatctgaagtatagaaatccgaaatatctctcaatgctcaaccatctgagattctatcttccacaggtttatccaaaattggataaaatcttatttcttgatgatgacattgttgttcagaaggatttgactggattatgggctgtggatcttaatgggaaagtaaatggtgctgttgaaacttgtggtcaaagctttcaccgatttgacaagtaccttaacttttcaaatcctcacatcgcaagaaattttgattcaaatg

SEQ ID NO: 29897 - DNA, 428 bp, Glycine max
  Clone ID: LIB3051-008-Q1-E1-D5
cccacgcgtccgctgggttcggtgtttcaggctcattctctcttactaggcccacaatcttttctcgatcttccaataatatctctctctttcgctctcaatctcatttccctgctgctgcattcggttccttgacacgttccaacccacacgtgcacgccgctgtcacttccgactccaaggccgctacttcgcttgacctaactcaacccgatctcgataatagcggcggcggtgccaacggtaacggaggcggcggtggaggtggaggtggaggtggaggtggaggagaaggaggaggtgataatagcaagggcgaggaaggatctgacggtgacaagaggaaaatggctctgttaatgtctcagaaattcactctagcttatgctgcactcgtcggagtgggtggtgtaatgggttatctcaag

SEQ ID NO: 29898 - DNA, 154 bp, Glycine max
  Clone ID: LIB3051-008-Q1-E1-D6
agcacgcatcagcttatgttagtgtttctggatcctatcatcttcagtagtgttcatgtcaatactaatagtacttaggatcctcagatccttgtaatagtccacatgctcgttgagacattctacagctattgaacactcacagcccgacatc

SEQ ID NO: 29899 - DNA, 336 bp, Glycine max
  Clone ID: LIB3051-008-Q1-E1-D7
aggagatcgtgggaacaagataaagtaagcaggtcaaagcgtcagcctcatcaaggaagttcgtcctacgtgtaaacattcagagacgactccttcaagcgtacaacctcacatcgccccaccaatttacataatagtgtcacactctaacaacatgcatacattcactagatctctattggactgtatcacgcctactgccaacatcatgtcacgattcatttcaacaattcagtagtaatcatagtactataggagaattgtaatcagaacttcgtagcgtaaaattcacttgccttggatcagatctgactcagaatcaagtgccgcagtaca

SEQ ID NO: 29900 - DNA, 324 bp, Glycine max
  Clone ID: LIB3051-008-Q1-E1-E1
accacaacgtccgaccacgcgtcagaccacacgtccgctgacatgatcgacgtttatcacagctaacgttcacactcatttcaacgaacaccatcctaacattgcatctgacgataatcacatggtgcacatttcaagagaccttgatattgctaaagatgctctaatgcatgtacttacgcaggtgaaaaccaatcttggtgaaatggaaggtgctctctctacaatccttccagttctgtcatagaccactgtctcagcagatggattaaatcgacgaaactattctggtagaaatggtcagagaaattgacttcgacattc

SEQ ID NO: 29901 - DNA, 419 bp, Glycine max
  unsure (1)..(419): unsure at all n locations
  Clone ID: LIB3051-008-Q1-E1-E11
aaaaaaatggccaaaagcaaaaactctcatgctttgcctcttctccttcccactctcttcttcactcttcttggaacctctcacgccggtggcatagccatctactggggccaaaaccggaacgagggcaccctctcagaagcatgtgcaacaggcaaatactcacacataaacatagcctttctcaacaaattcggcaatggcaaaaccccagaaatgaaccttgctggtcactgcaaccccacaaccaattcctgcacaaagttcagctctgaaatcaaggactgccaaagcaaaggtatcaaggtgttgctttcaatangtggtggcattggaagctacactttggcttcagtagaagacgcaagaaacgtttcaacgtttctgtggaacactttcttgggaagcaagtcatcttc

SEQ ID NO: 29902 - DNA, 420 bp, Glycine max
  unsure (1)..(420): unsure at all n locations
  Clone ID: LIB3051-008-Q1-E1-E2
aagaagcgtgggcggacgcgtgggttgtgagagtgccacgttacatcttcatgcagtctctaatacgtgtctttccttgctgtcaccgctacacgctctaatccgtggcatgtttgtttctgtttttgattatttcattgctcccagattcagcanaatatatacatttattaaagttagaaccgaaaacaacaacctttgagttcgtgattctctgacctttgattttaatcaacaaagttatcttgatagcttttattgatattgttataaatataaggtagtgaggaatttggtggtatgaacgtaaccattattactataatttgattaatatatgggtatggtgccagtgaatttgattcctgaggtattgaggaatttggttcatgagcacgcactagtggtgcccatatcact

SEQ ID NO: 29903 - DNA, 440 bp, Glycine max
  unsure (1)..(440): unsure at all n locations
  Clone ID: LIB3051-008-Q1-E1-E5
acagaggtgaagcttcatggattttggtatagtccctacactttgagggtggtatggaccttaaagttaaaggatataccatatcaaaacatagaagaagaccgctacaataagagtcttcaacttcttgaatacaacccagtatacaagaaaactccagtgcttgtccataatggaaaacccttatgtgagtccatgcttattgttgaatacattgatgagatttggtcacataattcattacttcctgctgatccctacgagagagctctggcaaggttttgggttaaatatgctgatgatgacatgttttctgcagttattgcattcttccttagcaataatgatgaagagcgagaaaagagcatagagaagatatgggagcatctcanggttgttgagaatcattgttttggtgattagaagaaattttttggggg

SEQ ID NO: 29904 - DNA, 440 bp, Glycine max
  Clone ID: LIB3051-008-Q1-E1-E6
atccaggagcgggttttcttcttccaccccttctaatttctctcttctctgaagctatcagaggctagagttctcctattcagtatctcatgtgcttcaaagaatggctgttagctttactgggcttgacatagaaggcagagaccagacagaagagaacatgacaatatgacatctatctagtggagtaataatttatttgtgatggatgaaactgaagtggaaaatcccatattcatggaaattaattctgaagataagagaaatgaaaatcaagagtttgcatcagagaaaggagaaggtagcagtgttgttttctcaagagaagcaccacttatgaggaaagagtcaagaatgtccactccttattgttgcaatgctaagaagctcaaatccggggctgttacaatagattgtgatcttggaagtaatgagaaaaa

SEQ ID NO: 29905 - DNA, 398 bp, Glycine max
  Clone ID: LIB3051-008-Q1-E1-E7
atccgaccacgcgtccgccaaatttacttacgtgggtgcataaattatttttccattataagaaccgggcagcctgccatttccttgcagacgaggatggggatatcatcatattatgcgtagcattgatcgacatgtgtggctctcagtcagtggatttctcttttacggaatatgtcatgagcatttgtacaatgaagagtttttgacccaacacatgctatacatggtatattgagattgggcaatcattgtgtaaagtgccaagaatttcatcatttacctgtgtctagtttagcacatgtgactgagtaaataggagtttgttcacttcatggtttctccaagaaaggaacctccggatccggttcgggcgtgttcctgccaacggtgccgct

SEQ ID NO: 29906 - DNA, 448 bp, Glycine max
  Clone ID: LIB3051-008-Q1-E1-E8
atccactcgattccgctcccatgtcactgcttcccataacagagcaaaacgacgtccccgtcgtcgacattgacagcgacgaagacggcgtcgccgccgtagctcctgcaagaaacgacgcgtcgtctcacaagactccgtcgccacaagttgagcttgtgcagcaagaaacccctgcgtcgggttccgctctgtctgccgccgacggcctgtcacgaagcttctggaaagccggggactacgttgttggtccctcctcaaagcccagtcccttccaaggtcacttggaacatgctcgggtgcatcccaagtttttgcagtctaatgcaccgtcacatagatgggcttttggagcaattgctgagcttgtggataatgctgttgacgagattcataatggtgcaacattcgtgaagattgagcagtttgatgtccagaaggataattc

SEQ ID NO: 29907 - DNA, 426 bp, Glycine max
  Clone ID: LIB3051-008-Q1-E1-E9
agcagtttagtttggcatttagcgaaggcaatggagaagaaaccgctgttggcggagagcgattactactacagggtggagttcagagcgtgcaaggacgacgcgtggtacgcgacgcgcgtttcgctggagggagaaacactgaaagtgaagtacttcaacttccccgacgaatacgacaacgcgtttcgagcctccgagtttggggacttggaaaagcttcaggagtttggggaacgcttcagaaccctctccaaacaggctcaggacagcgattgtcgttcactcgctgagggtgtctgggtctgcgcgtgtcagtgtttcggcgatgatgatcttcgctactacgacgctgtcgtcgacggggtgcaacatggaaagcattattggaaagcaggaaaggaaacatgcttttgcaccttcata

SEQ ID NO: 29908 - DNA, 424 bp, Glycine max
  Clone ID: LIB3051-008-Q1-E1-F10
accgcatctatcgcgacgatgtcgggggaaatatggtggatgcttttaggacccatattatgcaaacgaaggaccttggtacttgcccattgaggcagattggtggatgctctttcttttacatgaggatcagtaatgtctacattgtcattgttgtcagcaacaacgccaatgtcgcttgcgctttcaagtttgttgttgaggctgttgcattgttccgatcatactttggtggagcttttgacgaggatgcaattcgcaataattttgtactcatttatgagctcctagatgaaattatggactttggttacccacaaaatctttcaccagagatcttaaagctttatatcactcacgaaggagtgcgttccccattttcatcaaagcccacagatagacctgttccaaatgcaactttaca

SEQ ID NO: 29909 - DNA, 372 bp, Glycine max
  Clone ID: LIB3051-008-Q1-E1-F11
attaaaccctaatttctgtccgttgcattagctaaggagctttgccgcatgggttgttaagttttggcctgtggccattgcaatatgcagagcgagttctccgatgcgaagaagcgcagagaggaggacaaccctcaaacactcgtttccctcgtacacgacagtgagaagaagaagagaaagagaaagagaaagaagaaaatcgaggaatcaaacgagcagccccaggttgaggtatgccctaaatccttagtagactcggttatcccaattgttgcacaaaaggaaaatgctgaaaccaccacagagaattctaacccaacccccaagaaaaagaagaagaagaagaataagaatgtgcaagatgcagag

SEQ ID NO: 29910 - DNA, 448 bp, Glycine max
  Clone ID: LIB3051-008-Q1-E1-F4
atgcatgtgagtcaacctgcaaatacatcacctggctctggtctttcaagtcctttatctgtttcttcacataccggtgtacagtcagggagtggcttaactagcactgatgaatttctggctgctaaaacaactggagttcccaacactcctatttgcaatgtggagcctccaaaggtagtcagtgcaaccactatgttgacatcagctgtacctcaggcccggaaagcatccttggctcgatttttagaaaaacgcaaagaaagggtgatgagtgcagcaccatacaacctcaacaagaagtctgaagagtgtgccactgcagaatacgctggtgttaacttttctgccactaacactgtttttggccaagcaaagatagtagcccgcccgcacctttaggaaacaaactatttcggagaaaaatattgttgtaaccttaaaaatg

SEQ ID NO: 29911 - DNA, 369 bp, Glycine max
  Clone ID: LIB3051-008-Q1-E1-F7
cagaaggttcgttaaagtcgaagataaattaatgcaaagtagttagttggcagatagaagaagatcatcatcataatcgatccgttacaattagggtttctgattggagcataatagcgtattatcatctcatctctcagcagcagcagcatggcggagcaccttgcatcgatcttcggcacggagaaggaccgcgtgaactgcccgttctacttcaagatcggcgcgtgccgccatggcgatcggtgctcgcgcctccacaaccgccccagcatctcgcccaccctcctcctctccaacatgtaccagcgccccgacatgatcacccccggcgtcgacccacagggccagaacctcgaaccccgcaag

SEQ ID NO: 29912 - DNA, 416 bp, Glycine max
  Clone ID: LIB3051-008-Q1-E1-F8
acccacgcgtccgcccacgcgtccgaaaacagtgaaaaccataacacaatacctcacgtacctctccataacttccatcttcgccgaatcacaactttcaccaccgtcaccggcaccgatcaccgccctacgacaaccgtgaaggcaagacacttggacatctgaatcattggtataaaatggtttcgtttgaaatgaatgatcggaagaagattggattaggcttaacgggatttggtatatttttctcattccttggccttatcttcttctttgacaagggattgctagcaatgggaaatatactctttgtttctggagtatccctgaccattggacctgaaatcaactatgcaattcttcatgaaacgtattaatttcaagggaacaattccatttggaattgggtccttaat

SEQ ID NO: 29913 - DNA, 321 bp, Glycine max
  Clone ID: LIB3051-008-Q1-E1-G1
atctcagagatgacttaatttttgtgcatgcatgtgttcaattgttttaagtgagatatgatttttatcatagtttggctccatgttgatgtttgcatgacattggtgaatcgaatttcttcatggcagcctgaagaggtctagaaagtttcaacctgaagataggctcttctcattatcttcagtgacctcgccagcggcagaagatcttgcagctggacgagatgatggtagaccagattatggtcctggtcgttcaaaaggtggaggaatttatgctaatggacaaggtaaaccaaagaaaagtaaaagtggggcaag

SEQ ID NO: 29914 - DNA, 416 bp, Glycine max
  Clone ID: LIB3051-008-Q1-E1-G10
ataaattgggaggtgcagctacagaattgatttctgctccaaatacaagggaaccatgccagagtaattccattgctgaggatagaatggtggtttctgaggtatcttctggcggtcttggaaatgaattggagaggcatagagtgtcttctaccctatgtgttgatgatagagataataagcatgaagctgattcaggtgttatagttgatatgaaaagctctgtgcatgatttaagcactatgataaattcttcaatctcatctttgggcaattcttgttcaggattgagttttagttctgaaaataagcatgtgccccttggaaatcctcgtgtctctgcattgtctatggacaaccttcatgcacttttgcaaaatacagttgctgttgatgttcaatgtgagaaaactgct

SEQ ID NO: 29915 - DNA, 436 bp, Glycine max
  unsure (1)..(436): unsure at all n locations
  Clone ID: LIB3051-008-Q1-E1-G5
aagctagtgtggcttagtcgctaaatttgttacgataaagaaattaattcagcaacaaatataatgggttctcttatggcaggatgggactctctgatcttggatcctgaatcagctacaatagagaggaatcgatcactcaccaaagaagaaattaatgcttactggagagtaaagaaggagacagagttagaacacctcagagctatgtccaaactatctgagactattcaggcccgaaaatttgaggattcagagaattctcataagtcaagtaccgtgaccttggccagcataaaggagtccttaagcatggacgttgaccagaaaagtttagagcaacttatcaagaaaaatggctggtggaccaaaagcagctgggcatttcntgaatgaacgccagtgatagaagcggcttccaataagtatgcatcac

SEQ ID NO: 29916 - DNA, 365 bp, Glycine max
  Clone ID: LIB3051-008-Q1-E1-G6
acccacgcgtccggtgacaatctatacggttcttcttccggttcggttccctccgtccggttcggttcaattaccccgaactcttccatctccgtcgcgggtgccggcaggcatagccaccaccagaagcggacctgcatgtgctcgccgacgtcgcatcccggttcgttccggtgcagccttcacaagagcttcggctcgcgctcggcagtggcggcggcgtcgcctaaccggctgaacgcgcggcggtcggcgatgacgaactcgctcgtgagaatccgcggcgtcgaaagcgaattggtgaagcgagccttggcggcgctgattcggccgtcgtcgcaccatcagcgccgccgccgcgattt

SEQ ID NO: 29917 - DNA, 252 bp, Glycine max
  Clone ID: LIB3051-008-Q1-E1-G7
atttttgtattagccatgtatgaatatgtactaacatttgccttggttaacatgttttcttaagaaaaaaaaaaaaaaaaaaaaaaaaaaaaaaaaaagaaaaaaaaaaagaaaaaaaaaaaaaaaaaaaaagaaagggaggaggacgaagaggaatgaagccaggtcggcgtggaggagacgtcataagacctcgagagcgcgatcgaaattgaatgcagcggcggccaatcgggagagtcacgaggggga

SEQ ID NO: 29918 - DNA, 420 bp, Glycine max
  Clone ID: LIB3051-008-Q1-E1-G9
accacgcgtccgcagttatgcgtttctctctatagccagctatcatcaattcatcatgtcatcgccaaactccgcccgtcagccccacgcgccgctccttctcccgcgccccgatgccgccgcccgcctccccgtcctggcgctcctcctcggccgccgcggccactccgtcatggtccgggagacggcggcgcgtgagctggaggagcggcgcgccgactggacctactcgaagccggtggtggcgctggacatgacgtggaacatggccttcgtcgtggtctcggcggtcatgctcgcctgcaccgtcaaggagaaccccaacacgccgatccgctggtggatctgcggctacgcgctgcagtgcctcctccacgtggccctcgtgtggctcgagtaccgtaggaggaacgacgcgcc

SEQ ID NO: 29919 - DNA, 331 bp, Glycine max
  Clone ID: LIB3051-008-Q1-E1-H11
aggaaggccaccttgaatgttccccctcttcctccttcaccgagagacgatgccatacaactttacgctgctttcaaaggatttggatgcgatactagcgttgtgatcaatatacttgctcatcgagatgctacccagcgtgcctacatccaacaagaatacaaagcaatgtattctggggatcttctcaaacgcttatcttcagagctttctggcaagttggagactgcactactgctttggatgcacgaccctgccggacgtgatgcaatcatccttaagcagtctctaaacctgcccaaaaatcttgaaagctgcactcaacttatat

SEQ ID NO: 29920 - DNA, 427 bp, Glycine max
  Clone ID: LIB3051-008-Q1-E1-H3
accaagcgtccgaaaaggagttgtgtaatctaggttttggttgattgcgggatggaagtggaggcagtgcaacaacagcgcaaaggagcgcacctgaagaagaaggctctgaagaacaaagctttgggcatcactttcaacgagaaagatctcactgactacgtcaccggctttcacaagcgcaagaagaagagaagaaaggaagcccagaagcaacagaacgaggctctgcgccgcaaacgcaccgaggaacgcaaaaggaggaagttggaaagagaacatgttcttaatggaggcgtgccaccacctgatgaaattgatggggaccaagaagaaaccgaggagcaagttgaatctattgctgaaacaaagacatacgagaatgatgatctgaaagtcactgttgtaacaagtgagatcaaccctg

SEQ ID NO: 29921 - DNA, 437 bp, Glycine max
  Clone ID: LIB3051-008-Q1-E1-H4
atctgacttgctacgccctataccctgccgtgaaaaacttggaaaaggaaaactaatttcaattttttcacaccctgggaacattcaaactttcaagcaagataataatcccatcaagaaggtggtactgaaaggaaattaaaggggggaaaaggtcaaggtcgatcattttgaagctataggttggctttggtgtgaaagattggtgcttaagtttatggcattcaagcacagtggtatccaaataattctgcttctccgttttgcaacaatggtttttgtgctggtgggcttattgactctcatatcaatttccaaccgaaaaatcatcttcaacaacagcagttgcagctatcagaacagcatttgaaagagttatataatgcgagtcatggaactgttgatccaaatcttcatgtttataattcaaaagccgt

SEQ ID NO: 29922 - DNA, 300 bp, Glycine max
  Clone ID: LIB3051-008-Q1-E1-H7
cggacgcctgggttcgtggtggtcctcagcgtgaacgtatgatgaagtaattaacggattatcggaagagttatattcacacgaagccatataaatctcttgttgagtgatcggacaatccttggcacctactgtcatcggatccggtgctgtgcgccatagctagaaccggtttcaggtacggatatagcatgcttatgctgcagatgaatctgaattctgtggttggcttgttcacgattgtgggttatagatggtgtgttcatgtacgttactcaattgtgtttatcgttaacgtct

SEQ ID NO: 29923 - DNA, 395 bp, Glycine max
  unsure (1)..(395): unsure at all n locations
  Clone ID: LIB3051-009-Q1-E1-A1
aaacgaagcaaaaccgcaaccgccgctgctccgaagaaaaccgaggcggttaaaagggcagcgaagaaggtanggccgaagaagacgaagaaagtgtcgacgcctgcgaagcccaagcagcccaagtccattaggtctccaaccaagagggcccggaaagcagccgttgctgcggcttgatacttgtcttgtttagttaaaactatgacatatatatgtagatatgaaaaggtgtgggtgtgggtgtatgtgtgtgccttgctgcacaatcttgaagaaagttgtgtagtgtaggatggtagatagtttagtgttctgcaatgttcgctctaataagtgatctaatggagatgagttttactgttttaaatcatccttttttgctgttgcttgtt

SEQ ID NO: 29924 - DNA, 371 bp, Glycine max
  Clone ID: LIB3051-009-Q1-E1-A10
acaagcacaagagcaatggactcgtaagagtagtaactaagaaaataaaggtttctaatttatttcgttcaattctccggcggcaccgcaaccgattccgccaccgcatatggcaaaaggtcgaaaactaacgaccagccggagcgagcgcttcttgggaacctatgcttacagccaaggctccgccgccgtgaacccgtcggagcttcgggaagaggatgtatggggcgccggagatgacgccggcgaacgcgagtgggatccacacttcgccgccatgagcaacggcggcggaagccggcgccggattccgcgtgacacggatgtgcaccggcgcttgggtgggctgtctctggcttttgaagctccgg

SEQ ID NO: 29925 - DNA, 317 bp, Glycine max
  Clone ID: LIB3051-009-Q1-E1-A12
accacttcatggtttttgaccaattggtcttgtttttgtgtagtagtaatttcaagttgttcttgagtttgtgagttttgaaagtttggattgtatttctgtttgacgagtggtgttggaacaagttaggtttggtacggcctggttgggccatccaatatctcattcattggatttcatcgacggcataagtcataatcaagagtcgcgaacgcacgttgtatttaccatctcagaagtccgttctcagaacttacgagctgatccctgagtaccagaaatctgtcggccatacgagcgcatcatagctgccatct

SEQ ID NO: 29926 - DNA, 339 bp, Glycine max
  Clone ID: LIB3051-009-Q1-E1-A2
agaaaaaacaaaaaaacaaaaacagactgatccaaaaaaaaccaaagcggttaaaaaggcaacaaggtagggtgcggccgaagatgatgaacgaaagtgtcgacgcctgctaagccgtaagcagcccaactccattatgtctccaaatagtcatggctcggcaagcatccattgctgcagcttgggaggctgtcctgttgagttcaaactatgccagatctgtagttcatatcataacgtctaggtgtgggtgtatgtctgtgccttgctgtacattcttgatcaaagttgtgtggtgtaagatggtagataggccactgttctgcagtgtgcgatcaa

SEQ ID NO: 29927 - DNA, 399 bp, Glycine max
  Clone ID: LIB3051-009-Q1-E1-A5
atccgaggggatgcttctcagtcagggttcaactttggtagcagtgacgctcctgctgtgccgtccggtggattcaactttaattagaagatattcatgctctactggggagttttggttggtctatctgtgaagtcctcctttatgacacgacagcagttgggggacaagtcaacgtcttgtcattgtcctaatgtccttgggttgtacgaggtccagcaagtaaatacatggttgctggactgccttgggtttttgcaatgcctgatatttcatatctcatggtgtaaaatgctttgtggctatatttttttgccaccgtagagaatactagagtcttctttctgccaagtgatcatttcatagaattaatgaatgctcagtctcgtgatttttttt

SEQ ID NO: 29928 - DNA, 418 bp, Glycine max
  Clone ID: LIB3051-009-Q1-E1-A6
aagaaaacgttactagcacagttaatttagattcttctgattatccaaagcatagtaatttcaagttacacggtgatacaagtaaaggaaaggatgagttgcataagtttgagaaggtgccaattggtagtgggattgacatgtgtagttttgaggaccctttggatgaaaatcctcctgcattgatcagtttacgtggcaatgccaaattgtctgggtataatgataggattccctgtagcttgttgtccaaaagtcgtgacaatgtaccagtagttagtagagatgatgatgaaaactcttatgggtgtactcaccctattaatactaaaaccaagtcctttaggctaaagactggtaaaaggtgataatagaataattaaaaaactggcttcaaacttccagaaagttgctgaaa

SEQ ID NO: 29929 - DNA, 389 bp, Glycine max
  Clone ID: LIB3051-009-Q1-E1-A7
atccagctaaagatatttcactcactggtcacactaccaacagagcattctggacatggcatcatctgtctcttacgtgcttctacttcccgatctgatgattgtcgcctttgctggggagttaaactgatactttggacatcacatgtggagatttgacggaccaatatactaaaccacggactagttacgctctctttcagtggaaataccatcttgcccaggttttcagacaagaaacgattaaccctgtgggaagattgacatgccgctcaagcatgtccctggaaacactgctggcaccgtccctgccgatgaactcactccaaaaggatcaacttgggatcatttagactatgaacttcttggagttctgagtggtgatctat

SEQ ID NO: 29930 - DNA, 408 bp, Glycine max
  Clone ID: LIB3051-009-Q1-E1-B11
accaccgctgttccataatccggcccttcaaatcgccatttcttcctttctcaccaacaaattacaaaggcaaaaaatatgggaaccagggaacaagtttgtccgaccaatggggaaattgaaggtttggcaattattactaagaagaagaagaaaagattaagattaagaagaattggaacaacaagaagatagcagatgcaaaagctgttgcatcaactggaatggacaaggccaaaactgcaccaattgtgggtgcccacaaagtgaagagtgtaacctctgctggcctcaaatgggtcacgaatcactatcacaaaaggacttccaagtgtaactcacacactcacatgcgtcttggacagtttcacatccacagctttggtaaataatacatgatgctctact

SEQ ID NO: 29931 - DNA, 256 bp, Glycine max
  Clone ID: LIB3051-009-Q1-E1-B2
aacaaaagctgtttccactggcagacatacattgggtttaagctacaaaggtccaaccggtagttaactactgtgcgtgctggatcgtcagcagcagtgctatcggcaacaagctcacctcgtgctggtaagcctctgcttccaatggatgcaaatgaagatgaagagaacgagaaagcacagccagttacatagtcacatgccatcttccacatgagattctctcttgctagcatgtactctgcaatgcttctga

SEQ ID NO: 29932 - DNA, 170 bp, Glycine max
  Clone ID: LIB3051-009-Q1-E1-B3
aacaagcgtccgcaaacatagtgactaccagaagagacaagacacgggtgagcctagaggaagaaagagacatcgatcatcatcaagacaactgcagtttcaatgccccagtaggctttccaaacgtaatacttttagtgatggtaaaacttgcagagcaacttccagtt

SEQ ID NO: 29933 - DNA, 227 bp, Glycine max
  unsure (1)..(227): unsure at all n locations
  Clone ID: LIB3051-009-Q1-E1-B4
agcacgccctgcggtgcgaccgcaagtccacgagcgtanacgacgaccctttggtcctgatctcgctgcggtgcaggaatctggtgcggctgaagctgcgcgggtgcanggaagtcaccgagcacggaatggccgacgtggcgaagaactgcacgaatctgaagaagctctcgtgcggttcgtgcgcgttcggcgcaaacggcgtttacgctttcgttaacaactcc

SEQ ID NO: 29934 - DNA, 386 bp, Glycine max
  Clone ID: LIB3051-009-Q1-E1-B5
ctcttagaaccatcatgtcacaatctgatcattcctctgcttttaccacacccagattagttctcaagaaggttttggccaaatctcaacatgaaggggatggagctgttgttagaagaggcattggaaggagcgagttgaagaacttggatcccttcctaatgttggatcacttctcagtatctcccccagcaggatttccggatcatccacaccgaggttttgaaaccgtcacctacatgctagagggaggcatcactcaccaagattttgctgggcacaagggtacaataagaaagggtgatgttcagtggatgaccgcaggcaggggaatcattcactctgaaatgctcgcagaagcagacaacaacaacggattgcaacta

SEQ ID NO: 29935 - DNA, 425 bp, Glycine max
  Clone ID: LIB3051-009-Q1-E1-B7
accagaaagatccaattgggagttaaatgttattggataaatttctctcaggtgtagagagagttgaagaaaacatttcattgataattgagcaaacacaatgaatgctccacctcatcatgacgatgaggacgacaacgaacaagttttccttgatgagtctgacatcatccatgaagttgccatggataatgaagatctgcctgacgctgatgatgattctgaactcggtatgaacttgccaggaggaggatagtaattttgtgcacaaattcagtgctcataccggtgagttgtactcagtttcctgcagccccacagatgcagccttggtggttactgggagcggtgatgacagaggatttctctggaagattggccaaggagaatgggcttttgagcgtcaaggtcatgaagaatccgta

SEQ ID NO: 29936 - DNA, 423 bp, Glycine max
  Clone ID: LIB3051-009-Q1-E1-C11
accacttggtagttggtggcctatactgcatttgccattttgggaagcattctcttttttcagaaatagaattggaagcatcttggtgaaaacaacataacaagggagttgggcctctgttggttttgtcccttttggagcttcaactaaatcatgttattcattgaagataccatcccaaaagtgttatgcatagaagaagaaaataaggggcaggaaatgagacaggactgattattacttgcaaataaagtagcatttcaaatactaactgcctaggctataaggttatccctctcttgtttgatgagtcaaatatgcaaacatttatatctttgtaaaaatgtgacatctcaacattctgtcacagcccctattcttcctctgccactttttgatattttaaattaatcgttagtattg

SEQ ID NO: 29937 - DNA, 323 bp, Glycine max
  Clone ID: LIB3051-009-Q1-E1-C3
aatcaggccaagcaagctaaggcaaaccctcgttggcaagtttgttattgccggctcctcttcctcctccccctggcttcgaacgaacccttctttcccgttccaaggcccaacaaccgcaattccccaggccccaataaggactctctcaagatcgaaagatgagcaagtcccaatcccaatcccgcggaaaacgacgccgtaggcattaccaccactcttccgattcctattcttcatcctccctctctgattactccagaagtgaaagttcttctgatagtgaacatgaaacatctcatcgttcaaagatgcacaaaaag

SEQ ID NO: 29938 - DNA, 352 bp, Glycine max
  Clone ID: LIB3051-009-Q1-E1-C5
agaagattctggtgaatgcgtagaacaggaaaataaagaaattagcgtgaaaaatgttgggtgtgttcagcagctccatagtgtcgccgccggaggagctcgttgccgccggcagccgtacaccgtcgccgaagatgacggcggcggcgctgctgaagtggttcgaggagaagaacccctccgcagtgtcggtggaggtcggagagcatgtctagctcgcttacagccaccacaacgagtcgccgtttcagcctagatcctttgctgtgaacgatgaggtactctgcatgattgagggagcccttgacagtttgggcaacgtgagacgatattatggattggccaagtcaac

SEQ ID NO: 29939 - DNA, 390 bp, Glycine max
  Clone ID: LIB3051-009-Q1-E1-C6
ggctgaaacaaagaagtgaaaataacagcaaaaagtagcagctgctgcagctcccccgaagcttatctcagcagcagatactcaaccctgtttgagtagccgagaataacaccaatgggagaggtgttatctcaatacacgctttctctacctttctttctcaaatcactattatatcatagcatagatatttttgttgttgttattattcttattactattattcctggttctgattttcaggttattgttttgtgtttcaggaggaaaagaaaccagaggaacaacccaaggcagaggagaaaaaaccagaggaagagaagaagaaagaagaagcagcagcagcggaaaaaccaagcgaagagaaaaaaccggaacaagagtcgaaag

SEQ ID NO: 29940 - DNA, 411 bp, Glycine max
  Clone ID: LIB3051-009-Q1-E1-C7
accacggacgcgtctatttcatgtgataaaccctttgtacaaacgtttctcccattgctgcctgtctagaagcctgcgtatatgaagctttttgccagcctcataatgcttgcggggcttgatgctgagctatttcgtctataaaaatgaaatataggtttttgaagtaccttttttttttctctcttttttaaaccctaacctgtgggatgttgggttttgaaaggagtggagccttacagaattttggccaggctctgctgcatgtattttgttcctcatcccctggctgccacctctaaaagatgtgtgtgttgaaagtgtcgcactagaaaaaagaagagtcatatgaccatgtgaaagtatttattggccctccgctaaaacaatacgcatttagatcatccctgc

SEQ ID NO: 29941 - DNA, 422 bp, Glycine max
  unsure (1)..(422): unsure at all n locations
  Clone ID: LIB3051-009-Q1-E1-D1
aacgaaggtgctttcttagttgtgctgctaacgacaatccatggaaatgataagctccaaattcttcttcttcttcttttcaactctctgtcttctctacggattttccaacgccaccgatattcactattgcgataagaaagctgactatgatgttgaggtcaaaggggttgaaatatctcctgatcccatcgcacgaggccagcctgctacattcagcattgctgcaactacaggtaaagctttatctggagggaagctagtgattgatgtgtcatatttcggatggcacatacacagtgagacccatgacctttgtggagaaactacttgccctgtttcagctggtgattttgttattgctcattcccaagttttactgnaattactccacctgggtcatacactttgaagatgaagat

SEQ ID NO: 29942 - DNA, 372 bp, Glycine max
  Clone ID: LIB3051-009-Q1-E1-D10
agttattagtgaacaattcacatgggaacctcagctggatgtggatgacaatttcttcagcagtttccaaatgtgcgacctagactcctctgcatatgaaactgggtttcccattattgatgagctaagttcatttgataacagtcaaagctgttataacctttctgatcttctatttcctgggatcaattttacaaacgatggcactgaggaaaatatggagtatcccactctcgaggagacaataggagcagcagattttacttttggaggatcctctgaagggtttcaacagatgtttgattcttcatgggttaatcatctcatgtgccatcaggccattgcatttactgaagaactactgtcagcctc

SEQ ID NO: 29943 - DNA, 349 bp, Glycine max
  Clone ID: LIB3051-009-Q1-E1-D11
accactcaaatccaaatccaattccaattccaattcccaatcttctcaaaccctaattcctcatcttgaaaatgagagaaatcttgcacatccagggagggcaatgcgggaaccagatcggagcgaagttctgggaggtgatatgcgatgagcacggcatcgaccacaccggaaagtacagtggcgactctgaactccaattggaacgcatcaatgtttattacaacgaagcgagtggcggaaggtacgttccacgcgccgtcctcatggatctagagctcggcaccatggactccgtcagatccggcccctacggccagatcttccgccacgacaacttcgtcttcgg

SEQ ID NO: 29944 - DNA, 352 bp, Glycine max
  Clone ID: LIB3051-009-Q1-E1-D5
gtttccattggcggagctccgattcgccaccaccgttctccgaaccggatcgggttgttgccgcctctcaaatgctcctctttggagccggaaaccgccccgcctcctcccttcgactggactcacaagttgatcgccggtgtcgccggcgtcggattcctcgaaacctcgtacctcacttaccttaaactcaccggcgcagacgccttttgccccgtcggcggcggcacctgctctaaaatactcgacagtgattacgccctcgttttcggtattcctcttcctctgattgggatggctgcgtatggcttggttgctgcacttggtgttcaattggcttcgaagaatttcg

SEQ ID NO: 29945 - DNA, 417 bp, Glycine max
  Clone ID: LIB3051-009-Q1-E1-D6
aaagaagggatggcacacggggagtttaaggaacatacagaacgtgtggaaggcagagcagaagcacgaagcggagcagaagaagctggatgagctccgcagacagatccaggaggagagagagcgcaccgagtttcgtcgtcttcaggagaaagctggcctcgcatcaggagaggttggaatttctgtacgattcgggattgtcggttgggaaatcttcgaattccgaaggattcaaggcgctcgaacagttaccaaaatccgatgcaacggatgcagcaggctcctctgcttctgcatctgcttctaaggagggggcgagtgtgcctggggcattgttcgaggagaagcctcagtctgccaatgatgcttggaggaagcttcattctgaccctttgctcatgattcgccagcgcg

SEQ ID NO: 29946 - DNA, 425 bp, Glycine max
  Clone ID: LIB3051-009-Q1-E1-D7
agttccgcggaacagagaaaaagaaagtaccaatttctttagatagtcatggcttccaccttcgacgccttcaccgtcgacgacgaccacttcgccgcccccgccgccgccgacaccttctctggctaccccgacttctcctccttcccctccgacgacgtccccgtcgattacgccgacaccgcggcgtcgccggagatcttcggattcagcgatcccggtccagtttactcccagtctcccttcgagcaagtgcacgagaatgggaatggaaatggaaccgaaaacggctacggcgacggcgttttcgtctccaacggaccggtgcttccgccgccgggagacatggagcctgaggaaagttacgttcctcgggagtggcgcggtccaaatgtcacccagcttgaggagaaggagaaccggga

SEQ ID NO: 29947 - DNA, 435 bp, Glycine max
  Clone ID: LIB3051-009-Q1-E1-D8
aaccagcgccggaaacaactgggccaaaggtcactacaccgaaggcgctgagttgattgactctgttctcgatgttgtcaggaaggaggcagaaaactgtgactgccttcaagggtttcaggtttgccactctcttggtggtggaactggttctggaatgggaacactgttgatctcgaagatcagggaagaataccctgactgaatgatgcttacattctctgtgttcccatcccctaatgtttctgacacagttgttgagccttacaacgcaacattatcagtgcaccagctcgttgaaaatgcatatgaatgcatggttttggataacgaagctctctatgacatatgcttccgcagccttgagcccatcaccccaagctttggagatctgaaccatctaatttcagccaccatgagtggtgtgacatgttg

SEQ ID NO: 29948 - DNA, 373 bp, Glycine max
  Clone ID: LIB3051-009-Q1-E1-D9
actttcttgtaacttcaacaaacagcctcagcggaactctctggggtgttggtgttgctgagggatcttaggcaaaggtgttgatgatatgggagcgtgtgtttcaactccacaaggttgcgtgggagggaggttgagctcttccaagaagaaaaccaggaagaggaggagagagggactcagaagaagagttacttctcggttgtgtaaggaatcattggagaaaattgatgtggcagggttgcctgattgttcctttgccaatcccactttccaaggaagtattgaagaggcatggtttgattcggttgcagtatttgactctgactgtgatgatgattatcagagtgttcctgatgatgttgtatctctg

SEQ ID NO: 29949 - DNA, 267 bp, Glycine max
  unsure (1)..(267): unsure at all n locations
  Clone ID: LIB3051-009-Q1-E1-E1
acagagatggaattgatgatgtcaaggaagcagcttccagagcaacaagggttagaagttcagaacccaaattcaataaaggccctgcagcagaaaattcaagcattacagcggggaaagaacacgaatggagatcctgagagatgaagatagacgacttcgagctcaactgatggatactgctgaagcactgcaagctgcaggtgaacttcntgtgcaacttaatgaagcagaagaagctgtcattaccgcacagaagcgggcgat

SEQ ID NO: 29950 - DNA, 406 bp, Glycine max
  unsure (1)..(406): unsure at all n locations
  Clone ID: LIB3051-009-Q1-E1-E11
accatcaaagttggagtagttcccgtcaggtaaaaacaatcgagccagccaccgccacatgactgagaataaccccaaaacccattacccttcttcgggtgggattcccagtcccagtgatgatggcccaaaaaagcttccagggaagcagaagatgcatttcaacccgccagagaaagagattccggacgcggccactctgagggatcaatggaggtatgccattaggcagtacagtaaatggtactctcacgcttggggcactgccattctcgctggcaccgccttcttcgccctcggctggttcatcaaaggagagaaccccataccctctttcaactctaacanagacaaagacaaagacaaagacaatcacaattctcacccctgatgtcatgtgcccttc

SEQ ID NO: 29951 - DNA, 163 bp, Glycine max
  Clone ID: LIB3051-009-Q1-E1-E2
aacaacgcattatagcacaccacacagaaacgcaaaacagagagaacaactgttactcacacacgccatgggtaaatgaatggtttttgagcaacagcagttaaaagagaaaagggattcagcgaagatgacatcggttggtgtggcagcaacttccggtttg

SEQ ID NO: 29952 - DNA, 420 bp, Glycine max
  Clone ID: LIB3051-009-Q1-E1-E6
atgaaatctctgtcacgattcaggtcttgcatgcacgggattgatcacctgctcacgatttaatagcatgttgtcaatctgcatactagcacttgagcgatccggcctggatagatatgtgactcgtatgacattgcattcaaagtcaatctatctgcagaatttgctacattgacatggaacaatattgggatcgtcaaagttctcaagaggaacctgccatgcctgatcacctgagggttcaccctataattcttgatttgttgttacaacatactgggtcacatacaattgagggcttggctttgcaggacatacagctattggacttcacttcggtactatagcatttgtgataatgacggaattggcacttttgctacatgatcatgtacaccttgttgcccattatgaatagct

SEQ ID NO: 29953 - DNA, 325 bp, Glycine max
  Clone ID: LIB3051-009-Q1-E1-E7
cagcgattgaggtgaggaaccatgtctccccagaaccagagccagagtcggaggaggattccagttgttgttgcccattctgcttgggaccattccttcaactttcctacctcgacgaatgttttcataagttttgcttcaattgcattttacgctggaccaaggtggttgctggcaagcaccgttctccaccttcttctgctctatgccccctctgtaagttttatcttatcaagatcgcacagatattgattacaatgctattacactgaacaaggtctcttagatgacagactctatctatcgcattattggagatctctaa

SEQ ID NO: 29954 - DNA, 419 bp, Glycine max
  Clone ID: LIB3051-009-Q1-E1-E9
accacagcaattgtttctgatttttcccaggttgttgttggatgttacatgggaaaaatacattttcttgattttttgaatggacgcatctgttggattttccaaacttctggcgaggtaaaagcacagccagttgtagacacatgcagacaattgatctggtgtggctcacatgatcataacttgtatgctcttgactacaaaaaacattgctgtgtgtacaagctatcatgtggaggcagtatatatgggtcacctgcaattgatgaggttcgtggcttgctttatgtggcctctaccggtggtcgtataacagctatatcaatatcggcttctccatttactatattgtggctacatgaattagaagtccctgtgtttggttctcttgctgtcgcccacaatggaactgtaatatg

SEQ ID NO: 29955 - DNA, 433 bp, Glycine max
  unsure (1)..(433): unsure at all n locations
  Clone ID: LIB3051-009-Q1-E1-F4
attcatatcttcatcctacgccaatagcccaaaaccttgttctctttttgtggttcatttctctcttccagatgccacttgccgttcttcaccctcacgattttctcaggaaaaacccatctaaccagtaccagaccataatccctcactctcccaacatgaatcctaataagtctcatcggacttcccgaaaccgtaagaagcggcccgatccaagcccacaaggcgttgtcagcccagcccggctcacattatccccgaaaccccaagtcaaaaacaagccgcagcagcaactcgtcatgggtcaggtcaaaatactcaaacgcggccaacttttgacccaaacgacgccggattcaccgccgcagacggaaatcgtcgatcagaagttaactccgcagacggaaaccgtcganaaaaaggacttaacttc

SEQ ID NO: 29956 - DNA, 380 bp, Glycine max
  Clone ID: LIB3051-009-Q1-E1-F5
accacgcgtccggtacacactacatcttcaagacgcacaatcactcactctacattcttctatttcctctatccctaatttcccaattcgtccctaattctgcattttgcagacacttaattacccgcaatggcagagattcagccgccggagggccaaataaacggtgccgtgggaaccctaattcttcactcctcggagccttccatcggatcgaagcggcagcggcggccgagcgtccgattgggcgacatcggcggcgaccagccctacgatccccacgcccgccgcaacccgaagccgtggaaactcgccttcgacagtcaccaccaccaccaccaccaccaccgcagcaaagacaagggaccaggtaaaccctc

SEQ ID NO: 29957 - DNA, 401 bp, Glycine max
  Clone ID: LIB3051-009-Q1-E1-F6
accacgcgtccgggcagatagtgaaatcctaagattgtttagttggaagatggaggcagtggaatcaatagcggttccggaaccggacgaagacgatccttcatcgacgcttctggatctctcgagttaccagctccacgaccttgactcggtcgagttgccacccagcctcaccgagttggacctcaccgcgaatcgcttgtccacgctggacccgcgcatagggaacctctcccatctcaagaagctctccctccgccaaaacctcatcaccgacgccgccgttctccctctctcttcctggaacgccatttcctctctcgaggagcttgtgctgcgcgataatcaattgaagaacattcccgatgtcaccgtatttaagaaacttccgggtttccaag

SEQ ID NO: 29958 - DNA, 435 bp, Glycine max
  Clone ID: LIB3051-009-Q1-E1-F7
agaaaaaaggagtaggaagccatggaaaaggaaaacgaagagatggaaaggaaaaggagagaggaagagttgatccatgagagggaatgggaggagagaatgaactgcaggaggctggaatggaagaagagggttgacgagatgctgagccagcaccgagcagaaatgggccagatgcagactcgttttcttcacgagcaacaaaatcttactaaccaattgcttggtatattctcgcagtggcctgcccaaccttctggcctatctgatcatactagtgctagcaaccattatctttcacaaatgatgcaaaatttgcatcatgtgaatggaattgttcatggtgacgctagggttgagggagataatcaagaagatcaattcattgttgatggatgatgtatctctgccattttgtgtatctgtgctggggag

SEQ ID NO: 29959 - DNA, 442 bp, Glycine max
  Clone ID: LIB3051-009-Q1-E1-F8
accagataaaacaaataaaaacctctgttttctttgtgtgatttctcttctggttccgagtattgtgttattcaccaaaagcttgcacctttctgttgtggatcacctaaaacttgggttttggttgagatggctgagaaggaagaagccatgcatgctgttttgaaggaagctgtggatttggaaaacgttccacttgaggaagtttttcagactctgaggtgtgattcaaatggactcataacagaatctgctgaggagaggctggtcatctttggccacaacaaacttgaggagaagaaggagagcaaggttttgaagtttttaggatttatgtggaatcctctttcatgggtcatggaaactgcagcaatcatggccattgctttggccaatggaagatgaaaacctcctgattggcaagactttgttgggattacac

SEQ ID NO: 29960 - DNA, 382 bp, Glycine max
  Clone ID: LIB3051-009-Q1-E1-F9
accacccacgcgtccgatttgcacttgtgttgtacaggaggagaggtgcacgagtgttgaagtggagccaagtgtccactcattgctaaggaatgaactttggtcagtcagtattgtgtttttctggaccaatgcgtcgccaaatttggagattcctggcttttcatgtgataaaatcccataactttcaatctggtgtgtggtggctgacagaaattgtgagggttagcagcgcattgtctatgacatgttagaagtttatcctaattttaggtctccagttgattgatacttctgattctggcacgtgtgtttgaatattcatgctccaagtaattccttgtctggaacatcttttaatgtgataagcaagatttttaag

SEQ ID NO: 29961 - DNA, 399 bp, Glycine max
  Clone ID: LIB3051-009-Q1-E1-G12
accacccacgcgtccgggagcatggcgggtgaaaaatgggttcaggtggcggttcatggagtgcatggcgtcgtccagacgagcaagggcctcgtcgaggttgcgggaggccatgaggaacaatgatgaaagcaccaattgttagggtatgaaccctaaagctggcttcgagggcagcaaacctccagcaagaagaagaagaagaagacacagaggtaagaaaagggaaatatcattttcttatatcccgcttcattgtttacatagctatatatagaggaatttctcttaacagaattgtaaatcttatccaaaaggaatctaataacgatttctgttttcatatgattgcctacgaaggagcaaccactacaagcaggatttggagctgattcttgc

SEQ ID NO: 29962 - DNA, 415 bp, Glycine max
  Clone ID: LIB3051-009-Q1-E1-G3
aatagcctaaagagtcctccccaattgcttcaggcaattactgcatacactttgcggctgaaaagtctaatctccagagaaatagagaaaattgatgttagagccgatgcagagaccttgaggtacaaatatgaaaataacattgttatggatgtttcgtcatctgatgggagctctcctctacagtatcaactttatggcaatggaaagattggggttgatgtgcctccaggagggagtcaaaatcagcttcttgatagacagaaagctcatgttcaacaatttttggctactgaagatgcactaaacaaggctgcagaagcaagggatatgtgtgaaaaacttatgaaacgtttgcatggaagcactgatgtttcatcacgctcacttggtattggaagtaactcccaaaatg

SEQ ID NO: 29963 - DNA, 428 bp, Glycine max
  Clone ID: LIB3051-009-Q1-E1-G7
accacgcgtccgggcctcgaagatcctgcccttccacccgattccatccacgaagcttttctgaaggccgccgccgccgtcaaatcacgcgccgcctccattttctcctccaccgacgacgacaacgacggaggttgcgtcagcgacccgtggcccagcgccaaggacgcctccgatgcagtcatcggagtcgaatcggaaaacgaactgccgggatcctgcatcgtagagaggggagtcgagcccgtcgccgacgaagtcaaagttgctggtgaaggaggcgacgcctccgccgacgtggtggtggagggaggagacaaattaggagaggatgtggaagcgtgcgttgatgagttgcaagggttggatatcaaggatgtgaagaaaggtggagaagaagatgatgaagaagacaacaagagacctac

SEQ ID NO: 29964 - DNA, 369 bp, Glycine max
  unsure (1)..(369): unsure at all n locations
  Clone ID: LIB3051-009-Q1-E1-H1
accacgcgtccgcccacgcgtccgcgtcacttttccttaacggcgaagccatcgccgaaaagggcacaaccgtcattcccaccccccaaaccgtttcttcaattctcctctctcccatcccagtaaaaaggagaggaatcgaagctgttccgttctcatcggaaaggggaaaacggtaacggagatgggacttctgtctaacagagtaactagagagagcctgaaaccaggggatcacatctactcttggaggactgcgtatatatatgctcatcacggcatctatgtcagtgatgacaaagttcatcactttcacaaaacgtggccaagaagtaggaaccggtactgcactagatcntctcctcatta

SEQ ID NO: 29965 - DNA, 391 bp, Glycine max
  Clone ID: LIB3051-009-Q1-E1-H11
aggcaaacgctatcggatgcaatggaccatgcagaaccctcaacgactgcgacggccaactcatttgcatcaacggaaggtgcaacgacgaccgcgacgtcggaacccacatctgcggcggcggaatgccgccaaatccgccaccaagcggcggaagctgccagtcctcgggaaccctaaattgcggcggaaaatcgtatcctcagtaccgttgctctccgccggtaacttcctcgacgccggcgatcctgacgctgaacgacttcagcgaaggcggcgacggaggggacccgtcgcagtgcgacgagaagttccataacaacacggagcgtgtggtggcactccccaacggggtggttcaacggcattccgctgtgtttgaaaatgataa

SEQ ID NO: 29966 - DNA, 345 bp, Glycine max
  Clone ID: LIB3051-009-Q1-E1-H12
accacgctctgtgcagtttcctcgctctcttttctgcaattttcttttttgttccttctctgcggttatctttttgagcttcaatggcggacgctgaaaccttcgctttccaggctgagatcaaccagcttctcagcctcatcatcaacaccttctacagcaacaaggagattttcttgcgtgaactcatcagcaacgcttctgatgctttggataagattcgatttgagagtttaaccgacaagagcaagctcgatgctcagccagagctcttcattcgtcttgtgcccgacaaggccaacaagactctttccgttattgacagcggcattggaatgaccaaag

SEQ ID NO: 29967 - DNA, 430 bp, Glycine max
  Clone ID: LIB3051-009-Q1-E1-H6
atcttaagcagtgcccacgaggttagatcgcaacatttccctgccaaaacttcgtttgctactttaccccctttggcgctgtttgaaggattttttttttttttttgattcagacccactttgcaagacagtgttttgacctctttttatgctactttatcccgaaacagcaaatgggtcgcatcgctttcagcctcggaatttgatgacgacgatgatgatggagcatggtggtgacatgtgtaatcatggggttgttaataattaggggtatattaggttttggactggtttgtatttgtatctggtaatggtgtttaggttcagagaccttgtggagttggcatctctgtgtcaggggtgtttgcatttgttgcaataataatagtactaataataataatgggcaacggcacttctcgtgttgttg

SEQ ID NO: 29968 - DNA, 345 bp, Glycine max
  Clone ID: LIB3051-009-Q1-E1-H7
accacgcgtccgaaaaaaaaaaaaaaaaaaaaaaaaaaaaaaaaaaaaaaaaaaaaaaaaaaaaaaaaaaaaaaaaaaaaaataaataaaaaaataaaaataaaaaaaaaaataaataaaaatataaaaaaataaataaatttaaattcaattgaatttttttttattttctaaagtttttggaagtaaccggctttttcatttatttaatctatttgctttatatcacgctttcttttcgtgagctgttgtcatagcgactctgaccgatttcatttcccttcactatcgttgcgataacctgattgtggaatgggaccttttttgtcacatttaattatgcgt

SEQ ID NO: 29969 - DNA, 409 bp, Glycine max
  Clone ID: LIB3051-010-Q1-E1-A10
atcccacgagtttccactacgctcttctctttgtctttgactatagtagagaagagaaattaaagcagatgggaagtttacaggaagacgagttggtacaaatggtgcaagattttatagaatccgaatcaacatcccccacaagttccacttcctcaaattgccacaccttaaaccaccgaactcaatattttattctacaggatattctaaggagtgatggtgatacagcatgtgaggctaacgtattgaagtgtgtattgaagcatatgagacgtagaaagggtgctgagaacacaacaagtctcagtagatggcttgttatgacgatgacaatggatggcctcaatgcttctatatgccacacctcttgggcaacttctttgggttgtcctgctgcaggtgatta

SEQ ID NO: 29970 - DNA, 377 bp, Glycine max
  Clone ID: LIB3051-010-Q1-E1-A11
agagagcagttggaagacctcctgccaaaaaatccttcttctaataagctgttcaatatttcatagtttcaacttttgaaacacatttttagacaagaaggaaaagaaataaaattaaagcaaaaacagaatgagagaataataattatgggcataagatatgccatagtctatataacaaggccttttccttttttaagtaactaaagggtgcaagattgattgcaattagcagcactatgatgaaaaaaaaaaaattgaagatgaaggaaaagtgtcaaaataaggtaaggaacaaatggaatggttttaaattaatggaatggttggaataatgtgtgaagtggtggcacgcctaattgactgtgctgggtgag

SEQ ID NO: 29971 - DNA, 382 bp, Glycine max
  Clone ID: LIB3051-010-Q1-E1-A12
accacgcgtccgggaggctggaggacttgatgctgggccacgcctggtgaaaaaattagttggctttggagataataggacatctaagattgcggctagaattgctgatgaggaagttgcacatgtagcagttggtgtctactggtttgattctatctgtgaaaaactgaattgtgctcgagatttcacttttaaaggttgtgaagtctggttaatatctgcttatctgctcacatacactgatacacacatattgaaggcatgcaatcttcaacataattttctgtaagcatgcaaacttactaaaggaatacaatgtggaaacaaaagggcccctccaattattcaccccaaaataaaccgggaatccccggtaattggt

SEQ ID NO: 29972 - DNA, 349 bp, Glycine max
  Clone ID: LIB3051-010-Q1-E1-A4
aaaaagctttggcattgttcttatgctgtggttttttggcagatttggttgggaagtattaatcgaaagagagttgcatatgaaaattgtgttctcatgtggataattctgcattaaggactgcttacatcatctgctatcgagatttgtgcgtgttggagccggtcgactatagttgctagtcatcacttgggatagttcacctacgagatattacaggtagttaattcatgtaagatccgtggcttcgactgggtaagaggtctatgctcatcatatgcttcgtgctgtcagttgtgcgaatttatcacctgtcatttgctagacccatccatttaactctcacctc

SEQ ID NO: 29973 - DNA, 346 bp, Glycine max
  Clone ID: LIB3051-010-Q1-E1-A6
atcacacgtccgcccactcgtccgcccacgcgtccgggcaacgaccttgctggacaaatttgaggaacaatggctgcatcttttacctaaagttgctgaggaggaaactagacactttgaagaagacacatacgcatatctagacattcagcgtgctctcgaaaccacttttgccaatacgagcacgtaaaggtcaatgcacgctcatgtattaagccgaatgagtaccctgaggacaagaataagatgacaaggcgagattctggtgattcttccgacatgacaacaccaatcaagaagagactatccacattgtgattcattaattgcaccataatagacatta

SEQ ID NO: 29974 - DNA, 379 bp, Glycine max
  Clone ID: LIB3051-010-Q1-E1-B1
atcgatgaagagttaaggagagaaaacatcaacatcaaaccaaaccataaagatgaagcccattgacgacaaacaagagacagtgacgataagaacggtgagccacgacgaggaagggaaaaagagggtggagaagacagagcttagcactcacaacatcgacactataaggtacgtcgagaagaagctcatcaacaagggtgtccagcgacaggaccgccaccccgccgacggcatcggaatcagccggccaccgccaaagtccggccacggcggcaagttcacgtgggagggccctgctacagtggagaatagcgaactcatggcggcgccggcggccatggacgaaggagaccccaactatgtggactgggaagag

SEQ ID NO: 29975 - DNA, 397 bp, Glycine max
  Clone ID: LIB3051-010-Q1-E1-B10
atcgaccattacatttatcaaggggagtggagaaaccaagtgggagggtcacatacacagttgttcctgaaggtttgtgcagatttagtgtccaggaactgagcatgagaggaatataccatactgcgaggataacttcccttgaaatgaccaagactgaactggaacaagtggagcaagacccagatttcataatgttgtctcgccaatttaaagctactgcaatggagcttatttctgttttggagctgaaacaaaaaactggtggtatgacacaagtccttttggacaacgttccagttcacaagttggctgatatatgtgttgctagttttgagataagttttgaagaccaattatctatgctggacttaatttgacccacagtgacgctttc

SEQ ID NO: 29976 - DNA, 419 bp, Glycine max
  Clone ID: LIB3051-010-Q1-E1-B12
aatttttaacttcctctttctacatttcattcaaaacaatcatggcttctcttcattccattacattttcaacaaaaactgtcctttatgtatttgtattggcctcttccatcgcagcctctgctggcaacttctaccaggattttgacgtaacttggggagatggtcgtgccaagatactcaacaacggcgatcttctcactctttcccttgacaaagcctctggctcggggtttcagtccaaaaacgagtatctctttggcaagattgatatgcaactcaagcttgtacccggaaattctgcaggcactgtcaccgcctattatttgtcatcaaaaggattaaattgggatgagattgactttgaattcgtggggaatctgagcggtgacccatacattcctcacaccaatgtgttc

SEQ ID NO: 29977 - DNA, 431 bp, Glycine max
  Clone ID: LIB3051-010-Q1-E1-B3
aaaaatccaacagatctaaaagtaccagttttggacataaaaatgccaaagccatcagaaggaactgaagagaaacattctgtaccatcatctgctgcagtgatgcagacagatgaaaatgacaaggaagaagatgaattcagtgaagatgattgggatgcatttcagtcgtttcctgtctctaaaagtgaggatggagatgattcaaaaacagagtatgttgctgaaggaaaggatcctagcacagttaaaatgtcatcagaaatagaaagttctattggaggagttgagtttcaagaatgttctatttccaaatccatcaatagtgaaaaggagctgaaaggtgatgaatgtctggaggctgttaaagagaaacatgatcaaacttatcctagtgctaacaagccacatgataatgagaatcaagagat

SEQ ID NO: 29978 - DNA, 292 bp, Glycine max
  Clone ID: LIB3051-010-Q1-E1-B4
atccgatgcttttcactacaagggattcgcatgtccgacgtatatacatggtcactctgcttccgatcgctccagtagtcacttgcgaagatcttaacgaaaatttaggatgggtacactgcatccagatgacaaatcgggtaatctaaatgctttggtagagcttcagcaacagatagatgtgaatgcaggcgctctcgttgtccgcatagccgaaagttctgggagccattgtgcgtagcacgtgaaaatgtcgattgtggcagcagctcatgtaagtcttccttatgca

SEQ ID NO: 29979 - DNA, 424 bp, Glycine max
  Clone ID: LIB3051-010-Q1-E1-B5
tggatctgctgtcaaccctggttctttccagcagcacattagacatgattctaatttgatgagtcagctctttcagagtgatccagagttggcacaagctattttagggaatgatctgaacaaattgcaggaagttttacgattgcgtcatcaccaaagagatgaattaaagcgtcagaaggaagaagagcttgctcttctttatgctgatccttttgatgttgaagcacaaaagaagattgaagctgccatccgccagaaagggattgatgaaaattgggctgctgcattagaacataatcctgaagcttttgctagagtggtcatgttgtatgttgatatggaggttaatggtgtcccattgaaggcatttgtggatagtggagctcagtctaccattatatcaaaaagctgtgctgagcgt

SEQ ID NO: 29980 - DNA, 198 bp, Glycine max
  unsure (1)..(198): unsure at all n locations
  Clone ID: LIB3051-010-Q1-E1-B6
accacgcgtccgctcggttgaactcggtgtgtgtagaaatggcgaaacttgaagccaagctagggatgatcttggactcggtgggtcagttcttctccggcaaggaccatcttccttattgtgactctgacgtcgtanctggatgttaaagaaaagtcttggaagcaaaaaaacaatcatctcaagaatttatgccag

SEQ ID NO: 29981 - DNA, 406 bp, Glycine max
  Clone ID: LIB3051-010-Q1-E1-B7
atactatagaatgaaggtggagatgatgagaaaggttaaaagaagttagcaaattgaaagtaattaattgatccaagatctgaagattcactagtactttgcagcatcatggttttgtttcatgttgaaaaactggaaactatcttgtgcagctctgagcttccgtgaatagattgtagcattgcaatgtttacagaagtccttgtgaggaatgcaagaaatgttatttcccgtggcaaggaactttgttcgatcaaaggtctttgtttgttatggtagtagatagctggaacatgggaatgcacgaaaacacaactattgagattttaggtactgtgttaatgagcgttgataagaaacttcccgttacttttgtacagatcatcttccaaacatccaatattga

SEQ ID NO: 29982 - DNA, 371 bp, Glycine max
  Clone ID: LIB3051-010-Q1-E1-B8
accaagcgtccgatatttggtcctgatgatactccatgggatggaggcacgttcaagttgacactccaatttactgaggactatccaaataaaccaccgactgtacgatttgtgtctcgcatgtttcatccaaatatttatgctgatggaagtatttgtttggatatattacaaaatcagtggagtcctatttatgatgtggctgctatactcacatctatccagtcattgctttgtgatcccaacccaaattctcctgcaaactctgaagcagctcgaatgtttagtgagaacaagcgtgagtacaatcgaagagtgagggaaattgtggagcagagttggacagcagattaagttcatccttatatgca

SEQ ID NO: 29983 - DNA, 426 bp, Glycine max
  Clone ID: LIB3051-010-Q1-E1-C10
atccaagaggacattgcttgctcaattcctcgttatttctttaatctctacaatttcacttacatcggtggtcttaactattctgcatatggtccgttaagtttctcggggtatcctcagtatgcggtgtttctaaactgcactaccccagtcaccgatgatcctcgatacgtatctgtgaaggtcaacggtaattgtgattcgagttccgtaagccatatctatgccattctggtcacagacgatgatgatcgctttgggtttacactgacggacatcaacgttgggtgccgattgaacgttgctacatttgcaaactggaaatatattaacagggacgttaacgtttcctattctgatatcaacaagtggctgtaccactgaaattggatgtcatggttctatcgagtaatttgtatggaccga

SEQ ID NO: 29984 - DNA, 433 bp, Glycine max
  Clone ID: LIB3051-010-Q1-E1-C12
atccgaccgacgcgtccgctttggtatcacgagaaactatacgattcgattccttgttttcaatggacaccttcttcaattctcaatcttcttcttcttcgagaagccgctggagttacgatactctcaagaatttccgtgagatctctccgctggttcagaatcacatcaaacgggtttattttacgttatgttgcgctgtggtggctgctgctgttggagcttttcttcatgttctgtggaacattgggggttttctcaccacgttggcttccattggaagcatggtttggttgctatctacagcccctgttgaagagcagaagaggttgtctctgttgatggcttcggccttgtttcagggcgcttccattggacctcggattgatttggctattgccattgatccgagccttattgttagtgcatttgt

SEQ ID NO: 29985 - DNA, 402 bp, Glycine max
  Clone ID: LIB3051-010-Q1-E1-C2
aattgccccagacacccctcttaagctcgccgattacttcaaaatctccggtgttgtccgccccggatgcatatctgacagacccactggtggcggcatttaccttgacacttctgtgttacaagctgactacagaacttttgttgagattgtcatccagaacaactagaagatcgttcagagctaccatcttgattgctaatcgttctttgtccttggtatggacgggggacagtcgacacctgcgatcacgagccagtagaatctccgagatgcagttgcacgttgcaccacagaggtataccccttctcatgtactgctatttatagtgcccttgacaatgtgcgaatgtggaacttgaggtcagagttttgggcacgacaataccttgggcaacagtt

SEQ ID NO: 29986 - DNA, 364 bp, Glycine max
  unsure (1)..(364): unsure at all n locations
  Clone ID: LIB3051-010-Q1-E1-C5
aatcatctttatataacctaattgcaaatatgaataccatgcccgttttcttcttgtgcttcctctgtgcactgcatctcatctctgttgtggcaactgagccatccaaagatgagacacaagaagaaccaatgacacagccagatgcctgaggaagatgtggaagtggggggcatgatggaagctggggacacggtggagactgggggcatggcggacgaggacacggtggaggacatggcggaggatgacacggtggacgacatggcggaggatgcagatgctgcagtcgaaagggctgcanatgttgctgaagtaaaaatcacaaatatatgaactgaacacactcatatacttgagtgta

SEQ ID NO: 29987 - DNA, 288 bp, Glycine max
  Clone ID: LIB3051-010-Q1-E1-C6
agcaaacattggaatgaggcctaatgcggtgaacgtaccggttgaacagttaaccacaaggttggccactggcttgctgcaattggttgaaccccaaattcaaacgaatatttctcgtcaatctcctcagcttgttactcaatgattaagcattgtctttgtttaaaatatatttgcctaagaatgtcccgggtatgtgaatcacatgctcttcttttttcaatacgggtctgtaagagataaatttatttgaatggtgctatggatttgaataatttattttgctgt

SEQ ID NO: 29988 - DNA, 402 bp, Glycine max
  unsure (1)..(402): unsure at all n locations
  Clone ID: LIB3051-010-Q1-E1-C7
atcacttacttaggaattgatatcgaggtgtatggtggcagccttatatttttgcaacccgattctaccaagaaaggggttatacttctcgacggtaccaataagttgtgggctcttcccagtgaaaacggtaggttgtcgtgggaggaaggagttttggacttggagagtgcggcaatgcacgagatagggcatttactacggcttgaccactctaacaaagaggactctgttatgtacccttgcatattgccttcacaccaacgaaaggtgcagctctcgaaatctgataagaccaacgttcagcatcagtttgctaacgtagaggactctgcaggccacgtanggcgtttgggagtgagtttaattaccactttgtctcttggattcgcttacttactt

SEQ ID NO: 29989 - DNA, 176 bp, Glycine max
  unsure (1)..(176): unsure at all n locations
  Clone ID: LIB3051-010-Q1-E1-C8
actaactagtgttctataagttcacggtcagttctgaaaaatgggttccaaggttttgcttgttgtanttatgttcatagcggctatacttctgatctctgctgaggtttgcaccaatgaatacgaaaattttaacanaaaagatgggaagcatgctccaaatgggttatatgata

SEQ ID NO: 29990 - DNA, 415 bp, Glycine max
  Clone ID: LIB3051-010-Q1-E1-C9
acatatcttccactccacaacctcaaacttctctctctctctcttcctattctaaaaatcccacaaacccctttctctattccatctaaagattcattctttctgcaatttcgatacacgggtcttcattaattcactaagattctgcgtaaataatcgttttcactgaattttctgttccgatggagctaatttcaggattaccggaggacgtagcccgagactgtttaattcgggtttcgtatcagcagttcccaacggtggcgtcggtgtgcaaactctggaaatcggagattcacgcgccggagttccgccgtcaacggcgtagcacaaagcacgcccagaagctcatagcgatggttcaagcacgcgtcgaactgggaaccggttcgaccaagcgactgacgaaaccggt

SEQ ID NO: 29991 - DNA, 361 bp, Glycine max
  Clone ID: LIB3051-010-Q1-E1-D1
aaaatggggaacatgcacaaagaattgattctctggttttcatattgtttttcttattttagtttattgagacttggatatctttttcaatcaattttattgtttaactgctgagtgttatcgatcaaaaatatcaattttaaattattggtcttaatggattaagcaattttcctttttccctttttaattttaaaattgtgttcctttgccttttgaaactgtgtgtttggtaattggtaagaatggaattgatattaacaccaaaaaggtgctccttaatccaatcctttaaataaattgatgctcaaattcaccaaaatgttactggaatcaattttaatttgggaaaaattccaat

SEQ ID NO: 29992 - DNA, 429 bp, Glycine max
  Clone ID: LIB3051-010-Q1-E1-D10
atccgagcttgcctcgtgaagacatcaattcaaccatcaaacgaactcttctgaagagcttggaaagccctgattggaacgttcgtatggagtctgttgatgctgtaaacaaaatattggaagaggctaataagcgcattcaagcaactggaactggtgagttgtttggggctcttaggggacgacttgttgatagcaacaaaagcattgtcatggcttccttgacaacaattggcaatgttgcatctgcaatggggcaagctgtatagaaggcaagcaagggtattctgtctgatgtattgaaatgtcttggtgacaacaagaagcacatgagagaatgtgtgctgaatacattagacgcttggctggctgctgttcatctggataaaatggtttcatatattgcaattgctttgatggactctaaac

SEQ ID NO: 29993 - DNA, 248 bp, Glycine max
  Clone ID: LIB3051-010-Q1-E1-D11
aagcttgcctcgttaagacatccattcaactatcttaccaactcttcagatgatcgtagaaattgatgattggaacgttcttatgacgtctgttgatgctgtcttttggggggtggattacgttgataagtagatttatgcagctgcaattgttcatttgtttgggggtctacggggacgacttgcaggttacagtgtatgcattgtcatgcgcttctttgcgaactgatggaacacttctgtctagc

SEQ ID NO: 29994 - DNA, 422 bp, Glycine max
  Clone ID: LIB3051-010-Q1-E1-D2
atccgagtatgacagtgatggtgagattattgatccagatcagcttcaaaaaccagaagcaaaatctgattcggaggcctctcaatatgaagatgaaaagccagatgctggtgaaggtccttgggaccaaaagcttagcaagaaggacaggcttttggatagacagttcatgaaaaaccctagtgagatcacgtgggacgcggttaacaagaagtttaaagaggttgtggctgccaggggaagaaagggaactggtaggttcgaacaggttgagcagctcactttcttaacaaaagttgctaagacacctgcacagaagttggaaattctgttcagtgtggtttctgctcagtttgatgttaatccgggcctcaatgggcatgtgcccataaatgtatggaaaaaatgtgtgcagaacatgc

SEQ ID NO: 29995 - DNA, 405 bp, Glycine max
  unsure (1)..(405): unsure at all n locations
  Clone ID: LIB3051-010-Q1-E1-D4
attcaattttggtaccaaaaatgaatacaggcattacaaattactaaacaaactattaatcatgcctcttggagcaccgaatcattctgcatagaaaagaagctttggtatgctttaggaaagatgagagcagagaaggctgcttggagaatatctaatgaaaggggtttgaagctcacaactatttgtccagctctaattacaggtcctgaattttgtcatangaatccaacagcaacgattgcttatctcaaaggtgcacaagaaatgtactctcaaggttttctagcatcagtggatgtgaccaaattggctgaagctcatgcaagtgtattcaaggcaatgaacaacgaggcttctggtagatacatttgctttgaccatgtaattgatacacatagtgag

SEQ ID NO: 29996 - DNA, 323 bp, Glycine max
  unsure (1)..(323): unsure at all n locations
  Clone ID: LIB3051-010-Q1-E1-D6
aaccacgcgtccggtctttacatcacaccctctttccccctttgccaaagctctgatcctttccctcctcaaatcccccgntcctcaactttccttgttaagggtgccccgtttcccagtttccgaaaccatttttggtccggggctccccccaacttcggaaaagattcgaattttccgccccctttttttggttccaaaccctcctgaaacctcctttccccattcggggttttaaaggaaacgccttttaaccgttccattaagaaggaaaaggaaaaggaaaatccctgttgcctttgttggcaataacaacaattcca

SEQ ID NO: 29997 - DNA, 430 bp, Glycine max
  Clone ID: LIB3051-010-Q1-E1-D7
atccgactttttggaggaaatgcacaatggaaattctttacgcagcacaacaactcttgggaatgaaaaagaacgagagagagtttatgacactatcttccgcctgccatggagatgtgaattgcttatagatgttggcttctttgtctgcttcgattcatttctttcgttgttaactgttatgccagcgaggatcatgatgaccatttggaggcttctaaagacaaggcagttcaagaggttgtctacaatggaagtttctgattttggctgttttcttattttgagtagtggtgttgttcttttgcaacaaacagatatcagcttaatatatcatatgatccgcggtcaaggaacaataaaactatatgtggtctacaatgttttagagatatttgataaattatgtcaaagttttaatggggatgtg

SEQ ID NO: 29998 - DNA, 368 bp, Glycine max
  unsure (1)..(368): unsure at all n locations
  Clone ID: LIB3051-010-Q1-E1-D8
aatgaattgcaatgagtagcgaaaagtctccttcatcagcttctgcttcagcttcttcttcgagtagctacgagttgagcaaaggcatcaatggcctcgacaaggttattcttcgcgacccacgtggtagctccgctgaggtgtacttgtacggtgctcacgtgacttcatggaagaatgaacaggccgaggaattgctttttctcagtagtaaggctatatttaagcctccaaagccaattcgtggagggatcccaatatgttttcctcaattttcaaacctcggtcctctcgactcgcatggatttgctagaaatcggttctggaccattgatgattctcctcctccttttctgacanatactccg

SEQ ID NO: 29999 - DNA, 396 bp, Glycine max
  unsure (1)..(396): unsure at all n locations
  Clone ID: LIB3051-010-Q1-E1-E1
attgatcctcaaacacagttttctcaagtgcaaacaattaattttcaaaagaaaggtaagcaatttatatatttgtagctacctccaaggataactgctattagtatctagttatacttttgtagactgcaaaatgtttgtcattaagtatccttttattttcctggtgacaattgtaaatacattgtgaacataaggtctcgcttagtgttttgctttgttcgttgagaagatctangtaagcaaagtaaggaggtacaggagtccaactgttgtgacaatggtatctaactactgtagtttgtatctctagttattatttgtttcaagtggtattatttcttattttctttctccttcagaaaatgctgtaaaaggcatataagctctcaattg

SEQ ID NO: 30000 - DNA, 416 bp, Glycine max
  Clone ID: LIB3051-010-Q1-E1-E10
aaaaagctgaagcggagactgaactgaaacaacgatttgagcacagcatgatcgaagctgctgataaatatcaaggcgcaaacttgtatgtagtaaatttacatgatagcattggtgatgaaaaacttaaggagctgttctccccttttggtaccattacctcttgcaaggttatgagagagccaaatggcttaagtcgtggatcgggttttgttgcattctcgaatccctaggaggcatctagagcactcctggagatgaatggcaaaatggtggtaagcaaacctctgtatgtgacgctaccccatatgaaagatgatacgagagctagactgcaggctcagtttgctcaaatgcgacctgttggtatgccaccatctgttggtccacgtgtgccaatgtatcacccatgtggt

SEQ ID NO: 30001 - DNA, 427 bp, Glycine max
  Clone ID: LIB3051-010-Q1-E1-E12
agcggtgtcatcactggcgtgtccgttgctgagtgattacggttacagcgtggcgccgccggaagtgcaaccggcgaattggtttctgagagagtggtttgagtcaggtaaggggaaattagaagaaggactgaggctttgcgcgcacattgggtgcggtcgaccggagacgcggccacacgagtttcgccggtgttcggtttgcggcaaagtgaattactgttcacgtggatgtcaggcgctggattggaagttgcggcataagattgagtgttcgccggtggaaatgtacggtgatggtggtgttgatgtggagaatgagtttgtggtcccaaacgatgccgtttgaagaagtgtttcagcgacagaatcaatttctaaggttgaaaaataagaaaatagagaggaaaagaagcgattctataaa

SEQ ID NO: 30002 - DNA, 396 bp, Glycine max
  Clone ID: LIB3051-010-Q1-E1-E2
acaactgtgagggcgccgcaaaacatgaagggcaagtgcattctctgggcggatcgtaaagtcgttgaagaggaagatgcaaagctagtgaaccttagtcgcaaatctgacggagaagaaggaatcagacccatgtatttgcataagcgtaatcctaaccctcttcttgcactgcctccaaacatctcaagtgcgacatgagccccaaattcaacttcactgccaaacccatttcctttgtctcccccgttctcgttgttcctttttcacttctccctttttggttcagcacaaccatcgcgagatctagcttttgtttttaagatcttgaatatggagttaaaacttggctattttgtcaattatgggtgctttttggattcaaattttaagaat

SEQ ID NO: 30003 - DNA, 428 bp, Glycine max
  Clone ID: LIB3051-010-Q1-E1-E3
accaagcgtccgggagaaggagaaggagatttctgttgaatgatgaggaacctaccctcttgtgctgattgagaataagaaccagaacaggttgcagttaaaaaaatataacttgatgcaaagaggagtagcagaaccatataacaaaccgaaagtaaaggaaaagaaaagaagtgtttgaatttgatcgttaaactgagggagaagaagatgaatcacactcgcttggagtcttgtcatgaatctccccttaaagtatacaaattctgttttgtcccagaaaaacttggtgatatggttatactcttaataaggtttggcattcttgtgtgtcttgttgcatccatatcacttgctctccactcagcattctctaaaccagaccggtggttcccgttaccggagcatattcgcgccgtccagaatac

SEQ ID NO: 30004 - DNA, 436 bp, Glycine max
  unsure (1)..(436): unsure at all n locations
  Clone ID: LIB3051-010-Q1-E1-E6
accaagcgtccgaaagaaggtaagtccaagcccaaggggcagctgggttacagacgaagactccaaaagcttggtcagtgtacagtcagaccggttccggaggcactccattgccggttcattggtgagagatgatgagagccttgctagctctccagcagttccaagctacatggtgccaactcaatctgcaaaagccaagtccaggacacaaagtccattagccccagaaaatggaaaagcatagaaaggttcctttgggagtgcgaagaagcggctttctttcgcagcttcacctgccatgccaatgcgccattcaggtccaccaaaggtagaaagcagcagcttanatgcacagttagctgtggacaagggtgtggacagttgatcatacaagtaaaacgatggaaaaacataaagtacgattgaaaatata

SEQ ID NO: 30005 - DNA, 364 bp, Glycine max
  Clone ID: LIB3051-010-Q1-E1-E8
accaagcgtccgtttatagatacttcttatgaccaaagattgcagtcccaacattccctttgtttaattgatgcctttcatattattctaatttgtattaggaaccttcctggttcctccttgaatttaagccctttgtttagcacacagtgcatctaccatttcacttcacaacctttttttaaggaatattatttatagatacttcttatgaccaaagattgcagtcccaacattccccttgcttcattctcctgttctcaccatacatgttgttgtcatgatatccatcactttcattgctgcatccagcatcgtcttcctgcatgggatatgcattatacatagtccatccagattcacg

SEQ ID NO: 30006 - DNA, 429 bp, Glycine max
  Clone ID: LIB3051-010-Q1-E1-F10
actcttcctttctctcgctccatctctccactcttatctcgttccctttcacaactcaaacaattcccaaaatcccacccttgtcccctctggtcctcctccttctccttcttacccacacacactccgcaagtccacttcccctattcgcgcctcttcttctttttctccctccatggctgcttcttctccgctaaacgacgccgtcgaaggcaatcctcttctgcagaacttcgacttcccacccttcgatgtcgtcgagcccaaacacgtgcgacccggcattcgcgccctcctcggcaagctggaaagtgaattggaggagctcgaacggaacgtggaaccgtcgtggccaaagttggtggaaccgttggagaagatcgttgaccggttatctgtagtttggggcatgattaatcatctaaagtc

SEQ ID NO: 30007 - DNA, 434 bp, Glycine max
  Clone ID: LIB3051-010-Q1-E1-F11
atcgaccacgcgtccgcccacgcgtccggagcaagtagagacagcaggtccaggtcatcgtccagaagccctgatggaaagcaaggcttggtctcatatggcgatggttctccatactaacgtgaaaggtgaaatatgtggtgcggagggctttgggttactgtaatcttcaatgagctgcaggcttcaatttttgaacttcaccacctgcattgcttgatggaattcgtgaatgacaatcgttttcccccctttatagacagcaatggcatgttgaaaacttgaaatattctagtcctagaataagttaagacaatagacggtacttatgacattaggatgcagccttggttgtgaagttgttgcggtatttgttggaatcggagactcggatgctgttgctctacttatgcttggttggttacgaccagcat

SEQ ID NO: 30008 - DNA, 332 bp, Glycine max
  Clone ID: LIB3051-010-Q1-E1-F8
agtcctcagcagccacagtccctcttcgaacgaccccttcgatttcaatcgtgcaaggatttccccctatctcagcgctccttcttctcccaagcgttttggccaattttattacctaagcgccccctcaagcccttctaaagattttgatcttgcggctcacgatgatgatgccttcgcctttttcgttactggggaatccaagagccctcgatccgcggcagagcttttcgacggcggcaaaatcaagccgctgagcgaggatgattcctcggagtctgctaaaagcccacttctccctgccaaacgatcttccatagcccaaggcaaga

SEQ ID NO: 30009 - DNA, 265 bp, Glycine max
  Clone ID: LIB3051-010-Q1-E1-F9
atagaaggtccgttctgaagaaatccttcagccaagagcaagtcaccttcacctctcctctctccgccgaccccctcgtcgccctcatcggcggcggcatctccggcctcatttgcgccctcttcttggagaagcgcggcattcgctccaccgtatttgacaccggtattcacggtctcggaggaagattgggaaccagagtcgtcgatcctcatcctttgaaattcgatcatgcggctcagttctttactgtcagcgattctcg

SEQ ID NO: 30010 - DNA, 412 bp, Glycine max
  Clone ID: LIB3051-010-Q1-E1-G5
gtgatttcagacaaaacattcaagaagcagcaggaaactcttgatgaaattctttcacgacacaggaaagagatattgcagctgcagaaaaaggaagttgagatgaaaaaggctgcagctagaggtagcaaggctgagcagaaagctaagaagaagcaagtggaggaagaggtttctcaactttctgctaagcttaaggaaaaccaagccaaagagctggctgcattaggctataacagtagcaatggaaatgaaaagagcaatttggacagtttggtgaatgccatagctggagtatctgttgctagtcaacctgaacatacaaaggtcagcaaggccaaacagaggcgagagaaaagagctcaacaagaagcagaaagggagcagagaatccaatcagagcagagtgaca

SEQ ID NO: 30011 - DNA, 387 bp, Glycine max
  Clone ID: LIB3051-010-Q1-E1-G6
agtggaagaggtggaagtggggggcatgatggaagctggggacacggtggatactgggggcatggcaaatcaaacttcatggcatttgagtttccttattgacaatcccaaacagtctacagtttttgatattctcttgggaatttctcaagattttgaaattgctggtaatactcttatgccagctttttctgttccacaggctactgccagatcttctgaaaatgcggaatcctctgcatgatctggaatttgtgttatctttcgcttgttcgtttgtgtaattcaataaatgaaattaggcatgaccctcttgttgagtatgctctgcctatttgaaaatttccacacctcttttaactgtcgtaatgatgtgtgaactgtgtg

SEQ ID NO: 30012 - DNA, 365 bp, Glycine max
  Clone ID: LIB3051-010-Q1-E1-G7
aatcaattcacaaacagcaaaaaaaaaaattgaaaaaaaaggcgaaaaaaaaaataatccctgcaatgagacatcaaattatgatcctggagaatatcggaaataaaataaaaacagatgtgtatcaaacttacaatgcacatactgggccaccatcgcatcaaaacgcgtgttcgcagcaccaaagaaacacatcgcagcgagtcagacgccccttcaactaatcacatggcagaaccgtcgtccaccgctgccaccatcgctaccgctgatcctccggttccaacgaccaataactgggccgacgaagcggaccaacacaccaacgcctctaccgccgaggcataaacctcctccgttaacct

SEQ ID NO: 30013 - DNA, 366 bp, Glycine max
  Clone ID: LIB3051-010-Q1-E1-G9
agctactcgctcatcccgtggaggtttcgctctctcagtttcttttccccaaattggtttttcatctaacaatttactttgcagaaccgtaaccctaaccccttcccctaccttgtaaccttcctttcgatccttcacctcgcaggtctgattttagttgattcggtgattcccagataatgggagaaacaaaggacgaagcatacgaggaagagcttctcgattacgaggaggaagacgaaaaggcccccgactccgccggagctaaagtcaacggcgaagctaccaagaaaggctatgtttggaatcacaattccggagatcaaggaatttccttcgaaacccaaacttctcttgggcaatgtg

SEQ ID NO: 30014 - DNA, 425 bp, Glycine max
  Clone ID: LIB3051-010-Q1-E1-H1
attaaatcagttttcaatccgccacaaagaatttgtgaaaagggggaaaaaaaaagagtccctgctatgaacaaaaagttatgatcttggagaaaagaagaacacacaaaaaaacagatgtgtaacaaacttataagacaaaaactgggccaccatcgcagcaaaacgcgtgttcgcagcaacaaagaatcacatcgcaacgaatcagaggccccttcaacgaatcacatggcagaaccgtcgtccaccgccgccaccatcgctaccgctgatcctccggttccagcgaccaaaagctgggccgacgaagcggacgaagaaaccaacgcctccaccgccgaggcagaaacctcctccgttaacctggaagcgttaaccatcgacgacaaagaaaagaactcttcaaaactcttggacgaacccga

SEQ ID NO: 30015 - DNA, 430 bp, Glycine max
  Clone ID: LIB3051-010-Q1-E1-H10
aggaacgagtgggagaaaagcctcgaatttccatttaattacgtggatgccactctcaacaacagcttcatggcccaattccagggcaataatcagatgttgtcgccgctgcaggacatgttcatgtactggcccaacaagtccttttgagcacatcatgatggttttaaattacgatccgcaattgctcttaagattttctgactcaccatgcgaccacaatcgtaatttaaaaccatgtcacataaaatccacgcgcgccgcccattcgcatttgcacggtagcacgagactcaaggtccatgagtgtgcctgtgcgaccacacacatacgattattgatcaagttagcttagctaggccaaagtaagaaagaaagaaacattgaagctggaaacgcatgtgttggctccaccgtttgctttggtatt

SEQ ID NO: 30016 - DNA, 276 bp, Glycine max
  Clone ID: LIB3051-010-Q1-E1-H6
aaccactcgtccggttgattgttgattgcagatgtgaggtggcccgtaataccccatatgaacttaacatcacaatccctgtatgagggttatgagccaattgaatttatgcgtacacacacatgtgactatagacaggatccaccgggatgtcgcacaatacgatggccaatatatggtgtgatatattacataatttgtgtctcttcacaacgccattgtggttgagtgttcatttataatacataagttgtactccagcatgctaattaggca

SEQ ID NO: 30017 - DNA, 421 bp, Glycine max
  Clone ID: LIB3051-010-Q1-E1-H9
aaacaaacatacattacactataatgtctttgctcatgttcgtagtaacgaaggccaaccttaaggttgcacgtctggtcgccgtgatgtccatgattgcggtggctatcaatgccacacccatggcaaaggtcacattcaggtgccgtcaagtcgacgtgcacatgatctcctgtgcgtcagtgtccatacgaactgaggtaaaccgtctcaggactgctgcacaggtctgaaatcacacatcatcggcacgatgaccattgctgactgccagggagcatacaattccctgaaaatcgctgataacataacgtgacagagtttgaatgccggcatcgtcaacactcactctgtcatatgtgacgtcaagatcccataccagatcagcaacaccaactaatgcgctatcatcaagttctga

SEQ ID NO: 30018 - DNA, 420 bp, Glycine max
  Clone ID: LIB3051-011-Q1-E1-A1
cccacacgtccggtattttgactggcgtaattgggcttcccctgtacctaatgttggaaggaatcctcccacatctgtaacagaacttaattttaataagtttggaatccgtgccgccttaattggctgtttggccacatccacaaagactattcttgcagaatctcttctgcatggatacaaatttgacagcataaacacagtttattacatggcaccttttgcaaccatgatcttggccgttcctgccatgttacttgaaagcaatggaatccttgaatggttaaatactcatccatatccttggtcggctctcatcattatttttagctccggggtgttggctttctgtcttaacttctccattttttatgtgattcactccaccactgctgtaacatttaatgttgccggaaatct

SEQ ID NO: 30019 - DNA, 399 bp, Glycine max
  Clone ID: LIB3051-011-Q1-E1-A10
agtgcaaatatactgtctaaaggtaccaaacttagggattatacaaaaggagttgagaacgatttgcgcaaagttgaattggattcaattcaggattatattaaagaaagtgataatctagtttctcttcacgatcaaattcatgattgtgatagtatcttgtcacagatggaaactcttctaagtggatttcaggctgaaattggttccattagttcagacataaagattctccaagagaagtctatggatatgagtttgagacttaagaatcgcaaggtggctgaatccaaattggctaagtttgtggaggacataataattcctccaaggatggttgacgttcttgttgatggagaggtcaatgaggaatatatgagaactcttgagattctcagt

SEQ ID NO: 30020 - DNA, 414 bp, Glycine max
  Clone ID: LIB3051-011-Q1-E1-A2
gtgctcttcacctttcactccacgaaatcaaaaacaagtgctaagaagctccgtgtctccaatcccaaacatgtaacaccaaacccaagttggcatccaagttttaaaacaacaatactgcatataatattattataatatacataacaacagttattgatattgttgtgattgtgtgtgattttggtgtcgtccctttttcctatgtttaaggttgtacggagtttatgtgttgattcaattcgtcgataagaaaccttagtttgatattttgattggttctgtggagagtttttttttctttggtgtggtttttggtttgtgctgtttttggttgggaataacaatggccgatgaaggaaacaaaagcaataacttctattcgatcttggggttgaagaaggagtgcactga

SEQ ID NO: 30021 - DNA, 303 bp, Glycine max
  Clone ID: LIB3051-011-Q1-E1-A5
agtcaaaataaaagatggtgaaaccctaactctagagattatctacagcaacaaccaaagccacagtggagtaatggggcttttctacatcttggtggctgaacaactgccacaccaacacctcctttgacattattatgtgtcctaagtaaattcatcttggaatggatccaagagactattatattatatgatatctatatgagcaaatgaatatgttgtgatgaaaaataaagccagcactgagagtcttgtaataataggaaagcattaatttattatactatagtcacatatctttag

SEQ ID NO: 30022 - DNA, 426 bp, Glycine max
  Clone ID: LIB3051-011-Q1-E1-A6
agcccacgcgtccgagttcggttggcagttgtagtgtgataagtagtaactcaaataaattttccagtgatactttagcaggttcttgccaggatgaagattccctttgcagtgatgcagaatctctagatgttgaacctgtgaatgaaggatgctccacttcttttgaagaggttgtagcagaaagaattcatagggccagtgtaggaggcttgcatgccttgcttccaatggctaagtatgatgctaggtttgcttcttttctctctgtaaattaattggtgatgtctaccaataattttctttcagagataagaaattttttaccactgttttctcactgtcattcatggcagaatatgaactttcttataagctgtggacgtaatcctcttatggaagatcttcctatagtacaatacagat

SEQ ID NO: 30023 - DNA, 433 bp, Glycine max
  unsure (1)..(433): unsure at all n locations
  Clone ID: LIB3051-011-Q1-E1-A7
agcccacgcgtccggaataccacgatcaccaccgcaaagcaatgggcgctatactttctgccttaactggcggtgccgcaacggcggcgacgtcttcgccggagagttctgcttctagggtccagtctttccactcttcggcgcgctggcagctccacttcaacgagctcaaagaaaccaataagctcgttgtgatagatttctcggcgtcgtggtgcggcccttgcaaattcatagagccagcgattcacgccatgtccgaaaagttcaccgacgttgacttcgtcaagatcgacgtcgacgaattgccggatgtggcgaaggagtttaatgtggaggcgatgccgacgttcgtgttgtgtaagaaagggaaggaagtcgacaaggttgtgggcgcaaagaaggacgagctcganaagaagattgagaaaca

SEQ ID NO: 30024 - DNA, 380 bp, Glycine max
  unsure (1)..(380): unsure at all n locations
  Clone ID: LIB3051-011-Q1-E1-B12
aactcaaatccccaaccaatcccccctccttacttaaggtcattgttttgttcaaccattcaatctacgctttggctggtcaggacagtaccacataatcttcttctataacatcgaccggggtcgtcctctcgaaaaatgctacctctgcgtccacaatcacaggttggagcaccaaaaacatcgctgtctcttgtttcctcagaccccctcctgtctcctgatgaacctaggtcaaactctgacaatctccgtgaatctccggctgaaagtgcaagttcacaagaaacttggcctatagctgatgctgccgcagcanagaagatggagaatggaaaagcggagattaattgccttgagcagaaagtgattcatcgtgt

SEQ ID NO: 30025 - DNA, 433 bp, Glycine max
  unsure (1)..(433): unsure at all n locations
  Clone ID: LIB3051-011-Q1-E1-B2
aagaccaagccccactcaaccaacaaaacactctctccgctcctcctccaactttcaagtttttaaagtaataagatggcagagacattcctaattaacctcagagtcagtgaacgagggacaccctgacaagctctgcgaccaaatctccgatgctgtcctcgacgcttgccttgaacaggacccagacagcaaggttgcctgcgaaacatgcaccaagaccaacttggtcatggtcttcggagagatcaccancaaggccaacgttgactacgagaagatcgtgcgtgacacctgcaggaacatcggcttcgtctcaaacgatgtgggacttgatgctgacaactgcaaggtccttgtaaacattgagcagcagagccctgatattgcccaaggtgtgcacgggccacttaccanaagacccgaggaaatc

SEQ ID NO: 30026 - DNA, 433 bp, Glycine max
  Clone ID: LIB3051-011-Q1-E1-B6
agcatttttcttcatcccccaaagtttcaatctttgtattcaattcaccctttctctctctccatggccacttgtgttgatgccccaacccctctttctcggaagcctaacgggtcccaatccgatgatcattccttcaattacatgaaattctgccgacccactttctctgatcgcgttccctgcatacccatttgcaagaatcgtgacactgccttcacacgcgtggaggagtttgacacatgtgtggaggataatgatgatattgaggttgaggttgtggagggtgttgatctttggttgaagattcaagaggaggcaaggttagatgttgatcaagaaccaattttatccagctactatttcagttccattttgtctcacaaatctttggagagtgccttggccaaccacctctccacaaatttgagca

SEQ ID NO: 30027 - DNA, 435 bp, Glycine max
  Clone ID: LIB3051-011-Q1-E1-B7
agaaattctcaaaggcaccaatttcattgctcagagttcccaaattctccccaagagataaaatgtctctaatcccaaacttcttcggtggccggagaaacaatgtgttcgatcctttctcactggacgtgtgggatcccttcaaggattttcctttcccaaatacgctttcttcagcttccttccctgaattttctcgggaaaattcagcatttgtgagcacccgtgtggactggaaggagaccccagaggcgcacgtgttcaaggcagatattccaggactgaagaaggaggaagtgaaggtgcagattgaagacgataaggttcttcagataagcggagagaggaacgttgagaaggaagataagaacgacacgtggcatcgagtggagcgtagcagtggcaagttcatgagaaggttcagattgccggaga

SEQ ID NO: 30028 - DNA, 396 bp, Glycine max
  Clone ID: LIB3051-011-Q1-E1-C12
agctctcataacgctttctcgtttgaaatccctcaagggatcaactaactgaaggagcaatggggttgacatttaccaagctttttagccggcttttcgccaagaaggaaatgcgaattctaatggttggtcttgatgccgctggtaagaccaccatcctgtacaagctcaaacttggagagatcgttaccacaattcccaccattgggttcaacgtggagactgtggaatacaagaacattagtttcactgtctgggatgttggtggccaggacaagattcgtcccttgtggaggcactacttccaaaatacacagggtctcatttttgttgttgacagcaatgacagggacagagttgttgaggccagagatgagttgcacaggatgttgaatg

SEQ ID NO: 30029 - DNA, 425 bp, Glycine max
  unsure (1)..(425): unsure at all n locations
  Clone ID: LIB3051-011-Q1-E1-C2
aaggtgaagccagtattggattctaagggtccctttccattctctcagacagtggaagcatttgcatacttgaagactaatagaaccattgggaaagtagttctacatcccatcccataaacatatttaattaagcatataaggagagagcacagccttttaattatgtaatatgaatattgttagtcaagaatgtttagatttagaaacagattgtccttataaggttgtattggtaaattttgtcatatctagttcaaatgaaggtggtgttatcgttcanaanaaaanaannnaaaaaaaaaaaaaaaaaatgacaaaaacataaaaagaatcaaaaaaaaaataaaaataaataccaactcaaaatcttacctaaacaatctccaaaaaaaaaagggggggcccttcaaaagattccaacc

SEQ ID NO: 30030 - DNA, 435 bp, Glycine max
  Clone ID: LIB3051-011-Q1-E1-C4
aacccaagcgtccgagacactgcagcaaaaattagatgtttctcccctttcaaaacaattccagtctgcatctggtggttctatctgcagctcatgtgaaacttttgcacttagtcacacatcatcatcagacttccttgtagatatagcatggttgcttaaggacaccacttcagaaaattttgacagagtgatgacagcttcacaaattcaaagatattgccatttgttggattttctgatatgcaatgattcaacaattattttgggaaaaatattaccaaatttgataatcttgacagagagcgtggaatccaacaatgttgtaattaataggacaagtgatgttgacataacgcaactcctgaatcacatacataatgctagtaatgtcatatgtcagaaacatcagcaaagtagaagtatattgtgcac

SEQ ID NO: 30031 - DNA, 337 bp, Glycine max
  Clone ID: LIB3051-011-Q1-E1-C5
agagctctcacgtttgtgcttgcacttgcacctctccaacgataacaacgacgagcacaagatccagacaaggcaggcacatagtatggctggaccttttgagttgggttcatcaaagaagaaaccaggggatggagtgaatgatttactcacttttaatgctgaaaatatgcaaagcaacatgaaaattatttattacaggtttgttttggcagcagatttgtttaatgctttattgaatgaattcatttagttaggggccttatacttggtttgaaacggggaggggggttgttcctttctttctctcccagtttatggggttccacacaccagc

SEQ ID NO: 30032 - DNA, 389 bp, Glycine max
  Clone ID: LIB3051-011-Q1-E1-C7
agctggaacatcagcagcagaatccaagggaagcatcccttgctggctctcaaacccaaccacctaagcagtccccacaaatatggcaaaacagctactaatcttattcacctcccgggtttttaagggtcttgatgtgagtttgaaagggaccggtcacaggaggcatttccttccgcggtctaataattaaatgcaaccattgtttggtcccaagagaccatatatggccgcagctgccctgtgcgaagttgtattctatatgattataattatgctcgtgatgtttaacttaggtatttaagtgtgcaaatttggtgtacaatgcactgtaccctttttttcaacattcttctcatctggttatagtggaaagtttcttggatgct

SEQ ID NO: 30033 - DNA, 431 bp, Glycine max
  Clone ID: LIB3051-011-Q1-E1-C8
agcgaattcttctctgctattttatccctcctttgatgattatcatccctttcgtatctctatgtttagggggaggtaacagtgcatggggtgtagaagaataggggaaaagatgagaaggaggcactgctacttggtaattaaggttgttgacagaagatagagagcacagatgatgatatgcatattatataatatatagcagggaactcatgatgaattgtgcatcttactcctttgtgctctctatacttctgtcatcaccttcagcctccatttctcactattccccctctacaccaactgttagctagtgtagtatatacttcgtttctatctactggaactataattcatatataaattactttaataagcctgttcatatataataatttgatgttcaccctgggtatttattacctagctag

SEQ ID NO: 30034 - DNA, 431 bp, Glycine max
  unsure (1)..(431): unsure at all n locations
  Clone ID: LIB3051-011-Q1-E1-D1
agataaattgtcaaattatttttcttggcatctgcatagttataaatggccttgaggtctagctcagatccttatttagttctacaattttcttgtgtcaactgaacttatcaccaggaactattcaatatttaagttacccaaaatgtcctgtgagattatattcacgtcggagtttctctcattttttcactagttgctcataattaattttaagtttctgacaatattttaagattagagactgagcaaaaacttttggagttaaaaagcttatacttgattgggaccctcttggtgtataatcaaatgggtaatgatatatattgaacttacttctagaagatgcatgctaagaacactctagtttttgagaaacgagaggttgangagatgcaatagctgaagagtctgaacattcctagttctgc

SEQ ID NO: 30035 - DNA, 412 bp, Glycine max
  Clone ID: LIB3051-011-Q1-E1-D4
ctgcacttcttctctggtctctggcttccttggtacgggaaagaaccaatcttgtccaattccctttgggttttccctcttcgatttcttcaacttccaatcgaacaacctcctaacacaactcgcgttaacttaagccctccccgttgaattgacaattcgtgaataatcgcttgagaatttaacggcaaagctggtttaaaagggtttctcaagttgtggtttgattttcagtttctgatgctgaagaaataaaaaagcttgaaggctttgctcttctgtgtgaaaaatgttggaaggtggtgcgaaattcccgggaataatagatctcaacaagaataataacaactactatgatttctctcaaggcttttaacataagctgggggaaggtaccaatatgtcaattgac

SEQ ID NO: 30036 - DNA, 434 bp, Glycine max
  Clone ID: LIB3051-011-Q1-E1-D6
agaaaaagtctcacgagtggggagagtttgtaaattgcgacttccaatggcgagttgcgaataaagcgaagatagaaaaagtgcggcaaaggatgtgtgtgcttgcttcattgtttgcgttgtgaagtaggtgatcgaagtcgttgaatgctatattcgtttacgaaatgaaggaggacgcggagaaagataaaggcaaagacaacaataggatttggggagctattctcttcggcttaattggcgccaccgtcactacctttgcggtcggtcagctgcggaggagtgttgaatggttctatactcagtcatcctggaaaggagagagaaatggttctttccgatcagctttacaggaagaggcatggaggaggcacaataagcgaatgcaagaagagttagaggaggagatggaaagagtggaacgaataagg

SEQ ID NO: 30037 - DNA, 411 bp, Glycine max
  unsure (1)..(411): unsure at all n locations
  Clone ID: LIB3051-011-Q1-E1-D9
aggtcgtcaacaccgttgatctcaagaaaggagaggtcaccaaagggtcatatgaaggaggaaagcctgatgcatctttttcgtttaaggatgaggactttgttaaggttgccttanggaagatgaatccgcagattgctttcatgaggggtgcgatgaagattaagggaagtttgagtgctgctcagaaatttactccggatatcttcccaaagccttctaagctgtgagctgagatttctgcaactacctgcacaaggttgctagaattatcgtttggctgcagtcaaacaaaatagatagcaatcatagtagcatcaaaagctgaggattataattatatctttagttaatgcatggatcatcattcctaaggttgttggtggttcatgattttaatatatctctgaa

SEQ ID NO: 30038 - DNA, 436 bp, Glycine max
  Clone ID: LIB3051-011-Q1-E1-E1
cccaagcgtccgcccacgcgtccgggatgctccagagatcttgacagtgattggcaaaatcccttatctttcagagtttttgaactccttatatgattgtcaatacaagtcttttttctcagcatttgctggcctgacggagcaaattaagttggaccgctatctgcatccacacttccgatattacatgagggaggtcagaaccgttgtttattcccaatttttggaatcttacaagagtgtgacaattgaagccatggcaaaagcctttggagtgacagaggatttcattgatgtggagctatcacgctttattgcagcagggaagcttcattgtaagattgataaagttgaaggtgttcttgaaactaatcgccctgatgctaagaatgctctttaccaagcaactattaagcaaggggacttcctattgaat

SEQ ID NO: 30039 - DNA, 377 bp, Glycine max
  Clone ID: LIB3051-011-Q1-E1-E10
agcccaagcgtccggagaaattgacaggtgtactgaacgattctaaagcttcacttgaggtgcttgcatttgctgctatttctttgggcttgatctatgtgggttcttgcaatgaagaaattgctcaagcaattatatatacactaatggaccggagcgagtcagagttgggagagccccttacacgacttttacctctcggtctgggtcttctatatcttggaaagcaagacagtgttgaggcaactgccgaagtttcaaagactttcaatgaaaaaattagaaagtactgtgacatgacactcttatcatgtgcctatgctggaactggaaatgttctcaaggttcaaaatctgttgggtcattgttcacaacat

SEQ ID NO: 30040 - DNA, 383 bp, Glycine max
  Clone ID: LIB3051-011-Q1-E1-E12
agattgacagaagatgctaggtggtgttcatcaatattctgaaaggtaaaacaattttggtttttaatgataatataacaatgaatctaacatcaaatattgaacgctaaacatcaaaaataaatcgagccaacgcatttaattgtaagtgtcttcatattacctgtgttctgtcacatctttttgcataatattggcactaagtcttttttgatagaaattgtgaagatgtactgttatcattgtatcaactatattgtgcccttctttttttatttgatttggcaaacacggctacttttctccaaataagatggatcatttgtattgccggctttgtgcacaattatctacttgtaagaagtccaatttcgggcaacaac

SEQ ID NO: 30041 - DNA, 432 bp, Glycine max
  Clone ID: LIB3051-011-Q1-E1-E6
agcccacgcgtccggaaaggggtgaatccagtggatcaaaagataaatcagatcaaaagacattaagacggcttgctcaaaatcgtgaggctgccaggaaaagccgactgaggaaaaaggcatatgtgcaacaattagagagcagtaggttgaaactgacccaacttgagcaggagctccagcgagcacgccagcagggaatatttatttcaagtactggagatcaggcacagtcaatgagtggaaatggcgctatggcatttgatgtagagtacgcacgatggttagaagagcataatagacaaaccaatgagctaagggctgcaataaattctcatgctggagatattgaacttcgaaccattgttgacaatttcatgacacaatttgatgatatcttcaggctgaaaggtattgcagcaaaagctgatg

SEQ ID NO: 30042 - DNA, 192 bp, Glycine max
  Clone ID: LIB3051-011-Q1-E1-F10
agtaatagcaaagatgaataccaagccctttttctccttgtgcttactctgcgcactgcttcccatctgtgttgtggcaactgagccaaccaaagattcgacacaagaagaaacaaagacacggccagatgcctggagaagttgtggaagttgaagaaatggtggaagttggggacaatgtggaaaccgggg

SEQ ID NO: 30043 - DNA, 219 bp, Glycine max
  Clone ID: LIB3051-011-Q1-E1-F3
catgaacattgacgaggacatccattctttgcagctcgattcggcacatccaacgcaagatgttgaggctgaacctaaagctgttcaagctgatccaaaagttaaacctaaagtgaatccttctgttcaacattcagaacaagttcctgaaaatattcctgaacactttaatgttgtctttaatggtcaagttaatgctcgtaattctaccacttgatg

SEQ ID NO: 30044 - DNA, 146 bp, Glycine max
  Clone ID: LIB3051-011-Q1-E1-F7
agcccacgcgtccgaaaaaaaaaaaaaaaaaaaaaaaaaaaaaaaaaaaaaaaggaaagaaaagcaaaaagttaaagaaagttaataaacttaaaagaaatttaaaaaaatcttcgggagggtctccaaggtcgcttttcattgga

SEQ ID NO: 30045 - DNA, 432 bp, Glycine max
  unsure (1)..(432): unsure at all n locations
  Clone ID: LIB3051-011-Q1-E1-G1
aaaaaaaagggtcccaccgaaacaatgttggagcaagcacgcaggagacacgtagacgcagagagagggagttactaaaaatgaggtttggtttgganggagttgcatcggcgacaaatactgttgttgttgttgttggagaagaatgaattctgagaacaagagactcacaagaagaagcatttagaatcgaaattggaagagaagagggtatgaatgattacaaaggaagagaaggagaaagtagcgttgttgttgttcggaagcgattcaaggaaaagcaacaaccctgtccttccacaaggcccatcatcaaccaacaacaccgtcgctctgcttcnctccctaacactcaatacgaagaatctgaaacagatgtcgaagtatctgatgttagtgtttcagaangggatgacacatcttggatctcat

SEQ ID NO: 30046 - DNA, 413 bp, Glycine max
  unsure (1)..(413): unsure at all n locations
  Clone ID: LIB3051-011-Q1-E1-G3
agctattattcatccacactccctcccttccagatccgatcctcgatggcggcggcgtcgcggaggctccgggacctgcagtccgaggccgggaacaagatttgccttgactgctcccagaagaaaccgcagttggcctccgtctcctacggcgtcctcatgtgcctcgaatgccccggcaagcaacgtgggctcggcgtccaaaatccccttcgtccgatcggtcaacaatggactcctggtccgacatccagatcaaganaatggaagccggcggcaacgacaagctcaacgcattcctcgcacagtactccatccccanaganaccgacatcgttacgaagtacaacaccaaagccgcttctgtttaacgcgaccggattcaggccatcgccgagggccgcccctggcgc

SEQ ID NO: 30047 - DNA, 405 bp, Glycine max
  Clone ID: LIB3051-011-Q1-E1-G9
agtccacagccaccgcagcgtggacggaatcagagtgcagccatagcagcagcagcagcagcagcagcagcagtcattgaagtgctgctctagtttgaggcacaatgagattggagaaatgctggttttgctcttcaaccgtataccctggacatggaatccagtttgttcgtaatgatgcaaagatttttcggttttgtagatcaaaatgccacaagaactttaaaatgaagagaaatcctcgtaaggtaaagtggaccaaggcatatcgtcgagtgcatggaaaggatatgactcaggactcaacctttgagtttgagagaaaacgaaacaggcctgaaagatatgacaggaatcttgcggagaatgtcctgaaggccattcctaagattgataaaattagag

SEQ ID NO: 30048 - DNA, 394 bp, Glycine max
  Clone ID: LIB3051-011-Q1-E1-H11
agcaactcaaagggttatgcgttttgtgtttaccaggatcttgcagttacagatattgcatgtgctgctctaaatggaataaagatgggagataagactcttacagttagacgagctaatcaaggtgcaaacccacagcagcctaaacccgagcaagagagcattttaatgcacgcacaacagcagattgcactgcagaaacttatgttgcagccagccttagtggcaacaaaggtggtgtgtttaactcatgcagtttcttctgatgagctcaaagatgatgaagactatgaagagattcttgatgatatgagacaggagtgctccaaatttggtactttggtgaatgtggtgatcccacgaccaccgtctgatggtgaacctgccgctggag

SEQ ID NO: 30049 - DNA, 341 bp, Glycine max
  Clone ID: LIB3051-012-Q1-E1-A10
agcttcttcttctttttcatcaatcatcaccagtggttcttttccttctgagaagatcgaattgtgttttgcaaaaatgggagttccagagaaagaccctctttcccaattgagtttgcctcctggttttcggttttaccccaccgacgaggagcttctcgttcagtatctgtgccgcaaggtcgctggccaccatttctctcttccaatcattgccgaaattgacttgtacaagttcgacccatgggttcttccaagtaaagcgattttcggtgaaaaagagtggtactttttcagccccagagacaggaaatacccgaacgggtctcgacccaacagag

SEQ ID NO: 30050 - DNA, 412 bp, Glycine max
  Clone ID: LIB3051-012-Q1-E1-A11
agcccacgcgtccggcggcatatgtggtgaatgggctcattttggctgtgataggcggcagggacttggagcatttaaggactatgctaaaaccgatgggctggagtacgtttgtccccgctgcagtgcgttaaaattcagcaaaaaatcccaaaaaactgcaaatggtttttaacaactaacacaggtcaaacattgctggcccagagcaaaatgtacattgcaagtgctagatagatttatttacacatccattgtgcttggacccttgtctcaattggtaagggtaggtttctaaggactgtaattgtttcacttatgttaaagctgtagagttttgacatgctatggtcacctcacatctcaaacttgcctattttattttgtcaaaggtactcatacctagtacaaa

SEQ ID NO: 30051 - DNA, 317 bp, Glycine max
  Clone ID: LIB3051-012-Q1-E1-A12
ctctattttaagtaattcaatggcttacactgcaagtcttgtgttcttagcttccactttccttatcataaactttcctcttctggcaaacgctatcggatgcaatggaccatgcagaaccctcaacgactgcgacggccaactcatttgcatcaacggaaggtgcaacgacgaccgcgacgtcggaacccacatctgcggcggcggaatgccgccaaatccgccaccaagcggcggaagctgccagtcctcgggaaccctaaattgcggcggaaaatcgtatcctcagtaacgttgctctccgccggtaacttcct

SEQ ID NO: 30052 - DNA, 343 bp, Glycine max
  unsure (1)..(343): unsure at all n locations
  Clone ID: LIB3051-012-Q1-E1-A4
acccacgcatccgcccacgcgtccggttagttcaaacactaagttctgaaaaatgagttccaaagtttttcttagtctacttatgttcatggccactatacttttgatctcctccgaggttgcacccgatgatgcataccagaattttgacaaaacagatgggaagcgtantgcaaatggggtagatgaaagcaaatattggcgtggtggctatggcgactatggtggttggcgtggtggtggttggccttgtgggctatggaggctggcgtggtggctagggtggtgggcgtggtggctatggtggctggcgtggtggctatggtggtgggccgtggtggct

SEQ ID NO: 30053 - DNA, 215 bp, Glycine max
  Clone ID: LIB3051-012-Q1-E1-A7
aggctttccacatgtaggatcttagtatattattaaaggcttacagtgtttttcgctttggtggggtttacttatagcatgttttttttccccaccttggcgattcaataagctatgtttccgtttctctatagtgattttgtactttgtagtaagaattttgtattgagttataaattataaatgttgaagaactatgatgattaccccactcc

SEQ ID NO: 30054 - DNA, 338 bp, Glycine max
  Clone ID: LIB3051-012-Q1-E1-A8
agcccacgcgtccgcccacgcgtccgcgaaaaaaccttagggttcctctgttcttcttcgcccccaaaaaaattttctggctcagagaaattcaaccgttctcgccattgccgaagctccaactcctcgcatttccaactcttcacccaaaaccctttttgttggaacagagtttcagagagagacccttcacaacatggcaaaaacgaggccaggcagaaaagacttggattcctacaccatcagaggcaccaacaagatcgtaagagctggggactgtgtgctgatgcgcccctctgatacgagcaagccaccgtacgtggcgcgcgtggagaaga

SEQ ID NO: 30055 - DNA, 259 bp, Glycine max
  Clone ID: LIB3051-012-Q1-E1-B12
agatattccattctctctgtgtatttccctacctctcccttcaagatgcagatcttcgtcaagaccctcaccggcaagaccatcacccttgaggtggaaagctctgacaccatcgacaacgtcaaggccaagatccaggacaaggaaggaatccccccggaccagcaacgtctcattttcgccggaaagcaacttgaagacgggcgttaccttgctgactacaacattcagaaggagagtactcttcacctcgtcctcc

SEQ ID NO: 30056 - DNA, 168 bp, Glycine max
  Clone ID: LIB3051-012-Q1-E1-B2
caaacaaattttttccatgaactttgcatctttctatcatcacatccatggccacagttgtgaagctccacgttttcccagaaagtttgaaccaacacaaaacgaagttgctcaggaaaagccttgggccaaggccttcaactgggggtcttgggtttgggcaataaa

SEQ ID NO: 30057 - DNA, 304 bp, Glycine max
  Clone ID: LIB3051-012-Q1-E1-B5
aagcttgctgggtttgccgtgttcgcgttcgttgttcgatcggagaagacccttttccctctcgtcacttgagatggcatcaagacaccgtgttcacacagaacccttgaatgctcgaagggggtacccgccagaagggccatatgctcgcgtgcctcccatgcctcgcccgccacctcctattcctcctcatccggctgtgttggaagaggaacttgaatttcagcatgccgagatgcggagactcgtggcagacaacaggaggttgattgatgaccgaatggcgttgcagcgagaccttggg

SEQ ID NO: 30058 - DNA, 86 bp, Glycine max
  Clone ID: LIB3051-012-Q1-E1-B6
aggggctcttcacgagaagatctgatgaaagatgtaggtattggagatgagggagtcgttgcagggtgaggtgactcaggagttct

SEQ ID NO: 30059 - DNA, 423 bp, Glycine max
  Clone ID: LIB3051-012-Q1-E1-B7
aagcggtttatgccgtcccaggctgatgaagagacgcatcagttgtcgtatctgcaaaagcacttggctaacattgtgtctcttctagcagagcctgtggagggagaaggcgatgagtccctggttttaaccatggatagatttgagcatcttgggttcctaattcagtttggtgataagggatcagaaggaaattcgtttagtcaatgttctcctttttttgcaaactcagaccctgacatgcctgctgttcctgttcctgccgcacaagttcatgattggcttctgcaaaatgtagcggctgctttggaatatatttctgaacggacttcttcaaaggaaaatggcccagctagtgcctctgatcaggatgttgccatgactgatgcaagcactgtctcatttaaggtctcaacaggtact

SEQ ID NO: 30060 - DNA, 356 bp, Glycine max
  Clone ID: LIB3051-012-Q1-E1-C11
agattgttgtgactcgtacttcttcgtcgttatcctcatcctttgtcgtttgtgtgtatgttctttctctcagctgaaaatgtcttgctgcggtggtaactgtggttacagaagcgcctgcaagtgcggcaacggttgcagaggctgcacgatgtcaccatacgtgagctacatcgagtcaaccaccaccgataccttggtcatgggagtggcatcagtcaaggctcaattcgagagtgctgaatagggtgttcacgctgagactcatggctgcatatgtggagctcactgcacctgcaactcctgcacttgcaagtgacgtgttggagatctaaagcttcatgtatcgatggccc

SEQ ID NO: 30061 - DNA, 371 bp, Glycine max
  Clone ID: LIB3051-012-Q1-E1-C3
cccacgcatccgaattttactttgccataacggtgagtttagagagggaataatggatggaagaggaggctgttgcatcgccaggtatgtacccggtgcatcgcacgggtccaccgtcgagaaaataatgcttaggtttcgtccaatcgctcccaaacccgccgccgcggccaccgcttccgacggctcttcgtccgagagcagtgacgcttttctcaaaaacggaaccactagaagaaagtacgtaagagataacaactacaccagcaaacgaagaatccgccggagaaagaacacttcctcgccggagaaaaagcagaaaccggtggtgactcttccgtggcttcgggaaactcgcgattcggaaggat

SEQ ID NO: 30062 - DNA, 404 bp, Glycine max
  Clone ID: LIB3051-012-Q1-E1-C5
aagtagtattgcagtttattctatcatatccttgttcaaataattttcttttcaattacaataccccaatcccagaaacttatgttcatgaccatcctcaaggtcccaataacatttacttgaagacaattttgagttgaccttacagcctagttccacctacaaacacccttgatccttcaaagcctctcatagttccaatactggcaacaataatactcttgggcatctaaactatctccattcttttttccccctttctttgcagtggatttgcgaggttttaaagaaattaaatgcgtgtttatgtgctaaagagctaggtaattataaaattcatctcacacatacttctttttactaccttttatcttttagattttatttttgaattatccttgttt

SEQ ID NO: 30063 - DNA, 216 bp, Glycine max
  Clone ID: LIB3051-012-Q1-E1-C6
aaaggtttctgtgtgttgcgagggaggattgtgatgtgagtgatgggaagcagcgaagaagtggttggcaaagaagaggttatcgcaaaactcaaggaggatggcgactttgacaggcttcgtttgaagatcgttcgcaagctcaaggacaacgaagagttgcgacgacatagtacctcaattgtgaagcaatcagtggcactcaatcgtgctgga

SEQ ID NO: 30064 - DNA, 228 bp, Glycine max
  Clone ID: LIB3051-012-Q1-E1-C8
aaatgctctcaatctatttctagtttgtgagacatcagatgtcctcacgaatgctggtgcccatagccaagacgcaaccacaaagcagataacggggtcgtatgcaaacctcaaatgaagtgtacgaaacatacctcagaccttagcagcaccgtctgagtctgcggctcctgtctaaaggaacgcctcataaccttctccggcgcgcatgcccatttccaaacccat

SEQ ID NO: 30065 - DNA, 381 bp, Glycine max
  Clone ID: LIB3051-012-Q1-E1-D11
aggaaaaaacgtaagaaatctaaattaacaactgatggtgaagaagaaaagagacttaagaagtccaaaaagtccaagagggattctcctgacatttatgcttccgatttggaatccaactcattagttgtgcaggatgaacatgcagaatcaaagacttgtgaaagtctggttgatttagaacagaaaacagcaagcaggagtaagatgggaggaaaaatatccatcactcctatccctttaaaacaggtctggatgataaaatcagaaaaaatgaaaaagggaaatcattggtccaaagattgtatccaccagctgatttttggctgcctcaggaggatgcaatattatgtgctgttgttcatgaatatggtcctaact

SEQ ID NO: 30066 - DNA, 411 bp, Glycine max
  Clone ID: LIB3051-012-Q1-E1-D12
agatttattccgcgtctataagctttcttgttttgctattgcttgctccgcaatcataatttcatcatcgaatcaaatcaattttgaaggttcattataatggcggaagagataaccaagaacgacgtcggagtaacctccaaaaccaccagaagcagctccaggttctggcctcgttggattcccacttccaccgatcacatcatcgctgccgagaagcgccttctttccgtcgtcaagactggttatgttcaagagcatgttaacattggctctggtcctcctggctccaaagtgaggtggttccgttcatccagcaacgagccgcggtttattaacaccgttacatttgacagtaaaccccattctccaacgcttgtcatgattcatggttatgctgcttcacagggg

SEQ ID NO: 30067 - DNA, 170 bp, Glycine max
  Clone ID: LIB3051-012-Q1-E1-D3
agtataatactcgcgctatagctccccctgttcttcctcaatgaccagatacttatggttttggagacaaatttttccgggcagtaaattaaaattatgactcagttattgtagagccctaggttgattcatcattaatcgtgatgagtaatcacatgaggctctacaag

SEQ ID NO: 30068 - DNA, 295 bp, Glycine max
  Clone ID: LIB3051-012-Q1-E1-D4
acccacgcgtccgctttgccggcaaaggaagttccaccagaacttccggaacctgcactccgaatcaattttgctaaggatggcatgaaccgcaaggactggctttctctggttgccgtgcacagtgattcgtgggtgctctctgtggccttctatcctggagctcgtcttaaccgcaacgaaaggaaacgtttaattaacttgattaatgatcttcctactgtttttgaacttgtgacagagaggaagccagttaaggacaagcccactgcagatagtggaagcaagtctaggg

SEQ ID NO: 30069 - DNA, 241 bp, Glycine max
  Clone ID: LIB3051-012-Q1-E1-D7
aggaaaaacatcagcccagacgtctgggattggcgaaaagataatagaagtagggtatatcatcacacaaactgtgtcacagattaggggaagtacgaacgcaggttacatacactggaagactctcatatacgaccatgtaacgcatgtcaatctcgaatcaaatcaacatgggatgccaaaatctgaataagtacattcgtcgatatgccaagatggcgcaattggacatgtcacagat

SEQ ID NO: 30070 - DNA, 399 bp, Glycine max
  Clone ID: LIB3051-012-Q1-E1-D8
aggaagaatattaccctctctctataacattattcatcagatcagtttgatcttatgtaaatgaaggatttttagacaaaacccagattcactgaaaaacctcgaagcggagaaaaaaggcaacaacttttcatctctacgcaagtggttatggcggttgctgagaatgttggggccaaaatcggttcttcgagccagagcttggagaacgggttagtgtcggcggattcgggtgaggttgagaaatcgaaaaccagaggcgatcagaatctgaacaacggcgttttcaaccatcaagagagagttcccggtaccatgccagttcctaaccggaaatttcagctacaaggctcagatgcacgcaaatggggtgaacaatgatgggtatgggatgaatgg

SEQ ID NO: 30071 - DNA, 396 bp, Glycine max
  Clone ID: LIB3051-012-Q1-E1-D9
agcccacgcgtccggtgatgccaaaggcattgccaaggaagttcaacgttccctgcacaaaaattttccaaaacaaggttccccccaaaattccaaaggctaaaacaatgttaagaatccacaaactaacggcaaaaaatttccccaattatggtgaataaaaccgaattcaagcccccgggttgacaagaaattaataaaacctagaattatggccattagatattgaaaaggccttatttgcgccacctttcatagtgcccccaaaattgatgggggttcttgttgccatcccgacaacatttcctaccattctttttcaccatattttctaaagaattctttttggttcgtgtaatttatatactgtttatacctagactatgaacgatttac

SEQ ID NO: 30072 - DNA, 341 bp, Glycine max
  Clone ID: LIB3051-012-Q1-E1-E11
agcccacgcgtccgctcacacgtccgcctgctacttggtatcacaagtatggctggtcttggcaaaactgacgtttctcttacctctcaaattgccatcatgctttcagcttgagtacaacatttgacaattgcgtgagttcgtccactaggacatatcgtgtaatgttcggtgatgatggcccttgatactttggtgattctgaactccgatctccccaatgttctaacttgtcagcctctcatatctaaccctcgttagcagatgccccaagttatttccaaagggagcgtctagtggaatacatcataggggtgaaatctactatggtcacagacctg

SEQ ID NO: 30073 - DNA, 351 bp, Glycine max
  Clone ID: LIB3051-012-Q1-E1-E5
agagaaaatgaaatgcctggaaatggctcttgtctcagtcaccaccgcaaattcctcgaagcatattctcttacgcactctctctcgttctcacgctttctccttctctctccaccgtcaatttcaaccactctcctcttcctccgccgtgctccgccgtcttccccggtgccacgccgcctcccccggtcccccactcgcaccttccgaaaacgattccagcaggcaccttaaaggagcagatgttgctacatctttatccaaaattcaagatagaatacagatcttctttgctgttcttttctggatgtctctagtcgtttgggcttccgcctgggatgggaggaatag

SEQ ID NO: 30074 - DNA, 383 bp, Glycine max
  Clone ID: LIB3051-012-Q1-E1-E7
aagcaaaacaaaggaacacagaagcaggaacgaggaggagcactgtgtagaagaaatggggaagaagcagaacgagatccagaaaacggggctaggtcgagccctggtgaagcagcacaaccagatgatccaacagagcaaggacaagtctcgcttctacaggaagaagttccttgaatccttcaccgaagtctccgacatcgacgccgtcgtcgagcaatccctagaacccctccccgaacttgccgctgccgcttcaaccactctcatcagccttgaaccaggttccgtgcccgatgaaacgacgacgccggaagaagcgaggaagcagcagaagcaagaggaggcgctccacgccagcagcctccgcgttcctcgccgcc

SEQ ID NO: 30075 - DNA, 368 bp, Glycine max
  Clone ID: LIB3051-012-Q1-E1-F1
agaactccaccttcaccaccgagctccgtgccggcaccgccaccttcctcaccatggcctacatcctcgccgtcaacgcctccatcctctccgactccggcgggcactgctccgtctccgattgcgtccctctctgctccgaaccatccagccctctctccgccctgctcaggccaatccctccggcgtcaatcagccccgacgtctcatggcaaattcaccccagtttaacccgggctacgcgggcctgcctcgaaaacacgcgcaaggacttaatcgtggccactatagcctcgtccctcattggctgcttcatcatgggcaccttcgcgaacctcgctttgggcctcgccccgggcatggcctct

SEQ ID NO: 30076 - DNA, 400 bp, Glycine max
  Clone ID: LIB3051-012-Q1-E1-F2
agttcttccatttccattaaaaagaaaatatcataaatgggtattttcacattcgaagacgaaatcacctcccctgtggctcctgctactctttacaaagctctagttacagatgccgacaacatcatcccaaaggctcttgattccttcaagagtgttgaaaacgttgagggaaatggtggccctggaacaatcaagaagataactttcgttgaggatggagaaaccaagtttgtactgcacaagatagaagcagttgatgaggcaaacttgggatatagctacagcgtagtgggtggtgctgcctttccagacacagcggagaagatcacattccactccaaattggctgctggtcccaatggacgctctgctggcaagctcactgtcgaataccaaa

SEQ ID NO: 30077 - DNA, 217 bp, Glycine max
  Clone ID: LIB3051-012-Q1-E1-G1
aggcgtcggaaggaagagaagatgagtgagaatttgatggagaaagtgagcgcactgggagagcgcctgaaaatcggaggcgtggaagtggggagaaagatgagcgaggggatgagctccaagagtttcaagctcaaggagttcttccagcctgggcccaatcaggccgaaaagcttgtggaggaagctacttccgaggccctggaagagcccgaat

SEQ ID NO: 30078 - DNA, 311 bp, Glycine max
  Clone ID: LIB3051-012-Q1-E1-G5
agacactctattcaacccttcacattttctctcttctttatcttaaattacttttccatggaggaaagcaagaaacgagtccgggacgagtccagctactcacccgagtcccaaactcagctggtcgactctcccgagtctgaaagtcagcgggtcgactcacctgagtctaagattcgtcgagttgactcgtccgagtctcaactcgactcggtccttgactcggaagttcgtctacaagacgacatttttaacatactttacgacgccgataatgtgcctgagcgtgactcggttcagggtcttgactc

SEQ ID NO: 30079 - DNA, 262 bp, Glycine max
  Clone ID: LIB3051-012-Q1-E1-G7
agggttgaagagcatatagagtttttgcgttgaggtggatcggaaggttaattagctagacggagaacgtaggtaaacggcgaagacggaaagtagggttagtttgtgatttgcacgtaagtgcgtgcaaatacggttacgtgcgagaagctcgtgactcgtgagagccaaaatgcctcacagaaccacatacattttcccgcgtcagtttccggagcgaggagggttggatgaatcgtccaaacacctattagatcacgag

SEQ ID NO: 30080 - DNA, 197 bp, Glycine max
  Clone ID: LIB3051-012-Q1-E1-G8
aggtataagggaagataggtttatatagttaatcaaagtggtttggttttctttcatgaagttattttatgagctgatgcattgatacatacacagatgattcctttgttgagaaaattccaatgcagaagttgctattagctggcaatctgtctatgcctgtatgagtttcaatcaaaggttcccaactttgttgt

SEQ ID NO: 30081 - DNA, 339 bp, Glycine max
  Clone ID: LIB3051-012-Q1-E1-H10
cccacgcgtccggtcagtgatttacatatcagtgaaagaaatcatgaatactccatcaataagcaacctgagtctgtgataccattacatagacctggtctttttgcagctgctccttcctctgatttttctaagtcttggtctcattcggcttcttcttgggaaatggccaatagcagcctaagccagaagttgatatcaattcagacacctccatgtataaatgcatctggtgctttgagtaagagttctcagtcacatcaaattaatgggatattggaagaatgctggcctctaaatatcaattccaagcctaaccaaggttttcgaagtgatgca

SEQ ID NO: 30082 - DNA, 398 bp, Glycine max
  Clone ID: LIB3051-012-Q1-E1-H11
agatttaagtgtacctgcaaattttccatcaatttcttgagtgagccccatcagctgatttgtagtattctagctatacttgcaaaatcagtgtcactcagtaatggtagcctcttgatccatgatgctcacttcaactagttggtgcctttgcaaattgcaaattttcaactgaaatcctctcctctatgaaatctttctttttgcttatcacctttctgaaatgagaattgcaacacaacttgtaattgtaagttgtataaatcatgctgggtacaaggtcaaaagtattatttggataacactgtccagagaatccaactaacatgtcttaccatctgcctggtggctttaataaagggctcttttacattagtctgaataaatttgttagtttc

SEQ ID NO: 30083 - DNA, 390 bp, Glycine max
  unsure (1)..(390): unsure at all n locations
  Clone ID: LIB3051-012-Q1-E1-H12
aggaaggtccaccgaagctaaaggtgcttccacacgcagcagattttacctccataaacccttcgttcttcttcgtctccctttgcttctctcacttcccatgtctgagtggcttcgacgccttccctcgccagaatgctaactcatctccgccgcgcggctgccgcatgcggtggtgctacctccgaccacttcctcgctctcaggcagttcagctccgccgtggtcgccgtttcctccgtgtctgattccgatccaacacttccctcttcttccgattcacagagaaaagcatctagatggttgctatttctacctgnggcaatcacatttggccttgggacttggcagattggtagaagagaagaaaagattaaaatgttggaatat

SEQ ID NO: 30084 - DNA, 333 bp, Glycine max
  Clone ID: LIB3051-012-Q1-E1-H8
aagcgcgagcaagcatcccaaaaccctagctcgcgttctgctttcgtcttttacatcaggatggagtctcaggtgaagcacgcacttgttgtcaaagttatgggtcgtactggatccagaggacaagtaacccaggttagagtgaaatttttggatgatcagaaccgtcacatcatgaggaatgtgaaaggacctgtgcgagaaggagacattctcaccctactcgagtctgaaagggaagcaagaagattgcgctagatggtttcctttggcttgcctccaaattcgaacaaaacagtgtgattttgttgattttaatggtagttggtggat

SEQ ID NO: 30085 - DNA, 399 bp, Glycine max
  Clone ID: LIB3051-013-Q1-E1-A1
acaaaatcgccaaagcttgaaatctgattgcggcgtctcgcgcttccttcttccaccttccccgggtttcactgtgccgatgacttttcttctgagaaagagatcgtcatccatcgcgtgccttcgttttcccttcatgaaccggggcaggctttggcgttcttggaacttcttcttccgccactggacttgaccctacccccccccaattagggttatctatttcttccatttttttttccttagaaaaaaaaaacccgtttcttcttctctcgctgccgacgagtcttctttctcttcgaatctttctggctgctacattctgaagcacttcatatttcggtttttcattttcatttttaatttttttttaatatccgggatggccaaacaaaaatg

SEQ ID NO: 30086 - DNA, 401 bp, Glycine max
  Clone ID: LIB3051-013-Q1-E1-A12
agatatagaacagaggctacttattatgagaattgcaacaccagcttattaactggtttcacgttcataagcgtcaatgggagtaattcgatgtttcgacataatattattcctccaactgggcctcgctatttcctctgcaccgttggaaatcactgtgaaagatgccagaagtttagtatcagcgttgagtctcatcctgattccgctgctcctactacactgtcattcagaatcttatctgcatttctctctagcttggctgtgtatttcttcactgttactagttagttactttgtcgtgtaactctacgaagattttgcattcttgttcccagcaattctttgaacatattcactatagatattatatgattgctgggttgtttgtttcaataaat

SEQ ID NO: 30087 - DNA, 240 bp, Glycine max
  Clone ID: LIB3051-013-Q1-E1-A3
atccatctcccaggcttctacattctcacgccaccagtttcgggttcaaacaagttaacgaagaagaaaagggtcccaagggtggggacgtattcaagagcgttgcttcaagctacgatctcatgaatgacctaatgagtggcggtttgcatagattggggaaggataggttagtttccaagctgaatccgtttcctggaatgaagcatcttgatgtggctggtggaacaggggatgttg

SEQ ID NO: 30088 - DNA, 389 bp, Glycine max
  Clone ID: LIB3051-013-Q1-E1-A5
acaaaatgactcaagcccagattcaaccagttaaacttggaacccaaggctttgaggtactattaactacattacttgctcttattttgataattgatacaattaatctcattctaggtttcaaaattgggattccgatgtatgggccttactggagcgtacaatgaccctctccaagaacaggatggcatatctgttatcaagtatgcgttcagttagggaatcacattttttgatactgcggatgtttatggagccaatgctaatgaacttttggttggaaaggctttgaagcagctgcccagagaaaagattcagatagccacaaaatttggtattgcttcacgaaggttttcctgatatgaagatcaagggttcgcctgaatatg

SEQ ID NO: 30089 - DNA, 367 bp, Glycine max
  Clone ID: LIB3051-013-Q1-E1-B2
aattcattctgtcatgcaatgaatgtcaattctgagtaagttaactgatttttgttggtcctgctctccttaattgcagagctgtgttcccaaagttaatatccactgcgatggttgtgagcaaaaagttaagaaactgctgcagaaaatcgatggggtttaatccgtgagaatagatgcagatgaatggaaagtggtagtggcacgagatgtggatccagcgaaactggtaaaaaagctaaagacgggagggaagcatgctgagatatggcacaaccagaaaggagagatgatgtacaatcacaagtatcccatcaaccagaacatgatgcaacttgggggaaaggacaataataagtctcaaaat

SEQ ID NO: 30090 - DNA, 347 bp, Glycine max
  Clone ID: LIB3051-013-Q1-E1-B3
aaaatgcggggcaagaatggtaatctacattcacagccattaagatcaaactcttttcctttgcaacctccttttataccaaataattcattttccccaaatccccaaacttttgcaacttcagtagtgccacctagaactggtggacccagcttctctgcagcaccactacttaatgtaccaaatattagcaatcggaaaatttctggatatcctagtaatgctcatgatccacgccctgttaaacaatggaatggagacttgaaacaaagttctaacaataatgctccaagtcctgtaaagtcaattggcgaacaaactggacatatggtacagaacacacaaca

SEQ ID NO: 30091 - DNA, 345 bp, Glycine max
  Clone ID: LIB3051-013-Q1-E1-B4
accacgcgtccgcccacgcgtccgcccacgcgtccggaatattctcagccaagggtaagcccttatcgtcttgcagctcatcttacatcagcatttgctatttactgtggcctcttttggactgcactttctgttgttatgcctgaaccaccagctgaatcactaacatgggttcgtggggcagctaaagtgaggagacttgcattgcctatcagcatacttgttggtcttactgcagtctctggtgcattcgttgctggaaatgatgctgggcatgcttttaatactttcccaaagatgggtgatacatggataccaggagacatttttgaaatgaagcctctg

SEQ ID NO: 30092 - DNA, 356 bp, Glycine max
  Clone ID: LIB3051-013-Q1-E1-B6
tataagttcacggtcagttctgaaaaatgggttccaaggttttgcttgttgtagttatgttcatagcggctatacttctgatctctgctgaagttgcacccaatgaatacgaaaattttaacaaaaaagatgggaagcatgctccaaatgggttatatgataacaaatggggttaccgtggttggggtggtccttggtatggccgctggggtggcccttaataaggtggccgctggggttgcccttaataatgccgttgttggggccgtccctggcgtggtggtggccgttgtggctggggaagttggcgtcgacctaatggcaaccctcacaactaagaagaaaacttgctaaag

SEQ ID NO: 30093 - DNA, 361 bp, Glycine max
  Clone ID: LIB3051-013-Q1-E1-B8
aaagactgctgtttttgttctgtcgactctgcagcagattgatcctgttcctggccaagtttctgcacttgttctttgtcatacaagagaattagcataccagatatgccatgagttcgagaggtttagcacctacttgccagatctcaaggttgctgtcttttatggtggggtcaacatcaaagttcacaaggatctgctgaaaaatgagtgccctcatattgttgttggaacaccgggaagaatactggcattgaccatggataaggacctttctttaaagaatgttagacatttcatattggatgaatgcgaacagatgctggaatcagtggatatgaggaaagatgtttcaagacat

SEQ ID NO: 30094 - DNA, 380 bp, Glycine max
  Clone ID: LIB3051-013-Q1-E1-C2
aacaagcgtccgggttgaatgagctggttcaggaccagtctcaattgccacattaccacaatggacctcttctagacggcaaaatcgccgttaagctcatctggtatggtcacttcagatcatctcaaaatgctatcatcatcgatttcgttatctcactgtcatccccatcgtctcagagcagccaatcctctgttgccaagtcgtggaaaaccaccgagaagtactaccacctgagtcccaggaaggcttctctctccctctctctcggctatcagattctctacgagacatactcacttgggaagtcactaaccggcaagaatctcgtccagctggcttccaaaggctgacagaggaactccatcaacgttgttctg

SEQ ID NO: 30095 - DNA, 399 bp, Glycine max
  Clone ID: LIB3051-013-Q1-E1-C4
aaaacgtctgtttgttttcatatacaagaccggtaaataggaagtagaaaggggcaagttcatgatgttagaagtagcaagtagagatgaggaaaggatgggaggatgaagacaaagtttgtgtgggacctcagaaaaacaaaaatctcttaattaattggtcttggtggaaatgatgatgggttctaaatcaagtgaaaataaggggttgtacagtgctttcattatcggaaaggcgtgttgtaaaattattttcagtcgtgctgttttggtttgttttgtggcattattcattgtatctgtttgtggtgaacgcggtacttctggtgccttctgttcttttggtctaataataataataataataataataataataataataataataataataat

SEQ ID NO: 30096 - DNA, 381 bp, Glycine max
  Clone ID: LIB3051-013-Q1-E1-C8
acccacgcgtccgttttaaaggttttctatttctaaaacagcgtttgcgtttgtgtttggtcttagacgccgcacgccaccaccgtcactgtttcaatcctcgaactgtgtcttcttcgctttctggtctttttattaggttttgttcatcgatccatcgccaaacatgccttccagtcacttgcttctcgaggaacctattaggatggtctccatccttgagccatccaagcctagttttttctctgcaatgacaaagattgttggtaccctgggacctaaatctagatccgtcgaaaccatttctggttgcctcaaggctggcatgtctgtggctcgttttgacttttcatggcatgaccctgagtaccaccaggagac

SEQ ID NO: 30097 - DNA, 355 bp, Glycine max
  Clone ID: LIB3051-013-Q1-E1-D11
acgcaacgcgtccgtaacaatcattcttcatcatctgcaaatacttatccctcactgattcatcatggttcggttcagcaacaatgttatcggactccttaacttcctcaccttcctcatgtccatcccgatcctggtggccggagtgtggctgagcaagcaaggcgccatcgagtgcgaacggtggctggagaagcccgtcatcgcgctcggcgtcttcctcatgctcgtctcactcgccagcctcgtcggcgcatgctgccccgtgtcatggctcctctggctctacctcgtcgtcatgtttgtcctcatcgttcttcacatcgcctatcacaatttcgctttcgtcgttacc

SEQ ID NO: 30098 - DNA, 432 bp, Glycine max
  Clone ID: LIB3051-013-Q1-E1-D4
accatactggagcgtacaatgaccctctccaagaacaggatggcatatctgttatcaagtatgcgttcagtaagggaatcacattttttgatactgcggatgtttatggagccaatgctaatgaacttttggttggaaaggctttgaagcagctgcccagagaaaagattcagatagccacaaaatttggtattgcttcacgaggttttcctgatatgaagatcaagggttcgcctgaatatgtgcgatcatgctgtgaagctagcttgaagcgtcttgatgttgaatacattgatctctattatcagcacagagtggacacatctgtacctatagaggaaacagtgggtgaacttaagaaattggtcgaagaaggtaaagtcaaatatattggattatctgaagccacccagatacaattaagagagcaca

SEQ ID NO: 30099 - DNA, 293 bp, Glycine max
  Clone ID: LIB3051-013-Q1-E1-D8
aacgtgtaccctggtctccaaccctcttcaactcaacagcatctccaccacgcattcacggaacgttgccgatcaggcgtgtgatcccagtggcctgggacgatgacgagagagccactgggtcgttgccttccaacacacccgtggcttcatgtgggacgcaccacacactgtcgcacgcatttacagcaacaagttacacgcgtacttcgccaagacgcctgacttcggcaattgatgtatattaatccaatctcattgcactgctatagcaaagacttggttacagtatc

SEQ ID NO: 30100 - DNA, 275 bp, Glycine max
  Clone ID: LIB3051-013-Q1-E1-D9
agctaccattgcccatctccatgtggttccggttctgtttcagcactcgctcaccaagagtggtgatgaatacagcaagactccggtatcgatatctgatgtcatacactcgcgggttaaagcgctcacatttaggaatccatccacagttgctgattttgcccttgcccttaaactctcgaaaaggtataggttgcttcatccgcattatattgacctcgcatatcgagaccgagctcttcacgtttcaataaatagcttcgtaacctctcgac

SEQ ID NO: 30101 - DNA, 367 bp, Glycine max
  Clone ID: LIB3051-013-Q1-E1-E5
attgatctcacctgatgatttgttgcaagcatgttctctgtgggagaagtttgatgtgtatgttttacattatcttctatttaaattacttctgttactgtgattcggttaattactgtagacatggtgagtgggtgacttcatttcatactccatgggattcatggtagttaaaatcgggattaaaaattataaaattgcagggttttacgatgttaatccctccgaatgactcagatagcacatggaattgtagttggagtgaaattgttgtaaaatcctgatacaagttgtaaaattgtgattttatgatttctcgaaactgacccagttgcgttttcaacccggtttcatattttacctgctt

SEQ ID NO: 30102 - DNA, 400 bp, Glycine max
  Clone ID: LIB3051-013-Q1-E1-E7
actcgctcacggcgcatgttagcattgttgacaaaaaaacaaagcgcgtgggactcacgcgcctgagtcctcctcgtcctcttgcaaccgttgtcgacactctttctttctctctctaccttagttacgttcgtatctcggatccgtcgacgtttctgtcccttctttcggatccaccttcgttgtttcgatcgaatcttgttactatgatgagaagagatcaaatacgtgcacgtgagatgcgaaccccatccctggttgacctttgtgttcagaaagtaatagataatgtaaggtaccttggaaatgttggttctcttgaccatcatctgctcgagcagattttgccgcactgcacagctgaccagttgatgcatgtggagaagtccagcaagggaag

SEQ ID NO: 30103 - DNA, 406 bp, Glycine max
  Clone ID: LIB3051-013-Q1-E1-E8
aacgtgtaccctggtccccaaccctccaaagctcaacagcatcgccaccagcatacagggaacgttgccgatctggtttgtgatcccagtggcctgggaccaagaagacgaaccagtgggtcgttgccttccaacacagccatggcttcatgaacgacgcaccacccactgtcgcacgcatttacagcaactagtttctctcgttcttcgccaagacgccccatttctgcaattgaactatattactccaaactcattccactgcaatggcaatgaatttgttagagtatcgacagtttaaaattcagtaaattgacggttttgagtgaaaatggggatttgagagttttaaggtagagcacaaacatgcttaacttcagtacctacgctggctagctagctcaag

SEQ ID NO: 30104 - DNA, 136 bp, Glycine max
  Clone ID: LIB3051-013-Q1-E1-F1
attagcttgaggggggcaatgatgatgaaaggtccaatactgaaggacaagggccttccaacaatgagaatccgggaacttataaacgttatgaagtacttgccgcaatgtacaaggtcccaaccgaagttaattt

SEQ ID NO: 30105 - DNA, 356 bp, Glycine max
  Clone ID: LIB3051-013-Q1-E1-F11
agccaacgcatctgtaagcatatgcccacgttgatcccggtgggatgcttccaacatctcattaattggtttaagcgccaaagtttccgaatttgcataacggtattgctagttgggcttacagtgcatttgggtcacatcctcgctgttcatctattcaacccacgacactgcacatctgggcataaggcaaaatctcacgccaatttaaacattgatgacgcatcaaaatcctacagtaaaacagaagtttcattgcataacagtagaacagactgttggataatcatcaagaacaacgtacatgatgttacctcacatgtggaagaatatccaggtggtgattccaatcgtgt

SEQ ID NO: 30106 - DNA, 414 bp, Glycine max
  Clone ID: LIB3051-013-Q1-E1-F6
agtgaaagctggcgtgtttgacaaaatgagggaatgaagactattagctcattctctgaatattctgacatccgccaccgccacgtgtcaacctaattgggatccacagtcttcttccttcttcagctccacgcgccctctttccctttcctgtttctagctgttaccgacgtcaattgttactccgattatttattcttatttattttccccatctcactctccttcgattcgggatcactcacaacacaagtactactaccttggaatcaatttttagggtttctgattcctttatgtgtttgtctcgcaattgatcatcgcaaccacaatgtccggtcccctcgatcgttttgccagaccttgctttgaggggttttcgggcagtgatgagaagaaggagaggagatctga

SEQ ID NO: 30107 - DNA, 408 bp, Glycine max
  Clone ID: LIB3051-013-Q1-E1-F7
cccacgcgtccgggaataacccgtggacttacactgatccacttcgtgcaaagtataatgacaatatggcatcagtgaacgcatctatattgaaacctacaggaagcaggaaattataggattgggaatctcgatgaacttgaagttacaaaagtatgcatgaagatatcatcctttcagttattagactttggagaaataccatagtagatatgtccttgtcctatgtatgattgtgttctgtcttaaacagaacgtaaagtaattcatcacggttggatcgtgtatgttgtggaccatggaacgcaattgtgacgagaattcatcactactttaactggatattcttcccgagttaatgaatcatacctgatttagagtcctgcgagcgcatcctaatgactaggt

SEQ ID NO: 30108 - DNA, 343 bp, Glycine max
  Clone ID: LIB3051-013-Q1-E1-G7
acggattgagtttccggttatctctggaatatggagtttgtgtaggtcgagagagcttttgttgaatctcgaacgggacatatacggaacttgaatcatcgaggcaaaagaaagctcattgtggatgatcagttctgctgcttaatttaacatggattgttggctttctatggacttcctctaaaacactcactgggtcacggatctaagcaaccccttgcatccttgcctgagggattttagttgtaaatggacaccttgcctgttgacgcttatgcagtagcatatggatacactatagctgtgtatgtgagtacatcattcgccatggaatcagcatctg

SEQ ID NO: 30109 - DNA, 303 bp, Glycine max
  Clone ID: LIB3051-013-Q1-E1-G8
aagataagattactgtcgaaaatctagaaaatagagcacaaggaggggctgagccaatggagatctcccagagccccatgtcgtcgcctgatgatactccatgtggttatgtaaaacttttgaaaggtcatacatcagaggtttttgcttgtgcatggaatccatcagctccacttcttgcatctgggtttggagattcaacagctcgaattttggaaattgctgatggagcttgtgactctagtgtgcaaaatgaaccagttaatgttgtggtgctgcaacacttcaaagaaagcaccaatg

SEQ ID NO: 30110 - DNA, 382 bp, Glycine max
  unsure (1)..(382): unsure at all n locations
  Clone ID: LIB3051-013-Q1-E1-H5
ggatcacgcgtccggttgtctacaaggctatggataagaagctggagaactagtagcattgaagaaggtgaagatgaacatagagagggatggatttccaatgtcatccttgagagaaataaacattctcttgtcttttaatcatccctccattgtgaatgttaaagaagtagttgttgatgattttgatggtacttttatggtaatggagcacatggagtatgacctgaaggggctgatggaggttaagaagcatccctttagcatgagtgaaattaaatccttggtacggcaacttcttgaaggtgtcaagtatctccatgataattgnggttatccatagggacttgaaatcatcaaacatcctgctgaaccatgatgg

SEQ ID NO: 30111 - DNA, 398 bp, Glycine max
  Clone ID: LIB3051-013-Q1-E1-H6
atccaaccacgcgtccgcacacagctagcagatattacatacacgtgaatcactaattaagccatggagaagaaatcaataactgggttgtgcttcctcttccttgttctctttgttgctcaagaagttgtggtgcaaactgaggcaaagacttgcgagaacctggctgatacatacaggggtccatgcttcaccactggcagctgcgatgatcactgcaagaacaaagagcacttgctcagaggcagatgcagggacgattttcgctgttggtgcaccaaaaactgttaaatggatccattcactccaacgtgaagaagatgcatgcagcgctattttataaaaaataaaactacaatatactatatataataagactggcgctgcatcaatgacct

SEQ ID NO: 30112 - DNA, 394 bp, Glycine max
  unsure (1)..(394): unsure at all n locations
  Clone ID: LIB3051-014-Q1-E1-A1
aacgcaacattaanaaaagagcaagcacgcctaacttcggaacccaccaagagacagctgcactgaacaaaacanatttaaattacgatattcgtttcaagcagaggagaagggacacacagttcacacaataataacatcttcattcgtttacccacttttctttacgaccttattccttcgattctgtcttagaatgacgaattcactatctccctgaaaccatgactgtgagggacagtcatcatcattgagccttacccagaactaaaaaagcaatctttatcacatatcacaattcacaaagcttctgtggttgatgggtacaaggggaatccaactgtttgatgagaaaagagatgtttttttctctgtctgcaatttggggtttgaa

SEQ ID NO: 30113 - DNA, 345 bp, Glycine max
  Clone ID: LIB3051-014-Q1-E1-A10
acgcccacgcgtccgagaaaagattgagctttcaggagagagaaagaggaaaaagacttggaatttttttttttggggtgttccaatggttgaactggaaatccaaagaagggtgtgaaaaaaattgcatctttgtttggtgggtgtctctgaaactatgatcttgtgaaaacccacaaaggaaaccttcgatgcgcgttggtagatagagattgctgttgggattttcagagaaccgttgattgacaaatgaacggtggtgatgaagtcgtggcagctccggcgggtccaccgcagccgctggagtggaaattctcgcacgttttcagggaacgtacggcgggg

SEQ ID NO: 30114 - DNA, 403 bp, Glycine max
  Clone ID: LIB3051-014-Q1-E1-A8
atcagttccttgccttctacaaattctaatgcaattcaagaaccagttgctagagacattcatgggacctcagctaagttggaagagccgaaggaatccgagtgcaaagttcagactgatctggagctagattctgcaaagggttccgaaattgaacttgcaaattcggggaaacctatagatttattggaagaggaagatgcatgcccaatctgtttagaagaatatgatgcagagaatccaaaactcgcaacaaattgtgaccatcattttcaccttgcatgcattctggaatggatggaaagaagtgaaacttgccctgtgtgcgatcaggatttggttttcgaccctcccattgaataatacatcaacataggagttcaaatatactgtgtagtgtttg

SEQ ID NO: 30115 - DNA, 418 bp, Glycine max
  Clone ID: LIB3051-014-Q1-E1-B1
aacccaagcgtccgcccacgcgtccgcgataagtctgatctgaagctggatgttttcatggttcagcacgacatggaaaacatgtacatgtgggttttcaaggagaggccggagaacgcgctgggtaagatgcagctgaggagttacatgaatgggcattctcgccaaggggagcgcccgtttccgtttagtgctgacaagggttttgctcggtcccacaggatgcaacgaaagcattatagaggactatcaaaccctcaatgcgtgcatggcgttgaggttgtttccacacccaatctgatgaccctggatgaggatgatcgaaaaaggtggatagaactcactggccgagacttgaattttacaattccaactgaagcaagtgatttcagttcatggagaaatcttcccaacacga

SEQ ID NO: 30116 - DNA, 402 bp, Glycine max
  Clone ID: LIB3051-014-Q1-E1-B10
acgtacggggtcatcttcagcttctctcactttgatgcaacctttaaattagtccaatttcaattattcaaagacagtcccacccacttcccatctttctctcttcttttctgtgcagttgaggaaaaaaaactatgctccaatccaacaacaagcaaagaagcttctcctcacttttcttctttatcttttctctctaagccttttgttctctctacttcattcatgatgagtttgtgttcctccaaaggaacctgttctggtgacaccaatgcacacgtttcctcttctactgttggaaattactcatctgacagaaaaaggcacaacaacaaattcataacctttttgagaaaaaccatgtgggagtatgctttggcatgtgttggtgttgttccttgt

SEQ ID NO: 30117 - DNA, 358 bp, Glycine max
  Clone ID: LIB3051-014-Q1-E1-B3
aaccaactcgtcagggaaataattgatctttgataatgcagggaggaaagaaatctggatattccaccaaggaaacagctgcaaacattggtgcttctgccaaagctggcatggataaaaccaatgccactgtccaggacaaggcagaaagaatgaccgcacgtgatccgatgcacaacgagttggcaacccagaacaaagaggcaatgatgagccaggcacagctggacaagcacgcgtcgcgtcagcataacacggctgctaagcatgctgccacggcagggcacatgggacaacccatggggaaccatcagacgtcagctatgcccggtcatggaaccggacaacccacgggcca

SEQ ID NO: 30118 - DNA, 412 bp, Glycine max
  unsure (1)..(412): unsure at all n locations
  Clone ID: LIB3051-014-Q1-E1-B7
atcagggcggcacgatgagcagcagccatttgtaaatgggagctgtggagtagtgaacactatttatatagtgagagaaccagatatcttaccttccatcttaaatactgaaacacctggtcgatcacacatggaggttgacaacatggaagctaatcccaggatgactgtgtctgatctggaggtttctcgccaccgtatatcggtattcctgtccacgcatacttcatatgatttgcttcccgagtcaggaaaggtcattgccttggatataaatttaccagttaagcaagcattccatgttctttacgaacagggtatatctatggctcctctatgggatttttgcangagccagttcgttggagttcttagtgcaatggacttcattctaatattgaaagagctgggg

SEQ ID NO: 30119 - DNA, 334 bp, Glycine max
  Clone ID: LIB3051-014-Q1-E1-B8
atcaggttagctagctgctacctcttggctttttgtcttgctggttcaataacagtaagctctaagccaccgccaagttccattcccttcttttcctcgctttctactttttggttattcttcttcaccttggttatcctgccctacccaaaagttcaatattttttttgcagcttcaataccccctaaatcccaataaagatataaagatatacatatacacacgtttatatgttcatatagtatatggtacactacatggcacaacaatattcatcctcaagttggagctgcaatttatccaagatggcacggcttgcctttgtgctccctg

SEQ ID NO: 30120 - DNA, 166 bp, Glycine max
  Clone ID: LIB3051-014-Q1-E1-C10
acgcccacgcgtccgcccacgcgtccgttattaacataattatccctctttacaattcagtgtgaattctgaccttccagtagtcctgtttctacttttgcaaaccccagtttagaatttgtgagccccaaacgtgaatactaaaaggtttcggatttaccttttc

SEQ ID NO: 30121 - DNA, 420 bp, Glycine max
  Clone ID: LIB3051-014-Q1-E1-C5
aatcagccaccccttctaatttctctcttctctgaagctatcagaggctagagttctcctattcagtatctcatgtgcttcaaagaatggctgttagctttactgggcttgacatagaaggcagagaccagacagaagagaacatgacaatatgacatctatctagtggagtaataatttatttgtgatggatgaaactgaagtggaaaatcccatattcatggaaattaattctgaagataagagaaatgaaaatcaagagtttgcatcagagaaaggagaaggtagcagtgttgttttctcaagagaagcaccacttatgaggaaagagtcaagaatgtccactccttattgttgcaatgctaagaagctcaaatccggggctgttacaatagattgtgatcttggaagtaatgagaa

SEQ ID NO: 30122 - DNA, 415 bp, Glycine max
  Clone ID: LIB3051-014-Q1-E1-C7
atcaatgcacacgtcagaaaatgtggtttcttggttggaaagggcaatcggggttctcagcgtcctccacagccgaacaggtcactcaagggattgatggaaacgttctcacagccatcgtcacaggagcaacaagtggccttggtctggaaaccacccgggttcttgcattgcgcagtgtccatgttgttatggcagtaaggagtgtggacagtggtaagaatgtcaaagaaacaatacttaaggaaattccctccgctaaaattgatgtcatggaattagatctaagctctatggcatcggtaacgaaatttgcatcagattttaattcttctggtcatccactcaatatcctaatgtaagaacttttaattctatctgttttagatatcttgtaattaggtaatgtttttgt

SEQ ID NO: 30123 - DNA, 401 bp, Glycine max
  Clone ID: LIB3051-014-Q1-E1-D1
aacttatcatatcgttaacaagaagaacacgtaacagaaagacacatccaaaggaagtctctggttatttcaattaattaagagaaaggactcgaatagttggttattcatggaagacaccgcacaacaaatcaagcgtccttttggtgttcctgaaggaccagaattcactgttgggttggatgtacctttgagcggcgccaaaaatatcttggcgtttgcggagtgataagtggttatcttctttaattgctagaggcatttataatagtcaagaaagtgaggttcctcttatagatctattttgtactctgctagcccatgctgaaccggagcaacgtattatagcatacttgggatgaagttgttgtgctggcatcatctgatttgtcattacaact

SEQ ID NO: 30124 - DNA, 396 bp, Glycine max
  Clone ID: LIB3051-014-Q1-E1-D11
acgcggacgcgtgggcggacgcgtgggtaaattctgtagctgttgctccaaatgatagtttagtatgtagtggttctcaggatcgtacagcttgtgtttggagacttccagatctagtatctgtagttgtatttaaaggtcataaaagaggaatttggtcagtagaattttctcctgttgatcaatgtgtagtaacagcatctggtgataagacaataaggatatgggctatatctgatggctcctgtttgaagacatttgaaggacacacttcaagtgtgttaagagcattgtttgttactcgtggaacacaaattgtttcttgtggtgctgatggcttagtaaagctgtggactgtaaaaactaatgaatgtgttgctacttatgattatcatg

SEQ ID NO: 30125 - DNA, 373 bp, Glycine max
  Clone ID: LIB3051-014-Q1-E1-D12
acggcagcaattcacactggtctttgcttctcgttactcatttctcacctaactttctattcttctcagtctcagatcagaaccttagccatggcagcgttccagaagatcaaggtcgccaaccccatcgtcgagatggacggagatgaaatgactagggttatctggaagtcaatcaaggacaagctcattttgcccttcttggagttggacatcaagtagtatgacttaggccttccttaccgtgatgagaccgatgataaagttacaattgaaagtgcggaagcaactctcaagtataatgtggcaattaagtgcgcaactattactccagatgaagctcgtgtgaaggagtttggtctgaagtcaatgt

SEQ ID NO: 30126 - DNA, 418 bp, Glycine max
  unsure (1)..(418): unsure at all n locations
  Clone ID: LIB3051-014-Q1-E1-D2
agctattcctccctcctcacaaacttcactttcttcttcttcattaatgtctcacttcaagggcaagtaccatgatgagcttatcgcaaatgctgcgtacattggcactcctggaaagggtattcttgctgctgatgagtcaacagggacaattggcaagcgtttggccagcatcagtgtanagaacattgaatccaacatgcgagctcttagggagctgcttttcactgctcctggtgttcttcaatatctcagtggtgtcatcctctttgaggaaaccctctaccagagcacagctgcatgcaagccctttgtgaatgtcttgaangaagctggtgtgcttcctggcatcaatgttgacaagggcacagtcgagcttgctggaactaatggagaaaacaccactcatggtctagat

SEQ ID NO: 30127 - DNA, 117 bp, Glycine max
  Clone ID: LIB3051-014-Q1-E1-D5
cccacgcctccggagatgtggtatacatatattcttgtcccctaatatgttaaattaataaatattacatattatgggacacatctatctgtatctcacatctctggacgcgtgtgt

SEQ ID NO: 30128 - DNA, 340 bp, Glycine max
  Clone ID: LIB3051-014-Q1-E1-D7
atcaagcagttcattcgatcatatccttgttcaaataattttcttttcaattacaataccgcagtcccagaaacttatgttcatgaccatcctcaaggtcgcaataacatttacttgacgacaattttgagttgaccttagagcctagttccacctatacaaacacccttgatccttcattcgtttttgagttgaccttacctagctcaaatactggcaacaataatacccttgggcatctgaccaatctcaatccgttttttctgccttcctttgcattggatttgcaaggttttaaagaacttaaatgcttttttaggtcctaagaagctaggtaatt

SEQ ID NO: 30129 - DNA, 293 bp, Glycine max
  Clone ID: LIB3051-014-Q1-E1-D8
aggggaagaaagagggcaacgcagatgaaacgaaggtagaaaaacaaaattgacaaaaaagttcgatcatattagggttagggtttttctacgcatcgaatagtcactcaaattcgactcaaattccccaaattggagaaacctcaacattactgccttgctagggatagaaagaacgggtggcatcaaaagactcaaagcagtggaaatgctgggagaataaatagttgagtggaaatgagtaggttgtctttcaggcctcgaacacttgacattcataagaagctccccat

SEQ ID NO: 30130 - DNA, 398 bp, Glycine max
  Clone ID: LIB3051-014-Q1-E1-D9
acgcccacgcgtccgcccacgcgtccgattttccaatccaccttcccttttaacgataccaaaaatagcgttctggagtccaagatctcattcattgtcctttccttcccttcccttggcccaattgagaaatgaattccaacttcaatttcgatttcgatctcggcatcggatccaaccgtcccaaatctcttaacgaccagaaaaaccccaaaccaacttcctcctattcctctgcccaacccgcatggacccaccgacccgcccccactcagaccaccgccttgcccggtgggcccccctccatggtcggagacatcttcggcaagagttggggaacccctcaaccttcttccgcttccaaaaacatcgggatcgttaataagaaccctaacctt

SEQ ID NO: 30131 - DNA, 387 bp, Glycine max
  Clone ID: LIB3051-014-Q1-E1-E12
acgattccattctctctgtgtatttccctacctctcccttcaagatgcagatcttcgtcaagaccctcaccggcaagaccatcacccttgaggtggaaagctctgacaccatcgacaacgtcaaggccaagatccaggacaaggaaggaatccccccggaccagcaacgtctcattttcgccggaaagcaacttgaggacggccgtacccttgctgactacaacattcagaaggagagtactcttcacctcgtcctccgtctccgtggtggcatgcagatcatcgttaagacactcaccggcaagaccataaccctagaggttgaaagctccgacaccatcgataacgtcaaggccaagatccaggacaacgagggtatcccccgga

SEQ ID NO: 30132 - DNA, 384 bp, Glycine max
  Clone ID: LIB3051-014-Q1-E1-E3
aacgaacccttgggggttgtcctcaatttccgggaccaggtaaaaaacaattttaaaaacctgtcaaaaaaaggttcaagaggaattttgccaaacatgaattcaatttacattcaagaaaaactggttcctgtcatccgcggcctgatcacttcattggagagtgtttcacatggtagtagtaattggagagatgaaacttccttgtcttttcaagtggatctgtctccgtcaccaagtaatttgaatggacaaattgaaggtgctagttcaacaaaagccccgttattgggaaaatctaacaagccagataagaagaaagtaaaagatcatgtgattgctatgagagacgttgagttggaggagcatcggaaatctacagat

SEQ ID NO: 30133 - DNA, 341 bp, Glycine max
  Clone ID: LIB3051-014-Q1-E1-E5
atcagaaacttctcagccacatctgaaagatgtacaagcaaaatctcatagtggttctgctagaagttgcactaaagttcacaagaagggtattgcacttggtaagtcagtggacctcacaaaattcagtgattatggggaattaattactgaattggatcaactattcgaatttggatgtgaattaacttctccacaaaaggattggcttattgtctacactgataatgagggagatatgatgcttgttggtgatgatccgtggcatgaatttgttgcaatggttcgcaaaatttatatctaccccatagaggagattcagaaaattagcccgggtacct

SEQ ID NO: 30134 - DNA, 170 bp, Glycine max
  Clone ID: LIB3051-014-Q1-E1-E6
atcaggttgatgcgtgcttaaacaaaggcaaaatgaaaattttgaaaaaattattattgaatgttaaaaatcaagcaacccgttcatacgcatgggtaatctatatctatttatattattgcacgtcgcttgaacaagagcaaaatggaaattttgtaaaataagccatc

SEQ ID NO: 30135 - DNA, 412 bp, Glycine max
  Clone ID: LIB3051-014-Q1-E1-E7
atcaggcacaattacagtgactccgcttggttcctcttcttcgatcttcggtttgattctgcgtttgttcacatcatggccaccgcttcagtggcatttaagtccagggaggaccaccgcaagcagattgagttggaggaggcgcgtaaagcggggcttgcgccagctgaactcgatgaagatggaaaggaaatcaatcctcacattccccagtatatgtcctctgctccttggtatcttaatgctgagagacctagtttgaaacatcaaaggaaatggaaatctgaccccaattacaccaaatcatggtacgatagaggtgctaaaatctttcaggcagacaagtatcggaaaggtgcttgtgagaactgtggagctatgacacatgattccaagtcatgcatggaaagac

SEQ ID NO: 30136 - DNA, 401 bp, Glycine max
  Clone ID: LIB3051-014-Q1-E1-E9
acgtaaaatacagaccaccaatgttttgccaaagcacgggccaacttttctagtttatgtggaaaccaaaccaaacctcatttgtattttttcctattggaaaaatctcacttttaaattgtttctattgcagggactgactgacaaattcaaagaaaaggatactgcgtattctggctctgcaaccttcacctatgaatcgtttatgctgacagtcctgccattcctaatagcttaggaaattaatggtgtgtgtgtggttggtagggtttgtaaatggccaggctgtatttggtttgaaaatgtgtggtcgaattactttactattgccagcctttaatatgctagtactccctgttgttttactctataagtaaccagattcaaaatactatggtttt

SEQ ID NO: 30137 - DNA, 393 bp, Glycine max
  Clone ID: LIB3051-014-Q1-E1-F11
acgcaaacatgtccaccgcaacaactcacgtgctcgcttatcccttccctacctccggtcacgtgatccctctcttagacttcaccaaaaccctagtctctcgcggcgtccatgtcaccgttctggtcacaccctacaacgaagccttacttccaaaaaactattcccctcttctccaaacgcttctcctccccgaacctcagttcccgaacccgaagcaaaacaggctcgtatccatggtaaccttcatgcggcaccaccactacccgatcattatggactgggcccaggcccagcccattcctcctgcggctattatatcagatttcttcctcggttggacccacctcctcgcacgtgacctccacgtgccgcgcgtagtcttctccccct

SEQ ID NO: 30138 - DNA, 367 bp, Glycine max
  unsure (1)..(367): unsure at all n locations
  Clone ID: LIB3051-014-Q1-E1-F2
aaccacgcgtccgccacgcctccgctttcttttgttcaggggtgatccaacagactccatttacatggaggtagaacttagaagattatccttcctcaaagaatcattttctgatggaaaccagtctgtgagcgatagtcagacaatcacactagcttcaagcgtgaaagctcttcggcgagaaagaggaatgcttgtgaagcttatgcagaggaggctttcggagaaggagcgaagaaggctatacgaggagtggggcattgcattggattcaaagcgcaggagggtgcaactanggaaccgtttatggagcgaaaatgatatgaaccacgtaatgcaaagtgctacaatagttgccaagttagtg

SEQ ID NO: 30139 - DNA, 388 bp, Glycine max
  Clone ID: LIB3051-014-Q1-E1-F5
tccagtttggaattgcggcctttatggaatcctcccgtgactaagaagggccatcacaaaatagaacttaaggtaaatgcatcaaccaatttgtttgcaatggcagttggcataaaacagaaagatcttgtgagcaagatggttaaaaagtttatagacagtaatttcgtcgtgatgctcttccactatgatggtattgttgacgaatggaaggatctcgagtggagtagtcttgtcattcatgtgtcggcaattgatcaaagcaaatgaatatgattatattttcctttgggatgaggacctaagagttgagcatttccatccagataagtatgtttctattatcaaacgtgaagggctggagatatcacaaccagcactggatcct

SEQ ID NO: 30140 - DNA, 413 bp, Glycine max
  unsure (1)..(413): unsure at all n locations
  Clone ID: LIB3051-014-Q1-E1-F7
atcagcccacgcgtccgcaaaaccagagtggttctagtaatccggtgctgctagaggatgggaactagtgaatggcatatcgagcgaagatctagcttcggcactgaatcccccttagcaagagaggcaggaaatgtgcctgaaactgggtcactctctattgttgtgcttggcgcttctggggatcttgctaagaagaagacatttcctgcacttttccatctataccggcagggattcttaccagcagatgaagttcacatttttggctatgcaaggacaaaaatatctgatgatgaattgagaaaccggttgcgtggctatcttgttccaaacaaaggtgcttcttcccaactgttggaggatgtanagaaatttttacagctgatcaaatatgtaagtggctcctatga

SEQ ID NO: 30141 - DNA, 393 bp, Glycine max
  Clone ID: LIB3051-014-Q1-E1-F9
acggtcaaagatgctccccagggaccaatagttcgaaaggatcaggctattgagaacaaagaagttttggctattgaatacaaaaagacaacagaagtggaagaggaatgtccaccctcaccctcaccccctccacctccaccttctgaacctgtgaaagtggaagcaccaccagtacaaccacctcctgatctgttgaatttggaggatcctgttccagctgctgcagagttggcagagaagaatgcattggctttagccattgttcccgttgctgttgaacaacaaccttctgctgtttcaaatcaagcaaatggaactacaggatgggaattggcccatgttactgctcccagttcaaatgagagtgccacaacagctagcaaactggct

SEQ ID NO: 30142 - DNA, 420 bp, Glycine max
  Clone ID: LIB3051-014-Q1-E1-G2
aaaaaaaaactaattgcaaagatgaataccaagccctttttctccttgtgcttactctgcgcactgcttctcatctgtgttgtggcaactgagccatccaaagatgcgacacaagcagaagaaccaaagacacggccagatgcctggagaagtggtggaagtggaggacatggtggaagtgggggacatggtggaagcgggggacacggtggaggctggggacatggtggaggctggggacatggcggtggacatggcggaggatgcaaatgctgcggtcgaaagggctgcaaatgttgctgaagtaaaaaaacacaaacatgaactgaagacacacatacgtgtgtactccatgtaataagtatagtatgtagaattaagaaataaaagcatggaatctatatccgtgctaaggctgtc

SEQ ID NO: 30143 - DNA, 406 bp, Glycine max
  unsure (1)..(406): unsure at all n locations
  Clone ID: LIB3051-014-Q1-E1-G5
aatcagattacataaaagatttatcctgaaaattttcagatgcttgctaattattattggggttaaacatctgcagtggattaccttcatggattctgaaggacgagtcacagattcagaagctttgagaaaaagagtattttatggtggacttgaccacaaattacgaaatgaggtatggggtttgcttttgggatattatccatatgaatcgacatatgctgagagagaattcctgaagtcagttaagaagtcagaatatgtgaacataaagaaccagtggcagagtatatcctcagcacaggctaaaagattcacaaaattcaaggaaaggaaagggcttattgagaaagatgtggcgatgataatccanatgtaaatgttctgcgagatatcctgttgacat

SEQ ID NO: 30144 - DNA, 405 bp, Glycine max
  Clone ID: LIB3051-014-Q1-E1-G6
agcaaaagcaaaatttggggcgagaaagcgaagcaccaggtggttttaaagtgctcaagtttcactaccacgcccactgttagatcttctcctttctcacctcttccaacaatacatcttctgcctactgctaggtgaaatgcagaatccagatgcaaatcaacttcccgaagttgattcgttgccagatgggtttgttgagagtactacagagcctcttgctcctgcaactccatctcctgaacaagagaaacccctgaatagttacaaggatgatggtccctctgaccttattcattctaatgaacgatcaaatgatttgggagaaaaagagtttcaaaacaatcatgactgctcagcggagagtccctctagaagctctatgcagcagacagaaagggcaca

SEQ ID NO: 30145 - DNA, 416 bp, Glycine max
  Clone ID: LIB3051-014-Q1-E1-G7
atcaggggttcggaaggtgaagaggagaaaaagactatggagggtttgaagaagagaaagctggagctggacgaagcaggcaacggtgaattggcttccacggaagagcttcgcttcctcattgaacctctcgctaaaccccagctcgtcgatcttcttgctaaactatggtcccaatatccttcaattgcagaagaaataaaaagtattgcaagtgcagatcctgcccatcgaaagctttttgttcgtggcttggcctgtaataccacttcagaaacattgcgtgctgcatttcaagagcacggagaaattgaggaatgagctgtgatctttgataaagtgacaggaaaatcacgtggctatggatttataactttcaaaaatatggaatcaactcagcaagcattgagagccct

SEQ ID NO: 30146 - DNA, 401 bp, Glycine max
  unsure (1)..(401): unsure at all n locations
  Clone ID: LIB3051-014-Q1-E1-G9
acgggaatacttcattgatgtgaaagctgttcagattgatggaaatgttgtgaacttaaagccttcccttttagctattgacaacaagggaaatgggggaaccaaactcagcaccatgagtcctttcactgaattacaaacaactgtctacaagactttcattcgagatttcatcaagaaggcttcggacagaagattaaagagggtggcatcagtggcaccatttgaggcatgttatgattcaaccagcattagaaattcctcaactggactagttgtgccaactattgatctagtgctgcgaggtggagtgcagtggactatttatggagccaattcaatggttatggcaaagaaaaatgtagcatgtcttgcaattgttgatgganggacagagccta

SEQ ID NO: 30147 - DNA, 420 bp, Glycine max
  Clone ID: LIB3051-014-Q1-E1-H1
aacccacgcgtccgcccacgcgtccgcccacgcgtccgcccacgcgtccgcggacgcgtggggttgttggaaaaggccaaaaactatgttgcggagaaagtcaccaacatgcccaagccagaggcgagtgtcaccgacgtggacttcaagcgcgtgagccgcgacagcgtcgagtacttggccaaggtctccgttcagaacccttattccacttccattcccatttgtgagatcaagtactccctcaaaagtgctggcagtggtgaagggagatagcagcaggaacaatacctgacccagggtcattgaaggcaagtgacacaacaatgttggatgtgccagtgaaggtgcctcatagcatattactgagcttggcaaaggacattggtgcagattgggacattgattaccaattggata

SEQ ID NO: 30148 - DNA, 412 bp, Glycine max
  Clone ID: LIB3051-014-Q1-E1-H5
atcagagagaggaagttttggggtttgaatctatagaatagaatcaaaccaaattgaaagaagatcgatcgatcgatcgatggctctggtcggagttgaagtgaagcatgcggcggagggcgcaccggaggagaattgctccgccaagcccaccaagcagggcgagggcctccgccactactattctcacaacatccacgagcatcagctccttctccgtcaaaagacgcataacctcaaccgtcttgaggctcagagaaacgagctcaattccagggtgaggatgctgcgcgaagaattacagcttttgcaggaaccaggctcttatgttggtgaagttgtcaaagtcatgggcaagaacaaagtccttgtcaaggtcccacccagaagggaaatatgtcgttgatattga

SEQ ID NO: 30149 - DNA, 381 bp, Glycine max
  Clone ID: LIB3051-014-Q1-E1-H9
acgtacggtttattctatcatatccttgtccaaataactttcatttcacttacaataccccaatcccagaatcttatgttcatgaccatcctcaaggtcccaataacatttacttgaagacacttttgagttgaccttacagcctatttccacctacaaacacccttgatccttcaaagcctctcatagttccaatactggcaacaataatactcttgggcatctaaactatctccattcttttttccccctttctttgcagtggatttgcgaggttttaaagaaattaaatgcgtttttatgtgcgaaagagctaggtgtgatatttttttctgctgaaaaagttcacttcagagagattgttcacagttcaaacgtgta

SEQ ID NO: 30150 - DNA, 384 bp, Glycine max
  Clone ID: LIB3051-015-Q1-E1-A1
agcccacgcgtccgcccacgcgtccgcacttttctaatttttccctcgacagcgacgacgacgaccgcgtctgttcgatcggagtgggttttgagtggttgccgaatagttctgaattggagaaagaaggatatagaggaagaagaaggataggttgggaaagaaagaagaacaagaaagaagaaagaagaaaaaagaaaaaagaaaaaagaaaagaaaaagtaatcttagccatagatttaaaatcaaagagatctaagggtgcaagataattttcccacacggtgggagaccctataaaagtttccaccctagtctgttaaatattctctattcgattcgaaactggcactcgcttcgcttcgcttccacagcccacgcacg

SEQ ID NO: 30151 - DNA, 399 bp, Glycine max
  Clone ID: LIB3051-015-Q1-E1-A7
agctctcatcctttacaaaaacctaaattctgcgaagcaccgttctctacatatccaaacgccaccgtttttctcttctctccgtcttccgaagcttcgagaatcatactgctgggatgtctggggaagtttttgatggacaagatgcaggctatgtgcctgagaaccctgagtttccacaaaaccattctgatgaacacgatggaggaaatgtgattgatgactctgggttcccgcagctgcagcctgatgaacatgatgctggagggtttccgcagctgcagctgcagcctgatgaacacgaaggcggcaatttggctgaggatgccaatcatcctgaacataattttgacgggaatgatgttgaaggtttgcctggaaactgatttcctcctcaag

SEQ ID NO: 30152 - DNA, 383 bp, Glycine max
  unsure (1)..(383): unsure at all n locations
  Clone ID: LIB3051-015-Q1-E1-A8
agcccacgcgtccggttgaaggaaatggctgaagcacaactacgagaccagcatggcaaccctgtcccactcaccgatcaatacggtaatccggttatcttaactgacgagcgcggtaatcccgtccaactcactggtgtcgctaccaccgctaccggcacagcaggttctgggtttgggtcctatggtaccggtgcttacggtggtggtgcaagtgcaaccaccgttgcagatcttttggcaacccaaccaaggagtggcagggaggctagagagcttcgtcgttcctccagttcaagctctagctcgtctgaggatgatgggcaaggtgggaggaggaagaagggagtgaaggataanataaaagagaaactaccaggggt

SEQ ID NO: 30153 - DNA, 418 bp, Glycine max
  Clone ID: LIB3051-015-Q1-E1-B3
aggggtagttgacaggttttcacatcataacaattggctgcttctgttacagttttaacttcattggaagaatttctcatgtgcttgagtttgtggtggttgatttgcttaaattggtttattgagttctgttaggtcaattcctttgatctatgtggtgtttgtgtttgttgaggttggttatacttatggcttctcacttcactataggtataaactttaaagaagtctgttgattgagaagtgctcttttggttcctgaaaatgcaagttaccttaggttgaatagagagctgttaggggcatgagtgtcatgaatattttaatattattaggtctaaagtgaaaattttgtaaattttttttatcgaatttgagctaactgaatggtttaattgactttatgaatttggtcccc

SEQ ID NO: 30154 - DNA, 394 bp, Glycine max
  Clone ID: LIB3051-015-Q1-E1-B4
agggcgaaggagatagtgaaagagcttcttcctctaattcgagtgtacaaggatggcagcgtggagcgtcttctaagctctgaaaacgtggcagcctcccctgaagatccccaaactggagtctcatccaaagacatagtcatcgcagacaacccctacgtctccgctcgcattttccttcccaaatcccaccacactaacaacaaactccccatcttcctctacttccacggtggcgccttttgcgtcgaatccgccttctcctttttcgtccaccgctatctcaacatcttggcctcagaagccaacataatagccatctccgtcgacttcagactcctcccacaccaccctatccctgctgcctacgaagacggttggaccaccctcaaat

SEQ ID NO: 30155 - DNA, 388 bp, Glycine max
  Clone ID: LIB3051-015-Q1-E1-C3
agcccaagcgtccgggatagggttaaggccatggagcgcatcatctgcgccaagtacaagctaggtcgcaagatcggaagcggatccttcggcgaaatctacctcgcgacgaatattgataccttcgagatcgtcgccgtcaagatcgagaacggtaaaacgaagcatccacaattgctttacgaggccaagctctacaatattcttcaaggaggaagtggcatcccgaacataaaatggtgcggcgtagacggggaggataatgtgcttgttatggacttgctgggacctagtcttgaggatctttttgtctactgtggaagaaagttctccctcaaatctgtgttaatgttggccgatcaaatgatgactagaatagaatatgtgc

SEQ ID NO: 30156 - DNA, 400 bp, Glycine max
  Clone ID: LIB3051-015-Q1-E1-C4
agctttacagcacctccgttacctggtcgatacatatcatactggaggatgacaactccatctggacataaatttggccaacgtgtttgggtccttatacaggttgatgcatctctccaggactcattttatgatacctctcaaggtctgaacttgaatattccccttgatatcagtggctctaaaggacctcagattatagatatcaatgtccagcctactgaggaagatactgttcttcaaacccgcaatcctaatgctcccattgaacctgtgaatcaaatggttgataatgaaccaaggtttgagctggaaaatgaattccctataaatgaagctacatttgttggccctgctgcctcagcccctgctgcaacccctgtggcatcttcatcagttt

SEQ ID NO: 30157 - DNA, 386 bp, Glycine max
  Clone ID: LIB3051-015-Q1-E1-C6
agcaaggaggagacaacacaaagtgcaaaaaaaaacagaaattaaacactactagtagctagctagggtgagaaaatgggtgaagctaaggaaatatggtctgcaccaataacccctagaacagcttcagtagtaggaacacctgttgtggcatctccacctgtgtcatgtccaccctctcagcttcactcaccatctctaacaaggtcacctctacttcaccctgaggatggagatgcaccacgtcgtaaaacatctaagactccaaagactccaagaacccctagaacccctagaaccccacttagaatctctaatttgactccaaagttcatcacccctttgggaagccctatgagaaaagctctgaggttcaccaagcttga

SEQ ID NO: 30158 - DNA, 389 bp, Glycine max
  Clone ID: LIB3051-015-Q1-E1-D11
agaaaaaaaaaaacacaaaaaaaaaaaaaaaaaaaaaaacaaaaaaaaaaaaaaatacaaagtaaaaaaatcaaaacaaaaaaacaagctacaaatgcaacacaagtttgaaatcacaaaacaatgcataaaaaaaagggggggccccccaaaaggttccaaccttacttccccttgcatgcaatttcaaaccccttcaaaagtgtccccaattttcatttcacgggccttcgttttaaaccttcttaactggaaaacccctggctttccccactttaacccccttgcagcaaatccccctttctccatctggcttaaaaccaaaaaggccccccccgatgccctttcccaacatttgcacaccctgattggcaaatggaaccccccct

SEQ ID NO: 30159 - DNA, 387 bp, Glycine max
  Clone ID: LIB3051-015-Q1-E1-D8
agggagattcaaagcaacaaattgttttccttttctcttcaattcattttcctaagagaaaaaaacaaaccgaaatttcgagcaaaatgagagaaattgtttctgtcatggaaaactagttttttttttttttttgttagttcacttcggattctccgacaattcgccgatcttacattcgccggaatttcgcttcgtctggttaaaatcgcgacctctgaacagcaggctttcaaattgagtgctcatttatctgatcacgggtcttggattgctggttttttgtgtttgatccatctattttggcatggttcctaagatatggtattgcagaaaaggttagagtacggatttaatggctatcaggctccggccatgccgcgagct

SEQ ID NO: 30160 - DNA, 309 bp, Glycine max
  unsure (1)..(309): unsure at all n locations
  Clone ID: LIB3051-015-Q1-E1-D9
aagcacggattagtgctgtttatggtgggacatatatgttgaataagcctgagtgcaaagtagaatttgatgangaangaaaggttgttggtgtcacatcctaangggaaactgcaaagtgcaaaaaagttgtttgtgatccatcataattgccccgcaaggttaagaaagtttgtaaggttgccagaaccataaccataatgaatcaaccaatccccaacactgaagaatcccaatccgttccaattaatttaccacaaaaacactttggtccgaaatccaaccagttactaatttggtggtcaaaaa

SEQ ID NO: 30161 - DNA, 387 bp, Glycine max
  Clone ID: LIB3051-015-Q1-E1-E1
agggaaagtggggacaataataatcatggaagtgttgtgagggctgatcaagagaatggcactgcttcctctattgccactctgcttaatcaactccctcaaaccccttcattgcaccaacaatcaatgttggggtcaataggcgatggacttctaagaacaacataccaaataccaggaatgaattggtatgcttagaacaatttcaggtttttatttattgatgaacaaggagatattgaattactataagaaggctatacgatatgattctcagctggtggaaacttacactattagattgtaaagattttaatgggatattgagattttggttgttaggaatttggaagcagttgttagactttgatcaattagatgggcctc

SEQ ID NO: 30162 - DNA, 371 bp, Glycine max
  unsure (1)..(371): unsure at all n locations
  Clone ID: LIB3051-015-Q1-E1-E3
agtcccgacctcctttgttttcgacaaaccctccctccctctcaaactgtcacccctttccgtacgtccattcaaacatttcctctttcttatattcttctttttctctcttcactttcaaacacaaaccctaattcactttctaccaattcattcgcaaacaccttttccaatttccaacacacaccaaccatgggctacgaagacaatccgtatcgtgacgaggacggagagcccttgatggactacgacgacattcaatccgatcgcgagccatctcccgagcctcgccgccaggacgacgatttcgatgaggacgtcgacgagtggcgcggccgtgatcggtcgcagacgccggtctnatgacacga

SEQ ID NO: 30163 - DNA, 386 bp, Glycine max
  Clone ID: LIB3051-015-Q1-E1-F1
agggataccttgcagcccttgcttgatttcctccgagctcacaaatacaagggccatgctctgatgttaaatgatagaatacaaaccatttccaaacttcagtctgcattggccaaggctgaggattatctctctaagcttgcacatgatacactctattcagagtttgaatatgtattgcaaggaatgggttttgagagaggttggggtgatactgctgaacgggtattggaaatgatgcatctgctattggatattcttcaggctcctgatccttctacactagagacttttcttgggagagtaccaatggtattcaatgttgctatattatctcctcatggctactttggacaagccaatgtcttgggtttgcctgaaactgg

SEQ ID NO: 30164 - DNA, 337 bp, Glycine max
  unsure (1)..(337): unsure at all n locations
  Clone ID: LIB3051-015-Q1-E1-F11
agatttgaacgctatcttgtgggagaaatcctaactgttggtgctgaggctggagaactaaaggctggaacaaaggtactagtttaactaccgtgaaggaggtgaaatagaaatggaaaaatgacaaagagtactattcactgacatgaatgcttatgaggtggatttggggactgatgcaaaacactgcttctgtaaagcaagtgacttattggccgttgtggagtaaggttttggccattgaacgagacanaaagggagcaatcttttttgtgatatctttgataagtgtatttttagtagaataaaccattttttttcattggtgttaaaaatt

SEQ ID NO: 30165 - DNA, 386 bp, Glycine max
  Clone ID: LIB3051-015-Q1-E1-F5
aggctactctttacaaggccctagttacagatgccgacaacgtcatcccaaaggctcttgattccttcaagagtgttgaaaacgttgagggaaatggtggcccaggaaccatcaagaagatcactttccttgaggatggagaaaccaagtttgtgctgcacaaaatagaaagcattgatgaggcgaacttgggatacagctacagcgtggttgggggtgctgcattgccagacacggcggagaagatcacattcgactccaaattggttgctggtcccaatggagggtctgctgggaagctcactgtcaaatacgaaacaaaaggagatgctgagcccaaccaagacgaactcaaaactggaaaagccaatgctgatgctctcttc

SEQ ID NO: 30166 - DNA, 387 bp, Glycine max
  Clone ID: LIB3051-015-Q1-E1-G1
agaacaaaaatttacattaagcatagtacaaaacaatgaagaccaaactgctagcatttctcctcttctttgccttgactacaaaaccactactacttggagcagctggagctgctccagagccagtgattgatacatcaggcaagaagctgagagctgatgcaaattaccatatcatccctgcagtgcccttcaccatatgtggctttgttggctgtttcactggtggaggcctttcactagacagcatagatgaatcttgccctcttgatataataatcgagaaagccaatgaaggcctaccactgagattctcaccagttaacaccaaaaaaggtgttattcgtgtctccaccgatttgaacatttttttctctgattctgatg

SEQ ID NO: 30167 - DNA, 385 bp, Glycine max
  Clone ID: LIB3051-015-Q1-E1-G8
acgcccacgcgtccggcaaaacgcaaacactctcctcaaaacgacaaccgccacaaaacaacacaaccaccgcccctcaccgccttcatcttctctctctctctttaggtatcatcatatccatcacaacattcatcatcaaaaaatgtttcttgttatttttcttgttattaattattaattataatcatttacctgttttaaattcccatgatgaagcttgaaaagacgaaaacttaaacctttttgttacgaaaaaaacagggtcgatggctgaattcggaaacaacaacaacaacggcgccaacacgacgtcgtcgaggttctccttcttcaaccgttccctcacgacgctccgcaacgaaaaacgccgcagctggaccgt

SEQ ID NO: 30168 - DNA, 377 bp, Glycine max
  Clone ID: LIB3051-015-Q1-E1-H11
attcactatcagcgcaattcaccgtttggattctccagccggcatgggcaacgcaagagcatgttcatccaaacgcagcccacgccaaatccctcgtctctcatgttttatcccggcaagcccgtcatggaagttggaagctccgacttcccaaaccctcgttctgcaatgaactctcccctcgccaaatcgctcttcgcaatcgacggcgttactcgcgttttctttggatctgatttcgttaccgttacgaaatcggaagaagctgccttggaattcctcaagcctgaagtcctcgccggcattatgggattccactcctccgctcagcctctccttttagattctcaagcccgcggcggcatggatacagctat

SEQ ID NO: 30169 - DNA, 374 bp, Glycine max
  Clone ID: LIB3051-015-Q1-E1-H6
cccacgcgtccgatttatttatttttattcctagatgttttgaaaagccggttttggagttttccccttccgatgtttcttcaggtatgggagcggtgtatggcatcactaagagcagcgtcggggttgcgtcgatgggtcacgccggagctggattgattttgtgcttggtatcctgcaccttccttgcagttaggcttttacagttttcccctttcccattcatcaattcttttattgaatatgtttgcacaatagttaacaataccaaatagtggcattgagtgacttatcccaaaattgatacagtgggtaatggacacatgaatgagaactgaatgagaatttagttgtttcgaatatgtttgcacaat

SEQ ID NO: 30170 - DNA, 314 bp, Glycine max
  Clone ID: LIB3051-015-Q1-E1-H8
gtaaaatgctctcacacaatttgctcaccgttacgcttcttccagtctccatgtcaagctccacctcatttaactattgctactgatgacgttcaggtttactatagcaggtacgctaccaggcttactactaccaggccactatcgatgcttggccatggaatcaccgacatggagattcacttcctcgacgtgaaattccattcagtcggagcttagatgggttcacacttagtatgtcacttggtctagttcacaggagtatctgttaccgcgctggcagatgctgaatagttcttcactgctctcatttc

SEQ ID NO: 30171 - DNA, 155 bp, Glycine max
  Clone ID: LIB3051-016-Q1-E1-A12
agcccacgcgtccgaaaaaaaaaaaaaaaaaaaaaaaaaaaaaaaaaaaaaaaaaaaaaaaaaaaaaaaaaaaaaaaaaaaaaaaaaaaaaaaaaaaaaataaaaaatcaaaaaaaaaaataaaaaaaataaaaatcaaaaaaagaaattcttac

SEQ ID NO: 30172 - DNA, 426 bp, Glycine max
  Clone ID: LIB3051-016-Q1-E1-A7
agctgtggttatcatcttcttcttcctctttcttagatctcttctttctctacgccgcacgccgaaaccatggccggaaaaggagagggtcctgctatcggaatcgatctcggaaccacctactcttgcgtcggtgtgtggcaacatgaccgcgttgaaatcatcgccaacgaccaagggaacagaaccacgccgtcttacgtcggattcactgacaccgagcgtctcatcggtgatgcggccaagaatcaagtcgccatgaaccccatcaacaccgtcttcgatgccaagaggttgattggtcgtagattcagtgattcctctgttcagagtgatatcaaattgtggcctttcaaggtcattcctggtgctgctgacaagccaatgatcgtggttaactacaagggtgaagagaagcattttgcc

SEQ ID NO: 30173 - DNA, 414 bp, Glycine max
  Clone ID: LIB3051-016-Q1-E1-B12
aggaaaaccttaaggggaaaccggtacttttgaagtatgtcaaattccaaaatgttcgtagcttgacaatttttattgaggacaatcagtcaggttcagagatcacaaaagttcagaagatcgtgctgcatggtacaacagttgaaacaacagacatgaagggtctgaagaagattgaggatcattaacccctggaaagaggagattcaactttgctcctaatccctccttagaaattttgattggaattgtaatgttaacttggtgaatgatggtttatgacttctaatgtctatctgatttcaaataaaacagatgcacaatatatctacatggttgtgacaatttgtgattggaggtaacattcaagctgtatggttatctattgtgtccttttacatgttttgaaacatg

SEQ ID NO: 30174 - DNA, 399 bp, Glycine max
  Clone ID: LIB3051-016-Q1-E1-B7
agatcacacatcagcacatccatcagacaaatcttctacctaggatcagggattacaacccaatcgtgttgccgagtacgttccagacgttatcagtagggtcattagcattgtgaccgatcacctcagtgcctacaccataggtaatgacaacgacatacactacatctacaacaacataatcaatcatgccgagtatcgctgtgcacggaagacattcgacacacgatacgctttccaaaaagctcacacatcgcagtagtagtttggtatgcctgatgctcatgataatgcgcagcttaacgtgtcatctacatacgcacagatcatccctgaaagtagaacagtgtgcgacacatcacagattaccagttcagcagacgactactgtcacgagag

SEQ ID NO: 30175 - DNA, 395 bp, Glycine max
  unsure (1)..(395): unsure at all n locations
  Clone ID: LIB3051-016-Q1-E1-C11
agattttgtttcagacaaagttttgttgcaaagcaaaaaactacgaggagctttcctccatacgaatccaaggaggagagaggagacacagacacaaaggaaacggaaaaagcaacacacacaaaaaaggtctgtgcctcctcttatatgtaatagatagtttctgaaacaaaagaaacaaataaaataaaaataaaaggaccacatggattatgaaaacaacagttggatttgggacggggtaaactactacccgcgtgtgtttggtggtctaatggttacagcagccttgctgggcttgtcaaccagctactttggtgggattggggtttcatatntgtcactgccatgttcctggtctaatttggggatttttcacaagaagaaatcgggga

SEQ ID NO: 30176 - DNA, 243 bp, Glycine max
  Clone ID: LIB3051-016-Q1-E1-C2
cccacgcgtccgcccacgcgtccgctgggtcacactgcattccgcacggggtgagagtgtggaccggaacacgattgtgtttgttcatcgtttatcaatgatcatcagacggggaatttacatcttggagagaacgacaagtaagacgcactcacgcaaccttcgctgtcaccgggtgtactttcacacccatctattctgattccacattgagcggatctcacagattagactcttcttcta

SEQ ID NO: 30177 - DNA, 415 bp, Glycine max
  Clone ID: LIB3051-016-Q1-E1-C4
agatatttaataataaatttaaatatgcttttgatttgtaatgaattaacatattttgttttaaatttttaataatttcttttctttgcttcgagtttcaaaataaaacaaaagaaaattgactttggtcattgttatttttagtttagacaatttactgtatatatttttgtttttgtcactagaatatttaggtcatttgttattagtttctatcaaatacttttttaaaaaaattaattaataattaattaaatattataaggattataatataacatagatatattacaaggattaaaacacaataacatatattaaaaacataattttatttaataaaaatctcaatatatagaaaaattataaaaaatgtaaaataaaattcattaattaacaatgaaacaaaacatat

SEQ ID NO: 30178 - DNA, 421 bp, Glycine max
  Clone ID: LIB3051-016-Q1-E1-C8
agcccacgcgtccgcccacgcgtccgcccacgcgtccggcagtttattctatcatatccttgttcatataattttcttttcaattagaataccccaatcccagaaacttatgtccatgaccatcctcaaggtcgcaataacatttgcttgaagacaattttgagttgaccttacagcctagttccacctatataaacacccttgatccttcaaagcctctcatagctccaatactggcaacaataatactcttgggcatctgaactatctccattcgttatttcaccctttctttgcagtggatttgcgatgttttaaagaaattacatgcatctttatgtgctacagagctacgtaattataaaattcatctcacacatacttcattttactacctttcatcctttagatttgactcatg

SEQ ID NO: 30179 - DNA, 338 bp, Glycine max
  unsure (1)..(338): unsure at all n locations
  Clone ID: LIB3051-016-Q1-E1-D1
aggggcgaactgctgaggagaagcttaaacgcagtttatttggtgatgatgaaggagctccacttgaagacattgctgaagaggaagagcaaggagaagaggaagaagatgcagacattggagaagatgatgaaatggccgacttcattgtggatgaagaagaagttgatgagaatggggctcctatgangcagaagaagctgaagagaaagaaaactaggcaggctcctggagtctcttcttcagctctacaagaagctcaagaattatttggtgattcagatgagttgattctgaatcgccagaaaaatctagaaatgagtgaatttagagagact

SEQ ID NO: 30180 - DNA, 394 bp, Glycine max
  unsure (1)..(394): unsure at all n locations
  Clone ID: LIB3051-016-Q1-E1-D11
agctgaacatggatctctttaggaagtgtatggagccggtggagaaatgtttgagggatgctaaaatggacaaaagaagtgttgatgatgttgtccttgttggtggttctaccagaattcccaaggttcaacaactgctgcaggacttctttaatggaaaggagctgtgcaagagcatcaatcctgatgaagctgttgcatatggtgctgctgttcaggctgcaattttaagtggtgagggcaatgagaaggttcaggatcttctcctccttgatgtcacccctctatctcttggtttggagactgctggcggtgtgatgactgtcttgatccctangaacactacaattccaaccaagaaggaacaggttttctcaacatactctgacaacca

SEQ ID NO: 30181 - DNA, 415 bp, Glycine max
  Clone ID: LIB3051-016-Q1-E1-D12
aggaaaaaatacaaagaaaatgacataaaacagaaaggaaatacaggagaataattatttattctgggatagaatgtggcatgccatttattttgcttcttttttaaaataaaaaatattctgtggctcttgtacggtagtgcgcgtcctttctttcttttactttttagacttctggctggaaaagctatagacagagggttggcaagctgtggatgggtttacacgcgtcagcggaagcttgtttcacagcgaatagtgtgggttcaaaagttctgttacgagaactcaaaagttcaaactcctaagtatttattatttaaacacaataaaagttcctaaaaattaatgatattttttttagtagaaatcacgaaaataaagttatactacaatgtactaattaataatattt

SEQ ID NO: 30182 - DNA, 375 bp, Glycine max
  Clone ID: LIB3051-016-Q1-E1-D2
cccacgagtccgcccacgcgtccggggaccgatcaggtcaaagaatgagcttcagaatctgcctcctgttcctcccgtagatgcgattttggaaccacaccatcaaacggtgccagttggaattgttatgtcgactcttggtgctcaagtcatcgtggaaggagtggagaagcatgaccctcttaatgagggttctattctttggttgactgaaagccaaaaaccactaggtttaattgatgaaatttttggaccagtcaagaacccttattatgttgtgagatacaattctgaaagtgaagtccccacggggatcaatgagggaaccttgatctcctttgttcaagaatttgctgatcacgtgattaataacaa

SEQ ID NO: 30183 - DNA, 418 bp, Glycine max
  Clone ID: LIB3051-016-Q1-E1-D6
aggataattctatcttccagagagccatagacctttacaagaagcatagcatgaacctacttaacaagggggaggtagatgatattgcggtatccaaccagatgcaagtggatgagtcatttcctattcctagtttggagaatgggcatgtttttgtctcagcatccaatgggataaaagatgtgccaatgcctacattagaatcaggcaaagtggaaactacatctcctgcaaaggagcaattggaagagatcaatcaaacctacggccaaatggaggaagatcataacaagactggcctgtctagaccatcttctggttgtgcgaaccaagaagcagctgtagcaggtttgcaagagaaagagcccaaaatcacttctgataaggtgaattcaggggatgcaaaggaggattacac

SEQ ID NO: 30184 - DNA, 419 bp, Glycine max
  Clone ID: LIB3051-016-Q1-E1-D7
agattttgacgaaattttcgggattaaagaactggcgttaaaaaatgccgcccagtgcttcaaaatgcgaaaacaatgaagcagcatttttcagaaggtgttcgacctttaacgccgtggcaaactgtatataaactgcaccttttttcgtccattttcttaccataaatattcaattcaatgcttcatcctcatctattgcctattgcattcgtacctccctttgttttcgctattgctgtgtctctcgaggattgtctcaattgagttggtgctgaatccgaggtttattttagctggtgtggaatcatttcaacattatctggaagaagactttcagatttttagtcaaatttaatacttaaagatggggttatacgagcatccagatgttgtgcagtggggtattaatctttttg

SEQ ID NO: 30185 - DNA, 331 bp, Glycine max
  Clone ID: LIB3051-016-Q1-E1-D8
agccgatctgcatcttcacttcttactgcttattcttcttctttccgattcccatttattccttctttcttctcgatttcgtatatttgtattttctcctcttttttcttcccgcgaagaataaaaaaaacactggagaaatagatcgtgttgtgtgttgtattttagtgaaattgattgtgaagtgatggaatctatatttgaatgtttttattctaaaatcaaattaatgataaaattgagtagtgttatttatttacggcaaaaatactcaattgctcaaactcaaatcaattttggatctagaatcaattatgtagtattatgaata

SEQ ID NO: 30186 - DNA, 327 bp, Glycine max
  Clone ID: LIB3051-016-Q1-E1-E11
agcccacgcgtccgcccacgcgtccggcaccctcctctgttttgaaacagagaacaaagaaccatcgccatgcttgatccgagaacacaccaccccaccaattctttcgaattgtacgacgcaacacgacacaaaccccacacatgggatgttacgaactccggtttgtggccttcgaaaccggctttggaggaggcagaggtagatgattccgggatttgttcacctcccatgaggaccacgagccccccacgccgaaaaaacaaccaccgaagcctctcgccaacgtcgaggacgcaagccaatagtgagaaggcagaaggagct

SEQ ID NO: 30187 - DNA, 321 bp, Glycine max
  Clone ID: LIB3051-016-Q1-E1-E6
aggtccgtcgccatcatcgattcccatcggccttagccagtctaaggtttcggttcacgacgctatcgtacacatagcgagacgatggatttacgatcaaggccgagtcatcaggttggtcgaacctttcgtcttagtgcatcacgttatatgtctgacatagacgatcagatgcctactgccatcgatccatttgcagatgcaaatgccgatcactcgggtactgggtcacacgactatgtgcatattcatgtacagctgcgctgtggtaggatgagcctgacaaccgttcacggattgacataagaagtcagctcttat

SEQ ID NO: 30188 - DNA, 413 bp, Glycine max
  Clone ID: LIB3051-016-Q1-E1-F10
aggggtgttgtcagtagatgagatatcggagcaatactgggtggctgcatcatcttcttcatcatcatcatcatcatcgttcaagtcaaagatgaaccggagcgaatccgaatgggcctttcagcagttcctacagcaggaagctgcttcttcttcatctaattctgatcatgatgatgatcatcatcatgctaaactcaaaaaggaatccaacaccaacatccctgttactctacatgttgattcccaagactaccatgctattcttaagaccaagcttaatctcgcatgcgctgctgttgctatgactcggggatctttggtcaaatctcaaaaccctgacagtggaccacaggcatctaatttttctgaagttggatcgcatgctaccttaaaaggatctggcccttttg

SEQ ID NO: 30189 - DNA, 252 bp, Glycine max
  Clone ID: LIB3051-016-Q1-E1-F3
tgtagatgtgtgcccctggagaagttgtaatgaattccataagtaggaccagctcactggtaccttcacttccttttcattttgattgctgcagttccatatgatgacaacttagttgatgcctgtgttaattatttcacccaacccccataaaggaaatagaaatcgtgtaaccctagtttcagttaaattgtagtttgattgtcgtcttcaaaaccatcaagtgaatgggtatctcaaggatttcaagat

SEQ ID NO: 30190 - DNA, 423 bp, Glycine max
  Clone ID: LIB3051-016-Q1-E1-F5
agcccacgcgtccgggtctagtgagtgatgaggaaatcgtggcaaataaaggaccacctgttttgtccatggaggagaggctggcccttgtcagtggattgaagtgggtggatgaggtcataactgatgctccttatgcaattaccgagcaattcttgaatcgtctctttcatgaatataaaattgattatgtcatacatggtgatgatccttgcttgcttccagacggaactgatgcatatgctgcagcaaagaaagctggtcgttacaagcaaattaaacgtactgaaggagtttccagtacagacatcgtaggaagaatactgtcttctttaagagatcaaaaaaattgtgaagatcataatggcaccgaggtaaaacctcaagaagaaaaccagtcaaaggcttcccacatagcccaat

SEQ ID NO: 30191 - DNA, 419 bp, Glycine max
  Clone ID: LIB3051-016-Q1-E1-F7
agaaaaaaatcaaaaaaaaaaaaaaaaaaaaaaaaaaaaaaaaaaaaaaaaaaaaaaaaaaaaaaaaaaaaaaaaaaaaaaaaaaaaaaaaaaaaaaaaaaaaaaaaaaaaaaaaaaaaccaaattcccggggggccccccaaaaggttcaaacctaacttacccttccaggcaagttcaaacccctccaaaagggcccccaaatttcaatccacggcccttcgtttaaaaacttcgtaacgggaaaaccccggggttaaccaaactaaacccccttgcacaaaacccccttttcccaaccgggcttaaaaccaaaaaggcccgaaccattcccccttccaaaaattgccccaccctaaaggccaaatggaaccccccttgtacggcccataaaccccgcgggttttggggttaacccc

SEQ ID NO: 30192 - DNA, 384 bp, Glycine max
  unsure (1)..(384): unsure at all n locations
  Clone ID: LIB3051-016-Q1-E1-F8
agattgtcaattgtttcatcatccattattttttccgatttgcttatgatgttgttgttttctgttgagatcttctcacttcaaagttgaaacctttctgtgcgcaacaattagaatccctcagcccctcgtctaacgcatactctgttatctaaatttgcattcttttacccaacaaaaccaacccaaaaattataacaaaacataacctctcagaaaaccaccttaaaccggaaaaaaccactatttccccacaattttcgccggaaacccgctattgtgccttgtccctccatacccacgtcaccgaaaccggttttccgatacccaaaagcctcttttctggccccaagtcatttttaatccgtcnttgacgggtttttt

SEQ ID NO: 30193 - DNA, 389 bp, Glycine max
  Clone ID: LIB3051-016-Q1-E1-G5
aacgcactcgactttggcatttagctagggcattggagaaggcaccgctgttggcggagagcgagtacgactacaaggtggagttcagggcgtacttcgacgactcgtgggacgcgacgcgcgtttcgctgcacggagaaccactgggagtgacatacttcatcttctccgacgactacgacaacgcgtttcaagcctcctagtttgcggacgtgtttgagcatcaggagtttggggaagacttcagagacctctccaaacacgttcacgacaacgattgtgatacacactctgatgctgtctcggtcggcgcgtgtcactgtctctgtcaatgatgatcttcactacgatgaccctgtcgtcgacggggtgcaccatggaatgcatta

SEQ ID NO: 30194 - DNA, 348 bp, Glycine max
  Clone ID: LIB3051-016-Q1-E1-G6
agctgacttctttaaggagtatctgattgacaacagccttgatgatcttatttcaattctaaaacggggaaaagtagaggaggatcttttggacattttcccccctacaaaaagatccattgaagctttctctgagcatttcaccaaggaaggattggtggccttggtggagtataatgaaaagaaaatttttgaggtgaaacttaaggaaatgaagtcttctttaacagcacagataacagaggaggctgatacatctgaagtcattgagactgtgaagctgcgagttagagatgctaaattgccggaaattgaggtggtgcggatcttgtgggatgttttaatgga

SEQ ID NO: 30195 - DNA, 378 bp, Glycine max
  unsure (1)..(378): unsure at all n locations
  Clone ID: LIB3051-016-Q1-E1-G7
agggaaaacgtgtggggcttcacactgtgctggttggtacatcacaaagatgtaaaggagcagattatgccttggaaagcattcacaaccttagggaggctgtgcctgaactatgggaggctgatataaaatcagaagttgcataccctggaaagctagctgtggagacatctgtcactgcttgagattattattaagtgcatgaaattaattaagtcccttcaaaattgttcatttaatcaaaattgaaaatccaaccaccaacaacaaaaaaaaaaacgaacaaaagagagaagaagcccacgggaattcccccaacttcagatgtagtagttgtagttgatgtagatgctttgtaagattgcaatanaatagtca

SEQ ID NO: 30196 - DNA, 322 bp, Glycine max
  Clone ID: LIB3051-016-Q1-E1-G8
agcccacgcgtccgcgcagtgctagcaggagtccaagtaggagcaggagcaggagcaagagtttgtctcggtaagctctgattgttgcaattgaagaagttgtggatgatggtgagtgctaccaagtttttctagtaaaattgacattagccaaaaaaggcatttgggttttatatttgatcttctttttaattgaacttgagacttctgacctattggcgtcttagttttaatattgaggatttgaaggaccctagatttctgtaatagactgttaaatgtcaaaaacatgtgctatttggttaattatgccagtttattt

SEQ ID NO: 30197 - DNA, 415 bp, Glycine max
  Clone ID: LIB3051-016-Q1-E1-H1
aacccacgagtccggggcagtagccgagattccgtgagttgcaaaaatgaagacgattctttccaccgagaccatgaacatcccggacggcgtgagcatcaaagttcatgccaaggtcatcgaagttgagggcccccgcggaaaattggtgcgagacttcaagcatttgaatctcgattttcagctcattactgacgaaaacggtaaaagaaagctgaaaatcgacgcgtggtttggttctcggaaaacatccgccgccattcgcaccgccttgagccacgtggagaatcttatcaccggcgtcaccaagggctaccgctacaaaatgaggttcgtttatgcccattttcccatcaacgcaagcatcggcaacagcaacaagtctattgagattcgaaaattccttggcgagaag

SEQ ID NO: 30198 - DNA, 379 bp, Glycine max
  Clone ID: LIB3051-016-Q1-E1-H11
aggaaccctcaacgactgcgacggccaactcatttgcatcaacggaaggtgcaacgacgaccgcgacgtcggaacccacatctgcggcggcggaatgccgccaaatccgccaccaagcggcggaagctgccagtcctcgggaaccctaaattgcggcggaaaatcgtatcctcagtaccgttgctctccgccggtaacttcctcgacgccggcgatcctgacgctgaacgacttcagcgaaggcggcgacggaggggacccgtcgcagtgcgacgagaagttccataacaacacggagcgtgtggtggcactctccacggggtggttcaacggcagttcgctgtgtttgaaaatgataaggatcacggccgggaacggg

SEQ ID NO: 30199 - DNA, 389 bp, Glycine max
  unsure (1)..(389): unsure at all n locations
  Clone ID: LIB3051-017-Q1-E1-A10
aggcaaggagtacgaggtggagtgcgggcgacggtaacttaccaacgctaatgagttgttgagtttggtacatgggcggagaagtgttgacgatggcggacgtcacggccaacttgcaagcagcaaccaccgcatccaccccttacgcgcttcccaccagtctccctctcctctccgcttttctctccttcgctctcgctcagttcctcaagatcttcacctcctggtataaggagacgagatgggattctaaaaggttgcttgattcgggtggaatgccttcgtcacattctgcaacggtctcggctctggctgttgctatatgtcgccaagaatgggcagggtcacctgcctttgcgactgcaatggtcctggcatgtantgtgaag

SEQ ID NO: 30200 - DNA, 386 bp, Glycine max
  Clone ID: LIB3051-017-Q1-E1-A6
atcaggctcttgctagttgaagggtgtccatgtggttcctttggaagagagtggtatctcagaggaatctgtggaaaatggaactgaaagtgtttctgcacaagaggaagacactgagcagtattttagctttctgaaagtcttgactgaggtgaacaattggaggaagcaatgtgaagtagtagaacagttaaggctgctgctgagggatgacgaggaagccaggatttttatgggggcaaatgggtttgttgaagcacttttgcagtttttgcaatcagctgtgcgtgaaggtagtttgatggctctggaaagtggagcaatggctctcttcaacctggctgtgaataataacagagataaggaaattatgttatcggctggag

SEQ ID NO: 30201 - DNA, 352 bp, Glycine max
  Clone ID: LIB3051-017-Q1-E1-B1
aggcaaatcgttctaagagaggtgatgatgaaaaagaaactctttcaccatcaccatttccctctacactatcaccagttcttgagcctttctcatcatccgagagtccctcagattcaccaatatcatctccagaaatttcccattcaccatctccatctctctccactttctttttcattctctcaccctcaccttcacctgaggtagcaccaactccagacttatcacctccagcaaatccaccaatggttgtgttcacaccaccacagtccaattggggttcaatgccttctcctgcttcatcttcaaaccaagggaatgcatacagttcaaattacaagcaacatac

SEQ ID NO: 30202 - DNA, 345 bp, Glycine max
  Clone ID: LIB3051-017-Q1-E1-B12
agcccacgcgtccgcattttcagaggaacaatggcgggtagggtttcgacgtgcttcatcttcgtgtttgctctttcactccttcttccttttcagatctccgctgaggaatcatcggagatagagttcgtattcacattggatcattctaactttcatgacactgtcaggatgcacgatttcatcgtcgtcgagttctacgcaccatggtgtggccactgtaagaagcttgctcccgagtatgagaaagctgcttctatcttgagtagtcatgatcctccggttgttttggctaaaattgatgccaatgaggagacgaacagtgagcttgcatctcaatatgat

SEQ ID NO: 30203 - DNA, 364 bp, Glycine max
  unsure (1)..(364): unsure at all n locations
  Clone ID: LIB3051-017-Q1-E1-B2
aggaaaaccttccatagatagcctcccataaaaatgaagagtactacctctttggctctctttctacgttgtgcccgaatttcatcatatcagccttcagccgtcgctgatattgtactcgataccgagtgcaatccgattcgaaacagcggcacatactatgtgttgccagttatgagaagaaagggcggctgaatacagtttgcgaaaaccgaaacagacacatgccctctcactgttgtgcaatctccctttgaggtctcaaanggtctaccactgatgatttcatccccagttaagatccttgacatcaccgatggacttattttgagcctcagtttcacttatgtactcacctgtgcct

SEQ ID NO: 30204 - DNA, 362 bp, Glycine max
  Clone ID: LIB3051-017-Q1-E1-B3
agggagatgcggcgaagaaccaggtcgctatgaacccaaccaacaccgtttttgatgctaagcgtttgattggaaggcgtttttccgatgcatcagtacaaggtgacatgaaattgtggccgttcaaggtgattcctggccctgctgagaaacctatgattgtggtgaactacaagggggaggagaaacagttttccgcggaagagatatcctccatggttcttatgaagaataaagagattgccgaaggctatccaaggtccaacaataagaatgccgttgtcactgtgcctgcttacttcaacgactcacaacgtcaagccaccaaggacgctggtgtcatttctgggctcaacgtgatg

SEQ ID NO: 30205 - DNA, 331 bp, Glycine max
  Clone ID: LIB3051-017-Q1-E1-B4
agcaacgcgtccgccttgcgggagagggcaagaaaattagatcagggtatcctgattataaggtttgagatgccctttaatatatggtgtggaggatgcaattcaatgattgcaaagggtgtccggttcaatgcagagaaaaaacaagttgggaattattactcaacgaagatatggagtttcgctatgaaatctgcctgctgtaaacatgagattgtcattcagactaatcctaagaattgcgagtatgtcattattagcggggcccagaaaaaaactgaagattttgatattgaagatgccgaaacttttgaattgcctgctgatgaag

SEQ ID NO: 30206 - DNA, 84 bp, Glycine max
  Clone ID: LIB3051-017-Q1-E1-B6
atcaggatgatctacagaagattgcacggataagtattcgcttcgagctgtcgagtcaggaagttactcggtagctgaaagaca

SEQ ID NO: 30207 - DNA, 416 bp, Glycine max
  Clone ID: LIB3051-017-Q1-E1-C11
agctcaacttcttcttccgttcctccctttcgctctattaaggatctctatctctatctctccgatcgtcccaccatcatcgatcaaggtataaagagttttcaattggagaagcggactgggaacaagtgttacatgctttccgctagagatctgagcattatatggggtgacactactcattattgggagtggacaaccctaccagagtccaggttcgaagaagttgctaggcttcgagctgtgtgttggtttgacattactgggaggatgaacacccgcgttttgtcgccaaatactaattatgcagcttttcttgtgttcaagatgatcgatgccggtggatttcactacgatcctgcggtgttatcagtaggtattttgggaggcaatagcagtaccaaaaatgtttgttt

SEQ ID NO: 30208 - DNA, 415 bp, Glycine max
  Clone ID: LIB3051-017-Q1-E1-C12
agcccaagcgtccggaacttcttgttgacagtgtcccacgtgatctcactatggtccttcataaactgtttatccaaaagccggtccttcttgctaagcttttggtcccaatgaccatcaccagcatcttgcttttcattgtcatactgagaggcttcagaatcagattttgcttccggaagctgctccggctcaatatcatcactctcatactcgtcctcgctctcctcctcttccttttcctcctcactctcatgattctccctgcatttggtaatcaactcctcatactgcttattattcttcttcaacttctgcttcatggagttcaaggccttggcattgctactactcatcttcttcttggcatccttattagccatagcctgaaccaagaaatcgtccagcatcacaa

SEQ ID NO: 30209 - DNA, 356 bp, Glycine max
  Clone ID: LIB3051-017-Q1-E1-C4
agccacacgcgtccggtgttctataagttcacggtcagttctgaaaaatgggttccaaggttttgcttgttgtagttatgttcatagcggctatacttctgatctctgctgaggttgcacccaatgaatacgaaaattttaacaaaaaagatgggaagcatgctccaaatgggttatatgatagcaaatggggttacggtggttggggtggtccttggtatggcggctggggtggcccttattatggtggcggctggggtggcccttattatggcggtggttggggcggtccctggcgtggtggtggcggtggtggctggggaaggttgcgtcgacctaatggcaaccctcacaac

SEQ ID NO: 30210 - DNA, 390 bp, Glycine max
  Clone ID: LIB3051-017-Q1-E1-C7
atcaggttccctaagtcttcgtattgctccatagtctagtcgtctctgaagactgaagctctcacaaaaaaaaacaaaaaaggcttaccttagcgtgttatttgtttgacccggtgaatatctttctcttatgtgtgttctcatcacaattcatgaaacacgctctcttttttcccatcatcattatttctttgtgattctctctctctacactatccttgctctagtcttccttttctatgccttgccctttcttcgggcaaagttgtgtttccattttgtttccgagttgacttgctcaatatcccaggataagtgtgtgttcttatgaaggttgcagtgctatggagtctatagatttcatgctgcagcttcattagataccaattt

SEQ ID NO: 30211 - DNA, 423 bp, Glycine max
  Clone ID: LIB3051-017-Q1-E1-C9
agcccaagcgtccgattgaaacagaaaatttgaagagtttgtttattgtgaaaaaaagaaaaatgcaggcagcaaagaaagccatagagacctttaaggaaaccgcagccaacattggcgcctctgccaagtctggcttggagaaaaccaaggccactatccaagagaagaatgagaagatgaatgcagaagatcaaactcaaatggatatggctaccaagaggaaagaagagaagatcaaccaggctgagatggagaagcagcaggcccgtaagtactacgccgctgcaaaacaatacgccatggctgagcacatggcaaagggcaaccacgacaccgccgggcctagaatcgagactgccacacacatcaccagtgggcccgggactgacaatgctatgtactctaacactgggcctggga

SEQ ID NO: 30212 - DNA, 385 bp, Glycine max
  unsure (1)..(385): unsure at all n locations
  Clone ID: LIB3051-017-Q1-E1-D3
aggaaatgcatatgctaatagcacaggtttcaggggcggcagagatatgcatgggtgcctgttgtttggtacttctaatgatcctccgaagttgatttttactactggtgggaagcagcttaataggaatctgagtatatatcaggcaattcagagacagcttgtgctagattaagatgatgatgagagatttgctggcagtgactatgtatctggtgatggaagcagtctgtgaggtgatatttacaccatcacttatcagagggcagataaccagccagataaggcgtctactggaggatcaagttcaaatacgtcatcatctgccaaatctgggtcggccttanattcaagctcagaagctaaattgcatcagacatctgtt

SEQ ID NO: 30213 - DNA, 377 bp, Glycine max
  Clone ID: LIB3051-017-Q1-E1-D4
agcaacgcgtccgaagaaaatcctcaattttctgagcagccaaacactctctctctgtctctcgaagattctcagtttgcagagaaaatctgaatcatgtcgtggcaagcgtatgtcgacgatcaccttctgtgtgacatcgaaggtaaccacctcactcacgctgctatcatcggccaagacggcagcgtttgggctcagagtaccgacttccctcagttcaaacctgaggagataactgccatcatgaatgacgttaatgaacctggattaacttgcccaactggaatggaaccccgggggcacaaataaaaggtcatccacgggtgaaccggtgctgtcattcgatggaagaagggtcctggtggtgttactgt

SEQ ID NO: 30214 - DNA, 404 bp, Glycine max
  Clone ID: LIB3051-017-Q1-E1-D8
aatcaggcaacacgtatctccttctcaaactagtattattattcttccattccgttctacatataatcattcataatgggtgttttcacattcgaggatgaaatcaactcccctgtggctcctgctactctttacaatgccctagttacagatgccgacaacgtcatcccaaacgctcttgattccttcaagagtgttgaaaacgttgagggaaatggtggcccaggaaccatcaagaatatcactttccttgaggatggagaaaccaagtttgtgctgcataaaatagaaagcattgatgacgctaacttgggatacagctacagcgtggttgggggtgctgcattgccagacacggcggagaagatcacattcgactccaaattggttgctggtcccaattg

SEQ ID NO: 30215 - DNA, 415 bp, Glycine max
  Clone ID: LIB3051-017-Q1-E1-D9
agcccaagcgtccgcccacgcgtccgaaagaagccgccgccacggaaaatccaccggagaagaaggttgaagagaagaaacctgaagagaaaaaaccagaagaaaaacctaaagagagtatggtggttttgaagattaaactgcactgtgacggttgcattgcgaaaattcgaagaatcattatgaggttcaaaggtgtacaatcggtgagccttgacggaagcaaggacttggtgacagtgaagggaacaatggacgtgaaggagatggtgtcgtacctgaacgagaagctgaagcgaaacgtggaagtggtgcctcctccgaagaaagacgacgataagaaagagaaagaacgtgacggtggcgaaaagaaagagaaagagaaagacggtgccggtgagaagaaagagaaaga

SEQ ID NO: 30216 - DNA, 414 bp, Glycine max
  Clone ID: LIB3051-017-Q1-E1-E10
agcttagcgtttctcctcagcctcgtaaaaccaaacagattttactctctcaaatggagattcccattcactgtctccctcttcctcctccgacggcgtcggcttcgagacggatgagccgcggacgccgttggccgtgcgccgcgcgctgcagctcctcaactccggcgatcccgacctgcgcctccaagctgctcgcgacatccggcgcctcacgatgacgtcacaacgttgtcggcgccagttatcccaggctgtcggtccactcgtttccatgctccgagtcgactcgcccgagtcacacgagcccgctctcctcgccttgctcaacctcgccgtcaaagacgactcgaattagatcaatattgtggaggccggtgcattagaaccgataattagtttccttaagtctca

SEQ ID NO: 30217 - DNA, 314 bp, Glycine max
  Clone ID: LIB3051-017-Q1-E1-E3
agcaaaaacatcctggtatagtccctacagaagttcaccatcgtggttgtcaatctcaacagatgaaatgctaccatggaccttttctcggcaattttctgcttcaagtactcaaaactttcatcaaaatctgtggggaaataattgcactacgccatttgtgaatcattcagcagaagttcgctttccttctaatcatcagacttcttctctaggtcccatgcagacgactcctctttcacgagtatcacatggtcatcctcaacatgtatcggttacacactctagcataaatagtgataacagatacataa

SEQ ID NO: 30218 - DNA, 373 bp, Glycine max
  Clone ID: LIB3051-017-Q1-E1-E6
atcagctcagccttacgtttccgtaataaatctttcaaaatcgataaccgtttctcgttttgtttttggaccttatctttattcttaggttcgattctgcgtacgttgggaggaggaacagacatacatgaaggattctaattcgaattcggatctgtttgacccggtcatggctatggagtccgagtggtctcgcggcggcggcggcacctccgacgccgatttcgccttctccttcatcgacagcaacttctccgacagggttctccggatcgagattatgatcgactccgtctacgcccgccccgattcagacgcctgcgccaccattgccgactgggcatgccatcgcatgcgccgccgcgatgatatc

SEQ ID NO: 30219 - DNA, 385 bp, Glycine max
  unsure (1)..(385): unsure at all n locations
  Clone ID: LIB3051-017-Q1-E1-F4
agtacatttgtggatgtgaaggaataggaggttgttttggggtgaaatgagggatgctatcaaggttgatggactttctgactgcctgctggcggcgaagattcttcccccgaacggcaaggtggttccgaggttacggggccgaaagaaaggctgctgtggtacaatgatgcngggcagcacttgtttggtgaatactcaatggctgttgtccaggccaataacctgctcgaggaccagagccagattgagtctggtcctctcagcctgcttgacactggcccttatgggacctttgttggtgtatatgatggacacggtggacccgagacgtcgcgctacgtctgtgatcatctcttccaacatctaaaacgatttgcatctg

SEQ ID NO: 30220 - DNA, 409 bp, Glycine max
  Clone ID: LIB3051-017-Q1-E1-F8
agcccacgcgtccgcggacgcgtgggttgcagtttattctatcatatccttgttcaaataattttcttttcaattacaataccccaatcccagaaacttatgttcatgaccatcctcaaggtcccaataacatttacttgaagacaattttgagttgaccttacagcctagttccacctatacaaacacccttgatcctacaaagtctctcatagctccaatactggcaacaataatactcttgggcatctgaactatctccattctttttttccccctttctttgcagtggatttgcgaggttttaaagaaattaaatgcgtttttttgtgctaaagagctaggtaattatagaattcatctcacacatacttctttttactaccttttaacctttaaaatttaatcc

SEQ ID NO: 30221 - DNA, 247 bp, Glycine max
  Clone ID: LIB3051-017-Q1-E1-G1
agacaacacatccaaaataaaaaacacattaaaaaaaaaagaaaaacaaagattacagctcggaaagaatgctatactagatagagaacacaggacaacttggaatacttcgtagtgagataattgtactgtatacatagacgatatcgttccatcctccatttcgctgacgtgaattacttcattgcttcttcactttttcactcactccttctgatctcaagcagtttcccctcatggatcgctt

SEQ ID NO: 30222 - DNA, 419 bp, Glycine max
  Clone ID: LIB3051-017-Q1-E1-G10
aagtgaattccagggctgaaagaaagaggagttaaacgttcaaattaaagataataacgttcgtcagataagcggagagaggaacgttgagaatgaagatacgaataacacgtggcatcgcgtggagcgtagcaacgtgcaagttcatgaggatgttcagattgccggagaatgcaaaagtggatatagtgaaggcttcaatggaaaatggggttctcactgtcactgttcccaaggaagaggttaagaaggctgatgtgaagaacattcaaatctctggttaagcaaaagcaaattgttgttggtcatttgtgtttatctttgttgtttgagaaattgtgtgattttctatgttctattgtgagtgatatgcttgggagaatgtatcgtacgaggtgtgattgtataaagaaataaaa

SEQ ID NO: 30223 - DNA, 378 bp, Glycine max
  Clone ID: LIB3051-017-Q1-E1-G5
agcccacgcgtccggtgagtgaaaagttacaccaacaaacccgtgaaagcaaagcacccattagaccctttgcctaaccgactcactcccatggaatccgatctaaacgacgccgttttccccgaagaagatctcgacgacgacgacgacgacgacgatgaaactccagaggacgaagaggactacgacgacgaaaccgaagcccctcccttcgtcctcgccgtcgtagcagtcgcgccgcccgcttccaccgcctccgaaacactcgacaccacgttgatcccgatctccgccgtcgccgattcctcactgaaaccactgcacccggagctaatcgaggagaaaaaagcgctggacgattcgcggcgactgttccag

SEQ ID NO: 30224 - DNA, 379 bp, Glycine max
  Clone ID: LIB3051-017-Q1-E1-G6
atcagggaagatccgatgctgctagatcgaatttgacaaaacccacttcgtgtctgatcgaagcaacaactgggttctgtctgaattttgagataagatggaatcggatcttggcaagctcttcattgggggaatatcttgggacactgatgaggaacgtctaaaggaatattttgggaaatatggggaggtgatagagactgtgatcatgagggatcgagtaaccggtcacgctcgcggctttggttttgttgtctttggtgatccttctgttgctgagagagtcattatggataagcacataattgatggccgcacagttgaagcatagaaagctgttcctagggatgattagcaaaacattaataggcaatctggt

SEQ ID NO: 30225 - DNA, 388 bp, Glycine max
  Clone ID: LIB3051-017-Q1-E1-G8
atcaggtttctttcacttcacaaaaatgaaaaacatgaaattgtgttcggtgatgctatgcttatcactagcgttccttcttggggccacagcagaacaatgtggcacacaagctggtggagcgttatgcccaaatagattatgttgcagcaaatttgggtggtgtggtgacacagattcctactgtggagaaggttgccagagccaatgcaaatctgcaacaccctcaacaccaactccaacaacacctagtagtggtggagatattagcagactcattagctcttctctctttgatcaaatgcttaaataccgaaacgatggccgctgttctggccatggattctacagatatgatgctttcattgccgctgctggctctttcaat

SEQ ID NO: 30226 - DNA, 395 bp, Glycine max
  Clone ID: LIB3051-017-Q1-E1-H11
agctccttcctctcatcctctataaagaaagtgcttaatttgtgttgttacttggttcagtttccatggattgggggcttgctatatcttctcatcctaaaccttattcagtcacaactggtggaaatctctggcggagtaaacacaccaccaagaatatttactttgcaagttcttggatatcaaaagcttcacgacacaaaagggaaactcaaatagaacataatgttttgaggttccaacaaccaagtttggatcatcattacaaatgcatcagaggagggtctacatatcaagaatgcaatagaaaatttgttgtgaaggcaatctctaaacaccctcttggttttgaagctcatgcttccaatcctaagaacattttgactccgtcaaaa

SEQ ID NO: 30227 - DNA, 374 bp, Glycine max
  unsure (1)..(374): unsure at all n locations
  Clone ID: LIB3051-017-Q1-E1-H4
agccaacgcgtccgaacttcttattccttcactgaatccaaaaatatcacaacctgtattgttgccaaagtcttcttcaaaagcttcaataacttccagttctgaagccactcctggagtccaaaattctcctatcacgggtggtagctctaggggaaaatctgacaagtctcagagtaatagactttcttctgagcagcanaaaactgaagtcaaggagaaagggacaaaaaggaaatttgaacaaaaaggacacaaggaattgattcctttagtacgcaagagttcttcaccaagcttggtaacctgtcaaacaagcaaccacatctcaagtcaacacaagaggaaattgcggagtantgctttgtgtcctg

SEQ ID NO: 30228 - DNA, 371 bp, Glycine max
  Clone ID: LIB3051-017-Q1-E1-H8
agcccacgcgtccgcccacgcgtccgcccacgcgtccgcctcctcttccaaaatatccacgtttcttttcccacacactatcttaaatcttaaaaacattttttttttcaaagcaattagaatttagaccacaaaaggaacaccgaagagatgtacggacagagtagtagtagcagtagttcttacgaatcggatttggcgctgttggattcgattcggcaccacttgctgggcgagtccgaatccatattcggcgccccgaatttcgggtcgggtcggagctccagtttcagcagcttggactcgtgtttgagcgacaattggggcgagcttccgtttaaggaggacgatacagaagacatggtgttgta

SEQ ID NO: 30229 - DNA, 420 bp, Glycine max
  Clone ID: LIB3051-017-Q1-E1-H9
agtgcttgtccagtcctcaatattattatcaccaccaccatctttcccctctaagtctaacctcaacaataacatggatcatcaattctcacacatcatccccacagaaagatcacctagaagagaactccaacttcaaggtccacgccctacacctctcagaataaacaaagactctcataaaatcaagaaaccaccgttggcaccacaaccttcacaccctcatcaacctccaccgcgccaacctataataatctacaccgtgtcccccaaggtgattcacaccaccccaagtgacttcatgaacctcgtccaacgcctcactgggtccagttcttcttcctctgctgaagtggtcatgtccaacaataacaacaccactcatgtcgaccctttcaacaacggcggccgcggaatggt

SEQ ID NO: 30230 - DNA, 370 bp, Glycine max
  Clone ID: LIB3051-018-Q1-E1-A11
aggccaggagaggagggcttgatattgttgggaaaaggttatccgcacttgcacagtcatgtcatgtaccctttgagttcaatgctgtaagagtacctgttactgaggtgcaacttgaagaccttgaacttcgcccttatgaagctgtggcagtgaactttgccattagtctgcaccatgtgccagatgaaagtgtgaacagtcacaatcatcgtgaccgattgttgagattagctaagcaactgtctcctaaggtggtgactctggttgagcaggaattcagcaccaacaatgcgccgttcttgcagcgcttcgttgagacaatgaactactacttggctgtttttgaatcaatcgatactgttcttcc

SEQ ID NO: 30231 - DNA, 393 bp, Glycine max
  Clone ID: LIB3051-018-Q1-E1-A5
agtgaaagcaaatattggcgtggtggctatggctactatggtggttggcgtggtggtggttggcgtggtggctatggacgctggcgtggtggctatggtggtgggcgtggtggctatggtggctggcgtaatggctacggtggtatgcgtggtggctactgacgttggggtggtggctttggccctaacgaacataatgaggctgggattgatgctagccctcacaactaataacgaaacttgctaaagcttatatacgatttaagttatcgtactacataaaacttcattggaacggtagttataatagatgtggagatcgttcttcgctctggtcatataaaggaagaatacttttctattaggatcgtgttattcacgggcggccgctct

SEQ ID NO: 30232 - DNA, 410 bp, Glycine max
  Clone ID: LIB3051-018-Q1-E1-A7
agctccttcaaactccatctttccaaatcctctctttgcgattgtgttttgatctgcttcctactgcgatagtttctctactgttacatggccatggcggtttccgcaattggttttgaaggtttcgagaaaaggttggaaatatcctttttccagccgggactttttgctgaccctgaaggaaggggtctaagggctcttacaaaatcccagttgggtgagattctaacaccagctgcttgcaccattgtttcttcgctcaaaaacgataatgtcgactcctatgttctatctgagtccagcctctttgtttatgcctacaagatcatcatcaaaacctgtggtactactaagctattgcttgcaatcccacccatattgaagttcgctgaaatgctttcccttaatgt

SEQ ID NO: 30233 - DNA, 420 bp, Glycine max
  Clone ID: LIB3051-018-Q1-E1-A8
agaaaagttcaaactgtctgagttttgcagaatccacggagctaagaatgaaattgtagaagaagaagcactttcacagaaaacatgaaagggttaggtcctcatgcccctttggtttcaaggggaaagcttcctccttcgttggcagtagtggatgccttgccaacatgctcttcttatttctctagaaccaccgtcctatacccattaagatgcagactaaaatcaaggttgagcttggcccgtggcacaattcgagcccaagcatccaatattagtggtgttgaacctggagattatggaagcaatactgagaaagatggtcagaatgtatttgaatggaatgttatcgaaggcagttcttctaatgttgtaaaacctcctgatcggattccttatcctctctctatagcttttgtg

SEQ ID NO: 30234 - DNA, 274 bp, Glycine max
  Clone ID: LIB3051-018-Q1-E1-B2
aggagaaaacgtaaaacctaattaattagggttccgagactgagaatcctggattgctcgcagccttgacccaccttcttctctcagtcgttagggtttcgtgtgctaacaaccaggagttgtgtgatatttagtaaaatgggtgagactggaaaacgatatcattcgcagagagaccatgatggggacaggaaacatcaaaagagacgaatgactgacagagatgataggggcaatgatgaattgattgtatataggatactctgtccagatg

SEQ ID NO: 30235 - DNA, 406 bp, Glycine max
  Clone ID: LIB3051-018-Q1-E1-B3
agccaacgcgtccgcccacgcgtccgctcattaccaaatgaaatagaaatgcttggaacagtgggccctcctgtaccaaatgtggatgtttgcctggaatctgttcctgaaatgggatacgatgccctagcaagtacaccaagaggagaaatttgtgtaaagggaaaaaccttgtttgcagggtactacaaacgtgaagacctcactaaagaggttctgattgatgaatggttccatacaggggatattggagagtggcaacctaatggaagcatgaaaattattgatcggaagaagaatatatttaagctttcacaaggagaatatgttgctgtcgaaaacctggagaatatttacggtcaagtttcttctattgaatctatatgggtttatggaaacagttttg

SEQ ID NO: 30236 - DNA, 403 bp, Glycine max
  unsure (1)..(403): unsure at all n locations
  Clone ID: LIB3051-018-Q1-E1-B6
agcccgaacatgggaaactgctgcgccacgccgtccacggacgaaacggcgaacaagaagggcaaaaagggaaaaaaggaaaaccccttcgcgatcgactacggtttcaacgccaccgccgcgaacgggtcgaagctcaccgttttgaagtccccgacgggccgcgagatcgaggcccgctacgagctgggccgtgagctgggccggggcgagttcggcataacctacctctgtacggacaaggggaccggagaggagctggcgtgcaagtcgatctcgaagaagaagcttcggacggcgatcgacatcgaggacgtgagganggaggtggagatcatgcgccacttgccgcagcatgcgaacatcgtgaccttgaaggacacctacgaggatgacaatgccg

SEQ ID NO: 30237 - DNA, 415 bp, Glycine max
  unsure (1)..(415): unsure at all n locations
  Clone ID: LIB3051-018-Q1-E1-B7
aggttggtgtgaggcaatgacgcggcctttcggtgtgaagggggggaggaagcgaaagcacgcggaacccaaatacgacgcccatgacgaagaagaagaagaagaaacgcaaccaaagaaaactgtggtggaggtggagcacaaccaagaagaagaagaagaaactccagcaccagcaccagaggatgatggattgagcggtatcccaattgcgcccagtgcgaacaacactaacaaacccaacgtcatcttcattcttgaaaaagcttctttggaagtcgccaaagtcggcaagacatatcagctcttaaactccgacgaccatgccaatttcctccgcaaaaataacaagaatcgcggagattacaggcctgacattactcatcagtcncttctatcaattttggataaccca

SEQ ID NO: 30238 - DNA, 412 bp, Glycine max
  unsure (1)..(412): unsure at all n locations
  Clone ID: LIB3051-018-Q1-E1-B8
aagtcagctttgttgaaatcaagggagttacatattgtggctcgtcgactacgtcaaaattgacaatggataatgtcccttggcatgctgatgtgaaagctttttctgaggccctagctttgaaaagccaaggagagtatgaagttgcatgtgagcatgctcactcgtgctgtgtcctcttagcaaagactaataagttcaaaattgatggccagtggtatacatggatagactatgaaaaatttcatgatctggtggcatctggaagaacttttgacagcagagattacatggctgcaacaccatcgtggtcagtctatggattagaagaaagtggatttgatccaggacaattgagatacangatagagagacatcacaagtctacgcgcaatcaagcaggttagacatt

SEQ ID NO: 30239 - DNA, 395 bp, Glycine max
  Clone ID: LIB3051-018-Q1-E1-B9
agtcaaaatcaggctctacgaagggagggtttctcggggtccacttactggaactccggtaacttttaaggtttatcctggaaggcgagctgggggagtcgtggctgatgcactcgctgcaaatgagttgaatacacacttgtttcttcagagcagttctaaaggtattggtcagaatcttgtgctgcttgtaggtgggtttgaaacaacgactggagagcagactatgcaaaacttgcaagtgagagggtatcgagagatcgagaagggtcatcctggaatccctttgagcaaggactgacaaccaaaaggagacaaaattttatcataaagatgctccaaggtgtcatgaagggtctagcttacttgcatgaccacgataggttgcaccagag

SEQ ID NO: 30240 - DNA, 405 bp, Glycine max
  Clone ID: LIB3051-018-Q1-E1-C10
agcacgaattccatcttcccagctgccatctcaaaggatggtcgatcatacaatgatcagttgtttagtgctggggctgatgttcttcacagaattggcgaggatgggagaattatacaggaatttattcaacttggcgcaaaagctaaagttgctgcttcagaggccatggatactgaagccactctaggggagataccagatgaattccttgatccaattcaatacacattgatgaaggatccagttatcttgccttcttcaaggatcacggttgatcgtcctgtcattcagaggcatcttcttagtgatagtactaatccattcaaccgttctcatcttaccgcggatatgttgattcccgacgatgagctaaaagcaagaattgaggagtttgtcaggtct

SEQ ID NO: 30241 - DNA, 314 bp, Glycine max
  Clone ID: LIB3051-018-Q1-E1-C12
agcggacgcgtgggaaaacagctcttgattagattatatagtttcaggcaagaatagttaaaggaggcaaaaggtgaggagtacaaacggatgaatgctcacattcgatttaatggctattccgcaggactcctcgattgtcagtgaagtcaaatttggtgcattgcttgtcatcagcactgtcagggaactccactagagtaaccatgtgatcacctcaggaacaaaaccccacgctgcaaatgtagctactgtcgaaataagcttgaaggaatagttcgtctaaaaggtttctgatctggatctgctcatgg

SEQ ID NO: 30242 - DNA, 417 bp, Glycine max
  Clone ID: LIB3051-018-Q1-E1-C4
aggcatgttaccctcaaaagagatggtgtggtccttgatttggtgcctcctcctacaaaagttagcaacttgatttttggacgaacttggattgattcaccaggagagatgatcctgacaaatctgactacaggggacaaagtggtgctgtattttcaaccatgtggctggtttgggtatggctactttctcttgccatcaaatgttctctagtaacttactacttcttgctcagtacttctgttatatattatcaaacttaaagatttttgcttttgcagagctggtagatatgaagtggatgggtacgtgtataattctgctgacgagcctaagatactgatgactggaaaatggaatgaggctatgaattatcaagtttgtgactcagagggagaaccacttccaggcactgag

SEQ ID NO: 30243 - DNA, 420 bp, Glycine max
  unsure (1)..(420): unsure at all n locations
  Clone ID: LIB3051-018-Q1-E1-C5
acgtcagcggagagaaaaaaagttagggttttgcattttggatcagtcagactcagacatgggaggaggcaatgcccagaagtcaaagatggctcgcgagaagaatctcgagaagcagaaagcagcggctaaggggagccagttggattcaaacaagaaagctatgtctattcagtgtaaggtgtgcatgcaaacatttatatgcaccacatcagaagtgaagtgtaaggagcatgctgaagccaaacaccccaaatctgatctctatgtttgttttcctcatcttaaaaagtgaaagagttcatgttgagacatgatatcaatatatggcctgttctacagtctctatccacatagatcttcaatttcttttaatataaaatatgtctgtgtgtttgtgtcntcaggggtagtgagaga

SEQ ID NO: 30244 - DNA, 411 bp, Glycine max
  Clone ID: LIB3051-018-Q1-E1-C7
agttcttttccttggtgatggttcggaagatgggaaagtcccacctgggtcactctgcatgatctcacacaaggaaaaggaggtactcaatgctctagacgatgctggctttccagcaaatgatgaggaggttcagcaagaagtggttgcaatgtctaaaacaaatatatttaggcccgggattgatgttacacaggcagttctgttgcctcagttgacttggatgcgacaggagaaaacataaatggtagggccttggaaagctaaggtctatgatatgcacaatgtagttgtgagcataaaatctagaggagttcctggagccatgacagatgatgaactcttttcttcttgcaatgaacatgaaacagagagtgaagagctcaatgatattttgactgaggatgaaag

SEQ ID NO: 30245 - DNA, 412 bp, Glycine max
  Clone ID: LIB3051-018-Q1-E1-D1
agccaacgcgtccgaaagcataaaggaagtagtgagcaatggagggtttgatgtcatcattggcacagatgtgacatatattcctgatgctatattgccattgtttgcaactgctaaagaactgattgctcccagtggaaacaaggaagatgataatgttcctgcacttattctttgccacatctttcgccgagtagacgaaccaaccttactttcggctgcagcccatttcgggtttagattagtggacaagtggcctgctggaacttcaactaatttgtctcatagaattattggcaattggtttgttgacaatgatttaaaggatgatcttcctagtacagcattaaacatcttgctcttctgcaaggagtgatattgaacaacttgattcttctcttcattactatta

SEQ ID NO: 30246 - DNA, 418 bp, Glycine max
  Clone ID: LIB3051-018-Q1-E1-D5
agtgaattttaactaaccaaactaataagcaaaaatgttggcggtgtttgcaaaagccattggaaaaccaccggaggaactgaggcttccggcaatggggtccaataattcaaagaccccagaagaaattgtacagaaatttcaatctttgtggccagattctgcagtttacaaccttccacatgggaattttatggctctgtctcatgaagatgaaagtccaatacaccccaggtgtattgttgttttggatgatatcttctgcatttttatgggagctctagcaaacatagctgagcttagacatcattatgggctcccaagacaagcaacagaagccatgattgtgattgaagcctataaggccctaagagatcgcgctccctacccacctgaccaagttgctaaacatcttgat

SEQ ID NO: 30247 - DNA, 422 bp, Glycine max
  Clone ID: LIB3051-018-Q1-E1-D8
agcccacgcgtccgtttcaatgcttgcgtctacaatggcatatcatatctatccagagcacaagagtcagcagctagaattcgtcttgggactgctctcccttctcttcgtgtgatgaaatcttcttcaccctctactgttgctgatacagtgtttgttgagaggattagatcaaaggttaaatattggagagagtcatgtaaaagctccgacacaaacaaaagcagagatgaagaacttgtcaactcccttaggaatattgtcctgggcaatgaacagttcagatcaagaccttgcattaactgtagatgtttgcagtgaacgtcaagtgcaacttattctggagatggtgttagactactcagatgatcttcttcctttgccaatccctactaagagtgggaccattcatgcagtacgaa

SEQ ID NO: 30248 - DNA, 406 bp, Glycine max
  Clone ID: LIB3051-018-Q1-E1-E10
agcccacgcgtccggaataggttcttgaacaagcactattgaagaatcacacttcacagaagaagtacctctatacatgtgatgagtaaatgtctattcgccaagatctaactgttcatcgaatacgcaagcaattagtagtcaatgtgtacgaaacacatgcccgattggcactggaatttggggacctgtgtgactaaaatcagtgccaatctcagttgcaaactctttatgccgaatgcattgaggggtctgatatggaatttgccgcttacaacttgctttgtgtcataatgcattcaaataataacagagatcttgtatcatcaatggcaaggttatctcacgaagcaaagaaggatgaagctgtacaacatgcccttgccgttcgtgctgctgtaacttc

SEQ ID NO: 30249 - DNA, 371 bp, Glycine max
  Clone ID: LIB3051-018-Q1-E1-E11
agcccacgcgtccgcgtactggtcctggtactgttgtcggatcgaaacccctatcttgaattcgactcaacaacatgcggcatggcggaggacgacacggtcgacgacatggctgaggaggacacggtggaagacatggctgaggatgcacatgctgcggtcgagatggctgcaaatgttgctgaggtatctatcactaatatctgaactgaacacactcacatacttgagtgtactccatgtaataactactagatatgtaagatataacagataacagcatggactctatccgtgcttgcgctggcatacgttgatctgttttccgccaaccatgcatgtagttgacacatctttttactagacagcat

SEQ ID NO: 30250 - DNA, 418 bp, Glycine max
  Clone ID: LIB3051-018-Q1-E1-E6
aggtgctattgaacccagtgagcttgaggatttccagaatcgatatcatgttggacaacctgtttctggccatgttctaagtgtcaacatggagaagaagctattacggttggttgtgcgccccttttctactcttccttgcggaactagtgaagagccacacattaatgttgtggataagggtttaacagcacattttcatgaaggagatattttaggtggaagggttagtaaaatacttccaagtgttggtggattgcttgtccaagttggtcctcgcacatatggaaaagtacattttactgaacttgcagacacattggtgcctgatccgttgtctggatatcatgaagggcagtttgtcaaatgtgtagtgcttgaagtcagccacactgtcaagggtactattcatgttgac

SEQ ID NO: 30251 - DNA, 410 bp, Glycine max
  Clone ID: LIB3051-018-Q1-E1-E7
agatttgatccaaattttgacgaaaaagaatctctgcttcaagataagcttcaaaatgcagttgattttcagaccgagtgtcctcagacatctaaaactggtcagtctccaattacacccaattccaatgaagaacaatttagcagtgtcaatgagttagcaaatatatgtcagaagcaaaagcgtcaactagagaagggttctaattttactagtcctaaaaaatcaaggaatgatgaacaaggcatggctgttgctctctgtgagatggcagctgtagtttcaactgtgtctgcaaaaaagatcgatacctcaatatcaatagagaatgtcatagaagcagtgcaagcattgcctgatatggatgatgagctggttttggatgcttgcgatttcttggaggatgaaag

SEQ ID NO: 30252 - DNA, 410 bp, Glycine max
  Clone ID: LIB3051-018-Q1-E1-F10
agctttggttctcctgagctgtgtttattctctttctctgccctctcatcttcgagctccgatggcgagcctgtggcgcgcggcaaccggcatgacggacaacgccaccgattacgacggcgtcgagttctggtcgaaccccgagcggaccggctggctcaccaagcagggcgagtacatcaagacctggcgccgccgctggttcgtcctcaagcaaggcaagctcttctggttcaaggactccgccgtcacgcgtgcgtctcgtccacgcggcgtggtccccgtcgccacgtgcctcaccgtcaaaggcgccgaagacatcctcaacaagcccaacgccttcgagctctccacgcgctccgacaccatgtacttcatcgccgactccgagaaggagaaggaggattgga

SEQ ID NO: 30253 - DNA, 372 bp, Glycine max
  Clone ID: LIB3051-018-Q1-E1-F11
agcgcttcgctccctacccttgggctagggttttacttgtgcgtcttctccgaaagcaagctagggtttgtccgtgtggcagaatgggaaggtatcgaagccggagcaggagctatagcccccggcggcgaagcaggagcccaccggcaccgcgcggacggaaccgctatgtcgacgatcgctacggtgacagcaggtcttacagagaccgccgctcacctcttccttccggcttgcttgttcgcaatcttccccttgatgccaggcctgaggatcttaggatcccatttgagcgctatggtcctgtgaaggatgtttatctacctaaaaattactacactggtgagcctcgccgccttggatttgtgaaat

SEQ ID NO: 30254 - DNA, 414 bp, Glycine max
  Clone ID: LIB3051-018-Q1-E1-F12
aggagaaatttgacgttttcagagaattggaaactggagacttcactttcattcgatcaatcatgataactcgatacgccgattccgcctcgaaatccgcaacccctaaggaagacgccgccgaaggaaatcccctgcggccaagcgcaccaccgcgacgaaggccagagccactaaaaagaacgagctctcgcccgcagtcgattccaaacccgatcaatctcctcgatttcaggtttctttcatccatgacgatgttgtaattgtggaacagagatcgttaggtagtgctagcagcgcaaaatctgtgaaaaagaagactccggggagatcgagaagtacagcaatcagtactccgaattcggaagagcaatgtgaggcagtagctgatgaaactccaaatgaagatgatac

SEQ ID NO: 30255 - DNA, 284 bp, Glycine max
  Clone ID: LIB3051-018-Q1-E1-F5
aggccacttctgtgagtttgactgtggcattgttggtggcgtgcgtgtgaataagaagattttcttggccatggatggtaatgtgctcctagttgtgtttgagagagcataatagatgtgtatcttcaattaatttgtgtttgtgttgtgtgcttgaaaattcttttcctgtaatgttggataaaaattggagctaccgtacgtcgatgtataagaccagggatagatatacatgtctctttttcagtttataaatttatggaataaatgtacaatctgagaaa

SEQ ID NO: 30256 - DNA, 394 bp, Glycine max
  Clone ID: LIB3051-018-Q1-E1-F7
agcccacgcgtccggaaaccgtgtcaattgagctcaagaatggcactattgttcatggcaccattacaggtgttgatatcagtatgaacacacatttgaaaacagttaaactaactctgaaagggaaaaatccagtgactctggatcatctcagtgtgaggggtaacaacatccgttactacattcttcctgacagcttgaatctcgagaccctgcttgtggaagagacacctaagatcaaacccaagaagccaactgctgggaaacctttgggacgtggacgaggaatgggccgtgggcgtgggcatggacgtggtggtcgttgagttgcacctttcttcatttttgtggcatgtggttataagctatgcagcaagaatttctgggtggtttt

SEQ ID NO: 30257 - DNA, 410 bp, Glycine max
  Clone ID: LIB3051-018-Q1-E1-F8
agggaatctgaaaaaaatgatgatatggctgctcaggatcatgctaagcagtctttgaagcaaaaaaatgagtctgaaaatgatgctattatggtgcccgagaacagaggtttatgttcaggtgcaactggtcttgatgctgaatatgtggaagagaattcaggtacaaaagaggtttgtgaccaagatgcaggagcaggacagatactgcacacagatttacctagctttccttcacgagaaatggatcagcattcaggtcaaagggattcaaaattggctgccatggaatcagaggaagcagaggaatgcacctctaccactggagatgcctcttctgcatctgttgctggtgtctcagaagtggacacaaaagttgaatttgatttaaatgaaaggctcaatgcaga

SEQ ID NO: 30258 - DNA, 411 bp, Glycine max
  Clone ID: LIB3051-018-Q1-E1-F9
agggaacaggcacatacatacctgacttgaattacaattcctactgggatatgagcaccaaggcacctaggccaaggagatttccttcttcaaagcacaatgcatttcccagatcacgtctgagaaagaaacaagtggaagaggttcattctgagatagacataaatgcgaattcagattcaaggttgtttgagttcttaaatgaagatttccccgttcttccatgcaattccaaggctataccgccaacacaagccgaagagtctacgccattagaaaagtttcattctgagacagacatggatggtacttctcggtcatttgagttctcaaatgaagatttcccacttcttccaaaggtttgttctgagacacacatggatggtaattcaaggtcatttgggctttcaa

SEQ ID NO: 30259 - DNA, 415 bp, Glycine max
  unsure (1)..(415): unsure at all n locations
  Clone ID: LIB3051-018-Q1-E1-G11
aggctttcttggttgaagagacagggaaagtgagggatgagcataccgaggacatttcagtttcccaagctatttcaattgtgctagataggcacccagaactaaggcaacaaggacttgcccatgaagtgctacaatggtttatatgcagaatggaagcttggtttgctgctgatgcagatatgatttcactgaaaacctgggatcaggaacatgtcctgtctggtggtcatggactcatggtgcaaggatatgatccaatcataaaagttcttgcaaaagatattgacatatgcttgaaccaaagggtgaaaatgatatctagtggttacaacaaggtaatggtcacggtcgaagatggcangaactttgttgctgatgctgctatcataactgttcctattggaatcctaaa

SEQ ID NO: 30260 - DNA, 413 bp, Glycine max
  Clone ID: LIB3051-018-Q1-E1-G12
aggttcatactaagttctgaaaatgagttccaaggttttgcttgttctacttatgttcttggccactatacttctgatctcctctgaggttgcacccgatgatgcatacgagaattttgacaaaatagatgggaagcctagtgcagatggggtagatgaaagcaagtattggcgtggcggctatggtggcggctatggtggtggttatggaggtgggcgtggaggctatggaggtgggcgtggaggctatggagggggacgtggtggatatggcggcggacgaggtggctatggtggcgggcgtggtggctatggcggcgggcgtggtggcgggcgtggtggctatggtcctaatgaacataacgaggctggggttgatgctaaccctcacaactaagaaggcaactttctaa

SEQ ID NO: 30261 - DNA, 421 bp, Glycine max
  Clone ID: LIB3051-018-Q1-E1-G7
agcccacgcgtccgcccacgcgtccgccaacttcgatccctccccctccggccaccaccgtccccttcactgtcgaacccagcaatcacgtgacccccgccgacaacaccaacaccaaccaccctccttacgatgagatgatatacacagcaatcggggctctgaaggagaaagatggttcgagcaagcgagccataggaaagtacatggaacaagtgtacaaggaccttccacccacccactctgctttgttgactcaccatctcaaccgattgaaatccgctggtcttctcatcctcgtcaaaaaatcctacaagctccccggatctgatcctcttcccgtgctccaggcccaaaagccccgcggtcgccccccaaagctcaaatcccagcccaacactgagctcacatggcctgcgct

SEQ ID NO: 30262 - DNA, 387 bp, Glycine max
  Clone ID: LIB3051-018-Q1-E1-G8
acgtcagctttctgcagtcggcgcctcttcgctttctcttgaagcttacaatgtctgtgctgttgatgattcaggatggatagtgctgtgttggcatgtacgcatgtatcagttcttcccgtcagtcacgtgttggagaccttgacataccttgggaatcgagggcatgagctatgggatcctcttgtccttacttctgcctcattcttaagtcaattgcctgtagattcttcctctgtagactttgtgacattaagctggctgtcagtagactgtcctgtggatcaactgattcacgatcaacttagagtgtaaaaagtaaatggtacaactctgatgcgcaagtcatctcagtctgcagtgggtacatttaaggagatgatatct

SEQ ID NO: 30263 - DNA, 411 bp, Glycine max
  unsure (1)..(411): unsure at all n locations
  Clone ID: LIB3051-018-Q1-E1-G9
agcgaaacagagggattataaaaagagaagttactcgatagttcaaatcagaagatggttcctgtcacaccaactcaataacagatcaaaccaaacccaaactgttaggtttcctttgtttggtgtgaagccatggctgattcttcttccaacctgaaatccgacgcgataatggagcagatgaagcaacacctcgccaccgacgctggcaaacaagtcaccaataaaattggactcgtttatcagtttcacattgctcctaagaaacttggattcgacgaggtcgtctacaccgttgatctcaagaaaggagaggtcaccaaagggtcatatgaaggaagaaagcctgatgcatctttttcgtttaaggatgaagactttgttaaggttgccttanggaagatgaatccg

SEQ ID NO: 30264 - DNA, 404 bp, Glycine max
  unsure (1)..(404): unsure at all n locations
  Clone ID: LIB3051-018-Q1-E1-H3
aaccaacgcgtccgcccacgcgtccgcgtccttccacgtggccttgcaaacagggcacaccaagcttccatgcttgcgtacatgcgctgcgatgcacgggaaatgaaacgcgtgaccgcattccgctgtgtatatcgccgtaccctgtcctgtcttcacgctgttcaagcaaattccacagctactctgctcaaccataacaaatcacaatcattgaatactccatacatgggaatcttaaaaagatgaaagaagcatgacataccctgaatttgaagctgttcttgaagagggagagcttgagangggagcgtggagaagttggatttgagactgatggtgatttcgttgctctgggggtgttcttgctttgaactctgggactatcacttaatgtaactgtt

SEQ ID NO: 30265 - DNA, 422 bp, Glycine max
  Clone ID: LIB3051-018-Q1-E1-H6
agcccacgcgtccgcccacgcgtccgcccacgcgtccgcatattcttcttcttcttgttcttgttctatctgtgacgagcatcatggcctcgagagcagtgctattgttggctatgtgtgtgcttccggccatggttgtggccattcgcccagcaaagaaccctttttgcgtgaagggtcgcgtctactgtgacccttgccgtgctggttttgagacctcagcaaccacctacattgccggtgctgagattatgttgcaatgcaagagcagggttagcaacgaggttgtgtacaccaagaaggggtacactgactcaactggagcatacacaatgtacgtggacgaggatcacgcagattaaatatgcagtgccaagcttgtaagcagccctcaccctcaatgcaaggaagtcaccccgggc

SEQ ID NO: 30266 - DNA, 426 bp, Glycine max
  Clone ID: LIB3051-018-Q1-E1-H7
atcaggggtgactgtgaagcgatctcagagccattgctgacgttaaaatagagtatagaattagagtcagcgagcgaaagaggggttttggaacgtgcaagatccggtgctctaatctctgcattctgtgatggctccaaaaccgataacgagtcccgtccccgattcgtggtaccccacgctctccgtcttcaccctcgccatcggcctcgtcttaaccgcctctttcttcatttatgaagcaacatcttctaggaaaagtcgttcacttgttcaggagctgacaactggtgcagtggcttcagtcttcttgggttttgggtccttgttcctcctacttgcttctggtgtttatgtctaatttaaacattgaattggatgaaaattttgctaagcagatagctttaaatgaaaaattgcattgga

SEQ ID NO: 30267 - DNA, 201 bp, Glycine max
  Clone ID: LIB3051-019-Q1-E1-A1
accacacgtccggatagtatccatacctagtagtaactgagcacgacctcgtcgaacaggagtctaagatgtattcgccgcgcagaatgctccaagaaagacatctagatgagtcaaccttgataaaagttctaaagttgggactccaaatatagtggcctaagagacacatcatgagaattctcctgacaatcgaagcac

SEQ ID NO: 30268 - DNA, 374 bp, Glycine max
  Clone ID: LIB3051-019-Q1-E1-A5
aatcactttcaggtccgccattgtaagagcatcaatcacaatacgataaccgaacccaagcgattcgattccatgcaggaagcaataatagaatacgcatattcgattcctcgtcccaaaccctattccgctatttcgagtccgattccagcgagatcccaagtgacacagcagatccctaaaattaaaattccgtttcggagagatccaagtctcttcatggcgcctcgtggagccacgctgttgttccttctatgcgctctctgctattctctcatcgctattgctggaaagagctattacgatatacttcaactttctaacggtgcgtcagacgatcagattcagagagcgtatacgaagctagcattgaa

SEQ ID NO: 30269 - DNA, 418 bp, Glycine max
  Clone ID: LIB3051-019-Q1-E1-A6
atccgaccacgcgtccgccttgatatgatccgcaagattgctgatgatgatcctgacgactcaactgacagagaaaagaaagatgcatcctctgacaatgatgacaagaatggtcaatattctaagttctggaatgagtttggtaaatccataaaacttggtatcatcgaggatgccaccaacagaaatcgtttggcaaaactgctcagatttgatagcaccaagtctgagggtaaattgacatctctggatcagtagatatctagaatgaaaactgggcagaatgatagcttttacatatctggaaccagcagagaacaactggaaaactctcccatccttgaacggcctaagaagataaattttgatgttattgtcttcacggattcagttgatgagtacttgatgcaatacctga

SEQ ID NO: 30270 - DNA, 433 bp, Glycine max
  Clone ID: LIB3051-019-Q1-E1-A7
aacatatatagaagagccttccatatatagcctcccaaaagaatgaagagtactatctctttggctctctttctactttgtgccctaacttcatcatatcagccttcagccatcgctgatattgtattcgacatcgaatgcaatcctattcgatacagcggcacatactatgtgttgccagttataagaggaaagggcggcagaatagaatttgccaaaaccgaagcagaaacatgccctctcactgttgtgcaatctccctttgaggtctcaaaaggtcgaccactgataatttcatcgccatttaaaatccttgacatcaccgactgacttattttgagcctcagtttcacttaagtatccccctgtgcctcaactccttctcggtggaccgttattctcaatggtctgccagaagaactccaatgttaac

SEQ ID NO: 30271 - DNA, 375 bp, Glycine max
  Clone ID: LIB3051-019-Q1-E1-A8
aacaaagtggtccaattgctataggcgtgaatgcacttttcatgcaaacatacattggcggtgtctcacgctctctcatatgtaccaagatcaggatgaaacacggtgtgtaacgtgtaggatatggtgcaaaaggcttctcaattcatacgcttggcaggaaaacacactggatcatcaagaattcgtggggggagaaatggggagaagatggctattacagactctgcagatggcatggcaagtgtggtacaaacaccatggtttctgctgcaagggtgacgcatccacacttaacacctacatagaattatgcatcttattaactatgcacttaaggacatctatttcaataatttgcactctaggtgatgt

SEQ ID NO: 30272 - DNA, 440 bp, Glycine max
  Clone ID: LIB3051-019-Q1-E1-B11
aacaagcgtccgcccaagcctccgcgaaaattccgttgagaacaataacaatgggcttcaaagaattccaattcgaagatgaaaatcgtacatggcaatgctggttacatacttgaagacgttcctcacttcgccgactatattccaaatcttcctacatatccgaatccgcttcgatccaatcctgcttactcggttgttaagcagtatttcgtgcacatggacgacactgttcctcagaagggcctcggcaaaaggtatactttaaatcggatgaagtgcatgcatgcattgtcacgtgtggtggactctgccctggcctcaacactgtcataagggaaattgtctgtggtctttcctacatgtatggtgttaacaaagtccttggcatagatggtggttatagacgcttttattccaaaaacaccattactttaaca

SEQ ID NO: 30273 - DNA, 344 bp, Glycine max
  Clone ID: LIB3051-019-Q1-E1-B12
acaacgcgtgggcggacgcgtgggcggacgcgtgggtgtcgatgtcagttccatgttcatagttaggaaaaacggcaaaacttcactgcacaatgctgctaggtatggtgtccatcgtattgtaaaaacacttattgctcgggatccaggaatagtatgcatcaaagataaaaaaggtcaaactgcactgcatatggcggttaaaggacagtgtacttcagttgtggaggagatattactagctgatccttctattttgaatgagcgagataagaagggtaatacagctcttcacatggctacaaggaaatgccgttcacagatagtgggccttttgctaagct

SEQ ID NO: 30274 - DNA, 444 bp, Glycine max
  unsure (1)..(444): unsure at all n locations
  Clone ID: LIB3051-019-Q1-E1-B2
agaaaattacgaaagagtattgaaaaattggggttaaggaaaaggtgaacggtgaagagctgtttatctctcgagtgctgagaaaaaggtgccattgtccatttctcgatccgtaaattttgctgtgcgttttcgttattttcgcatgttctgcaccgatcttttgtttcgcatgaatataataagctcctgatattattcggaactttcttcttcgtttttcttttctcgaacaatttcggaatttctggtctgagtttttctcgtttccccaaatattagggttccttcaacgctcttttcgagatgttgatcgctgactgaaacaaatcaattgcatgataagtaaattgattgataataatggaattgtctttattgatgttgattccgtggattcaaaccagttccgtacacnttggtttgaagagaaacaacgacaat

SEQ ID NO: 30275 - DNA, 339 bp, Glycine max
  Clone ID: LIB3051-019-Q1-E1-B3
accaaacgtccggcgctaactcctgttaaattcctccccaacttaccaatccctcaccttgggttaaaaccaacaagggtttgccaaaccaattaaacgacgtgtcctccggttcgattccgcttctggggttggcgcagatagtcacctgcgtcaactacctccgctccatgcctttcgcgcttatgcaaaccctacgtctcagccgactccactccgatcagatcgtcgacgagcgcttcctcaccgccgtcggattaggcctcgccggacttatcatgctcaccgatcagctcatcctcagcagacaattcttccaccatctacacggcaccgccg

SEQ ID NO: 30276 - DNA, 428 bp, Glycine max
  unsure (1)..(428): unsure at all n locations
  Clone ID: LIB3051-019-Q1-E1-B4
agcgaccatctcatccacgtcaccgccgtcgatatctccgtcgcagacctcctctccccgtcgtcgtcgtcgtcgtcgtccgatgtccctccaatcgtcaaacagctcttcgccttcgaccacggtatgagttacaccgctcagtccacgccaatcatggccttccaggtcaacgacctcgccgacggcatcttcctcggctgcgccgtcagtcatgccgtcaccgacggcgcctccttctggaacttcttcaacaccttcgccggaatctcaatacgagccacgaactctcnctccatcctcccggattttcgtcgcgaatccatcatcaactccaatgtcgtgctccgcctgccacaagaaatgcaagtgacctttaatgtagacgaggcttttcgcgagagaatcttcagcttcagccgctaatc

SEQ ID NO: 30277 - DNA, 400 bp, Glycine max
  Clone ID: LIB3051-019-Q1-E1-B5
ggccgtttgaagtttgaagtttgaagtttaaacatagagaaacgaaattgaatgcaacccaacaaaacacattaactcccatttccattcattcatcctcaaactttttttataaaaaaaccaatcttgctcacctcggagagagagagaaatagaatgaccggagtggtcatggtgaccaagggcggtggatgcggcggcggcgggaagcggacgaggtcggcgcgaaccgccgaggaggaagaagagcagcagaaccagctgtcgctggtggcgcttctcttggcggccatcagaaaatcgatggtgtcgtgcagggtggacccacccgaggacgtaatctccaccgtccatcacatggagatcggatggccaaccaacgtccagcacatcactcatg

SEQ ID NO: 30278 - DNA, 426 bp, Glycine max
  Clone ID: LIB3051-019-Q1-E1-B7
attaatcctacaatggattatgtgttatctttctgttaacggttaaggtgtatgtagattcaggaccggcgaggtgttaccggcagataaagaacataccgtactcgaaatcccgtttctgccgcggcgtgccggagccgaggatccgaatctacgacgtgggaatgaacaagaaaggcgtggacgagtacccgttctgcgtgcacctggtctcgtgggagaaggagaacgtctccagcgaggctttggacgcggcgcgcatctcatgcaacaagtacatggccaagttcgccggaaaagatgccttccacctgcgcgtgacggtacatcacttccacgtgctccgcatcaacaagatgctatcgtgcgccagggccgacaggctccatatcggtatgaagggcacctttgggaaaccgcaaggga

SEQ ID NO: 30279 - DNA, 307 bp, Glycine max
  Clone ID: LIB3051-019-Q1-E1-C10
ataaagcatcggcgtcaatttcgccgccaacttcgccacatcccttcgcatactcgctaacaggccctcaatcgggtcgtcaaactggcaggggagctgcattcgctgtcgaggtcgcagtgaaagttgcagtaacagttgcagcagccgacgcagtgtacgccggatcactcacgcaaaagctcaagtgtatcctgctgtgtttcatggcagtttcgatcgacgtactgggctaatcaaacgggctaacgaacggcgcgaagatctccgtcgatcgatctttcgtgaggcattctgccaggcatgc

SEQ ID NO: 30280 - DNA, 423 bp, Glycine max
  Clone ID: LIB3051-019-Q1-E1-C11
atagaatagatagattctctgaagatgaatccaagggtgaagaaaatggaactggtggtaaccaagggttacggggatatggatgtggatgatgttctcaggacaaatgaagacctggttgtgaagagtggctcaaaattgttgccaggacatcttgaatactcgagacttgtgaatgcaaatattcaggaccctgctaatggtcccataaattcagtcgagttccatccgaatgcgcagttgtttcttgcagctggattggaccggaagcttagattttttcaaattgatggcaagcggaacagcacaattcagagcgtcttccttgaagattgccccattcgaaaagcctcttttttgccagatggatctcaggttatagtatcgggaagaagaaagttcttttatagttttgatttagtt

SEQ ID NO: 30281 - DNA, 428 bp, Glycine max
  unsure (1)..(428): unsure at all n locations
  Clone ID: LIB3051-019-Q1-E1-C2
aaaaaattataatttctattacatacattttgtagctaggatgagcaagttactactcattcgtgttgctgggttcgtggcaacctttgtcaccatggtgatgatgatggtgcccaaaaacgtgagtgcccaaaacataggtgatgacatcgtcacacaagacttcttcaacagcataatcagtcaggctgatgatggttgtgcagggaagaacttctactcacgagatgctttccttaatgctcacaattcctacaatgagtttggtacgcttggtaatcaggatgactccaagcgtgaggttgcagctgctttcgcccatttcacccatgaaacaggacatttttgctacatagaagagattaacggtgcatcangggactactgtgacgagagcaacaccgagtacccatgtgcccctaacaaag

SEQ ID NO: 30282 - DNA, 372 bp, Glycine max
  Clone ID: LIB3051-019-Q1-E1-C3
aagcaatcggagggtaagatttctacgacgtgagcaaagtggatagccttcaacttcccaatttcgttaccccgcaagggtggaattgttgattgcatggcacaagtttgcgcgaaaacattaactctgtgtagcctgcagatcttcacgtcatcaggtccgatggcaacgtcatcacttgcaataatgcttgcgatgcttgtacaggtaatagattctgctgcactggacctatcaataccgcacagacatgtcaacctaagatcgactcgcatattttccaggatcactgtccccatgcggattcctacgcttacgatgatttgagcaacactttcagatgcttcaacaagcctgaatatacgatcacat

SEQ ID NO: 30283 - DNA, 293 bp, Glycine max
  Clone ID: LIB3051-019-Q1-E1-C4
accaaacgtccgggttggattggttacatgcgcgtaatttcctcaaccacggatatgttgtatttgattacttagtacgcaacgcagtctctcgattcgcgaactggttactcacagcattggttcgggaactgattccagcttcaagctgtctggtgctcgcactgtatgatcccctaaagtcaggctaatccaacccgtcatgtacatcgtcgacgtcgacatcgagtggtggttccatggtcagcactcacagtagtttctgatccacatgctcaacggagactccactg

SEQ ID NO: 30284 - DNA, 396 bp, Glycine max
  Clone ID: LIB3051-019-Q1-E1-C5
atcacgcgtccgggacatcacatggagagcatggagattctgctaaaattgagttcagagatgcccttaaattgttggcggaacagctgggacacatgacttattttggaggagacaatctaagttttgtggatataacgcttgttccattctacacttggttcacagcctatgagacttttggcaccttcaacatagagagtgagtgccccaagtttattgcttgggccaagaggtgccttcagacagtaagcgttgccaagtctcgtcctgatcagtataaggtttatgagttcattatggatctatgaatgacgttaggcattgagtaagttggaacttaatggccattgtgaactaatggttttccactggtcgttcatagcctttcaaata

SEQ ID NO: 30285 - DNA, 412 bp, Glycine max
  Clone ID: LIB3051-019-Q1-E1-C6
atccgagactaccacaccctcaatgcgtgcatggcgttgaggttgtttccacactcaatctgatgaccctggatgaagatgatcgaaaaacgtggatagaactcactggctgaaacttgaattttacaattccaactgaagcaagtgatttcagttcatggagaaatcttcccaacacggactttgagcttgagatgccacctcccccaatcaagaatggtcataatgcacacccgattaagctgcataatggatctggacttaacggatctggcctgaacggatctggtcttaatggatctggacttcacctatctaaccacagtaatgatgataggttggacctctctcctgtcagcagcaagaagatgaaagaccttttccctcatgggaatgaagaagaatgttacct

SEQ ID NO: 30286 - DNA, 380 bp, Glycine max
  Clone ID: LIB3051-019-Q1-E1-C7
aaccgattcaacgttgaggttcatttttaatgagctcattgctttgataaaggatactcgtcaacatacaggatatattgagtggcacattaagatttaagatgtatacatagatgcttctcatgagacgctggtcgacgctattctgctggcatcttgcgagacagaacagtccatctagaagtatccctatggaatttggtcaaagtgggtcatctatgttcgctcccaaagctcatgtggctgccatgcgtgcgattgcctactcaagttcgtgggtatggttctcatgatgctcacattcatgacaagtaatcttaagacgctatgagattgtaagttccattgcctcacacaactttacgtgatgaatccatgac

SEQ ID NO: 30287 - DNA, 391 bp, Glycine max
  Clone ID: LIB3051-019-Q1-E1-C8
attaattcttctgggacactctagtttcgctaatagggagcactactggtctgggagtgacatcattgaatacaaaggaactggtagataatttgcatcattatggagtaatcacatctataacggtagctgaagtaatggtgaccattgatacagcattgtgtatacccacctgcggtggacactaaccatatgtgcacagtcctatgccgattggctacaatgccaccatcgctgctccgcatatgcatgccacctgtacttcagttgcttgagaagaatttgcaacctggaatgcatgttcttgaccttggatccggatcaggataccagacagcatgctttgccatgatggatgataccccacagccgtactattgctgtcgcacat

SEQ ID NO: 30288 - DNA, 311 bp, Glycine max
  Clone ID: LIB3051-019-Q1-E1-D1
agcaaatggccgactagattcccttcagcatgatctgcatgctcgcccgtcacgttcccgaaagcggagcacatcctcctctgctgagccctcgattgacacgaccgcaccgacgattggatcactcgcatgatacagatccggactgaatgcgtcacgaatcagagtgtcgtgaaaatcatcaccaccgacgacgccgtcgattccagtcacggcaacaatgacggtgccaccattttctccggcgatactagtcactctactctcatgtgtgccctgatgtcggtttattcccgggacattgtcgttca

SEQ ID NO: 30289 - DNA, 384 bp, Glycine max
  Clone ID: LIB3051-019-Q1-E1-D10
aaaactagtaatattattcttcgaatccattttattattcataatgggtattttcacatttgaggatgaaaccacctcccctgtggctcctgctaccctttacatagctctagttacagatgccgacaacgtcatcccaaaggctgtcgaagccttcaggagtgttgaaaaccttgaggggaacggtggctctggaaccatcaagaagatcactttcgttgatgatggagaaagcaagtttgtgttgcacaaaatagaatcagttgatgaggcaaacttgggatacagctatagcgtagttggtggggttgggttgccagacacgtgtggagaatatcacattcgaatgcaaatttgctgctggcgccaacggagggtctgctg

SEQ ID NO: 30290 - DNA, 370 bp, Glycine max
  Clone ID: LIB3051-019-Q1-E1-D2
aaagagtgacgcatacacagccatccaaacctacctgagtgcaaactcatcccatagagccatgaggctcaaagctgaagttgtgaatgatagccatacccctcttgtcctcagcatggattacaacgatgagataactgacgagtttcatggcatcaaactatggtggagtgcaaacaaagtaagcagcagtccacaaagatacaaccctttttcttattacggttcctcagactagaaaaggttctacaagctaacattccataagcgccaccgtgatattgtcatcatgtcttacataaagcatgttttggatgagggaaaggatattgagatgagaaacagacagttgaagctttacaccaacaat

SEQ ID NO: 30291 - DNA, 410 bp, Glycine max
  Clone ID: LIB3051-019-Q1-E1-D3
attcactcgccaatgcacatcacaaatgcctgatgattttctcactctggatgacttatattacattgtcagtacatcacccgaaggaaatatcatagctttgaagtttgacacaatgaactggctcattagtatgcataataagtgggtcctttagattctgtcgtgtatgttctcctaagttgtctgtgtctatttaccatcacttcaacgtctcatgaagggcctgagacgtcatataagtgtgcgtggaacagaagaataaagttcgtcattgtagctatattttgaatgatataacttgccttatgtatactaacaatgaaaatcattatactataaatttgttaaatctctttacaagatctcgtagtactacatagtattgttgcaacaactacacatgaaac

SEQ ID NO: 30292 - DNA, 412 bp, Glycine max
  Clone ID: LIB3051-019-Q1-E1-D5
aaccgcccacgcgtccgggacatcaaaaggagaagaaagtgaagctgctaagaaggagttcatataagcccttaaattgttggaggaacagctgggagacaagacttattttggaggagacaatctaggttttgtggatatagcgcttgttccattctacacttggttcaaagcctatgagacttttggcaccctcaacatacagagtgagtgccccaagtttattgcttgggccaagaggtgccttcagaaagaaagcgttgccaagtctcttcctgatcagcaaaaggtttatgagttcattatggatcgaagaaagaagttaggcattgagtacgttggagcttaatggccaatgtgaagtactggttttccattggtcgttcatagccgttcaaataagtaatatttg

SEQ ID NO: 30293 - DNA, 430 bp, Glycine max
  Clone ID: LIB3051-019-Q1-E1-D6
atccgaagagttcacgcagtttgttctgaagatgagtggcttttctgtgaaatttatgatggctttaatgggagagatgcagctgactttctgataccctttatgactttatcatatcttattttaagatgttatactgggatttggaaccagattccataaaagcttctaacattgcgagtatgggtggatcctttcaatataattttgatgatagtcttaatcttcaggagcatcaatctctgtcatcatttaagggaagcgattccagtcttgactgtttcacagacagtactccacattccaattcagaagcatctcctaaatcattttcacaaactacagtacttaatggcctccaacatgttcttactcaggttgagaatgatttcctgtacatggctgagtaggaaatggacgaacatccaga

SEQ ID NO: 30294 - DNA, 424 bp, Glycine max
  Clone ID: LIB3051-019-Q1-E1-D7
cgcgaaccaacaatcgcggagatggtctgctgactgctatacgtaaagaatgtctaagagttatggattataaagagttgcttttaaacgattgtggcgatcgcgttgctcagttgttacatgttcagtcagctaccccctttgtacaaaacccaaaaggcagtgttcctcaagagtttctgattgtgaacacccacctgttatttcctcatgattcaagtctttgtgtagtgagattgaatcaggtttaccagatattgcaatatgtggaattgtatcagagagaaaacaggctcaaacccatgcctattatactctgtggtgactggaatggaagcaagcgtgggcatgtttacaagttcctaaggtcacaggggtttgtatcatcatatgacattgctaatcaatacagtgacagttatgc

SEQ ID NO: 30295 - DNA, 354 bp, Glycine max
  Clone ID: LIB3051-019-Q1-E1-D8
aattcaccctcgtgctcggcgttcgtctgctagcagtaagcactttggtttgtctcgtcaagttggattatccctagagccttaacacaatagcggccatgacatagatcaattattgtagcgacattagtcgatacgcagagaaggggaaccacagagtccagttcgacacccggttctgagttccaatcagcagatgacgatcccacacgtcacgaccctacgtacactgtagcagccacacgtttatccgttgctatgattgctgaagttgagatccatgagttagatgcacaggacgaagcatcttacgccaccgtcaggagagaaagaatggtaagtcttcactcctat

SEQ ID NO: 30296 - DNA, 424 bp, Glycine max
  Clone ID: LIB3051-019-Q1-E1-E10
acaacgcgtccgcccacgcgtccgggagagaccattcaatataaggacattggctcaactttcagtttttgaggcagatgtgtaaatctgactcaagaagactgttagttggtaacatccacgtactttacaacccaaacaggggagaagttaaattaggtcaaattcgttttctcttgtcaagagcacaatacctctcagagaaatggggtaatacccctgttgtgctagctggtgattttaatagtactcctcagagtggaatatataagttcttgtcatcatctgagcttaatgtcttgctgtattacagaaaggaattatctggacagaaacgctgtcgtcctgcccaagttttaggcgagaataaacaaacagttggtccaattgtcacactatatggggctcaaattgtacacaggga

SEQ ID NO: 30297 - DNA, 414 bp, Glycine max
  Clone ID: LIB3051-019-Q1-E1-E12
aactcagagaggaaagatggcatttttgtggtcagatctgatgcaacaagggtaagcagccaggttctgaaggctggagctcgtaagcatgaattgttagttactaatgcagttgcaacaaaggaaggccgtcctgcggcttctacatcaaaatctgggcatgaacttctcctttttgaggccctacgtgaaggtttggaagaagaaatggagagggatccttgtgtatgtgtcatgggcgaagatgtaggtcactatggaggatcctacaaggtgactaaaggtcttgccacaaagtttggggaccttagagttttggacacccctattgctgagaactccttcacggggcatggcattggggctgccatgactggtctgaggccagttgttgagggcatgaacatgggattc

SEQ ID NO: 30298 - DNA, 399 bp, Glycine max
  unsure (1)..(399): unsure at all n locations
  Clone ID: LIB3051-019-Q1-E1-E2
atcaacatgccccctactattcgagctttcatcatcaagtattgcatctccacgtacgcgcatggcgaaatcacatagcagcctgaggattgccctcatcgggcatcagacgcaccgtcatcaactctagagttcacctcagctcatccaccgtatggttagagcgttgcttgcgacccatggccgacgaatatgcgaccaagtcnagtgccaaacgtaagcacagtactacgtccgtgaccgacaagccatcacgcgtctctgctcaagacgttaatgaagcgctactacgatgcaacctaataactttgatatctctgcttgttagatgatcacttttgtttctcaagtcacagcacgacacacctagttgctcatgattctaagaatttttttttt

SEQ ID NO: 30299 - DNA, 437 bp, Glycine max
  unsure (1)..(437): unsure at all n locations
  Clone ID: LIB3051-019-Q1-E1-E3
atttacgtgtagtaaattctatggataccatggcatgtaataaagggcaaaccgtgagaaatgcgaagaagaagcaggtgaaagacgagttggatcgtcttaaacaggctgagaagaaaaagaggcgcttggaaaaagcactggctacttctgccgccattatttctgaactggagaaaaagaaacagaaaaagaaagaagagcagcagaggctcgacgaagagggcgctgctattgctgaggctgttgctctgcatgtgctacttggggaagactcggacgagtcgtgtaaggttgtgatcgatgacggtgggtgcaagacctggaactgcaaccgaactctcggcatctccttgggtggagaaagtgcttgcttccctcatctagatggtggcagatggtcttttganagagtggttgggtctctgatgcataca

SEQ ID NO: 30300 - DNA, 425 bp, Glycine max
  Clone ID: LIB3051-019-Q1-E1-E4
atccacctgcaattgagaatcttatggagcttctcacaatgattgatgcctgcatgagggcttcagccaaaaatattactgctgtcattccatattttggatatgccacagctgatagaaagacgcaaggacgtgaatccattgctgccaagcttgtagcaaatttaattacagaagcatgtgcaaatcgtgtacttgcttgtgacctccattctgggcagtccatgggctattttgatattccagttgatcatgtgtatggccagcctgttatacttgattaccttgccagcaagactatttgttcagatgatttggtagttgtctcgccagatgttggtggtgttgccagagcacgtgcttttgccaaaaaattatctgatgctcctttagctattgttgataaaacgcgccatgggcataat

SEQ ID NO: 30301 - DNA, 374 bp, Glycine max
  Clone ID: LIB3051-019-Q1-E1-E6
tccatacctcgcgcctgccgctaatggggcgccttccatgtcaggaaccatggcgtacccccttcactcatcacctcccgccgccgcgccggcctcaccatcttctcggacactcacattcctgacaagctctgggactcctgctcggcctccgctcacgaaggttactgaagcaaaatgctcgcatcaactatctccgatgaaaacgatgccgttcaggtcctcgattgaaaggactacttcgaccaccatacgctgctactctcacgccggaactctaacaggtggccggagtttcataccgactatcgtgagctggtggcgacgtataacgactagatgacgattctggcgcaaaagttgctggctttgat

SEQ ID NO: 30302 - DNA, 417 bp, Glycine max
  Clone ID: LIB3051-019-Q1-E1-E7
aacattcctccttgctccccaacataaaggcttttttgtgcgcaatgatatttttcactttgttgaaaaggatccagttcaccaacaacaaccattcttgtgacctcagagcactcttgattcaaaattgaatgcatcaattgcaaccaataaatctgtgtccaaatacatgctgggtggagatatccaatctatggactacgttgctacaaatgatgtcacagaaaatggtgtagttgataaatatggattttcagagcaaatcatgcagcgagcccctgatactgagcatattagggaggataatactgttgaagagtcaaatggttcacttcaatcttcagtgaatgcagtacaagaccatgtgcctgtttctcctgatgaacctgctggggagctacaaaagcacacttatgc

SEQ ID NO: 30303 - DNA, 423 bp, Glycine max
  Clone ID: LIB3051-019-Q1-E1-E8
atccatggatgacaactggattggttttgtcttttgtgttacatttgagcggaacattattcgtcctgcggtttctagtagttctccacattgttcattttcttcgtcacatccgtttcgtctttcttttgaaagtgaatacacagaagaatactttgacatgccacttaatttggagttgaacaagatttatggatcaaaacatctttgggtcatttatatctctcgagaacactgccattttgtgaaaacaggggctcatatcacatttaaagcccactcaagtgttaagatcaatgcatggggcatgaagagtatattcaggcaagatatagatgaccttgaaaggatgcaacaaggagaatctcttccactccatcctaatgatgtagtacaccatgttgactttgatagtgtagaaaa

SEQ ID NO: 30304 - DNA, 174 bp, Glycine max
  Clone ID: LIB3051-019-Q1-E1-F1
atcaaacgtccgcctactcttccggcaattgttgtaactttttgagtcttaacgtcagtaaaagtcgaaattactttgtcgttaggggaaagagattgtgtgtgtctcagtcactatcgctggatcgagcgaaggtcttaccagctgaatcgatttgggaacgacttacttgtg

SEQ ID NO: 30305 - DNA, 311 bp, Glycine max
  Clone ID: LIB3051-019-Q1-E1-F4
atcaagtacctacgcacagatagatcttgttttttttctgcctccatcattttctcgagagctttcagtttgtgtggctcatctttcttcgtctccttcactcgcccctcagtaacagcccgcctctctgaatcgctttccgtgattcatctgtcgttcaagctaagattttcgggcatgtctaggacgtcaccaagaagcaaacttacaaagatgtttcgaaagctacgtgttttcaggaacgagatgcaagttttattgtcgactttcgctagtccaattaagtttcagaactacatgtttcattgaaa

SEQ ID NO: 30306 - DNA, 433 bp, Glycine max
  Clone ID: LIB3051-019-Q1-E1-F5
atccgaaacatctttccctccccttctgcttcaaaaagcttcgcttcgcggacttcttccttctccgctgctcatgcactcttcggatagaccgttccgctactggagcgaccgcgggtagtccacctcatctgctcactatcagatcctagagtacagtggtcgctggtgtcatcgaagggcttgatgggaagatcgctatcatggacaatgaaaatcgttacactggaaacttgacaagtcatctaaagcctggtggcggcgattttggaaacttctacaggcttccttctgtcaatgatttgagaattgacatgttaccatgatccatcagaattctccttgaatctgctattcgtacttgtgacaattttcatgtcaaatgcagaagattttgataagatactcgattgtgaaaataattctacgaagc

SEQ ID NO: 30307 - DNA, 314 bp, Glycine max
  Clone ID: LIB3051-019-Q1-E1-F8
aagacacatccagactcgaagccgaagaagacgatcctcataatactgccaacagcaccggatgcagcaatgagcatgacattccagatccctcccttcagccgagtcaaggatcacatgttcaaacaccatggtggcaaagggttcgtctctggccctatgacgtcagttaaagccagaagaaaatcatcagatggtctgtgttgatacgcaagatctcacatctcacatgatcgcctgcatgtgacagatcttgcccacgacgatcaagtagcaaatcaataatgcggaacagatcatgtctatccctacat

SEQ ID NO: 30308 - DNA, 416 bp, Glycine max
  Clone ID: LIB3051-019-Q1-E1-F9
acattcaacaagaaacaagaagacgtgcttttcaataccaagaagcaattatgcatttcctcagagtcacaagggaaacaagttgctgttttccaatgtgaaagtaatggagagttagttcttgaactcatttctcgcccaagtttcaattttagaggagtaaggccagccaaagtattgggaaaaacttcaatcaatctgggggatttgcaagatgtagcatctaaattgccaaaagagaagtggttagatttgacatctacagtcaattggtcaaagcctattggtattcgcattggtttgtctttaactcctccagtttcggcaccatatgagttgcactttgtttctatgtatccattcaaaggaagttagttttccttcctgcttccaagaaagttccagcaaacaaaatg

SEQ ID NO: 30309 - DNA, 369 bp, Glycine max
  Clone ID: LIB3051-019-Q1-E1-G1
atctacttcaaccttgcggatcaagaagacgccgcagccatggtgaactactccatagaatccgacaatcccaccatagtcctgcaaggccagatgcgcttagcttacagtgcatttcacgaacactatggagactgcctttgccatcacgaagttgcccctagttaaagctaacagatacctgcacgatattttggcccacagacaggccatccctttccgacgcttctgtagtggtgttcggacgacagcccaggctaacagcagacactcgaatggtcaatgacgctggcccgtcaaatcagctaagttcatcctagatttgctgaagaacgctgagagtaatgctgacgtacaaggtttggatat

SEQ ID NO: 30310 - DNA, 58 bp, Glycine max
  Clone ID: LIB3051-019-Q1-E1-G2
aaacaaatgtcagcactaagtgcagtaagcaaatctgcgtatcattaactaccttttc

SEQ ID NO: 30311 - DNA, 434 bp, Glycine max
  Clone ID: LIB3051-019-Q1-E1-G3
atgcacacaggatgcacattcaaccatcgttatgtgaaatcaaatccacgagaagtagagaatgccacttggatgctcacagtatttcattgttttggccaatatttctgccttcattttgaagctttccagcttggcatggcccctgtatacatggcattccttcgttttatgggtgatgaaaatgaggctcggaattatagctatagcctagaggttggggccaatggtaggaaactcatttgggagggtacaccacgaagtgttcgtgatagtcaccgtaaggttagggatagccatgatgggctcattattcaaagaaatatggccctatttttctctggtggggatagaaaggagctgaagctcagagtcacaggaagaatatggaaagaacagaattcagatgctggggtgttgcatgcaaatctctg

SEQ ID NO: 30312 - DNA, 73 bp, Glycine max
  Clone ID: LIB3051-019-Q1-E1-G4
aagaaacgcagccggtaacactgctcacgccacctccggaaaattcgcaaccaccatttgccagccacgatca

SEQ ID NO: 30313 - DNA, 435 bp, Glycine max
  Clone ID: LIB3051-019-Q1-E1-G5
atccaaggacgcgtggggtgccccgcgcgcggtatccaattaccgacaataacaacattgggtggtaacaaaaacaaaatccgcggttgtgcgtttttaaccttaattaataacaacaggatcatgaaacagctccacaagcaaacgagtctgaatcaccggagggaggaagagatgttggggagcagcgagagctcaccctactcccccaaatccatcaagcacaccagatctctccccagatccatcaactacctcctccgcgagcagcgcctcttgttcatcctcgtcggcatcctcatcggctccaccttcttcatcatccagcccactctctcccgcatgggcccacccgagccggcccacacattcctccctcgaaccgggcttgcccgcttcagcggcacaaggcctcgcacgggccgcgttccggtc

SEQ ID NO: 30314 - DNA, 370 bp, Glycine max
  Clone ID: LIB3051-019-Q1-E1-G9
aggaaagtgcagtggacagatacttgtggtagtgagcttgttgaaatacgggaatttgagcccagcgacgcggatgggtcagttgatgaattcgaccatgggaatcacaaaacttgttcctgtgctattatgtaaattggcattccaaaagatgacagagtcacagacccatttatgaggtatcaagtcgttgattgctaacatattccaccactcagcttgaggaaaaggagcagatatttttcagtctagtggagatttatacacctcttttgcctgagcaatcatttgtgtctataaatgcttgctgtggccttcaaattttgtgcctctgctttcatcaatttttgtgtaatctttgtcgtgtgaa

SEQ ID NO: 30315 - DNA, 368 bp, Glycine max
  Clone ID: LIB3051-019-Q1-E1-H1
ataaaacgacgacaatgcgatcaagaagcgtggttgggtcacgtggacgtagcagagaggtctctgattaaactttcacgctcacacctctcatacacaacgcaatccaaattttccttgcgtcttttcgtccatggatttggattggtcgtgttcttccaccatcagcatcaccaccggcaacccctactgtctcctcttccaagcgctatcactcattccaatctcgcactagctcctcttctcctccttcgttttcctctccttcctctaccgtttcctggagctccatttcctccaagacctcttctccctcttctccggctcctccgtcaccttaacctaccatcgcgcttcccaattctacg

SEQ ID NO: 30316 - DNA, 393 bp, Glycine max
  Clone ID: LIB3051-019-Q1-E1-H12
cccacgcgtccggtcttctcaactacgctactatgtatatatgtttttgcattttgctgggtctacattgtaagaattatggcatcagaggagacaacaatttggaaggcaatgataaaaactccagcctccatagtgttgataatttacacctttatatcaatgtggtttgtaggtggcctcactgccttccatttgtatttgataagtaccaatcagactgcatatgaaaacttcagataccgatatgatcggcgagccaacccatataatgaaggagtgttgaataatttcaaagagatattctgcatcagcattcccctttcagaggacaattttagggcaatggtgccgagagaaccagcattacctactcgattagttggtggaggc

SEQ ID NO: 30317 - DNA, 389 bp, Glycine max
  unsure (1)..(389): unsure at all n locations
  Clone ID: LIB3051-019-Q1-E1-H3
agataagagtgtcatccaccaactttatcgcccattggttagttctggcattggttttggtgctcacagatggattgccaccctcctaaggcagtgtgactgcttggcaatcctcaggtctcctcaaggcccatctgaagaccccacagcccaagcgggtacgacaaacatgatgaagctcgcacaacgcatgaccgagtgcttctgctcagggatctgtgcttcatctgcttgcaagtgggacatactgcacattggtaatctggctgatgacatgagaatcatggcccggaaaatcgatgacccaactgaagctcctggcattgtgctgagtgcttcaacttctgtttggatgccggtgtcacngaaacaggtgtttgatttttctg

SEQ ID NO: 30318 - DNA, 442 bp, Glycine max
  Clone ID: LIB3051-019-Q1-E1-H7
atccgaacaattccaagcatctattattggtttgaacaagttttgggcttttggtggtaatgtggtggctatggataatgactcgtgtggagtggggttcatggcggaactgtccaacgaaagtagctgcaaaacggtgattgatgttttggagatgctggtgcgcatggacccttcggacattggtattaggcttttggagccactcaaggcggagttccctattttgagctatgccgatttctacccggtgatgatttttttgtctttggtgtttgtgcgcttaatgttgtatttgtgttgacgcaattggttggcgttgttgccgttgaggtcacgggtggacctgaagttccattccaccctggaagagaggttaatatataataccttggtagagttgtgttcaacacaaatgacgggaactgattcacacacaact

SEQ ID NO: 30319 - DNA, 372 bp, Glycine max
  Clone ID: LIB3051-019-Q1-E1-H8
aaactgttacaccctctacttttcgtaatttctctcatccttctttctttcaagtgcaaaatcgatctctcactgcctcagcaatggctgcagatgatggtgtgaaacctccaactctcgagtttctcagcatctgcaagtctctcctcgccggcggagttgccggaggagtgtcacgaactgctgtagctcctctggagcgattgaagattctgctgcaggttcaaaatcgtcaagatataaaatacaatggaacaattcaaggcttaaaatatatatggaaaactgatggttttagaggaatgtttaaaggaaacggaacaaattgtgctcgtatagtcccaaattcagcagtgaagttctttagctatg

SEQ ID NO: 30320 - DNA, 362 bp, Glycine max
  Clone ID: LIB3051-019-Q1-E1-H9
aaatatcttgtcctcaaatgtgccatagaaacaaggacaaaaaaatcccatgtttctgaagttagcaggtttggagttccataagtagaaatgggaaaaagacaatctttgcgcaacaaagccacccaccttgtttctgtccttctcaaccccatctccgattccgacacttccaatcccaaaacctccaaacaacacccaccagcaccaacacctacacctccttccggacaagtaagtggattagagacaaatgatgaagagggtaaccgtggtttagttgatgggcctgatacttcatccttcactgcgttcctctattccttattgtcctcctctgacactggagataatgcaaactc

SEQ ID NO: 30321 - DNA, 113 bp, Glycine max
  Clone ID: LIB3051-019-Q1-K1-A1
ctcacacgtccggaaagaatctatacctcgtactcatgcaccatgacttggttcaacaccactctaagctgttttcaccgcgcataaggctccgacaaacacacctgctacac

SEQ ID NO: 30322 - DNA, 52 bp, Glycine max
  Clone ID: LIB3051-019-Q1-K1-A2
cgcacacgttcgggtcgcatttctaccacatacatctcgaccatactacccc

SEQ ID NO: 30323 - DNA, 124 bp, Glycine max
  Clone ID: LIB3051-019-Q1-K1-A3
ggatatcgctgaggcagcatcagctgatgatcttgctcgatattaggatttaaataagctgggtgaaagagtttccatgtgtgaggccgtgtgaacgtacgatgggagggggattagggaaagt

SEQ ID NO: 30324 - DNA, 140 bp, Glycine max
  Clone ID: LIB3051-019-Q1-K1-A4
cccacgcgtacgggtggctgctcttggctatgataatggtttctatgcccctggaagatgctcaaaagaatatgggaattgtactgctggcaacacaagcactgatccttacatagatgcccaaagtttgatatggtcgc

SEQ ID NO: 30325 - DNA, 223 bp, Glycine max
  Clone ID: LIB3051-019-Q1-K1-A5
atcactcttacgtccgactctgtacaagcagcactcacaatacgataacccatccggggcaacacgattcctttccatagtcaatggcacaacactcacattccattcctcgtcccaaacgccgattccgctgtggcgatttgtatgacaacgagagcgcgagtgacacatcagatccgtagagttaaaattccggttctgagtagatccaagtctcttcatg

SEQ ID NO: 30326 - DNA, 133 bp, Glycine max
  Clone ID: LIB3051-019-Q1-K1-A6
cccacgcgtacgccttgatatgatccgcaagattgctgatgaggatcctgacgactggactgacaaataaaagaaatatgcatactctgacgatgatgagaagaaaggaccatattctaagttctggaatgag

SEQ ID NO: 30327 - DNA, 243 bp, Glycine max
  Clone ID: LIB3051-019-Q1-K1-B1
ctcaaatttcaatctccttttcttgattcgttcatctttggtctgaattctcctatgggtattcgagattttccgaaaaggtatattggttgttgaatcgaattaggtcttttgccatgtgtacagtctacgctggatgtgcaggatgcaatgatgccaatgctaccatgagacaattctataggcgcaagtactcaaagtttactcaacaagaacttccagcatgcagacctattctcacac

SEQ ID NO: 30328 - DNA, 123 bp, Glycine max
  Clone ID: LIB3051-019-Q1-K1-B2
cgaaaattaggaaagagtattgaaaaattggggttaaggaaaaggtgaagggtgaagagctgtttatctctctagtgctgataaaaaggtgccattgtccatttctcgatccatgaattttgc

SEQ ID NO: 30329 - DNA, 133 bp, Glycine max
  Clone ID: LIB3051-019-Q1-K1-B3
cccacacgtccggcgctagctcttgctaaattcttctctaccttactactccctcactttgtgttagaatcatcatgggtttgcataaccagttaaacgacgtgtcgtcgggttcgagtccgcttcttgtgtt

SEQ ID NO: 30330 - DNA, 66 bp, Glycine max
  Clone ID: LIB3051-019-Q1-K1-B7
gttaatcttataatggattatgtgctatctttctgttaaccgctaatgtgtatgtggattcaggac

SEQ ID NO: 30331 - DNA, 117 bp, Glycine max
  unsure (1)..(117): unsure at all n locations
  Clone ID: LIB3051-019-Q1-K1-B8
tgagaggttggaagacttgtgatgtggagtatcaatcttactttgctcttgatgagggctggtaatcgtttaaggagtatagtgcgtatngatcaggagtccctttgatacttgatc

SEQ ID NO: 30332 - DNA, 206 bp, Glycine max
  Clone ID: LIB3051-019-Q1-K1-B9
gttaaacatactgataaattgatggttaaattgattagaaagatagtgatagtgtagggaataattaaaatatagagatgattataataatatgagtacatgtattagaacattgagtgtggaagtttgtgacgtaatagaggaggatgttacagagctgggtaaatgcaggtgtgatgttgattaagcatatgataagaggtata

SEQ ID NO: 30333 - DNA, 81 bp, Glycine max
  Clone ID: LIB3051-019-Q1-K1-C1
gaaaaataataagatcgaacgaatgctccatccatgattccattcatcgattccatggtggggagaagcgtgccgtcgatt

SEQ ID NO: 30334 - DNA, 136 bp, Glycine max
  Clone ID: LIB3051-019-Q1-K1-C10
cttaaacatcctcgtcaatatcgcctacaattgtgtcaaattctttagaaacggtctagaagactttcaataaggtcgataaacttgcatgtgagctgcattggatgaagaggtcacagagaaagttgcagcgtaa

SEQ ID NO: 30335 - DNA, 108 bp, Glycine max
  Clone ID: LIB3051-019-Q1-K1-C2
tccgcaacattataatttctattacatacttttgttctaggatgacaagttactactgattggtgggctgggttcgtggcagcatttgtacggtggtgatgatgatgg

SEQ ID NO: 30336 - DNA, 59 bp, Glycine max
  Clone ID: LIB3051-019-Q1-K1-C6
gtactatcaaaccctcaatgcttgcatggcgttgaggttgtgtgaacacccggtcgggt

SEQ ID NO: 30337 - DNA, 62 bp, Glycine max
  Clone ID: LIB3051-019-Q1-K1-C7
cttaaacgttgaggttcatttatggtgtagttattgataatagtaaggattgtttggtattt

SEQ ID NO: 30338 - DNA, 216 bp, Glycine max
  Clone ID: LIB3051-019-Q1-K1-C8
ctaattccttctgggaaactgtatgttctctaatatggagcaatactgatctgggagggccgtcagtgaatacataggaatggtagataatatgcatcgttgtggagtaaccacgtctataaaggtagctgaagtaatggaaaccatgtgtagagctttgtttggacccggagggagtggagtccaaccttatgtggacagtcctatgcctattgg

SEQ ID NO: 30339 - DNA, 337 bp, Glycine max
  Clone ID: LIB3051-019-Q1-K1-C9
gtttgagaccctgatcagtcactcactcactcgaagacgatgagttcgatccgtgatggaaccaccaagccagattgtctcattgcggactaccacgactgatcccgatcatgtgaaagtcattcagtgggacgacttccagcacgatcttgcaaggttggcgagtctctcttctgcactccacgaagccaacgagaagaagcggaatcttcagcacaagctcgagtccctaatccaggtcaatgctgaatcattgggtcggttgaatgaacttgaggagatgcgtcagaaattggaatcaaagaaaatgttgatggagaatatgtctatatgttct

SEQ ID NO: 30340 - DNA, 53 bp, Glycine max
  Clone ID: LIB3051-019-Q1-K1-D2
taaattaacattccatcctccaaacctaccggatgcaaacttttccatagagc

SEQ ID NO: 30341 - DNA, 57 bp, Glycine max
  Clone ID: LIB3051-019-Q1-K1-D4
cctgctctgttttgaaacataacatgaagcaaagtgaacaaagagccatcggcatgc

SEQ ID NO: 30342 - DNA, 106 bp, Glycine max
  Clone ID: LIB3051-019-Q1-K1-D5
cccacgcgtccgggacatcatatggaaaagataaagaagctgccaagatggagttggtataagcccttaaattgttgtatgaacatgttggagacaagactgattt

SEQ ID NO: 30343 - DNA, 124 bp, Glycine max
  Clone ID: LIB3051-019-Q1-K1-D7
gcgcgaaccaacaatcgcggagatggtctgctgactgctatacgtaaagaatgtctgggagttatggattataaagagtggcttttggacgattgtggcgatcgcgttggtcagttgttgcgtg

SEQ ID NO: 30344 - DNA, 307 bp, Glycine max
  Clone ID: LIB3051-019-Q1-K1-E10
cccacgcgtccgcccacgcgtccgggagagaccattcaatataaggacattggctcaagtttcagtttttgaggcagatgtgtaaatctgactcaagaagactgttagttggtaacatccacgtactttacaacccaaacaggggagaagttaaattaggtcaaattcgttttctcttgtcaagagcacaatacctctcagagaaatggggtaatacccctgttgtgctagctggtgattttaatagtactcctcagagtggaatatttaagttcttgtcatcatctgagctaaatgtcttgctgta

SEQ ID NO: 30345 - DNA, 53 bp, Glycine max
  Clone ID: LIB3051-019-Q1-K1-E6
cccatacctcccgcctgccactcatggtgctccttccacatcataaaccacgg

SEQ ID NO: 30346 - DNA, 66 bp, Glycine max
  Clone ID: LIB3051-019-Q1-K1-E7
gacattcttccttgctctctgatataaaagcttttttgtgctcaatgatatttctgggtttgttga

SEQ ID NO: 30347 - DNA, 52 bp, Glycine max
  Clone ID: LIB3051-019-Q1-K1-E8
tggatgacaactggattggttatgtcttgtgtgttacattcaagcggaacat

SEQ ID NO: 30348 - DNA, 80 bp, Glycine max
  Clone ID: LIB3051-019-Q1-K1-F12
gtcatacttatgcactctcccaccgtaaagataatctgatgtctagcctttggctagggtttaaatgaaataggctcatg

SEQ ID NO: 30349 - DNA, 106 bp, Glycine max
  Clone ID: LIB3051-019-Q1-K1-F5
ctcacgcttccctctccgtatccgtgaaaaaccttcgctgcccgcacttattccttggacaccgctccttccagcatgcgatggatgcatgaggcgctggagccac

SEQ ID NO: 30350 - DNA, 60 bp, Glycine max
  Clone ID: LIB3051-019-Q1-K1-F7
tcacgctcccatctcgtcgttttgctaactcaagatcttcccaatgcgggggtgctgctg

SEQ ID NO: 30351 - DNA, 296 bp, Glycine max
  Clone ID: LIB3051-019-Q1-K1-F9
ccttcaacaagaaacaagaagacgtgcttttcaataccaagaagcaattatgcatttggtcagagtcacaagggaaacaagttgctgttttccaatgtgaaagtaatggagagttagttcttgaactcatttctcgcccaagtttcaattttagaggagtaaggccagccaaagtattgggaaaaacttcaatcaatctgggggatttgcaagatgtagcatctaaattgccaaaagagaagtggttagatttgacatctacagtctattggtcaaagcctattggtattcacatt

SEQ ID NO: 30352 - DNA, 81 bp, Glycine max
  Clone ID: LIB3051-019-Q1-K1-G1
atctaactaaaccttgcagaacaagaaaacaccgcaaccatcgtgaactactcctgagaaccgggctatacaaccaagtcc

SEQ ID NO: 30353 - DNA, 267 bp, Glycine max
  Clone ID: LIB3051-019-Q1-K1-G10
gagcgacttatcggttgttcggcacaaccttttagttcttggcttacactaggttaagattctgttttctgggttgcagggtcgtaactcatccacaacaaagggggagcagagaaacaaggtcgatgagagttgagtatataaggttgcagcaatacaagtgaagtatcttcgctggtgctataaataattaaacatgtcttctgcggcaacttcaacttggatcacgtacttctcgtgttcacccaatgcaactaccaatttacc

SEQ ID NO: 30354 - DNA, 380 bp, Glycine max
  Clone ID: LIB3051-019-Q1-K1-G11
ctctgccgctcaatttcccgcgctccgtgtctccctacgtgactcaccggaaatccgagtgcgaacgccgccgggaaaggctattctacggcacgccgcagatgaacgctgccgcgtgcgacggcggagcagcgtcggagaaccggagacacggtggaaggttctggatcctctcgaatttattccgagccagatcgaacaagaccgaatcctcgccctctcatcctccgccgtcatggttctcgacaatccttcacgcgcgccggcacaataagtgtcggcacgcggatcgaggattgtcgccgttgacagaggtggagaatttcaccgaatactctgctgacacagtgcaagaccgatctgactcgggaatttcgtcg

SEQ ID NO: 30355 - DNA, 109 bp, Glycine max
  Clone ID: LIB3051-019-Q1-K1-G4
caatttgcttcctctgtttccattctttcttcttcattttggtgtcttcttcagttctacttttttcttgtgttctcgggtgagttttacagctgctgaaggcttccat

SEQ ID NO: 30356 - DNA, 75 bp, Glycine max
  Clone ID: LIB3051-019-Q1-K1-G5
ctgacgcgtggggtgccttcttcgcggcatacaattaccgacagtaccaacatctggtggtaacataatccaaat

SEQ ID NO: 30357 - DNA, 71 bp, Glycine max
  Clone ID: LIB3051-019-Q1-K1-G6
cacatgcgcacccggtcacactggtcacgccaccgtcggaaaattcgcaaccaccagtggccggccacgat

SEQ ID NO: 30358 - DNA, 177 bp, Glycine max
  Clone ID: LIB3051-019-Q1-K1-G7
tgaagtttatgtatcttgcattcctacttctatttgttttctctagccaattcttgcttggatgagcagatgcttcgcccagacaagtgattgacacagatggcaagaaatttcgagctggcgtagatgactatatccgacaggtcccgacaaccgcatgtgataggcagtgggccg

SEQ ID NO: 30359 - DNA, 52 bp, Glycine max
  Clone ID: LIB3051-019-Q1-K1-G8
caatttgcttcctctgctaccattcactcttctacattttggtgtcttcttc

SEQ ID NO: 30360 - DNA, 386 bp, Glycine max
  Clone ID: LIB3051-019-Q1-K1-G9
ggaaagtgcagtggacagatacttgtggtagtgagcttgttgaaatacgggaatttgagcccagcgacgcggatgggtcagttgatgaattcgaccatgggaatcacaaaacttgttcctgtgctattatgtaaattggcattccaaaagatgacagagtcacagacccatttatgaggtatcaagtcgttgattgctaacatattccaccactcagcttgaggaaaaggagcagatatttttcagtctagaggagatttatacacctcttttgcctgagcaatcatttgtgtctataaatgcttgctgtggccttcaattttgttcctctgctttcatcaattgttggataatcttttgtcgtgtgaattcatttggcttttaat

SEQ ID NO: 30361 - DNA, 74 bp, Glycine max
  Clone ID: LIB3051-019-Q1-K1-H1
gttaaacgacgactatgcgatcaagaagcgtggatgggtcacgtgaacgtagcagagaggtcgctcattaaact

SEQ ID NO: 30362 - DNA, 176 bp, Glycine max
  Clone ID: LIB3051-019-Q1-K1-H10
cccacacgtccgcccacgcgtccgcccacgcgtccgcccacgcgtccggtagaactatgtattgttgtattaatatcactggatcctaataagtgttgggctaaaggcctaaagctatatatgcaccttatatttcaatttgcaataccaaaaaaaaaaaaaaaaaaaaaaaataa

SEQ ID NO: 30363 - DNA, 243 bp, Glycine max
  Clone ID: LIB3051-019-Q1-K1-H6
cccacgcgtccgaaaatattgaaaagccgcaagggaggtttcgtttcgttgggttcagttcacacattctattctctatcgatggctggtccctgcttctcaatccactacaccagaggtatgaggagccaacgtgtgtgtgatgggtgtggaagcatagttagtttaccctagaggagcaggcagtgtgtgctgggcgttgtgcaacaccagttacctctgtggctgctcctgtgatggaca

SEQ ID NO: 30364 - DNA, 106 bp, Glycine max
  Clone ID: LIB3051-019-Q1-K1-H7
cacaattccaagcatctattattggtttgaacaagttttgggcttttggtggtaatgtggtggctatggataatgacgcgtgtagagtggggttcatggcggaact

SEQ ID NO: 30365 - DNA, 348 bp, Glycine max
  Clone ID: LIB3051-019-Q1-K1-H9
gttatattgtcctcaaatgtgccatagaaacaaggacaaaaaaatcccatgtttctgaagttagcaggtttggagttccataagtagaaatgggaaaaagacaatctttgcgcaacaaagccacccaccttgtttctgtccttctcaaccccatctccgattccgacacttccaatcccaaaacctccaaacaacacccaccagcaccaacacctacacctccttccggacaagtaggtggatcagagacaaatgatgaagagggtaaccgtggtttagttgatgggcctgatactatatccttcactgcgttcctctattccttattggcttcctctgaacactgga

SEQ ID NO: 30366 - DNA, 346 bp, Glycine max
  Clone ID: LIB3051-020-Q1-E1-A10
aaaccacgcgtccgcccacgcgtccgatcccaactcatctttctctttttctcactctctcacacccacaccctaactttcaccatgcggttccaatcgctctaaccctaactccctctctccatcatcgatcttcgatccgcaccgccgttcctttgaatctcttcagattctccgctgcttccaccaggaggaggattttttcgcgattcgcgctcgacgcttccgttgccgccaatcgatgagattcgctccgaatcccaacgccctgccgtcaagtttttcgcggaagtaacggatcctgttgttgttctgcttcgagtcgattggattgctctgttttgcc

SEQ ID NO: 30367 - DNA, 383 bp, Glycine max
  Clone ID: LIB3051-020-Q1-E1-A11
acacccacgcgtccgccgcgacgtcgttttcagacacggcttcgatagtgaagcaacgattcaatagttgacaagtggttttggtttgatatatagatgtggtgcgcgtcgtgttgttcgaaggaagtgaagtaaagactaaagagagttgtggtgtggtggtggttgtcgtttttgaaatggcagcgtcgtcgtcagagaagcaagtggtggtgatagggatggacgacagcgagcagagcacgtacgcgttgaattgggctctggataactttttccccagcccaggtttcaagctcgttctcagccactccaggcccaacgccacctccgctgtgggcttcgccggccctggagccgctgaggtcttgcctattgtagat

SEQ ID NO: 30368 - DNA, 416 bp, Glycine max
  unsure (1)..(416): unsure at all n locations
  Clone ID: LIB3051-020-Q1-E1-A2
aaattaatttacaaaaggtcaagggaagcacggaaacgctttgacaaggctagccttatttatgaccagactcgtgaaaggtttctgtcactaagaaaaggcacaaaaactggtgtagctactgccctagaagaggagcttcatagtgcaagatctacatttgagcaagctcggtttaatctggttactgccttgtcaaatgttgaagcaaagaagagatttgaatttttggaagcagtcagtgggaccatggatgcacatcttcgttacttcaaacaggggtatgaattgttgcaccaaatggagccatatattaaccaggtcttgacttatgctcagcaatcaagagaaaagtcaattataagcangcaacccctaattaaaaaaatccaagagtacanacgacagattgatcg

SEQ ID NO: 30369 - DNA, 410 bp, Glycine max
  Clone ID: LIB3051-020-Q1-E1-A4
aacacgccttcgcacaattttgattgtgatttaatggatttaattcactacgaaagtgcattgtacctatgaataacatccataattgatgccacaatttgattgtgagttaatggatttggttctcttatttgatacttcaggagtacatgttaagggcagagtttcgtcttcccagtatagtagatgaggaagcaactcctgagagaaaagctcctatacgtgtaaaatttgagataccatattttactgtgtctgggatacaggtattgctccgtgtactgatgtacaatcttcttatattctgaatattgttatgcctgtatgcatctctatcttattaaaagatgaatatgtcatgtattttatatctcacatttgtcaccattgatgtctcacatgtcattttg

SEQ ID NO: 30370 - DNA, 434 bp, Glycine max
  Clone ID: LIB3051-020-Q1-E1-A5
acacggacgcgtggggcacaatggactaccttctacttcttccactaataatcaccatagtatggataaacattcatgtattcatctctagcttcaaaccactcaaatcctctaaaaatcccccgggtcctcgcccttttccaatcataggaaacatcttggagcttggcaaccagcctcaccaagcacttgccaagctttctcaaatttatggtcctataatgagtctcaagcttggtaagactaccaccattgtcatttcctctccacaagttgccaaagaagtgctacaaaaacatgatcaaatttttgctaataggacagtccctgatactctccgagcacttgatcatcacatactttctgtggtgtggatgccacctttagcacaatggaggacccttaagcgagtttgtgctaccaaagtgttctct

SEQ ID NO: 30371 - DNA, 141 bp, Glycine max
  Clone ID: LIB3051-020-Q1-E1-A9
aacccacgcgtccgcccacgcgtccgcacacgcgtccgcatatatgtaaaataaattaataataaaatttctattagtaccaaactcagtaaaaaaaacgataaaacctgaaggttcaataaaatagaagattaaataatt

SEQ ID NO: 30372 - DNA, 418 bp, Glycine max
  Clone ID: LIB3051-020-Q1-E1-B10
aatgtctgttgggcttttagggttagggttagggttagggttttggtttgtggatctattgttgtcgctgcgatggatcgcaagaggggaaggcatgaagctgccttcaatttcaatggcggcgccaagaaatcgaggcctgcacctctggctgtccatttggtgaaggatgccacttcctgcattatgttccaggtggattcaaagctgtctctcagctgatcaatgttggtagcaatcctgttattcctcaagttggtagaaaccctgttccaccatccttcccagatgggtcgtctcctccagttgttaaaactcgattgtgcaacatgtttaacacagccgaagggttcaaatttggtgacaaatgtcactttgcccagtgtgagtgggagcttggcaggcctacagcgccatc

SEQ ID NO: 30373 - DNA, 432 bp, Glycine max
  Clone ID: LIB3051-020-Q1-E1-B2
aactgtttccgaatgctgctcccaatgaaatgaatttttttttaataataataattttgaccttaaatccttgtccttttgaggttaaatttgatggaatatactgttggggtgtctcactgctgcatacagaagtaaaggcatctgcacctgctacattgatggaggtggtcaaagcaattgccaagcacgaacctgcagctcctgaaagtgttgctatcagagctgatcagaagagttatagttacaagcaactcatcacatcggcacagaagatatctaatctcttgtgtggcagtgatgcacagacaggaaatctcggtggagctcgaataggaattgtagccaaaccttctgctgaatttgttgctggaatacttgggatttggcttagtggaagtgttgctgttccgcttgcaaccagctatccag

SEQ ID NO: 30374 - DNA, 430 bp, Glycine max
  Clone ID: LIB3051-020-Q1-E1-B3
aaaatgaggaagaagaggaagaacactatgaagaagctgaacaagttaatgatgcatcagatgaggaggaagaggaggaaccaaagcagaagaacaaggagtttagaggcagtgccaaaaggaagggatttgaatctgatgaggactctcctccaaggaaaacaaccacccatcggcggatggcggttgtgtacgatagtgatgaggactaaacttccttaagctagattttcatgggaagtgcagctatctgatgcagcaaaggcagagatggctcttagttccccccatatatagctacatttttaatatttcatccttatatacataaagcagagcctgggacactaaagtagtgtttattctcaggtcacaatatatgtttttttgactgtcttgttaatggtgataaaagaaattcagtgtacat

SEQ ID NO: 30375 - DNA, 416 bp, Glycine max
  Clone ID: LIB3051-020-Q1-E1-B4
accacgcgtccgcccaagccttcgggttgatcgggatcaagagtccttcagtttctcctcgttgttcttcgctttcctgttttcaatttcgattctttcgttaatttaataagatgtttgggagggcaccgaagaagagcgataatacgaggtactacgaaatcctcggcgtctccaagaacgcttcgcaggatgatctgaagaaggcttacaagaaagccgccattaagaatcaccccgacaagggcggtgatcccgagaagtttaaagagctggcgcaagcttatgaggttctgagtggacctgagaagcgtgagatatatgatcagtatggtgaagatgcgcttaaggaatgaatgggtggtggcggtggccatgatccatttgatatcttttcatctttctttggctgtggg

SEQ ID NO: 30376 - DNA, 415 bp, Glycine max
  Clone ID: LIB3051-020-Q1-E1-B7
agaatggcttctagttcagaatctcaatctcagtctaaaccgctccaagaccgagttgcaatcgtcaccggctcgtcccgcggaatcggccgagaaatcgcgcttcacctcgcctcactcggcgcgcgactcgtcgtcaacgagacctccaactcggcccaagccgactcagtcgcggcgcagatgaacgccggttccgccaccacgacaccgcgcgccgtcgtggtccaagccgacgtgtccgatccggctcacgtgaagtcgctcttcgactcggccgagcgcgccttcgactcgccgatccacatccttgtcaactcggcgggcgtgatcgacggcacgtatccctccgtcgccgacatcaccgtggagtccttcgaccgcactttcgcggtgaacgcccgtggcgccttcg

SEQ ID NO: 30377 - DNA, 427 bp, Glycine max
  unsure (1)..(427): unsure at all n locations
  Clone ID: LIB3051-020-Q1-E1-C1
aagtgttctataagttcaaggtcaattccgaaaaatggggtccaaaggtttgcctggtggaattaagttcaaagcggctatacttctgatctctgctgaggttgcacccaatgaatacgaaaattttaacaaaaaagatgggaagcatgctccaaatgggttatatgatagcaaatggggttacggtggttggggttgtccttggtatggcggctggggtggcccttattatggtggcggctggggtggcccttattatggcggtggttggggcggtccctggcgtggtggtggcggtggtggctggggaaggtggcgtcgacctaatggcaaccctcacaactaagaagaaaacttgctaaagcttctttacgggtttaggttttcgcaataaataaaacttcatgagaagtgtanttgtaataaa

SEQ ID NO: 30378 - DNA, 343 bp, Glycine max
  Clone ID: LIB3051-020-Q1-E1-C10
agactcccacctccaccaccattgtcaaaacccccaccagtagcaagagaacggcttccatctctaccacccctccctgagaaagttgacccacctattgtcactctggatgatctcttccgcaaaaccacagcaactcctcggatctactatcgacctttgtctgaagagcaagttgccgcaaaactttcaacacagggtaaaagcgggaggcagtagataggccattagcctgcaaatcgtcccttgcagccctttaactgatttggatagttttagtagtgctatgggattattgtgaatgcgtcgtgttggcagatctggtggtgttttgtctcgggaa

SEQ ID NO: 30379 - DNA, 354 bp, Glycine max
  Clone ID: LIB3051-020-Q1-E1-C11
actgatcctttcatttgcaaattgcaaatgcagaaaggaaaagcggattctatctccatcatcagctcccttcctgaagatgttgccctcaaaattgcttcgctacttcaggtgcgggatttgtgtgccttaggttgttgttcgatgttctggaaggaactctgcttctcagattgcatttgggagtctcttgtcagaaacagatggccctcactctcttccttccatttcccttcttcttcttccactcattctcccagtttcgagtacagaaattgtttgtgtggaaaattgggttacagaagtggacgaaattgtacttggagaggcacgtggaattgggaattagagcta

SEQ ID NO: 30380 - DNA, 393 bp, Glycine max
  Clone ID: LIB3051-020-Q1-E1-C12
acccacgcgtccggattcccttagttttgaaagtgttcctttcatttgtgtttttagttgaactatggcttttaacagccaaatacttgtgtgacaccacaagtcttaattctgctgttgttagaatgtgttttctcgcatatcggcatatgtggtcgggataattaccgattttttattacacagattgacaagcagagaaaaaaatgctatgcaatcagtttggattcaacaagtcaattttctttttctttttctagtccggcaagtacctgaatgtcatttgttttgtaatttgtcaaaggatacgccacatttatttacactgctttttctatattgggaacttttacatatccaaacacatggtggtgggcctctgtgccggagatg

SEQ ID NO: 30381 - DNA, 369 bp, Glycine max
  Clone ID: LIB3051-020-Q1-E1-C2
cttcgatcaattcgtttaattcattcccccggtttttttcattcgaccaacggctagtcttcgtttacatcactaacttcaaggttgatatcataaacatctccttgaaattatactaatcttacttcccttaactttcgtttggtttttaatcttccaattattgtattttacatcatgaagaataagcttttgcggcaattcaaggttctttcttctttcctctgttccctaccatccaagggaataacctctttagatacactttttgctctgagaccacatatgaccacactctcttccatttcatccataaaacttggagtgcactcatagaatcccacattcataacatgtttcctatgggca

SEQ ID NO: 30382 - DNA, 432 bp, Glycine max
  Clone ID: LIB3051-020-Q1-E1-C3
acacacgcgtccgtaaacccccaaagcctttgactttgttcaatccttcgacatgagtatgacccaattcgccatggttgaggagttggcttttcttgtcaaggacaatcttccttgcaagcatttagttctcacaatggaagaagcactggttaactttcttcaggatgatgacactagttcagatggaatcttggaattggagccaatgaactcttacaaccgtcttttattgcatcgccttgctgagatatttgggtttgcacatgaatcggttggtgaaggagatgatcgccatttgattctggaaagatgtccagatacgtccatacctccaatccttgttagtgatatcctatggaagtatgatgaaccacaatctttggttacatcccaccaaatattaaggagaagtgtagcctctccagtctc

SEQ ID NO: 30383 - DNA, 435 bp, Glycine max
  Clone ID: LIB3051-020-Q1-E1-C4
atttcatctcaaccttcctccaattccaacaattccttaacaccacaacataaaccttcccgcccccaaacaaaaaacctccttcttttaaagggttaatcttaaaccaggatttttggcactaatttctctatgggagaagcaccagcattgcttgttgatgacgtgcaggatggggctctgaatggccttgaattgaaaaatggaacttgcaaaacaactgctactgttggcgataagatgtatgtcattggtggagctgatgatggaactttgtccattgaagttcaaatttttgacggtagtcttggagaatgggttcgtcccactgtgcgtggcaccaaacccgtgttgtgcaatggcctctcagcagtgcctttggaagaccgaatactgattcttaagaagggttctaagcctgatgatcggatatgg

SEQ ID NO: 30384 - DNA, 272 bp, Glycine max
  Clone ID: LIB3051-020-Q1-E1-C6
acacacatgtcagcttcttctggtaatttagacccctctgcaagtgcaatctcgttcacgaacttcaccttcaccacatcgcctttcaggactacctcattctatggaatcggtgcttctgccttggatcagagaaacccaagacatggtggtttgtcagatagaagtggcgcttctgtgccgacattaattccagaatagaaattgctcggcctctgatactgcctccgatatcacgtacgtcattgcttgagattatgcatgaactgagt

SEQ ID NO: 30385 - DNA, 426 bp, Glycine max
  Clone ID: LIB3051-020-Q1-E1-C8
acccacgcgtccgcccacgcgtccggcaggctttctgaccccagcaacgtgcttcagagctgggacccaaatctcgttaatgcttgtacttggtttcatgttacctgcgactccaacaatcacgtcattcgcttagacttgggcaattctaagctctccggaactttgggaccagaacttgcccagctaccccacctccaatacctggagctctacaggaataacataagtggcaacattcctcgggaactttctaaattgaagaaccttattagtatggatttgtatgacaaccaatttcatggcaaaatccccaagtcttttggcaacttgaactcacttaaatttctacgcctaaacaacaacaaactgacaggagcgatcccaagagagctcactcatcttaaaaatctcaaaatccttgat

SEQ ID NO: 30386 - DNA, 435 bp, Glycine max
  Clone ID: LIB3051-020-Q1-E1-D1
atacgaacgcagtctacatccatgccatcttcaagtggtagacagcgcctggaaaagttgttgggagttgatgatgaggatgccgatttttccgtggctgactatgtgaataagaaatctgtgagtggagacagaagactgggaaagaaaaatgctaaaaggaatgattttagattccaagaacctcaatctgcccagaacaagtactcaggaagccataaagtgaaggacaagaaagggagtggacaaaagggttcatatgctaatcagcctgtgtcatttgtatcaagtggcttaatccattcagaaactgtacaggttacagttgatgctgaagagactaataggaatggtgtcaccagctctgctaatataggttcatttgaagaacacactactggttttggttcaaaaatgatggctaaaatgggatac

SEQ ID NO: 30387 - DNA, 417 bp, Glycine max
  Clone ID: LIB3051-020-Q1-E1-D10
acaaaagatcattaaccgtgcaattcttttatctttattaaaatatttttactctaacttccttaaccacccaaaaacccttcccttagttttccttctcccatgtttttcttatattaagtctacttaggtaagctgggatcgaagaacagaacatcatgagcataagctagcttcgtgttgtgctgtctcaaatgttcatgaagtcgtaaatgccgccacacacctctgttgtctcataaaaatgtctctttttcctcgtctccatatcttcgctaggcctttactttcctcatctctctctgccccttctggcaggtcctctctccctccctacactttcattagcagtgtttgtgttttccttttccaaagactatcagtctcacatattttgtttggaactactacttaccc

SEQ ID NO: 30388 - DNA, 433 bp, Glycine max
  Clone ID: LIB3051-020-Q1-E1-D3
acacacgcgtccgtataaaactaattaaaatagttctagtccttgcaagaggcagatttgtttgcagaattcgaaaatgttaatgacattcaggaagatatgcttaatgatatatatgataaagctactgaagaaccttctcagtccatgcacaatgtgattggcactagcatggcttcagaaagtaacgcaactgaaaagacatcagaggaaaatggatccagccagtctggcaaagctgagataacagaagaacagagagcccgtatggaagcaaataggttgaaggcactataaaggcgagctgagataacagaagagcacagagctcgtatggaagcaaatatgttgaaggcactagaaaggcgtgctgccttatcacaggcctcccaactttgatctgaattgtagatgaaagcattacttgtcgttg

SEQ ID NO: 30389 - DNA, 346 bp, Glycine max
  Clone ID: LIB3051-020-Q1-E1-E10
agaagctggatagtttagttgagaagagttctgatctgagtgccgcttcgcagatgttcgaggaacaggccaataaaaccaatcagtgttgtaccatattgtaatcgagcttccaagtctttcattatgcagcgtgctcagttgaagcctgtgcggacatggagactgttggataggataaaatagcttcatatgtctatatcactcgattgtttgcgtggttaaaattatatgattgtaccaggatacatgtactgtcttaccgtgttggcaaatgcagattgggatttacggtgttgtgaggttgagtgagaatttatagtatgcataaattagtgttttggtg

SEQ ID NO: 30390 - DNA, 294 bp, Glycine max
  Clone ID: LIB3051-020-Q1-E1-E11
agaggacgcgtgtgctgtcgcgtgggatgatatggctcaggacttggcattggatctggaggagcttcgccgcctccacagcatcgccaattgacctcgtaccctctctcttctctcctccgaaattcgtgacctcgagaagttatcgtcagaggaagcttctgcgcagattccggcgccgatgtcgaacggaactgaagtggagccttcacctgcgctggggtatgcggcagtcgcgtcgttcagttgggacgatgatagtgacgatgttgggatgtatgtgttgggggatgg

SEQ ID NO: 30391 - DNA, 244 bp, Glycine max
  Clone ID: LIB3051-020-Q1-E1-E4
accacgcgtccgatgaaaggtccaagctattatacgttagcacaataatctgggatgacgcgcggcctttgggcgtgacacgggtcaaagcgatactacgcgattttgggaccgtggctccagcgacgtagcgtccaatcacgcgttcagtatataggtccgccttaactcggaaactgtggcatggaagtgcatatactcgacgaatttttaaactgatcagtctgggtagaacatgacgaaa

SEQ ID NO: 30392 - DNA, 336 bp, Glycine max
  Clone ID: LIB3051-020-Q1-E1-E6
aaccgagtctgcccacgcaaacgtatcgagccagcctctcaagctagggttcttcaccgcgctccaaccttcgtctctctcgcttcgtcccctccaattggaatgtgattgtgacgtcacatgctggtatctgacattttgaaattgtaactgtggtgggagcattattatatattttgcgacatcaaggagattcagacatgtagcaggccgattgactccttgctagagagagtgctttgtatgaatagtctctcgtctgattacttcaatgagctctaccgattgaaaatgtatcacgaagttagtgacgacatctacactcaagttgatcac

SEQ ID NO: 30393 - DNA, 258 bp, Glycine max
  Clone ID: LIB3051-020-Q1-E1-E9
aacccacgcgtccgcccacgcgtccgcttccgatctctttaccttattgctcgtggcaccggtggcattaatccttgtgtctcatcctatggagcagatcagtttgatgatactgactcggctgagactgaacgcacgagttctttcttcggttggttctatttttcaatgaacattggcgctcttagtgcatcttctctattggtttggatacgcgatggtgtgggttcgggatggggctttggtattcctgctgta

SEQ ID NO: 30394 - DNA, 411 bp, Glycine max
  Clone ID: LIB3051-020-Q1-E1-F10
acacccacgcgtccgattagctgcatgagctggtttgggaaactccgtttattctccaatttcaatccctttcacttcattacttctttgttaatttttaccctccatttttcaccccaatcgcgcttttccctccaacccctgttactgatccacgctaaaaccaatctcaatcgtaatttccggttttcgtcacaatatggggttccgattcaagagtaatccgcatttacgcagaggcctttgctgtgcaaatgatgacaagcagcaggagaggtccccatctgttattgtcattggaggtggcatggctgggattgctgctgctcgtgctcttcaagatgcctcatttcatgttattcgtctagaatcacgagaaagacgtggtggtcgaattcaaacggacgactc

SEQ ID NO: 30395 - DNA, 211 bp, Glycine max
  Clone ID: LIB3051-020-Q1-E1-F11
aacggagacgtccggggagagttgtgagttatcttgtcatttattataggcggtatttgatgaggtacaggatgttcgtgtagcagtgtgtggttgtttgttccgttgtcatttgattcaatgatttcagttaggttttctgttctgtgagtgagatcatcagttatagatagagttatacaaagtcttgtactagtcttaacaatgtgaa

SEQ ID NO: 30396 - DNA, 425 bp, Glycine max
  Clone ID: LIB3051-020-Q1-E1-F3
aaaaagccctgtatgattctgtgacggagcaatataatgtgctgaaatctgcaatacatggcaaaaaaggatttgaagcatcaactccagtagtttctttgtcacagtcatggaagtagatgaaatctgcatttcttcattgcaatttgctctgatgcaggctccaactgctatgttccctttcagaagcaagttacaagacttcagtcaaacaatttcaactgattcacttctgagggactgcctattactacaccggtcaccgaatgatttagcttgttggaagtttgcagtcaaatacatatttttcatttcatttttccttttgctcttggttgccgttatcagcattcaattcatctggaatctgtttcagttcagaatgttcaaattctgctgcttactgtacaggtctctcttagttc

SEQ ID NO: 30397 - DNA, 348 bp, Glycine max
  Clone ID: LIB3051-020-Q1-E1-F9
aagttttctccttttcttctctccacacaatttctctctcctctctctctctacaaatccttctttctttcttctcttcgctgctcactgtgaccatggctttcagagtaggaggagcgggagggggaaatgcctcttctggcatgggtgttgctgagcatagtgtaaacaccttcctggaattgcagaggaagaaagttcatcgctatgtgatttttagaattgatgagaaaaagaaggaggttatcgttgaaaatactggatgccctgctgacagctatgattatttcactgcatccttgcctgaaaatgattgccgatacgcggtccttgactttgattttgtga

SEQ ID NO: 30398 - DNA, 199 bp, Glycine max
  Clone ID: LIB3051-020-Q1-E1-G11
tcgtagacgaagacggtcgtcatcctcttgctccagctggagctggttctttccctggacgcttcagtgggagatagacgttgcacgcagccatagagcaacctcaataaccagattagtattttgcaggtcatctcaactcatcatgcctcattattgtgtcaatttggaataattggcataagttgaatcaattggt

SEQ ID NO: 30399 - DNA, 431 bp, Glycine max
  Clone ID: LIB3051-020-Q1-E1-G3
gggtttcacattctgttaacattggccactgttcacacacacattctgtgcacaactttaagtacatttagtttgtttgtctgtgtgtgtgaacagtggccaatgttaacagaagatagaacaaactaaatgtacttaaagttgtgcattgggtttcacattctgtgctttttgccttttcatttaataggttgacatgaatggtgaactgtctgtcaagcataaattgtctggtcaccagaaacctgtttcttctgtttcatggagtcctaatgaccaagagctcctcacgtgtggtgtggaggaggctgttaggcgttgggatgtctctaccggtacgtgcctgcaagtttatgaaaaaaacggtcctggcctcatcccctgtgcatggtttccaagtgggaaatatatactttctggcctcagtgaca

SEQ ID NO: 30400 - DNA, 432 bp, Glycine max
  Clone ID: LIB3051-020-Q1-E1-G4
accacgcgtccggttttagtttttaatcctaaaaaattcaaaacaacaatcaacatatgcacgggtgttaccaagaatatgactatatgcatgtgtaaacattctaaatgtgtttaagctcactgcatatgttgagattgttatgccttgatggatatgaacttgcgatgaatctttcttctttttgcttactctcttgaaaatatatcatttttaaaattaggcttgctgctataagaatttggtttggttaccaaacacaagaaaggtaatattttttgtaatatatcccttgctgttctaagaatttggtttggttatatggacctggtacgctgtagagaagaggttagccttcccccaaaaatgaggttccttttaaattttccgtgctatcaatgagcaaacatctatcatgaaagtttttccctt

SEQ ID NO: 30401 - DNA, 430 bp, Glycine max
  Clone ID: LIB3051-020-Q1-E1-H1
aaaatatatacgtataccattaattatgatgaaatcttcttcacatctttctgcaatattcctattgttctttctccttactgccctatccccttcggatggagtttcattctcttcattcctaaagcaattaaaacagaagctggagaagagtcccaccctaaaagatttcctgaaacccaccactataggggatatttattatacgttgaatttcacagaaatcttctcttccgaagagagaagcgcaccaccggtgtctctcatcaaagattacttatcaaactacggctacattgaatcctctgggccattgagcaattcgatggaccaagaaacaataatatcagccattaagacctaccagcaatatttcagtttgcaacccaccggcaaactaaacaacgagactcttcagcaaatgtcgttc

SEQ ID NO: 30402 - DNA, 430 bp, Glycine max
  Clone ID: LIB3051-020-Q1-E1-H3
aaatttacaatggccgtcacgaaaagcctctcaatcttcctcttcatcgcaatgagctgcgtcgccgcagctcaggcagcgaacttcaacatcacaaataactgcacctacacggtgtgggccgctgccgtgcccggcggcggcgcaaggcttaaccctggcgaatcgtggaacatcagcgtgacgaacggcacaacaggaggacgcatctggggtcgaacaaactgcaccttcgacaacgcgggacgcgggaagtgcctcaccggcgactgcgagggtgttctggagtgcaacaaaacaggtacacccccgaacacggtcgttgatttcgcgttgaaccagtataacaacctcgacttctacgacatctccctcgtcgacggtttcaacgttcccctacagctgaccccgacctacaactgcagttccg

SEQ ID NO: 30403 - DNA, 267 bp, Glycine max
  Clone ID: LIB3051-022-Q1-K1-A1
cccacgcgtccgccttcgcccactttcaatttttctctccctaaaaatcaaatcgtggccaccgccacatcccaaacccttcgattccaatctccgtcactttctctctcctccaaaatccctctctccgcattctccgtctcgctccgcccgcaacgccgcgcctcccgccacctcgtgctggtcgtctccgccggcctcgacgcaaagcccacggtgctcgtcgcggagaagctcggctacgcggggctgaagctgctaaaggac

SEQ ID NO: 30404 - DNA, 107 bp, Glycine max
  Clone ID: LIB3051-022-Q1-K1-A3
gcagcattgggagatagaaagagagtagagtatgagagagagagaaagacccttagcctgggctatcgctcgctttcctttgacgcttctgacccttgctatgtctg

SEQ ID NO: 30405 - DNA, 178 bp, Glycine max
  Clone ID: LIB3051-022-Q1-K1-A4
ctctgtttcgctttcaccgaagaattacttgactttcccgaactccacctgagagaaagatacccttaattcgcaggcgcgtcttgtgttggacaacaaccacaagatgattaacttcgaagaaaccgagttgcgactcggcctccctggcaactactcatcactcaagggaagtgct

SEQ ID NO: 30406 - DNA, 235 bp, Glycine max
  Clone ID: LIB3051-022-Q1-K1-A6
cgaaactaaagtataatttaatggaccaaaagtgacggtaagtctttatatgtaggacttaaagttttacttgaagatatttcttcatcgtcatgattcttttcttttttccttgtacgactttgcagttttctttaactacttccggcgcatcttcaaaaatattttcagccatgcagagcaaattactcaggtttattttatatttacattgtcttcttgctttgccattttt

SEQ ID NO: 30407 - DNA, 229 bp, Glycine max
  Clone ID: LIB3051-022-Q1-K1-A8
cgcaatcttcgccttcgcccacaacaactcctccttcaggatcgctgccaacgtggctttccatttttacccttcatcctcgagaaaaaaatggcgaacgcagcatctggtatggccgtccatgatgagtgcaagctaaagtttctggagctcaaggcgaagaggacgtaccggtatatcgtttttaagattgaggagaaatctaagcaagttattgtggagaagctgg

SEQ ID NO: 30408 - DNA, 130 bp, Glycine max
  Clone ID: LIB3051-022-Q1-K1-B4
agctcatacaactgatgcctgctatctactccagttgctggtataacctttcatgggaatgccatacatgcacgaggaagagactcctactatataagccatgctttacacctaccatgccttctaactc

SEQ ID NO: 30409 - DNA, 271 bp, Glycine max
  Clone ID: LIB3051-022-Q1-K1-B5
cagcattcagcatcgcttttttctattcaacgactccgttccgttctcttgcttggtcttcgaaaccctaataagcttctgcacttccttctgattccacttttggtaatataagcccctcctcttcttctcagatctgaaactacttgttttaactttttctattcaacgactccgttccgttctctttcttcttcttcgaaaccctaataagcttctgcacttccttctgattccacttattgctacaactgggaagatactgtatggc

SEQ ID NO: 30410 - DNA, 200 bp, Glycine max
  Clone ID: LIB3051-022-Q1-K1-C6
gtttatcgccgatcccaacgggaaagcgaaggatgcccttccgttcggaaccggggtggctatggacgaccctttaaccgtggggcccgaacaggactcgaatcttgtgggcaaggcccaaggaatttacacttcattatcacaagaagagatgggacttatgattgtgatgactattgcatttacagatggatattttt

SEQ ID NO: 30411 - DNA, 433 bp, Glycine max
  Clone ID: LIB3051-022-Q1-K1-C7
atagacactgaattattactaaatttaatcacttgaatttagccaagcgagagggttaaattgaaggtgaagtcagataacatattatatattgagttgattagtattgagatatattaattatattttaattttatataattatattatttatattaaatataataatattaattatattatattataagtatttaatttttataataatatattatattaatatttttattttatattatatttttatatatttttttatttattttgtattatttatttattattattttaatatattattattattaaatttaatattataaattaattatattatgttattttaataaatgtaatatatattatttattaatttaatttatatttttttatataattattatattattatatattttattatatttat

SEQ ID NO: 30412 - DNA, 59 bp, Glycine max
  Clone ID: LIB3051-022-Q1-K1-C8
cccacgcgtccgaaaaaaatttaatttaaaaaaaaaaaaaaaaaaaaaaaggaaggaat

SEQ ID NO: 30413 - DNA, 209 bp, Glycine max
  Clone ID: LIB3051-022-Q1-K1-D1
ttcctactccaaccgcacttctgcttcgcaattatcatgggcaaggtcaagatcggaatcaacggatttggaagaattggccgtttggtagccagagtggctctgcagagagacgatgttgaactcgttgccgttaacgaccctttcatcaccaccgattacatgacatacatgtttaaatacgacagggttcatggactctggaatct

SEQ ID NO: 30414 - DNA, 120 bp, Glycine max
  Clone ID: LIB3051-022-Q1-K1-D2
ggcacgcgtccggttcgtttatgttttctactcttgatcgtctcatctatcacgggctacaatcaatgaaagccatgagagcattttgttgatagaatgattaggtctatatattggatt

SEQ ID NO: 30415 - DNA, 194 bp, Glycine max
  Clone ID: LIB3051-022-Q1-K1-D4
cccacgcgtccgcccacgcgtccgtgtggcagtggtagttgccaaactagtagcgagaagtaagtcacgtttttctccgttttcattcatcacaatattaaagcttttagtttccttcagtatgggggacacttacgttttggccacaccgaatctcaaccgttccgatgacttgttctgttattatgcttatt

SEQ ID NO: 30416 - DNA, 285 bp, Glycine max
  Clone ID: LIB3051-022-Q1-K1-D5
gtcaaaaaagcgaatcaattgaaatctcaggaatgcttgaagttaacggctttgagcctttcaaaacagaagcatcaacaagtgacttaaagaaaaaggatgaaaatggcatgaacagatctagtcttcaaacaacagaacctgcaagccaagttgcaattacccattctcaaagtattgcatctcaagtccatcctcgggaacaaagcaatcaccagcagcaaagctttttcaacatttctggactaactcaagatcttatgcataatgaaaggtggtcaatgt

SEQ ID NO: 30417 - DNA, 145 bp, Glycine max
  Clone ID: LIB3051-022-Q1-K1-D7
atctgaatatctcacgccgaagactgtgcgttgaaatcttgcaaggacgagatgcaagcatcgttgttttccttcccagaatttacgctcttcttactatcatcaagatacaaaatggaatatctactgaccagtggttggcatg

SEQ ID NO: 30418 - DNA, 295 bp, Glycine max
  Clone ID: LIB3051-022-Q1-K1-E1
catggacgaattagaagaaaccctactcacccaaatcgactgggaatcgttcctggacgacatacctgaacttaacgtcgatgattttttgcaggacgacaacgccgttcctgttgttaccgacaatcattcctccccgaacgacgaccccgttttgtccgagatcgagaacatgctcatgacgcaagccgaaaacgacgctgtcgttttgcccgagacgccgtcttcagaggccgggttttacaagctcttcgaagagattctggtggaggagccccaggatggacccgtgagc

SEQ ID NO: 30419 - DNA, 287 bp, Glycine max
  Clone ID: LIB3051-022-Q1-K1-E3
tgcacctcggctcagcacagctactatcgaaaactagccaaggctctgtcttttggccggtttccttttgcttcaacaacatcgtcgtcacaaatctagagacagagagagagagagaaaaaaaaaactgttgaattgaagatgaagatcactgtcatgactgctgatgaacaaatcatcacgttggatgtggatcctcactaatctgtggaaaacttcaaagcatttctcgaggttgagacatgagtggctttttatctagtagtttatatatgattataatttat

SEQ ID NO: 30420 - DNA, 86 bp, Glycine max
  Clone ID: LIB3051-022-Q1-K1-E5
aaaaaaaataaattaaaaatttatttaaaaaaaaaaaaaaaaaataaggaggataaaataaaaaaaaaaatggaaaaaataataaa

SEQ ID NO: 30421 - DNA, 124 bp, Glycine max
  Clone ID: LIB3051-022-Q1-K1-E7
cccacgcgtccgcccacgcgtccggtgaaagagaaaatccgagactctgatttggagagtcgagtgagtgagtgctgcttcctctgaatcaaatcattcatcactctctctggtcctgagtttc

SEQ ID NO: 30422 - DNA, 143 bp, Glycine max
  Clone ID: LIB3051-022-Q1-K1-F6
cgaagtgcccttcttgtgctttttttttaaaataaaaaaaattataaataggaaggttaatttaatatatatagtataaatattaaaaattaatataattacaataatatatatacatttatatatatttttatttttattta

SEQ ID NO: 30423 - DNA, 156 bp, Glycine max
  Clone ID: LIB3051-022-Q1-K1-F7
cccacgcgtccgcaacagcatcagttcatggctgcgatgatgaaccaacggcgcgcaatctgaaacgacagattccagccaatgatgtacgcgcggccacctactgctgtcaattatatgtaccctccatacccttaccctactctagatccttac

SEQ ID NO: 30424 - DNA, 135 bp, Glycine max
  Clone ID: LIB3051-022-Q1-K1-F8
cccacgcgtccgcccacgcgtccggtcaacatggaggaggagactaggaggaagcagcaacaagctcaggaggcatatgatgaggatgatgacatgcctggtggtgcacagagggtacagtgcgctcatcattaa

SEQ ID NO: 30425 - DNA, 92 bp, Glycine max
  Clone ID: LIB3051-022-Q1-K1-G3
cccacgcgtccgcccacgcgtccgttcacgcgtccgggattgaagaagagaggggaattgaagagcttgagagagaggggatggggttgaag

SEQ ID NO: 30426 - DNA, 152 bp, Glycine max
  Clone ID: LIB3051-022-Q1-K1-G4
cccacctccgtttcataaagggtagaatgaaagaagcaccgattgtctcgactgctttgaggaatacgatcaaatttggtacaattctcaatgatcctgacttgcctctttcatactttcctgaattcaagaactcaaaaagagttcctaat

SEQ ID NO: 30427 - DNA, 189 bp, Glycine max
  Clone ID: LIB3051-022-Q1-K1-G6
cccacgcgtccgtccacgcgtccgttcaatctgagtttctagccattcagccaagcagttggccatcaactgctcttttacatggtgctcatgattttatttttattattttttttttattatttatttatttttttattttatttatttttattttattattgtttttttatttttttattattttta

SEQ ID NO: 30428 - DNA, 187 bp, Glycine max
  Clone ID: LIB3051-022-Q1-K1-G7
agccctttggactttggttgttgcaattgtatatcgatcggttgattcatgctaggccatttcgtaagggcacttaaagcattctaagttctctagctagctggcccttaagactcttctgctaaaatgatgacctcaagctcttttatctatagcttttagatctatatatataaatactagactt

SEQ ID NO: 30429 - DNA, 238 bp, Glycine max
  Clone ID: LIB3051-022-Q1-K1-H1
ctctaagctagctgcaacacaactctgaaatttttgtgagtatttggatgatgaattctcgtgtcgttcgaagtgtttcagaatgttttatcaaaccgttgggccaagctaaagagtcaaacctaatatgtcatttaacaccatgggatattgctatgatgtctttgcactacatccagaaaggtctactcttcaagaagcctgctacacttgttgatccacatgatatcatggagaa

SEQ ID NO: 30430 - DNA, 303 bp, Glycine max
  Clone ID: LIB3051-022-Q1-K1-H2
aagctaacaacatcaaccaactctctccaaaccagcactgaataacaacagtggcgaacatatatattttcaccaatcacatgaaagagtccttcaaattgcagagatgtccaataactcaagtcacccaccacatataacaatataataagaacaccaataaaatgtgaaggaaactcggatcatttcatgatgaaattgtgcataacttcatctcatggcatggaacttcaacttcaaatcttagatcttatcaagcttttcagccttgacaactgggtttgcttaagctatagcatcatt

SEQ ID NO: 30431 - DNA, 201 bp, Glycine max
  Clone ID: LIB3051-022-Q1-K1-H5
cggacgcgtgggcggacgcgtgggcagatggtgctctctgggatattttttggagacaggatgtccctaagttgcaggaatatctgaagaagaatttcagagagtttaggatgattgacttttggatgtataggtctttgcgcctttatcttattctgcaatgactctgagagagaggaagaataaattggaatggaagtt

SEQ ID NO: 30432 - DNA, 241 bp, Glycine max
  Clone ID: LIB3051-022-Q1-K1-H8
aagtgcttcaaccctctcatgaaatcagattcatctttaccaaaggcgggcaggaataggtcctatctcaatttgaatctagcgaggatggacaagtccagtgctctcctaatgctccagttgatgttgacaattctctcagctgtgttgccatcaatgtcagtcctattgagtatgggcatgtgctgctgattccgctcattttcgagtgtttgcctgaaaagattgtaccgtgatagct

SEQ ID NO: 30433 - DNA, 267 bp, Glycine max
  Clone ID: LIB3051-023-Q1-K1-A2
gttatatatgagtgtagaactacactttgcgatctaactagcaccatgacctcgagggtgagacttatacttcatggaggtgaaattccaaaaaactatggtatataggtactcgaaatacctgtataactgtacttacactgattcatatgtattatgttaatcaagaatgtctatgaatcactatatcactgtgcgtattatacttgatatgatctatttatatacatttaattggttaccttttacgtaggaaccaagttcaat

SEQ ID NO: 30434 - DNA, 320 bp, Glycine max
  Clone ID: LIB3051-023-Q1-K1-A4
gccacgcgtccgatttgctttgaaagcatgatttacagattcgatatgcttatgagtggctgacaaatactttatgggggagagactatgacatatttggtattgatgaacaacttcatattgttgaaaatgccagcaagcgttatgcaaggaaacatatttcagaattggatttccctttactacaagcccccttttgatctataaatcattcttctaaaatcattacagctagtgacttccaatatatatttccagaatccaaaccattgctaattcagttgtattcatcatggagtgaacgttgtgctcaatttttc

SEQ ID NO: 30435 - DNA, 185 bp, Glycine max
  Clone ID: LIB3051-023-Q1-K1-A7
cgcgatgatgcataccagaattttgacaaaacagatgggaagcgtagtgcaagtgggatagatgaaagcaaatgttggcgtggtggctatggcgactatggtggttggcgtggtggtggttggcgtggtggctatggaggctggcgtggtggctatggtggtgtgcgtggcggatctagtggatg

SEQ ID NO: 30436 - DNA, 181 bp, Glycine max
  Clone ID: LIB3051-023-Q1-K1-B3
gttcgcggagaccttggtttcatctttcatttgctctcctttctatgctaccttcgtgtcgtttccaaacgctgctgtcatctactccttacattgtacttattcgatgaacaatttcgatgcttccaagttctgtgtaattattgccaatttttggatgaaaatcctgttcacatatatc

SEQ ID NO: 30437 - DNA, 359 bp, Glycine max
  Clone ID: LIB3051-023-Q1-K1-B4
gtgagatacgcactatcatggtggactttattgagaaaatattggagagaggtgacgggattgagcttcttgttgatgaaacagcaacaatgcaagacagtgcatttcactttaggaaacagtcaaagcgccttcgaagagctctttggatgaaaaattttaaactcctggccttattgacatgcttgattgttgttgttctttatttaataatcgctgcttgttgtggaggcatctctctaccgtcctgcagatcctaattgtcactcttgccagtttatttgttttctgagctctgcaactatcaagatcgtacgataagcatttgacgacacttaagtattccatattcaaattta

SEQ ID NO: 30438 - DNA, 421 bp, Glycine max
  Clone ID: LIB3051-023-Q1-K1-B6
cttctctctttaccttcttaactcaccaagcgaagcgaaaagcgctttctaaggtaagtgatggcgaacgcaggtgaagtttcagccttgaaccgcatcaaactgcatcttttgggtgaactctctccactggccactcccctaaactattttgatgaatcaaaccctagcccctctgaatcttccaattcccaatcttcttctgtttctcttaaccactacttcactgacctcttcgaattcgactccaaaccccaaataatcgacctccaaactcccaaaacactaacttcagctcagaagaaacctcaattgaatcggaaaccgtcgctgctaatcgctgttccaaagaagaccgagtggatccagttcgggagcccggatccgaacccggtgatggctgccccggaaaacctgccgc

SEQ ID NO: 30439 - DNA, 380 bp, Glycine max
  Clone ID: LIB3051-023-Q1-K1-B7
ggcagagaaggcgaaagagatgggccagagttcgctcctctcaaccctcatcgtccatgacaagtcctgatggtggatgcaatgatagtgatacggatataagtagagaaaatcgtggaatttcttcaaggcaggtatcaaaacatggaaagcttacttggggaaggggtggatttagaagtaacactcggcatggtagtggtggcagtagcaatagcaaaagttctcgcagtagtcgattatctaagtttgttgatcatctccgcaacttggatgaaaacactgatgagtttgatgtccatctcatgcttgtttctcttgaccaacaaagttcatcaagtatgcatcaaccttacctttgctgtcgaccaactatgtct

SEQ ID NO: 30440 - DNA, 350 bp, Glycine max
  Clone ID: LIB3051-023-Q1-K1-C2
ggaaatattgttggctgcatcttattctttatatgcttctcacgctgtgtattggagctggattttctggtctggggcgttctctgtcttctgttgtgacaagagttgcatcaatttttgtatttgcatcattctcttcccttctaagcattgccagggtgcctgcacttaagaaagaaatcaaggttcgtttcattattggagttgatggacctaagcatgttcggttggaatatatgacagaaaagcattctcttcaagatcgagttgaaatgttgtgagcttgacaacatgtacaagtctcatctgttctaatatatgggcacatcattcttaaacatttccttaac

SEQ ID NO: 30441 - DNA, 315 bp, Glycine max
  Clone ID: LIB3051-023-Q1-K1-C6
ggaagaagtatttttgaaggacaggatacccacctggtttgcagcttctggagatgtgggcttggctgcgatagccatagcaacaataccaattatcttccctcctctcaaatggtacttggttctgtgctcttacatcctcgcccctgcccttgccttctgcaactcttacggtactggcctcacatactggagtctggcatccacttatgggaagattggtcttttcatcattgctgcatcagtaagccaaaactgtggtgtaatagcaagggtagcaccctgtgctgagatgatgtcaatcgttgtaactag

SEQ ID NO: 30442 - DNA, 424 bp, Glycine max
  Clone ID: LIB3051-023-Q1-K1-C7
gatttttatctattatctattactgaagaaattaaaatgcattgccagatgccttcgaaaaaaaatgcattgccagaattgctcaatagtgtcatatattaagtttaaaacacatgattaagtatattatttgtttttgacacatttatttttaaacagctattgtcctaatctcagtgtttctcatatattataaatgaaaatgtttcaggtcttaaacttaactgagcttgaattaaatcgggtggatgtgcgtgtgggattatcaggtgcattatattatatggatggttcttcacaagcagtgcggcagttgcgtggtcttgtttcacaggttgcttctcctctaaagtgcatattctgtttcaatttgagatggctttttttgcatttgtgtcttccgagctattttttcttccttttg

SEQ ID NO: 30443 - DNA, 284 bp, Glycine max
  Clone ID: LIB3051-023-Q1-K1-D1
ctcacgcgtccggagaaaccaagtttgtactgcacaagatagaagcagttgatgagggaaagttgggatatagctacggcgtagtgggtggtgctgcatttccatacacatctgtgaagatcacatttcactccaaattggctgctggtcccaatggaagctctgctggtcaactcactgttgaattccaaaccaaatgagatgcttaatccaaccaagaccaactcataactggaaaagccaaagctgatggctctttcaaggccattgaagcttaccttttg

SEQ ID NO: 30444 - DNA, 224 bp, Glycine max
  Clone ID: LIB3051-023-Q1-K1-D2
attcttccataattctcatgtttctgatccaaggtttaagacgttatagtttccttgaattgtcgtctgggttcaacgtgtttgatgtttagactgaatcagtttgaattagtggagaatatctgataccgaaaaaaagattcagctctttttcttgtttctttgtcacaatacttggatttttgagaatctggagacatgggttgttgtgtaagtaaatattc

SEQ ID NO: 30445 - DNA, 351 bp, Glycine max
  Clone ID: LIB3051-023-Q1-K1-D3
catgttatacacgcagaaagaacaattctttgattgagttggctatggttggattgatggccttaaaactcatgctgaggaacattttactgacagaatgatgctcaatgctgctaacattttccccttcaacacaccaaccaccaaagaagcatactactatagaatgatatttgaaaggttcttccctcaaaacttaaccaggctgaatgttcctggaagaccaagtgttgcatttatcacaaccaaaactgtataatgggatgctgctttgtctaacaaccttgatccatctggtaaggcagcacttgtattgcatgcatcaacttatggaaatcatgtcaaaacttt

SEQ ID NO: 30446 - DNA, 156 bp, Glycine max
  Clone ID: LIB3051-023-Q1-K1-D7
aaaaaaaaaaaaaataaaaaaattaattaaaaaaaaaaacaaacaatataaaagaatcgaaacttatatacacatgcatgcaacatacctacatcttctatactttccaccttttttcatctcctctatcccacattttacatcttctttacttta

SEQ ID NO: 30447 - DNA, 234 bp, Glycine max
  Clone ID: LIB3051-023-Q1-K1-D8
ctcactcattcgctctgtcactctctctctacacgactggctatacaaaaggtgctggactagctaactcactggattactcgtcacaatatagcacatcatatacctctgccctactcgctactctttttactaaagtgactctccacatccataacaagctcgcacctattaactaaactctcccaattcagatcctaatccgctccggcaacttatgctggcctagaccca

SEQ ID NO: 30448 - DNA, 308 bp, Glycine max
  Clone ID: LIB3051-023-Q1-K1-E1
ctgacacgaaatgcttcattaccattatgattgacatatcataaagtcgtatattcagcatgtatgaccaaatcattggccctgttggctctgctactgtttacaaagcactcggtgctgatgccaataacatgatcgacatagctgttgattcctttaagagtgttgaaaacattgcaggaaattggggacctggaacaaataggacaataactttcggggatgatggaaaaaccaaatatgtactgcacaagatataagcaggtgataatgcaaacttgggatatagctacaacgtagtgggtgga

SEQ ID NO: 30449 - DNA, 333 bp, Glycine max
  Clone ID: LIB3051-023-Q1-K1-E4
gttttcccttcgaggatttaatacagttgcatatctgggattcgaacacgagaccagtaggtaagctaaaacaacccgtgctggttgatctatgtgctcggtggttgggtctactttatttgttcctgtgggctaggactgcatctcttatgcgtatctgtctctggattctgctggttgcaaaggaatttctttcactctggccgctataacaaagtcaaactattctcgcacctctaggatggtgtggggttactattatggagtgatttggctttgtgtttattatttatggggggggtcttatattgtagatttttttttgtatttttt

SEQ ID NO: 30450 - DNA, 368 bp, Glycine max
  Clone ID: LIB3051-023-Q1-K1-E6
gccgttagggggagccatcttcctcagctcggacctgaggccgcgcgcttctgctcgtccgggccccctgcggctgccccgtcgccaaactcgaggcctctggtcccaaaaaggccaaacgccataagaggaccccacccagtgcgactcttaatggaggaggagatcatcgtagattgactgagatgttaccaccactagcatctcatttatattatactaatcatttactgaaaaactactgatcagaaccaatttttaaaataaaaatatcaatatggactaaacaattcgttgagtagatatttgcactatgaaataaatatatataaacaatacaaagatcaaacaaaaataaactgctataa

SEQ ID NO: 30451 - DNA, 280 bp, Glycine max
  Clone ID: LIB3051-023-Q1-K1-E7
ggtttatcatggacctgatcagtgggcgaatgaatttacaagtgaaggacggcagcgtgatgcagttgatgatcagtgggttaatgaattctcaaagttgaaagttaatgattgggcaaatgaatttggtcagcagtttggtgaaggagccttaggggatagcacttctgatagttgggcacaagcatatgatgagttcctaaatgagcaagtggctgccaagcagcagtttgacattttcgaggggtgtgtttgtcttttacttatttaaaaccttgtt

SEQ ID NO: 30452 - DNA, 316 bp, Glycine max
  Clone ID: LIB3051-023-Q1-K1-E8
gtagagattcttccacttcctacctctacctctgaacttgccaaaccctcttgttagcaaagacaaaggagtcagagaagggagagaaaacttgatcgtttttgttttgtagaaacaacttggtatagttaataataatatttgaggagatcgagagagcaaagacaaagtttgtagtttgtaagtacagagaaagatcacatgattgcgaagacaaacacgattatgcctatcattggcaaactgtactgttcatcgtctgagacggtgcttgtggtgaggaggaggccacacgtggtgaatggtgggggttttg

SEQ ID NO: 30453 - DNA, 417 bp, Glycine max
  Clone ID: LIB3051-023-Q1-K1-F1
agcgcgtgagaaaagcagaaatggcggcggctacggcgatttctcagctaggctgtggttgggccgtccaccgcagctcacacctccggcgccgctcgtttctgttcccttcccctcgctccaagttatcggttgttatgagtctggagaggcatgacacggatactgctgggtctgataccaaaaatacactaagttatgcagttgatgtgtcaaagctacatgttgaagaaaagaagaactcatattcaacaaaagatggccatgatgctgaaaaaataaggtttggagaggcaacacatgaaagtgtcgatcaaccgaaaaggactgcaaagattcatgacttctgtttaagcattccctttggtggatttgttttaacaagagggattattggattccttttttcactgaatc

SEQ ID NO: 30454 - DNA, 222 bp, Glycine max
  Clone ID: LIB3051-023-Q1-K1-F4
cacgcacttgcaacagtacctctgaggtcctttcacaacccttacttctccatataagggtgatcgagtctacctgccgctggaccttggaccgtatatccctccttcacttcaacgtccaagaaatgtcctcttgaatgctacactgattcttaatgtgcttattgactatacatcgctgccaatggcatctacaataaacctagcatcgaagactatatc

SEQ ID NO: 30455 - DNA, 409 bp, Glycine max
  Clone ID: LIB3051-023-Q1-K1-G1
cccaattaatgttaagattgctgagctcagagaggcactagaatctgttacagctgagcagaagtacttgaaagctcgtgatgcgagacatcgccatacgaatgagagcacaaggaagcgtgttgtattctacactgtgggagagtaccttctcttggctgctgttagtgcactgcaagtcatatacatcaggcgcctcttcagcaagtcagtggcctacaatcgtgtttgagtccccttcatgattaacgttatggtttccttcattagcaacaggattaggtttattacatatgcgttctctattcaacagtacgattacaatcccttggtgaacactttttttcttttcaagagagactccacttgtatgttgatacccaacaagatatttaaattccttacaact

SEQ ID NO: 30456 - DNA, 149 bp, Glycine max
  Clone ID: LIB3051-023-Q1-K1-G5
ccgacgcgtccagggttttcagttatttaaacttgtcataacttttataacaggtaggtttaattgaaagcatattagcaaatacaacatcgatataatgatattaaaaataaaaataataaattatacaatttaaaaaaatataataa

SEQ ID NO: 30457 - DNA, 379 bp, Glycine max
  Clone ID: LIB3051-023-Q1-K1-G6
cgcacgcgttcagttgaaatcagtggaactgcttctcaagtccaaacagcacagcaggtaatacagaattttatggctgaagctgcagctgcagctgcagcaccagcacagccgcaaacaactgtgcctgctgcagaccaaggatacaattcttaccctgcccatggttctgtctatgcctctcctccttccaatcctggacatgctggaggctatggctcagtttatggtgcaaactatgggtactaagctgggcagagcaactaatgctgctattattgaaatttataatgctgggaacagaattaatgtaataatttaagaaattttagattattgtccgacttccccgttccctatactcctaatcatttggaaa

SEQ ID NO: 30458 - DNA, 359 bp, Glycine max
  Clone ID: LIB3051-023-Q1-K1-G7
gtttgcttttgctacccgtgcgtaaaccgataaacctctggagctagctactggggggttgtcatcaaatcgaccatggaaagcattgaaatggaggaagccgcattcggcatagacgaatccaacgatgacttgtgcagttcgatcctctctcgcttcgctaactccaccgacgaaacccaccaacacctctgcgccgtcatcggcgccatgtcgcatgagctcaaagacaacaaccaaccttccacacccttcgcctacttctgtgccgcacgcgtctctctcgacaaattcacctccgaacccaatcccccgagccacgtcatcgatgcgcttctcaccattctctctctcgccct

SEQ ID NO: 30459 - DNA, 242 bp, Glycine max
  Clone ID: LIB3051-023-Q1-K1-G8
caaaaataagacattgtttggtttggttacttgctcgaatttcctcgaatcggttagtttgtatttgattagttaaaccgcaacgcggaatctcttttctcgaactggctaactctcaggcaagtggttcggacgctgattccagcaacaagcggctggtgctcgcactgtatgactccctaaactccggcgactccgacgccgtcatcaagatcgtctccgtctacctagagtggtggttc

SEQ ID NO: 30460 - DNA, 368 bp, Glycine max
  Clone ID: LIB3051-023-Q1-K1-H1
ctagagaggaaaaattctagggtttgagtttcacagtgagagaagctcgtggtgtcggggagtccatttccagctagaaattagaatggggaaaaaccagaagacaggggtgggaagagcgttggtgaagcagcacaatcaacagagcaaggaaaatgggcgtttacagaagaagaaggttctcgaatccttcacagagatcagcgacatcgacgccataatcgaacaagctgaacaccctcaacaacccctcttctccacccctcaccggcccatcaatctggatctgagctctggcattggcaaaaatgaaatgacacttgaagaaatgaggaaacagctgaagagggaggatgctttgcatgcta

SEQ ID NO: 30461 - DNA, 432 bp, Glycine max
  Clone ID: LIB3051-023-Q1-K1-H2
cgtagaaagcaatcgaattccagaggcagctttaatggctcgatcttatctcccaagggaggtctcagagatagtggcaattgggagaaaagacctcaataaggtcaatccaaaagctgctgaatcattggctaatcctgaagaatatccaaatttgtttgaagattggcaagttgcactagctgtcgaatctaaagctgtggaaacaaggaatgtgtaccctcctgcggagcagtacgtcaaccatgctgacaaatcacacattacccttgttgaagcttttagaagcatgcagattgaggaaggagaggagcatctggagaatggggactctactcatgagttgactgaacgaaatggagaagagcactacacagaggagcaggatgaacagaatggataggaatgaagccaagatgaagcagttgtagt

SEQ ID NO: 30462 - DNA, 391 bp, Glycine max
  Clone ID: LIB3051-023-Q1-K1-H5
cccacgcgttcgcccacgcgtccggctaaatcttatcttagcaatagctaccggtatgacaacaatactctattaggcaaaaacaccaaatgggagaggaaaaagagcagcctaagaatgaaaccgagaagaagcccgaggaggccgccgcagcccccaagaaagacgacggacccatccctgtcgtttacaaactcgacttgcattgcgagggatgcgtcaagaagatcaaacgcacatgtcgccacttccaaggtgtggaaaccgttaaggcagatctatcgtcgaacaaagtgactgttaccggcaaattggatgccgagaagctgctagataagatcgccgagagaacctaaaagaacggtgacatcatctcaactacatccaaaaa

SEQ ID NO: 30463 - DNA, 109 bp, Glycine max
  Clone ID: LIB3051-024-Q1-K1-A2
gctttgtggaaattttgtacaagttcttcatccaaatgtgatgatacaaaacctgtgcgtatttttggtggggatacagttcctattagaaccgttgcctaggctccat

SEQ ID NO: 30464 - DNA, 181 bp, Glycine max
  Clone ID: LIB3051-024-Q1-K1-A3
ctagctagtgttctataagttcacagtcagttctgaaaaatgggttccaaggttttgcgggttgtagatatgttcataacggctatacttctgatctctgctgaggttgcacccaatgaatacgaaaattgtaacataaaagatgggaagcatgctccaaatgggttatatgatggcaaat

SEQ ID NO: 30465 - DNA, 80 bp, Glycine max
  Clone ID: LIB3051-024-Q1-K1-A5
ggcgtgcacaatcgacttccgctgtcttgacgaaggttttggcggcaagacctggggggtcaatagagagcaagaggggc

SEQ ID NO: 30466 - DNA, 90 bp, Glycine max
  Clone ID: LIB3051-024-Q1-K1-A7
ggattctacccgccgctcgatgggaattgcgcttcaaggcgtctcgtagggctaatgggcctcacgagggtcaccaacggcacgtgcctt

SEQ ID NO: 30467 - DNA, 248 bp, Glycine max
  Clone ID: LIB3051-024-Q1-K1-B2
gcaaggcaaagaaaatgacagtggacatcattctagattttacaaaatcaaaggagcgaccagacatggctgtcatgatctaagatacttcaacgtgattggatcgaacccaaacatatgactaggagaagctccaaggccactttgtcaagggtctctgcaatgcacctactggtgcatgatttactggaggttgtgcgcatgaatgtgccacacattggtatgggggttggagttgaagcaggtga

SEQ ID NO: 30468 - DNA, 268 bp, Glycine max
  Clone ID: LIB3051-024-Q1-K1-B3
cccacgcgtccgaaaacaatcatgagcttcattctgtttccgattctctttgcatttaggtttctgtcctcgcccgtgtctctctgcttcggatctggtcctcgccaaggttgaccgtcgcattgatctgacttcacagattgtgcgcatcactacttcactaaaggtgcagaatacgggatctgatgttgtgtctgagattatgctgtcctttcctgagaacgaggcaagtggcttggcgtacttgaaggcaacacggggggatggg

SEQ ID NO: 30469 - DNA, 256 bp, Glycine max
  Clone ID: LIB3051-024-Q1-K1-B4
cccacgcgtccgctctcatcatctacgatcatctgatgatctttttggtcatcatcgtgatgctttcaagagttcactccatggcaacaatggacatgtggaaaatagctggattgatccccgggtgcaaatacagcaacaccttgaagctgtgaggcagagaagagagttaggagatactgttacatcagcagatctaaacttgtctgcatctgctggtgctcacgaagagagttcagcacgaggttttatggac

SEQ ID NO: 30470 - DNA, 157 bp, Glycine max
  Clone ID: LIB3051-024-Q1-K1-B5
ggaattggaagggttagggttcgggtttgggcgagttcttcgtcggacgaagcggggagtgcgcagtcgagagggacggagagagtgttctgggacggcggtgttggaaatgcatttggggggcttgagggacgtattgtgattgggcggtacagcg

SEQ ID NO: 30471 - DNA, 164 bp, Glycine max
  Clone ID: LIB3051-024-Q1-K1-B7
gggacgcgtgcgcccacgcggacgaataagaagaaagagaaaaaaaaaaaaaaggggggaaaaaagaaggaaggaagggggaagaaagaagaagggaaagaaaaaaaagaaggagagaaaaaaggaagaaggaagaaagaaaaaagacacagagagaagggggg

SEQ ID NO: 30472 - DNA, 131 bp, Glycine max
  Clone ID: LIB3051-024-Q1-K1-B8
gagacacatacgaacaggcaatggtccacgcacacgcatacgcggaaaaacacataggagatgccaaacagactaacgcaaaaacatgtagcaaaccacaagaaaacgatcgagggcgtcgagaaaatgaa

SEQ ID NO: 30473 - DNA, 260 bp, Glycine max
  Clone ID: LIB3051-024-Q1-K1-C1
ctctctctctctgtttcgctttcaccgaagaataacttgactttcccgaactccacgtgagaaaaagatacccttaattcgcaggcgcgtcttgtgttggacaacaaccacaagatgattaacttcgaagaaaccgagttgcgactcggcctccctggcaacgactcagcactcaagggaagtgctgccaagagaggcttctctgaaactgcttctgttgatttgaagcttaatctttcttcttgcattaacgactctgc

SEQ ID NO: 30474 - DNA, 173 bp, Glycine max
  Clone ID: LIB3051-024-Q1-K1-C3
gggagacagagaaagagaaggagaaggagagggaaagagaaagaagggagagggaacgggaacgggaagagagagagaggtctcggaggagcaggagtcgaggccagagagaaagagagagagaacgggattgagacaccatagatagcaggagattaatggacaaaggagag

SEQ ID NO: 30475 - DNA, 70 bp, Glycine max
  Clone ID: LIB3051-024-Q1-K1-C4
cagccctatccccatcgcaacttttctgaggaagttgctattcttgatggctactttggcaagcattgct

SEQ ID NO: 30476 - DNA, 243 bp, Glycine max
  Clone ID: LIB3051-024-Q1-K1-C5
agatcatagaatatctgatggaaatcataatgtggaaagagcttctcctgagcgagcgcaagatctggattcttccagcccacctgtggtcgcgacctgttagagagatcttgggagaaagtgtagtacctcttcgaataagtgaaccacccaaaacaaacagtggacaggctgctaatggctcagcactcacacagagaactgcatctaccagtagcttagcatcgagcaatgggacccctg

SEQ ID NO: 30477 - DNA, 268 bp, Glycine max
  Clone ID: LIB3051-024-Q1-K1-C6
cccactcgtccgaaacaaccccttcttcactttcattcaaaaccaaagtcccacgggcgaaaaaaaccataaaattttagctctccacgtgtatttgaatcaaagtcttttctaatggtttatctgctattattgaaagtgttgggatacaagtcccaagcagaactttatcaatacagctgcttgtagctgaagccatcatcataggatggactggaatcagttgtcaagtttcaacgtaattagttcagcaggattgccttgcgca

SEQ ID NO: 30478 - DNA, 277 bp, Glycine max
  Clone ID: LIB3051-024-Q1-K1-C8
attggccaattcggccactcttctctgaaaaagcctccagcctccttcttcatccatgttccctctccaccaaaatcctccgcggttcgttccgttattcatcgaaccgttctctcaagtctcgtacttggcttagttcacaactcgaaacttcaccgaacgcattccattcaccaattcgtccaagtctcgtatcaatcagtcaatccgtctcgtggaggttggagagatcggatgggaaaggatccatggcgcatcgagtggaccaggagtatga

SEQ ID NO: 30479 - DNA, 140 bp, Glycine max
  Clone ID: LIB3051-024-Q1-K1-D7
aaaaaaaaaaaaaaaaaaaaaaaaaaaaaaaaaaaaaaaaaaaaaaaaaaaaaaaaggggaaaaaaaaaaaaaaagaaggaaaaaaaaaaaaaagaaaaaagaaaaaaaaaaaagggggggaagggggaaaggaccaaag

SEQ ID NO: 30480 - DNA, 142 bp, Glycine max
  Clone ID: LIB3051-024-Q1-K1-E1
atccattcattgtcttaatgttttcaatttcttcctctttctccatccatttctttcggctcctctcaataacccctttctcaaattgttgcttatcaccatctcaaactcccaccaccaaatctcacccctatattctttc

SEQ ID NO: 30481 - DNA, 292 bp, Glycine max
  Clone ID: LIB3051-024-Q1-K1-E3
ttcatttaaagctgatacgcctaaccaaagattagctcacacgctagtgttgccgtggggcgcatagtatagtatggagtatggaccctcccttcatttaaccatttaccaacttgaatgaaaatctaatcccaatctcaagtctctccaaaaccaagttttagttagagacttaagactctcctctatctaactttggcggtggcattcaccacacactcactgactcagcatggcaaacgacgccgctctgaaaagctctctgctgtggctggcaacaattatattggtg

SEQ ID NO: 30482 - DNA, 188 bp, Glycine max
  Clone ID: LIB3051-024-Q1-K1-E7
tgtactagtgttttgttagttcacacactaagttctgaaaaatgagttccaaagggggtcttattctacttatgttcatggccactatacttttgatctcctctgacgttgcacccgatgatgcataccacaattttgacataacacatgggaagcgtaatgcaaatggtgtagatgatagcaaatat

SEQ ID NO: 30483 - DNA, 86 bp, Glycine max
  Clone ID: LIB3051-024-Q1-K1-E8
aagaccgaataaataatgctttggttgtaataaagcattatatatccttatttaggggatttagcgaaggaataataatgataata

SEQ ID NO: 30484 - DNA, 54 bp, Glycine max
  Clone ID: LIB3051-024-Q1-K1-F1
ctgaagtttgaatgttcatttgaaagtttgcccaagcccacttgaaagatcact

SEQ ID NO: 30485 - DNA, 391 bp, Glycine max
  Clone ID: LIB3051-024-Q1-K1-F2
cccacgcgtccgctttgtagtgttgaatgcaagtgcctctgatgccactcgcttattgcggaacaaaactgcaacaggtaacgtgtccagagagaagattgagagatacttacttgaaaatggactcggccagacaccccccatgggatggaatagctggaaccactttggctgtgatattaatgaaagtttaattcgagaaacagctgatgcattggtgtcatcgggccttgctgctttgggatacaaatacattaatgtagatgattggagggccgaacttaatcgagaccatcagggaaatatggagggcaaggcttgagcgtggccttcaggaattaaggctctggctcattatgttcataggaaaggtttgaagttggggatatat

SEQ ID NO: 30486 - DNA, 217 bp, Glycine max
  unsure (1)..(217): unsure at all n locations
  Clone ID: LIB3051-024-Q1-K1-F4
atttcgtcaattccaacaacaccacaatgggaagaagtaagnccacaacatacctctcgggggctttcaatttccctattatatctgttggaagtaccattgagttaatcttataatggattatgtgttatctttctgttaacggttaaggtgtatgtatattcaggaccggcgagggtgtaccggcagataaagaacaaaccgtacccgaaatccc

SEQ ID NO: 30487 - DNA, 261 bp, Glycine max
  unsure (1)..(261): unsure at all n locations
  Clone ID: LIB3051-024-Q1-K1-F8
gccgtcttaattaagatgtaaaacgaaaaaatgtgtcgcctagccatatccgagagtggaacaagaagggagttgctcgaaaaattggaggtgnttcaagatcgaaaggcgagggacagatgcatggccagcaagatccttcggcattatcagccaaanttcttcccagcacggttaggtgagtgttgaggtgtctggaaaaagtacctgggaggagaagggttttcgccgaagcctgatgggggaagaaggaaattcgca

SEQ ID NO: 30488 - DNA, 51 bp, Glycine max
  Clone ID: LIB3051-024-Q1-K1-G3
gccaattacccattcctgcgattgcgcttgttgaagatgagaatgaatgtg

SEQ ID NO: 30489 - DNA, 160 bp, Glycine max
  Clone ID: LIB3051-024-Q1-K1-G6
ctctcactcactttctttctctgtacaactaggaagctttctctctctaaaagcggggaggtcctccagcaccgcgacctccaatctccctctttgacacagagagagatactgtgtgtgagaccagtattcagtttatggattccttttctcttctaca

SEQ ID NO: 30490 - DNA, 196 bp, Glycine max
  Clone ID: LIB3051-024-Q1-K1-G8
ccgactcgtccgaatgaagtcccattaaaattctccccttcccaatgccatgcgggggggccatatttaatatagggaaggttgaagttgtgacataacattagattaccatgcaatgcattataatctatttgacataattgcacatccaggtgcaatgccaacatattgctacacataacccttagaccagcat

SEQ ID NO: 30491 - DNA, 234 bp, Glycine max
  unsure (1)..(234): unsure at all n locations
  Clone ID: LIB3051-024-Q1-K1-H1
gngagtcgacaaatatctgatggtgttatagcacatagtgtttctcaaggtacacctggacgcaaaactaggctaacctctaataagacagctggaaaggaaacttctcgaaaaggaaataaaggaaaaacaccaggaagacagtctgaaagaggggatagatcaactagtgtgtctgtgagcccatcacctgatttccaggtccaatcgaatgagatgcagcagtttgggcac

SEQ ID NO: 30492 - DNA, 166 bp, Glycine max
  Clone ID: LIB3051-024-Q1-K1-H2
cggacgcgtccgcccaatcatgcggggtattgaaagcacgattcccaatgccatgccgggggcccatattcaatatagggggggttgatgcaggaacataacatgacattaccatgcaaggcattataatcgctctgacataatagcacaatcaagctggaatgcc

SEQ ID NO: 30493 - DNA, 178 bp, Glycine max
  Clone ID: LIB3051-024-Q1-K1-H3
cgttttgttagttcacacactaagttctgaaaaatgagttccatagttattcttattctacttatgttcatggggagtatacttttgatctactgggaggttgcacccgatgatgcataccagaattttgacaaaacagatgggaagcgtagtgcaaatggggtaggtgaaagcaaat

SEQ ID NO: 30494 - DNA, 145 bp, Glycine max
  Clone ID: LIB3051-024-Q1-K1-H5
gaaacgcatgttggattatgagttatcatcctctgataatcaatcgcctctttttggggtctcacatatcatactcaagactctcatcacaatacatgaatcaagctcatatcgagtttcatcagagtcactataatgacgcatt

SEQ ID NO: 30495 - DNA, 220 bp, Glycine max
  Clone ID: LIB3051-024-Q1-K1-H7
caactggctcaaagcaaatgccactaaggcagaaaattcggctgctgatgctagtgctgctttttctgggaaaaagctcttgcctgaagtaataatcaatgaaaataaatcttctggagaaaaaactgggtctactcctgttagtactgctacaaattttactagttcttggagccctggattattgtcaaacagtcaagggatttttggaaattggaaa

SEQ ID NO: 30496 - DNA, 444 bp, Glycine max
  Clone ID: LIB3051-025-Q1-K1-A10
ggctgatgatgttctacatgaaggaggtctacaccttctgccacggagtgcaggccggcaccaagctcttgggatccacgccgcacgaccagcttctcatcaagacctccgattccttctacggcttgctccttgtcgcaattgggttcctcctcttcatggtctcttttgttaaagatcgtgactttcaggtcttcttcgccaagggttgcacgctcctccacctcttcatggcgatgtggagggtctactttgaacgcaaggttgaagatctcgcttgggattggcttcgccagactgttggcgattttctcttggccctttcgtggggtttcttccttgggtactcttggaaggagaaagatacgttataaacttgtcaatgttgccttccctgcttcaattacagaaaatggtcaataatcttaccagattatgcctgat

SEQ ID NO: 30497 - DNA, 436 bp, Glycine max
  unsure (1)..(436): unsure at all n locations
  Clone ID: LIB3051-025-Q1-K1-A4
gccacgcgtgccgccaagcgttcggccaagcgttcgtgcacgcgtccgcttttctctgaggctccctttctctctgtctgtctctcgctcttcttctcatccagcaccgagtcacagactcaccgatcttccgattccctttcgtcttggtttatgagctcgaaggagagacccactcttggtggcacgcggattaagacccggaaacgggaatattgctgcgccgctggaccctgcagcattctcggatgcagtggtccagatatatttggataatgctggtgatctggaacttattgctaagagcatngaatcttcagaccttaactgttcaagatacggcgatacctttgttgaggtagttctcactgggggtcgtacacaacctggaactaccaagcctgatgagggggaccgccatccatactctataata

SEQ ID NO: 30498 - DNA, 183 bp, Glycine max
  Clone ID: LIB3051-025-Q1-K1-A6
gtctaaggggtgccctgagatcacatttaacaatggtgaaggctgtggccgttcttggcagcagagagggttgtaactggaactattcacttcgttcaggagggatgatgaacaaccaccgacatctggaatctaatgctggagctataactggtcttgaatggattgataaaatgtcttgag

SEQ ID NO: 30499 - DNA, 424 bp, Glycine max
  Clone ID: LIB3051-025-Q1-K1-A7
atttccagatctttatattggctgttactcgcaatgccagatatggatctcttatagggagcttcaaaggaaaggacctaacacgcattgaatcagctataaaagctttacaaaagaaatttcaacccagtgctttcattgagacgaaataggatgatgttctaaatgctatggtccatttcttttggatgccaacagaatgaaaacctttcatggctggggtcatatcattctcatattacctacaaatataagatgcattgggataaagatggagagggaagaaaatcaaggtgctgctgtattggtagaagaaagaacaatggcacaaggaggtggctgaatcttcaattctattgccatacacagcacttttaactgcttcatggagcatggacaacctattgattattatggaattatt

SEQ ID NO: 30500 - DNA, 448 bp, Glycine max
  unsure (1)..(448): unsure at all n locations
  Clone ID: LIB3051-025-Q1-K1-B10
gctgagaagtgtttggcagatcatggtgtggataggccttcaatgggagatgttttgtggaacttggagtatgctttgcagcttcaagaggccttcacacaaggaaaggctgaggatgagactaagtcatcatcagcagtccctactgcagctgttcctacttcacctgccccaccaacacctnccatttcttctgatgaccgcccggctgcgcctgctcgtccggaagtgaataataatacttcatcggatgtgcattctattgatgaccattctggaactgcaatgtttgctcagtttagcaatctcaatggcaagtgaaggcctaatttggtttcatgaatggagcaaccatcacctggacagctacaaatttgatcatgtctaggaagatgttatagtagctttctgaaggcttggaccaaaaaattcctgtgtaatggtgtga

SEQ ID NO: 30501 - DNA, 296 bp, Glycine max
  unsure (1)..(296): unsure at all n locations
  Clone ID: LIB3051-025-Q1-K1-B2
cagaaaaataaaattaaaactntgcttcgctttttctcttcattggttttcttcctcttctacccctttgatctcatgcaatctcccctcatggatccctttgatttgattcgcaaaggggtttaattgcttgagatctcgtaaaggttttggctttcgtaatggaagggtttggctgaagctatctggaatatttgtgttacatttttggaggtccatctatgttttagtcattttgtccatattcttgtcaataatgagcttatccaagaaaggttcccaaacagacaccaaac

SEQ ID NO: 30502 - DNA, 435 bp, Glycine max
  Clone ID: LIB3051-025-Q1-K1-B5
cccacgcgtccgcccacgcgtccgcccacgcgtccgccccagcagcgtgtgctttcttcgttcgtctcttacatcaggtacattaattaagataatactacttctgaagtgctgttgaggttatggagcgccagggtcatgattatgcaactgcatctgctatggcatatgctcagcaacaacgacaagctgctaatatgcaacaacagcagcagtttggatttcatccccagcatcagcagtttccttcgtcaatgcacggttctccttttatccccccaggtcctggtcctgcacacccccctatgcaacaattcccttatcatcctgccctgcagcagcagcaacagccacttccacaattacaccctcatgcccctcccccgcctcatcttctacttcagcagcagcagcagcagcaccaaggaccacctg

SEQ ID NO: 30503 - DNA, 429 bp, Glycine max
  Clone ID: LIB3051-025-Q1-K1-B8
cccacgcgtccgatctaaacttccttgttattcaccatattcagttctcaaatgctattcacagggatgacttggtaagtggtgctggctctaatgctgtagccgttctggctgatgggctcgtagatggactacttgacggaagctccacggacaaggtatccagaatttatctagaaacactgtctttgaacttagctcatggctgcacaagagaaatacaaagctgagatgtcccatgtcatcctgggcaaacattggtgatctgatgaagaattgcacaactgctggagaagacattatactttgctggtgttgctatcgcaatcatggtatgcatcgtcaatggaccaggggagatggctgacgcagactatggctatgctggaggcactctcagtgagattgacctttatgttgggaagactg

SEQ ID NO: 30504 - DNA, 225 bp, Glycine max
  Clone ID: LIB3051-025-Q1-K1-C12
aaaaaaaaacatattgcaagcacactttaacaagatttttgaaaataaacaacagggcggtcaacatggaaggaataaatgccaaaaaatttcccacggacgtaattgctgcgcggcacgaacgctctaggacggttgcttggaagtatgctgatcgaatcctacatttgttgaaccaacgtgtgatcgccaatatcgtgcatagcgggtcttgccctgtgtttc

SEQ ID NO: 30505 - DNA, 427 bp, Glycine max
  unsure (1)..(427): unsure at all n locations
  Clone ID: LIB3051-025-Q1-K1-C2
gcagtttattctatcatatccttgttcaaataattttcttttcaattacaataccccaatcccagaaacttatgttcatgaccatcctcaaggtcccaataacatttacttgaagacaattttgagttgaccttacagcctagttccacctatacaaacacccttgatccttcattcttttttgagttgaccttacctagctccaatactggcaacaataatactcttgggcatctgaactatctccattctttttttccccctttctttgcagtggatntgcgaggttttaaagaattaaatggcgttttaatggcctaaaaacctaggaattatagaattcattttacacatacctctttttactaacctttaatctttaaaatttattcttgaattaatcgtgtttaacggagtaatttaatta

SEQ ID NO: 30506 - DNA, 434 bp, Glycine max
  Clone ID: LIB3051-025-Q1-K1-C3
gaccgtttgagcttgaggccttgcaagactgggaatacaaatttatgggcaagtatgtaaaagttggaaccgtaacaaagacagttccagtaactgaaccagaatccactgctgaaccatcagaatctactccccatgatgaatcttcaaagcctactgaagatgatggcccatcagaatcagcagctgctaaaaatgatgaaaccccttcaaaggttgatgcagataaagagtaataatcgttggataaagagtaattgtcttgcaaattctcttgcaaacagtggaaacggttacttagaagcttctgagaaatactgagccttgctgaatgtattcagcaaatgtgggacaaagtttgcctaagtattctgtttgataaataaggaaatcttggtatttaatttcagttttcctgggtttatagcttcttc

SEQ ID NO: 30507 - DNA, 432 bp, Glycine max
  Clone ID: LIB3051-025-Q1-K1-C5
attccgttcaaagcgttgcgtagaacagagaaaaagaaagtaccaatttcttgagagagaaaacccgaagaagagtcatggcttccaccttcgacgccttcaccgtcgacgacgaccacttcgccgccccctccgccgctgacaccttctccggctacggcgacttctctactttcccctccgacgatgtccccgtcgaccacgccgccaccgcggcgtcgccggagatcttcggattcagcgatcccgatccaggctactccccgtctcccttcgagcaagtgcacgagaatgggaacggaaatggaaccgtaaacggctacggcgacggcgttttcgtctccgatggaccggtgcttccgccgccggaagaagtggagccggaggaaggtcacgcacttcgggagtggcgccgtcaaaatgccattcagc

SEQ ID NO: 30508 - DNA, 351 bp, Glycine max
  Clone ID: LIB3051-025-Q1-K1-C7
aacaaattaacaagaaagtgaaattgatttgggttacttgttttcttgagtcattcttggttagggtcgtgaatcacttaagatacttagtacttgaatgtttaatatcctcactttgagagtgattgttagcgtttgacttgcttctttttgaataaataaatctatatagacttttgctttgaaagctcgtctcttaaattttcacatccacttttaagggtgtggctgcaccaaagtggttaataagcatgctgcggcatctaactagttagaaatttgtcctactgcatagatatccctgctgattatgtctgtattaaaagtaaatcattcttttgccaatacatc

SEQ ID NO: 30509 - DNA, 439 bp, Glycine max
  Clone ID: LIB3051-025-Q1-K1-C9
gaagatatgaggggggtgtttcttccatggaacccaccttgcttccacgacgcactccatctcccttccgtctcgctcctgccaacgagacccttcttcttcaccctctcagcctcctccaccccctcagcgcccgtggagtccgcgtcgcagctcagcgcgcgcgagaggaggcgcgcgaggagcgagaggagggagacgaggagcggcgcgaagaactggagggaggtggtggaggagaggctcatggaaaagcccaagaagcagaagggctcgtggatggacgagctgaaccttgacaatctcgccaagctgggtccacagtggtgggtcattcgggtctccagggttaagggaaacgacattgcgcaactcctcgctcgctcgctcgccaagaattatcccgatatggagtttaagatatatgctccatctgtca

SEQ ID NO: 30510 - DNA, 368 bp, Glycine max
  Clone ID: LIB3051-025-Q1-K1-D1
tcgaaggcaagagaaggggaatgttgggtgtgtaacaaattgttgaccctactttgggatcagattatgatgtggagcagatggagatattgacaacagtggctttggaatgtgtggaggaagagaaagatgtgagacctagcatgagtcaagtcgttgagaggctccaaagtcatgattcttaatctcttgtgcatgtcactttcttgtttatcattgtctattgctagcctctagatattttcatcagtttagataattaaggagtgtttatatttctcatgttgagcagtagagttaaattaataagtgtttgtttagattcacatgtacttaatgtaaatccatcttgaaattaattactcccc

SEQ ID NO: 30511 - DNA, 435 bp, Glycine max
  unsure (1)..(435): unsure at all n locations
  Clone ID: LIB3051-025-Q1-K1-D2
gaactctttcggagagagacacagaagtcagcgagtgcaccataaatgtagaaacccctcaaatcaaaacaaaaccatacaacacaaatcgtagattgaaaaaaataataataaagaatcagaaaaaatgggttctgagaacaaagaagccgcaggtggagaacttaacaattcgtctccttcgccctcttcttctcatgcttggaaaagtcgaatcgttattccaacccttctcgcaggagttgctggtgctggagctgggttgatttcaaagcatcgaagaactcttggtcctgcttactgggtggtctaactatgctgtgaatttcaccattgtcaccgggtgctattgtggggcacgtgaatttgtggctgcaactagaaaaacgggacctgatgacatatngaattctgcagtagctggatttggaactg

SEQ ID NO: 30512 - DNA, 433 bp, Glycine max
  Clone ID: LIB3051-025-Q1-K1-D6
ctcaagccatcctctcctactatgttctccttaaaaaaaaaacgaaaacagtggggttgaaaaatttgtcttttatttgcagaaacgagccaaggcttagggtttggtcttttggtgtttttgcgaattagggtttgtgattggatcgccatcttcaccaattaccattaccataaaacttaatcttctctctcgccatgacggacggcttctggaatcggcagcagccgcttcacccttcttccaccatgctcaaacgacctcgtactgaatatgatatgtcaccttctggtctgacttcagggggtaatgaaatgcataattatattgctcgaaatgatgaccacaccggtcatcgaatgctaaaggacactaaaacaattggatctgcttatgatcggtaccttcaaagtgcagggcagcttacttcttt

SEQ ID NO: 30513 - DNA, 410 bp, Glycine max
  unsure (1)..(410): unsure at all n locations
  Clone ID: LIB3051-025-Q1-K1-D8
ccttaatttctctctcacacacactttcccacatctctcatacacttcctgcttctctctctctctctcgtcctttttcctcattctcttcttcacaaaacatcactcttttttcatttcaccgacaacacaacaacgtgagttaaacaaaaaacagtaactccacgcagccatgacagacagggtgtacccatccgccaagcccgccgtggttaacggcggcgccgccaacccatctttcccggcgacgaaggctcaactttacggcgccacccgccccacctaccgccctcaaccccaccaccggcgccggagccggcgacggtgctgctgcaccttcttcttctggctgatcctcaccgtgctgatcctnctnctnctgatcggcgtcgccggcacggtgttctacc

SEQ ID NO: 30514 - DNA, 314 bp, Glycine max
  Clone ID: LIB3051-025-Q1-K1-E10
tttgaaggatttgttgaggatgctgttgaatccaccacgggagaccattaaagatgatgcaatgattcagatagagatgtctgtgccatggagaggcaaaagtaaattacacagacgaaactccaattctttgccaggtgagaagctcgggtcaaaagggtgcggaaaaactggcaaggtccaaattttgtgaattactaccatttatatacatatctgtggtatacatggaaggaaataagggttctaaatgcaattcagtggggaaaaggcaaatttttagggagtaaaaaaaaataaaaattaaggaaaaa

SEQ ID NO: 30515 - DNA, 440 bp, Glycine max
  Clone ID: LIB3051-025-Q1-K1-E12
gtgatttgttacatcttagtaaattgatagatccttcaatctgttcttgttattgtgggtaacatttagcttccttctatggctggatatagtaatgtcacacagatctgtacttttttttctgtttgctttcattcgttttcagttcaatttgtaactaaaatggatagatctgagcactgatgatacagaataggatcaatttttcaagtgggtgctgctgaacagtgtaagtttttcaacggacaattttaatttttccctggctttgatatctcacatttgatagctgaaaccctaaatttcctgcacaataaaccaaacaatgtacaagatgtttccttttgaactctttaagtttcgatgttaattaatctattagctagaagaaccaaaactctatcatttatagttacagttcttcaaggataacctattag

SEQ ID NO: 30516 - DNA, 436 bp, Glycine max
  Clone ID: LIB3051-025-Q1-K1-E7
ctcgcactgttatttctgagcatgcacagcagagcggtggtgggagtttcagctctaagtatgggacttgggagaattgcttgaccacatgatgatccttgccgttccatgcaaacaaacatcttttttcttctgaaatttgccaaaacttgtgtcaatcattggaatcggagtttttgggtgcaggtgaaaagcaattttgcatcaggtcaaattggttccgtttcagtgaattgtgtattccgttagtatccattttcttgtttatttatatctcaaattgcgatatttaccgctgcctaagatatgtggtagatttgtgtgacttgaatcaaattgccttcaacaaagctttgttcataactaatatagtagctcaacagtttaggcccgtaatttctgcataagaacaattcttccagatgctcataattaa

SEQ ID NO: 30517 - DNA, 427 bp, Glycine max
  Clone ID: LIB3051-025-Q1-K1-E8
ggactaagccctctgcaatctgcagaagtatatgaccctcatacaggcatgtggtccctgttacctagcatgccttttgcaagagctcaagtgttgccaactgcttttttggctgacttactcaagcctattgccacaggaatggcttcatacaaaggaaggttatttgttcctcagagtttgtattgctggccattttttgttgatgttgggggtgaagtttatgatccaaatttaaattcatggcttgaaatgccaattggtatgggtgaaggctggcctgcaaggcaagctggaacgaaattgagtgttacggtcgatgatgatctatatgcacttgatccttcaaattctcttgacagtgcaaagatcaaggtatatgattatgaaggtgatacttggaaagttgcagcaggagatgttccta

SEQ ID NO: 30518 - DNA, 424 bp, Glycine max
  Clone ID: LIB3051-025-Q1-K1-F2
cccacgcgtccggagagagaaaagccagatagagaaagacagacagagagagagagagagaatgctccgagtttctctttcagagactagtagacagagaaagagagtgtgtgtgactctgtgagagtgtgcgatgatgatgcgaagaagaaccaaacaacgaaaaaacaaaacgacattcacaaatctgcgcgaacctctcaatctcatttcctgagaattctctctcactgcgctgcgctgcgttttgtctccgccaccgtcgtcgtttcggcttctcaaaagcatttcgcgcgcgagggagataaagatatgagtcgtttagggttcaagcacgaagtttacgacggcgacaagcacgttggcgaactcgacgtgattcctctgtcgtcgtcgtcgacaacgacgccggttcacaatagct

SEQ ID NO: 30519 - DNA, 435 bp, Glycine max
  unsure (1)..(435): unsure at all n locations
  Clone ID: LIB3051-025-Q1-K1-F3
ctctgtctcagtgtgtctattcctttgttattccatgattaaaaagcttcgttttttgcattaatcttattccaactatatctcgactgacaaaataaaacattaatattgctttgaggtcgtggtgcacagctgtggtaattggtgaatcttgcataattggtaattattggtatccgagataatttcttaacattttagtggaaatgctacttcaacctccaatgttactgtaaattagaattatgagcacttatttttatagccaactggttctttagtcaattntagtggagttatccttggaaattttaatgattgtgatgtgatagatntcttggtactgactactgagttgtacatgacgaaaggtatgaagaaacccaatggattatcccacanattacagaatgagatgggaaatattaaagctaa

SEQ ID NO: 30520 - DNA, 341 bp, Glycine max
  Clone ID: LIB3051-025-Q1-K1-G1
gccacgcgtccggtttctgagcctcccctcccctctctctaagatccccaaattgcttgtgaatgctagaaaccctagacagattcgattggatgcgctcccatttcacatcaagggcgagcgcattcggttcttgcaagcaagcctggtactaccgctgcctcggcctcgacccctgaatttgaaccattcatcaccacctttcttcattcattcacggttttccttttcgactcgatttgttgttttttttgttttgtttccttgacgatgttgacgatgagcaagcagaagaagaaccagaacgcgaagaggctgttgataagccttaaagggcctgg

SEQ ID NO: 30521 - DNA, 407 bp, Glycine max
  Clone ID: LIB3051-025-Q1-K1-G2
gaatgagcccgttcatgctcctctaccaccgaacacaccccgtcaccaccgaacgctaacgtgcgccccttccttaccctgcgcctcggcactctcccttattccccctccttcataagctccgcgttaaccgtcctctctctctctctctctcggatcggagcgagactggcggctccggcgttgggggcgttagggttagggttagggtttccaagagatgtggtatgctccaggcattgatgaatctgttctcgctgtgttggaagccatttggccgcgatgctgctgatcgaatcgattccatcggagttaccggaagagaaggccaaaacggcttgctttggttccgcgacggcggaaaatatggctctggcgatttcttcatggccggcgttcaggccaac

SEQ ID NO: 30522 - DNA, 438 bp, Glycine max
  unsure (1)..(438): unsure at all n locations
  Clone ID: LIB3051-025-Q1-K1-G3
tcggacaatttggttttggccgaacctttttaacatcatttgggctggttttctgccaatacaaacaaacaaaaacttgattctctctattccatggcgcccggaaggaagaagcggcaagggaacacatccattattcctgtggatgcaaaccccactcagcaaaaagcacaatctttggatattgatgctgagtgtgagagtgagaccaaaagaatgaaatttgctgaggaagatggtgatggggcagggggttcttcttctgttgtgaaaaagaagcgtggcagaaaaagtaaaaaaggagaagcatgacacggaaaagatgttagagagcaatttgtcggaaaagaagatactcaaggcgaataccacggtgaaaattgtggagtatgagggtcttcttctgttcaagaaagtgcgaanaagaaacgtggaaga

SEQ ID NO: 30523 - DNA, 436 bp, Glycine max
  unsure (1)..(436): unsure at all n locations
  Clone ID: LIB3051-025-Q1-K1-G4
tctacaatcactccttcctctcatcctctataaagaaagtgcttaatttgtgttgttacttggttcagtttccatggattgggggcttgctatatcttctcatcctaaaccttattcagtcacaactggtggaaatctctggcggagtaaacacaccaccaagaatatttactttgcaagttcttggatatcaaaagcttcacgacacaaaagggaaactcaaatagaacataatgttttgaggttccaacaaccaaatttggatcatcattacaaatgcatcagaggagggtctacatatcaagaatgcaatagaaaatttgttgtgaaggcaatctctaaacaacctcttggttttgaagctcatgcttccaatcctaagaacattttggactctgtcaaaaatgtattgtctgctntctactggttttcctat

SEQ ID NO: 30524 - DNA, 364 bp, Glycine max
  Clone ID: LIB3051-025-Q1-K1-G5
ctttttgattcctaaattctctaaaattcgaaattctaatttcgttaggggaaagagattgtttgtgtgtgagtggctatggtggctggcgtggtggctatggtggtgggcgtggtggctacggaggttggggtggtggctttggccctaacgaacataatgaggctgggattgatgctagccctcacaactaagaaggaaacttgctaaagcttatataggatttaagttatcgtaataaataaaacttcattggaagggtagttataatagatgtggagatctttcttcgctctggtcatataaaggaataatacttttctattaatttccttatctttgtatctctctgttcctttttgct

SEQ ID NO: 30525 - DNA, 269 bp, Glycine max
  Clone ID: LIB3051-025-Q1-K1-G7
cttgagcttctccttctctctaacctaatttctgctccgacgacaacaccaacaccgaagccaatgacggcggcggcgacaccaccgcaacctgctttcattcccaccaaaggattgggaagtgtagtttgagttgatttcagcttctcctgagcaacaatgcgaaacattcagcctcatcgattttccactcttatcgaaccacccaacaaaaccccaacctcgaagccattcttccttgccatacctcaccgaaccattcccgagcc

SEQ ID NO: 30526 - DNA, 355 bp, Glycine max
  Clone ID: LIB3051-025-Q1-K1-G8
cttgagcatttcctactctctaacctttttgctgattcgacgacaacaccaacagcggacctattgacggctgctgctacaccactgaaacctgctgtcattcacaccaaaagataggaaaatgtagttcgagatgattgcagctactggagcgcatcaatgcaaaacattaatcctaatcgacattccactcttattgaaccacccaacataatcacaacctcgaaaccattctacattgcaatacctgatcgagccattgctgatactcgaggccaggaccttaatttcatttgcgtcaaacaccagcacgacatcgactatgactggaacatgcttctcccttgatccacct

SEQ ID NO: 30527 - DNA, 449 bp, Glycine max
  Clone ID: LIB3051-025-Q1-K1-H11
cttaaactccttactacattctccttctcacatgaaatggatacatcctagttcttttttgggatcaataaggacaggctggaaggatccaaaaccaaccccactcaccattattattattattattatcagggcagaaacaaacacaacactaccctctccaataaagtgtatttctgtacacaaaactcttcagtcttaaccaaggtagtagctagcagcagaaaaattaaaattaaaaattaaaaaaattaaagagacttacaaaaagcaaaaaaaaggacgaggattgaattctttcttgccttttctttttccttgcagactctgctaagcatctttggttcctcacttttccattcttttatctgccttcccactccttcttcattcctcttcgaattttctcttcttttttttcaaccaaattatcttggtttgagcttctc

SEQ ID NO: 30528 - DNA, 434 bp, Glycine max
  Clone ID: LIB3051-025-Q1-K1-H4
gcgtgcgtgggatgggggcgctaaggaggcgttcaatgtgctcagaagcaccgttgaccggagttattttcctgatgggcagacgttttgcacccttgcgagtgctttgtgcagggagcgcaagattgatgagatgaggagttgttgtatcttgccgtggggcggaatattgtgcctcctacgtcgatgtatgacaagtacatatcggctctgtgccgggctgggagagtggaagatggttatttggtacatggggaacttaagagtgttgctgccaagacgtcgtatgttaagatgattaagggttttgttaagtctggtaggggagatactgctgctcggcttcttgttgaaatgaatgggaagggtcatacgccgattcctcggttgtgtagatatgttatttgcagcttgcttgaaatggacaattcaag

SEQ ID NO: 30529 - DNA, 429 bp, Glycine max
  unsure (1)..(429): unsure at all n locations
  Clone ID: LIB3051-025-Q1-K1-H7
cgcgcttccgccgccacactcgtcggagcacactcgccggaaaacactccccggcaaaaaaagaaaacctcaaagactaacccgagtcgttatagtgggttggagtgaacgaaaagaaacaaaggcaatacaaaaagggcaaacacgaatacacggttttcattctttcaccactcttgtttccttttacgacgtcgttatggaactcaagtttatgcagttttcgcaacacgttcttcctcattccccttcttcatctcaaaccctcgcttctgcactctcttccccttcatcgtccaaaacgcgaaccctaatgtgtcgtttcgtgaatcgctcgagcctctttccgaccaccacccgccttcttcggagaaccaaatcgtttgagcaccacgcgcttttcacgcgcagggggagnttgagaagggc

SEQ ID NO: 30530 - DNA, 280 bp, Glycine max
  Clone ID: LIB3051-025-Q1-K1-H8
agcacaacatgacgtgtacgattctatgtccgacacgagcctatttcattcacagtaacttctaacgacgattagctactattcattgctatttccagattctgattcttgacgtcagactatggaatgggaacccatgtgatgtgacatcaagactgcttggtagatcgtattatggatcttacaactgtatcttcctgccgcacgagttccggcacttactgtaattattatgactacgactacgacagctaccatgttgtctcttgctggtggctct

SEQ ID NO: 30531 - DNA, 430 bp, Glycine max
  Clone ID: LIB3051-026-Q1-K1-A2
cttaccccaagacccaagttttctcttttcctcataaccccctctctccctaccaaatttcaatttcctctttcctcccttaggttatggatccattggggaaacgccctgccgccgaggacgattccctaatttccgattgcgagagcggggtttccgctggagacacgccgccgccgttcgtcgaaaacgccgacctcgtccggaccagattcgttcgtggcctcgtcgcgcactgcttcaaacccgaggttctggcagttcgcagaaacgtgtgttcctccgtcatggccctggcgccttaaccattcctttaacgttttggcccgtgcctgggccaaattgcccggcggcaatgccaacgtgaagttggcctgttacggtccgtccagtaaggaagagttaaatgacttctttcagaacggtttcg

SEQ ID NO: 30532 - DNA, 410 bp, Glycine max
  Clone ID: LIB3051-026-Q1-K1-A5
cggacgcgtgggcggacgcgtggggtgatttgcagaggagaagaggcaatggcttacatgtgtgcagacagtggcaacctgatggcgattgcgcaacaagtgattaagcagaagcagcagcatgagcagcagaagcagcagcagcagcagcagaccaatccaattccatggaacagcactcctcctctccctcccaccgatttccccgaccccttccaatccgatccccccttccacttccaacccttccgcttctccgacttcgactccgacgactggatggactccctcatcgccaccccctgctcctacaccaccgattttccctttcccctcctccgatctcaaccgcctcatcttcccgccccaatcccccgactcggactccccacagcagcctctcctaaaag

SEQ ID NO: 30533 - DNA, 446 bp, Glycine max
  Clone ID: LIB3051-026-Q1-K1-A7
cccacgcgtccgtgcagtttattctatcatatccttgttcaaataattttcttttcaattacaataccccaatcccagaaacttatgttcatgaccatcctcaaggtcccaataacatttacttgaagacaattttgagttgaccttacagcctagttccacctacaaacacccttgatccttcaaagcctctcatagttccaatactggcaacaataatactcttgggcatctaaactatctccattcttttttccccctttctttgcagtggatttgcgaggttttaaagaaattaaatgcgtttttatgtgctaaagagctaggtaattatagaattcatctcacacatacttctttttactaccttttatcttttagattttatttttgaattatccttgtttaatggagtaatttaattcgttgaagggttgtggaatttg

SEQ ID NO: 30534 - DNA, 54 bp, Glycine max
  Clone ID: LIB3051-026-Q1-K1-A9
ctttttttttgtcatcttttaaattttaatcagtgtgaattttgaattgactcc

SEQ ID NO: 30535 - DNA, 408 bp, Glycine max
  unsure (1)..(408): unsure at all n locations
  Clone ID: LIB3051-026-Q1-K1-B11
cgtggaagaaggaggaactcgaaaggatcaagaaagaacgcgagcttctggctcaggaaagatcaattgctgctgccaaagacgaagctgttcttgcttttcttagaaagtttgcagaagcagaagacacggtgcagttactcgagaaaattcaggttcaaaacgacaaacagaaaaacatgaaacaaaatggcggtaatgataatgctaatggaggtggtggtgtcgcagttgtcactgatatggataaacaagaatgtggaaatactaatgttcgtgttagtgttgggaattttgtgcacatgagtagttctcgttggccgaaggatgaagtggaggcattgataaagttaaagactcaaattgatgtgcangcacaatggaatagtaataacaataacaataatg

SEQ ID NO: 30536 - DNA, 428 bp, Glycine max
  Clone ID: LIB3051-026-Q1-K1-B12
gagcgtgaacccaccgtgcttgactctgttattaagagtttcgaagaagaaatactttctccggttccgaacccgaacctagcatccgaggcagatgtgtttaagccgaacctagggtacttattggaagcatccgacgacgagctagggttgccgccgacggtggcgccaagcgaggatgtgttgaaacccgaaacagttgattcggatcgtgttggaccagaaggaatggatctgactgggtttttggggtttgaagatgatattcgtagctacgaaggttttgggtttgtggggtatgatgtgggagataacggtggtggttatgtgacgatagatgggttgtttgactatgcggaacccggtgccgatattttgtggcggtcggagtcgttgcaggctttgtagttggttgggaagattaatta

SEQ ID NO: 30537 - DNA, 124 bp, Glycine max
  Clone ID: LIB3051-026-Q1-K1-B2
cccacgcgttcgcccacgcgttcgcccacgcgtccggttgtaacattttatggcaaatgcagcagcagctttatgattatcccatttataattggaagcaaaccaatccaatccttgatccttc

SEQ ID NO: 30538 - DNA, 399 bp, Glycine max
  unsure (1)..(399): unsure at all n locations
  Clone ID: LIB3051-026-Q1-K1-B3
cccacgcgtccgcccacgcgtccgagaaaccctaggaagcagcagcggcggcaacagggagagaagatgaagttcaatccacgtgtgtcgagcagccgccgcaagagccgaaaggctcatttcacggcgccatcgagcgtgcggcgggtgcttatgagcgcccctctgtcggcggagctgcggtctaagtacaacgtgaggtcgatcccagtacggaaggaggacgaggtgcaggtgatgcgaggaacatacaagggtcgcgaggggaaggtgactcaggtctaccgtcgaaagtgggtgattcacattgagcgcataacccgcgagaaggtgaatggttccaccgtcaacgttgggattcacccctncaaagttgtgctgaccaagctcaaattggac

SEQ ID NO: 30539 - DNA, 402 bp, Glycine max
  Clone ID: LIB3051-026-Q1-K1-B4
tcccgatcaatcacaaaaattagttaacttatcggaccttttacttcgcttcaaagaaaaatactcagaataagggcaaaaagaaaaaaaaaaaaaaacgtaaaaagaggtgcaacacgaggacttcccaggaggtcacccatcctagtactactctcgcccaagcacgcttaactgcggagttctgatgggatccggtgcattagtgctggtatgatcgcacctgataagtattgcacaatcaatactatattctttgctgccgacggccgattttcatcgacttttacaccgaacgagccacggtgcccacgatacatttatctcccgatcaatcacaaaaattaattaacttatcggaccttttacttcgcttcaaagaaaaatactcagaataagggc

SEQ ID NO: 30540 - DNA, 406 bp, Glycine max
  Clone ID: LIB3051-026-Q1-K1-B6
cccagagagatggcgtcacggaacatgttcaaacagccagatactaatggagttgttaatggagagttggctaatgtaaaagtcacaaatacaagtttgaatagacaggtgactggttcttcacctgaaagtacatcaaaccaatcaagcagagcagctccttctgttgtgcatgggcagggtgctagtgacccagttcagttgatgagattgctcgcagaaagggctcataagcaacacttttctttcaatgatttgcttgttgatactcctccagtgacactgtcaggtccatctggacagagagatgactcgggcaatgcttcagcagcagctgccgaggcatggatgtctgctggggcaggaaggtttaaaacaggacccaaaaattctagttcccccaaaa

SEQ ID NO: 30541 - DNA, 440 bp, Glycine max
  Clone ID: LIB3051-026-Q1-K1-B8
cgaagttcaaggtgccggatttcgataagtacaaggacactacttgccccaagaatcacctgaagatgtacaacaggaaaatgggggcatactcaaaaaatgaaaaattgttgatgcatttcttccaagaaagtcttattggggcagtcgtcacctggtatactaatctggaaccttcccgagtccattcttggaaggacctaatgattgccttcattaggcggtatcagtagaattctgatatggctccgaatagaatgcagctaaagaacatgtgtaagagggagcatgaatctttcaaagaacaatgatagtagatgcgttaccagtgttctactatgagaagatggtggattacactccttcaagctttgccgatttagttttcgttggtgaaaggatcaaagtaggcctaaaaagaggcaaatttgattatgctg

SEQ ID NO: 30542 - DNA, 431 bp, Glycine max
  Clone ID: LIB3051-026-Q1-K1-B9
tgaaaatcttctttttccgagtcacaatgtcttaaaatatatatttgcaggggtgcttcgctttgtttaggtggtcttcatccagatatgattgttgatcaggaacagcatcttaagactgagaggagagaataccactcacacatacataattatcacaatgatatgataggatttctatctaagttgaagaagagctggcaaagctgtaaagatccagaaaaggagattgcgcaaaagatatggaggtcaaaacatgtagagaaaagaatgccctcaaaagtgattgaatctagagtctatgatcatgatgggaatgttacagggacatctgattcatgctcctgggatgcagaggagaaagcatgtagtagcgacaaccaaatttcctcactgagaaaagacaatatacttcaaagaagggtgcttga

SEQ ID NO: 30543 - DNA, 243 bp, Glycine max
  Clone ID: LIB3051-026-Q1-K1-C11
ctcacgcgttgctcaacactccctcccatgcgttctcctgcaatccgctgcaatggaaggtcaggcttccctcaaggctccctatccggccaccaccatactctcttacagacccagaacctctattcttccatcccaagccagctctcgcaaaataagctccacactatccttcactgtccatgcccaattcgaatctgatgatggctcatctagattatccacatcacatgaatctgtgac

SEQ ID NO: 30544 - DNA, 438 bp, Glycine max
  Clone ID: LIB3051-026-Q1-K1-C12
gggagcttggcgtggaagcagcttcttctcaacgctctggaatccaacgctcacctcaagcactcttctttcatgcagctcgcaaccctaggaaccaacggaacaccttccaaccgcactgtcgtcttccgaggattccaagacaacactgataacatccaaattaacacccatgcccgcactcccaagattgaagagctcaagctttgctcctctgccgagatatgttggtatttcacagattcctgggagcaatttcggataaatggggatgtagatatcattgatggtttgaatcctgatccgctaaaacttcagcaagagaaaaatcctggtttgccagttcattgagatcaagattgcaatatttgttgcccaaccctggacttccctgtctaaatgagcaagcactgccagaaatatcattagatccttcta

SEQ ID NO: 30545 - DNA, 227 bp, Glycine max
  Clone ID: LIB3051-026-Q1-K1-C4
gccacacattctttcaatcctccgaagaatgcacagaccataaggaacctagtttaaataacacctgaacaaattgaaactgtcaactgaagacttgcaaaaaaaggatacacatctgaaaataacattcatgatcatactgaagacatttatagatctatcgacatgccaacattactcagactattaccatttccttattcaggcatgctgtaatgtcatacatt

SEQ ID NO: 30546 - DNA, 391 bp, Glycine max
  Clone ID: LIB3051-026-Q1-K1-C7
cccacgcgtccgcccacgcgtccgcccacgcgtccgcccacgcgtccgcccacgcgtccggcttgagcaaggtgatcaaaaggaatgcaagaaacttctagaagatgggaagagtacactcgacagcatgacagatattgatccatctgtatatgctagctattactgggtatcatctcagtttcataagacatgccaagaatttgctgagttctacaaaagtgcccttctctatttggcatacacatcagtggaatctctctcagattcattcaagctggatctggcatttgatttgtccctctctgcccttcttggggataacatctacaactttggagagctacttgcccatcctataattaagagccttctggggacaaaggtggaa

SEQ ID NO: 30547 - DNA, 233 bp, Glycine max
  Clone ID: LIB3051-026-Q1-K1-D10
accgtccggaaggatggaagaacttacacggagggtccggatggaggacatgctggatcaacgcgcgaacttccctccgaagaaatgactacgaaaccaacatagggacaagatgcaaccacttagaacaaaccctagactattatacccgcttatgatcaataagcaatatcgcctgtgattctatgaacatagccgattctaatgccaatgctgcaacggctagggttctc

SEQ ID NO: 30548 - DNA, 439 bp, Glycine max
  Clone ID: LIB3051-026-Q1-K1-D11
gtgagtgaaaagttacaccaacaaacccgtgaaagcaaagcacccattagaccctttgcctaaccgactcactcccatggaatccgatctaaacgacgccgttttccccgaagaagatctcgacgacgacgacgacgacgacgatgaaactccagaggacgaagaggactacgacgacgaaaccgaaccccctcccttcgtcctcgccgtcgtagcagtcgcgccgcccgcttccaccgcctccgaaacactcgacaccacgttgatcccgatctccgccgtcgccgattcctcactgaaaccactgcacccggagctaatcgaggagaaaaaagcgctggacgattcgcggcgactgttccagcgtctgtggacggacgaggacgagatcgggctcttgcaggggtttctggactacacggcgcagcgaggatcctct

SEQ ID NO: 30549 - DNA, 433 bp, Glycine max
  unsure (1)..(433): unsure at all n locations
  Clone ID: LIB3051-026-Q1-K1-D12
gtttttctcagtctgcactttatatgagaacatattttgatggtatagaacatatgaaaagacttaacaccatctgttaaaataatgactcaatgccgacttcgacttacgaggatagtttcagtgacaaaaaataagaagaaaaaaatatatcattgtttgtaatataatgttaacctcccaccattttctggcccccagtgtgcttttcaagtcaaacaagaaaaatgtatatattttatttgaagttttttgttgcttccatttgttctggagaataaagaaaacaagtagtccaacaaatagcacgaggtcaaacaagaatgcgctttgtgggggcgaccaanatctgaacttctattatttctagtttgctaattgtatgtcaagtactttcattcttttctctctgggtataagaatttaatacata

SEQ ID NO: 30550 - DNA, 452 bp, Glycine max
  unsure (1)..(452): unsure at all n locations
  Clone ID: LIB3051-026-Q1-K1-D4
tcgcccacgcgttcggtttcatcatctattagtgaaggtagcatggaaatcgagttgacaacttccacagtatcaatcgatgtcacacctgtcaataattcagtttcacaagttgtttcagaaaataatagtttgacatcacatgagattgtagacattccaccttctagcaaagttgtttccactcatgaagttactagtcacaatgaatttcaagggataactcctgttggatattcttctgctgaggaaaagagagaatttacagcaaaagctgaggaagcatgcacatctacccttgttggatcttctgaactggaaactgctccttgtcctgtcacaagaactgaaaaacatcattcttctgatacttcaaggctattgttacgtgacagtgattgccagcacaatgtanggactagtgctataaagattggtgaaccttaagggac

SEQ ID NO: 30551 - DNA, 432 bp, Glycine max
  Clone ID: LIB3051-026-Q1-K1-D8
gtcaggttggtggtcagggaggaggatgatctcattcgctggcgttccgcgtgatgcgtttgtgccgcccttccttcaacgtcgaacctccactccgcctcgaccccaccgacctcttcgtcggcgaggacctcttcgacgaccccgctgccaaaccccactctttctcctgcgctgccgcccacgacgacgactccgatcccaactaccgtaaccgctgcctccttcgtcacttctccgacgccatgggcctctccggcctcctcgttctccctcagtctttcggagccatttatttgggggagaccttctgcagctacatcagtataaacaacagctccaattttgaagtcagagaagtccttatcaaggctgaaattcaaacagagagacagagaatactttttttagacacatcaaaaacgccagttg

SEQ ID NO: 30552 - DNA, 300 bp, Glycine max
  Clone ID: LIB3051-026-Q1-K1-E1
cttacttgccctctctagctattgagcttttctttttaacacggaatatgagtgacacaaaagggttttgaggctttctatcactctaaagctcttagctcattcacctcttgggtggtgtggtctattatgtaaattaccatttgtgcaattttttctcagatctatccaacttctcttttttatcctttattctgaatgcaaatcgccatcatcaccatttgatttgcatgaccataattgttctgctttgattttccactctttcacatcatttttcaatgttatttcctatgggtg

SEQ ID NO: 30553 - DNA, 241 bp, Glycine max
  Clone ID: LIB3051-026-Q1-K1-E12
cccatcgtgcgtcttttataaaattttgacacacactttagggtgataggggcttgatgctgacagaatatgatcaaggatataaacaagaatatgtatgatattgacaccaagtaagtgaacaccttaatcatgtgagtctttatgtagagatgctttagaatttgttgatgatttatattgctaatgactatggcatgcttgcaactaatactattactgagacatacatgtaatgtgc

SEQ ID NO: 30554 - DNA, 415 bp, Glycine max
  Clone ID: LIB3051-026-Q1-K1-E6
atcacatctactgctctctgagaacaataccatacactcctaactctctctccgttgacttatcttctcacacctccatggcccacacttgcattacatacgcagatgccggcatggacgctgaccaacgccgactcatgttcgaagacaagttcactgctgtccttattcattcggtgatgaatatacttatttggtgcctgattcattatctgccattgtaattcgcgtcacctgcggttgtgaggattcatagatcgattgatcgatcgatctgcgagacgggtgtagagactggaaatgcggatctgcgtgataagttgggctgatcatttttcggtcaactaattcattgatgatcatcatatcaaaattgactgtcgtcggattgcaatggcatgtgaagcctcgattc

SEQ ID NO: 30555 - DNA, 411 bp, Glycine max
  Clone ID: LIB3051-026-Q1-K1-E7
cccacgcgtccggttaaactaataaaataatcataaaggtggtggaggggtgtgtgcgctcacgcgcatgacagagcatacataacagggcataggaaatatcatatatactatatattatagtctagtttgcactattttaatggtggccgactaccttaattccacatgcttaaatttggcacctctttattatataaccgtttcattctgaatagcatgtcaaagggtgttctgagaaggaatcacacaagagaaattgtgcgtggatcttggcaatttacatttggtacaaaaatagtaggaaagaaacccatagttaatatagtaacaatgtcctggctaacgaaggggaaccaaagggggtcaggttagtttatgcggttcacggaaagtcatggcaaccgtggt

SEQ ID NO: 30556 - DNA, 436 bp, Glycine max
  Clone ID: LIB3051-026-Q1-K1-E9
aatggttccaagttttccgttcagattggcctcgattccaccgtcagatccttcaaggaggcggttgctcacaattgtgatatatcctctgatcaacagcgcctgatttacaagggtcggatcctcaaggatgatcaacccctccaaagctacggtttggaggctgatcacactgtccatttggttcgtggtttttctccttctaacaccactggtgggactaatagtggtggtggcggtggtggaaataccacaactgccaacacgagaggtgctggtgctaatgagggtgggggtttaggagggccaggatttggagcttcaccgtttcctggacttggtggtaacaatgggatggggggcggtggcctcaatggcttatttggagcgggctttccggatcttgaacaaatgcagcaaccatttttgtcaaatc

SEQ ID NO: 30557 - DNA, 411 bp, Glycine max
  Clone ID: LIB3051-026-Q1-K1-F1
tgtgggtgaacgtcttaccctcacagtcacaggtacagaataagcgctaaccgatttccgatatattctcatctgtgactcaatcacactgcaatcacttcatcctcagtacctgttcttcttctcctccttcaatcataacattatataaaatatatggtacactgattacatttataatattatattattatatataacttcacaatctctagctattcattctcatacaagattgatttggggattggacatcatggatcgcctaacatcttcttcccagctaatgatcgtttcggatcttggttcccacaatggttgaccataatgattcctgaaaatggtccctttttaaggttcaaggcctttgggaaagcccattatcgccaagattctctgctggtgttctca

SEQ ID NO: 30558 - DNA, 402 bp, Glycine max
  Clone ID: LIB3051-026-Q1-K1-F11
acggtgctcactccgttcactatctctctcctttgcgcttgctttctgaactgtcgatttgcgttgcattcagctcattttcggatatgagttcattgtcagattagctgatttagtttcctctggactaaagtgttgagaacatgcgtgaactttgcctgattttgatttacattgctactgtttatgcctttctgcatgtttcgatgcctacaactgaatctatactgtttcttttaacaggtttgcatgcatgtgttcgttttggactttatgttcgtttgcatgcatgtgttcaaaaacatttacctttgtgtctatctgttatgtgtattgttttggactcttcattgtccttcatgtttaaagctttgcctttgtagttggttttctatgagtata

SEQ ID NO: 30559 - DNA, 181 bp, Glycine max
  Clone ID: LIB3051-026-Q1-K1-G1
acggacagttatgaaaaacgggtaccaagggtttgcttgatgtagctatgtacatagcggatgatacttttgatctctgctgaggttgaacccaatgcatacgaaaattttaacaaaaaagatgggaagcatgctccaaatgggttagatgatagcaaatggggttacagtggttgaggtg

SEQ ID NO: 30560 - DNA, 431 bp, Glycine max
  Clone ID: LIB3051-026-Q1-K1-H1
cggctacccatcagaacactgaggtcaccatctatgctaccctcactcttcccagtggtaccaccactttggtccacctttggaacgatggtcctgtgtcttctggtacccctgcaatgcatgctatgacttcttctaacacccaatccaaggaaagcttggatcttctttctggctccagtcaagcaggaagtgggaattcacttaggagaagaagaaatgtaagtacctgttattctacttgctttttttttttcgccaaatgtggcgtttgttagacaggggattgaacccaccaacctttcctttccccttaaccatcccattcaacctaatatttccctgcatggttatcttgggcatcaaaaccataacggatgttttggaaattcgttttcttcttttttagggacattgattggagagtgtat

SEQ ID NO: 30561 - DNA, 324 bp, Glycine max
  unsure (1)..(324): unsure at all n locations
  Clone ID: LIB3051-026-Q1-K1-H10
caaaatgcttcaacaccaaattgttcagtcccctgctatgctaggccttgcaaatcctaactccccatcaattccgaaccctacccctccaaagctccctccaacacagacccatcacccccaagaccgcaactcttcaaccccttcttcagctctcttgtctctcctcccacctcacctcagagcccaagcacttcttgcccaaatggcttccttagcctccaagctctttgaagtttcccccaatcggtccctttgggtcactgcctttcgtggatcccttccaactttcctctcttnccattcgtctaccccacttgacac

SEQ ID NO: 30562 - DNA, 418 bp, Glycine max
  Clone ID: LIB3051-026-Q1-K1-H2
tcgtccacgcgttcggccacgcgtccggccacgcgttcgaaaactggaaatgtgggtgaagggcatcaaaatagcaattggaatacaaccaaggcttctgaaggggagtcttctggttggaacaatatccaaaagtcaaatgaaacttcatcagctggatggggtggtggcaatgggtttaaaagtggatcagatgaaggaaacttgaattctacttggagtggctggaagtctggatcaagtggagtcaaacaagctgggaaccctgctggtacttcagatattgatgctaatcaggatgctgggtggaaaaacaaaccaaataaggatgggagtgagtcatctggttgggaaacaaaaaacaattggaatgctccagtctcttcatcaaatgataaagtggaaaaaggtaatgatc

SEQ ID NO: 30563 - DNA, 434 bp, Glycine max
  unsure (1)..(434): unsure at all n locations
  Clone ID: LIB3051-026-Q1-K1-H3
cccacgcgtccgcccacgcgtccgggaagagcggcagcagcctttacagctaaccgatgctgtaaataacagtgcaaaagatcaccctcattctaagttgtttattgaactactaaaactagcttccaccaaggcagaagaataccccggtagagatgcctcagatttggtgatggcggaggaggttgtggacctaaccgctggaactcatgaagaggttccgaaggctgcaacaaaaaaggaggatgccgatgttaaagcacaggaagattctgtggcagttcctagtccagagcaatctgatgacagtgacgatgactntcaaaaatggtctcagtataaatgtggctattagtgattaatgataaagaatgaaatttaacttaactttaactaattaatttttaataatggtagtttgaaaatctttaaat

SEQ ID NO: 30564 - DNA, 150 bp, Glycine max
  Clone ID: LIB3051-026-Q1-K1-H5
cacaactaagaaggaaacttgctaaagcttatataggatttaagttatcgtaataaataaaacttcattggaagggtagttataatagatgtggagatctttcttcgctctggtcatataaaggaataatacttttctattaatttcctt

SEQ ID NO: 30565 - DNA, 395 bp, Glycine max
  Clone ID: LIB3051-026-Q1-K1-H8
ataaaagattaaataatcgtggagacgtagcatcaccgttggtggtagctgcacacagcgatattatattatgcagatagtacagtactaataataatgtataaaatactatgtgaagaagcaagcaccaacgacaatacactaattcagaggatgtcagttttcaggatgatgtctcatctccaacatgattaccattcacggagagtacagacccttactcaaaaccgtggaagatagtaaatctgaaacctgatgcattggattcatatacgaaagatggaaccatatggcctcaatcagcaatatgtaacgcgttatgtatcgtggaccagctgaggaaacgggttaggactgttcactgcaaaagcatccatcttgggttgatctgacat

SEQ ID NO: 30566 - DNA, 420 bp, Glycine max
  Clone ID: LIB3051-026-Q1-K1-H9
cggacgcgtgggcggacgcgtgggcggtacgcgtgaccaacgtacgcgttccacacaaggatattatattattcagatggaacaatactaataataatgtataaaatactatttcaagacacaagcaccaacatcaatacatctaattcagagactttcagttttcacccatcatttctcatctccaacatcttcactcattaccgagatacagacccttactcaaaaccctttaacataataaatctgaaacctcatgcattggatttaaatacgtataatggaactatcttgcctcgattagcaatatgatacttgataactatcatggaccaactgaggaaactggttagtgctgttcactccacatatttccatcttgggttgatctgataatgccattgataaatattgaaaact

SEQ ID NO: 30567 - DNA, 52 bp, Glycine max
  Clone ID: LIB3051-027-Q1-K1-A10
agtctgccccagtcattctccacacctctttccgatacgctaccccttgctg

SEQ ID NO: 30568 - DNA, 227 bp, Glycine max
  Clone ID: LIB3051-027-Q1-K1-A12
gccacacgttcggctggccagatcaaagtacaatgtgacgcgttataaacagcttgtacatgtgctatagcttctaaccgatctgagatggctgaataggggatagagtgctatgctgtacttagtgaagaggatatgatgagctacataatcttgaaagttgcctgtgcttgatacaatgcaaggtgcaaggtcaatttgcacgtatactatcaggcgtatacatt

SEQ ID NO: 30569 - DNA, 253 bp, Glycine max
  Clone ID: LIB3051-027-Q1-K1-A2
cccacgcgtccgcccacgcgtccgcccactcgttcgatcctctccaatctgccaggatttgggttgagtactctctggttcagaatcaatcttcctccctttgagcttggtagttttggcttcacttggattaaattattggctattattatttttgtatgatctgttatcatggcgttagaaactatctttcaattgctaaacttgtctttcaaaaaggaaaacaaaaggatgagaagcctttgcgcataaa

SEQ ID NO: 30570 - DNA, 224 bp, Glycine max
  Clone ID: LIB3051-027-Q1-K1-A7
gattatttgaaaacagaaaaggtgggagtgattgaaggttgatgatggatgagaaagagtggcaggtaaagacaaagcagaatttaggttttagggttagtttatttccaattctcaatggatttgatgttaacattccctcagttatccgtggaaaggcgtagaaacccatagcttttacataccctctgtctgctatctgctatacagccacagattttatc

SEQ ID NO: 30571 - DNA, 444 bp, Glycine max
  Clone ID: LIB3051-027-Q1-K1-B1
ctcacccgcacccgctacctccgatctcccgccgtcgccgccgcatcccgttcccgatcttccacctgtttcagtcgcgaaccgtcgcgccaacagcgctttttcgccgcgcattccagcaggtcaccaccgcgccacacaaccatacccactgcgccgcccatttccggagaagtatgaacagaagtctctctggtacacttggagcaaatcttgagagaagaggagctcttaactcttgagcccactttaacgccacagcacggacggtgatagggttttgtggaattttctgggaaaaaatttcctagaaaatggacgatggcatgcaattgcaaatctcccttgacaagctaccaatcaagcgcttggattctattgaagaaaatggaattgaacgattcccacttgacgtggattacgatgagaagcggctctccctaa

SEQ ID NO: 30572 - DNA, 432 bp, Glycine max
  Clone ID: LIB3051-027-Q1-K1-B11
gagatgtagccttgggcattcttctcactaagctataccacaattgcatcagttattgttacacctctgttaactggtcttctgattggatcagtagtgccagttgatgcagttgccatgtcaaagtcaattctgcaggttgtacttgttccggtgacccttggtcttcttctcaatacatatgcaaagtcagttgtatctgttcttcaacctgtgatgccctttgatgccatgatttgtacttcactgtgcattggcagccctcttgctttaaacaggaatcaaattttgacaggcgaaggtctccggttggtttttccagtattaacatttcatgttgttgccttcactttaggatattggttctcaaagattccatccttgaggcaggaagaacaggtgagcaggacgatttcactatgcactggaatg

SEQ ID NO: 30573 - DNA, 424 bp, Glycine max
  unsure (1)..(424): unsure at all n locations
  Clone ID: LIB3051-027-Q1-K1-B4
caaggatggaccaaagcggcaaagagaatcttctcctcgtagaaaacctcctccctcaccacggaggagatctcctgtacctagaagagctggatctccaagacgaccagattctccacgtcgccgtgcagattctcctgttcgtcgccgattagactctccttatcgtcgtggaggagacacacctcctaggaggcggcctgtgtctcctggaagaggtcgttctccatctccacctagacgccttagatcccctgcaaggctgtcacctagaaggatacgtggaagtccaggtcgaagacgttcacctncacctcctcccaggcgccgatcaccacctagacgaccacgtagtcctcctagaaggtctccaattggtcgtagacgtactcgctctccaatacgtaggtctgcacgctcacgc

SEQ ID NO: 30574 - DNA, 447 bp, Glycine max
  Clone ID: LIB3051-027-Q1-K1-B5
cccacgcgtccgcttgtttataatgtggttattatattatttttaacccaatttttttgtgattatttgaaattgaccaacaactcaagttctattttgtcttgatccttcactcttctctcacgctcagagaatgtgtagagaaattgcagcttttgaaaacacctgaagaacgtcaacgcaggttggaggaaattccagaaatacacgtggatccaaacatggatccaagttatgagtctgaagaagatgcaaatgaagtggatgataaaagacaagaaaactacatgagaccaagagggtctactgcatttggaaggagggggagagatattgtttctcctagaagtggttctatttcaaatgattcttggagtggaacatggaattattctaatgtgaatcatgaactcggcagaaatttgtctaataagggattttcaatca

SEQ ID NO: 30575 - DNA, 420 bp, Glycine max
  unsure (1)..(420): unsure at all n locations
  Clone ID: LIB3051-027-Q1-K1-B6
attcccccagccttgaagagcataacctatcttcatctgttcttgatttgagttaaccaggattcaggcctgaggctgaactaatgcgatttgagtatttgataagaatgacacatttatgacagtgcccaaaaaatatagtaaattaataactagtgttagtaattaataataaaacacaaaaattaagataatattagtctctaaacattgctcggcaagaagttgtgattgtttgtgtataagatggagtttaactgtcatgaaggagacttttaaagtttgtttcattgaatgggagttgatttaatgatagttaaacttagttatactgaaggtacacatctnctttttgtcttgttgatccatctttcaaggtgaaatgcanaacatcctcggcttccaattatacatgtaaaa

SEQ ID NO: 30576 - DNA, 392 bp, Glycine max
  unsure (1)..(392): unsure at all n locations
  Clone ID: LIB3051-027-Q1-K1-C11
cccacgcgtccgcaacaatctcaagttcagcagttgcttcttgaacagtttatgcatcagcagatccctgatcccaattttgggcagtcaaaacatgatatttctagggataacctgttagatcaggtacaattgaggagatatgtgcatgaattgcagcagaatccacattctttaaggcatcccgatccatcaatggaacagattatccaagcaaatatgggcatcaatgctgcccaaagaaggcaagctgatttggcagacctcttgttgcaagcaaggcatggaaatatattgccttccgaacaacagcttcattttcagcangatcagcttcaggcacagcagttatctttggctcttagacngcagttagggttggatggagaaag

SEQ ID NO: 30577 - DNA, 454 bp, Glycine max
  Clone ID: LIB3051-027-Q1-K1-C12
ttcagattctcttctaaccaaatcagaggacaatctggcaagaaaaaaacaggatctacatgatctataatgttatgccaacctccttttgcttaatttgggcaattggctttgttcttactcattgttgtttatattttgcgttagattattctcagagttttgtgttttgttaatttgaaagggagttggtcaatatgcacatatcctatcagttgtatgcattcttatcctgcattagaatatccatatcctaaattcttctaaaatttgcgtatggctctgtttgtttaaagctttgtttagcaatggagcataagcttcaagtctttatttatgcttttaaccaacttttgtgttctatttctttgcctttaagaaaaatttgggtgtcatttcctataatccttacgtggggaatacaaccaattgactgtcattaattggaagtaaa

SEQ ID NO: 30578 - DNA, 228 bp, Glycine max
  Clone ID: LIB3051-027-Q1-K1-C7
cccacgcgtccgcccacgcgtccggatatagttagttttggtaggaataatatacggtgggagaaagctgggattagcttcactttgaaggctcttcaaactgaaccccttagaaaagaaaagaagccttcttggattggaaccagatcccaaatggcaaatgggttaagaatatttggggggcttcccctaaatgccatttcttaagccttgcatttaattaaccat

SEQ ID NO: 30579 - DNA, 440 bp, Glycine max
  Clone ID: LIB3051-027-Q1-K1-C8
gtgttggtgccggtgcaggaagagagggcttgttggtggatccgattcagaaaaaatgggttcaaacccgtcgtttgtcccggagatcggatccgatggtcttcccagacaatcttccgttatcacttacaccgaacagataatcgaagcagaacagcttcaattgaagaagtacattcaagaaaactatactaaaattcgtgatgtggagcgtgagcttgcaaatcttggattagagatgaagcttacatctggaccaaagaaagcagcgctggaacatatgagaaagaagatagaggcatcaaccgagaaaattcgtgtggcaaagatacaggaagaacaggcacgcaaggtgtgggaatcagcatcaaaaacagtgcaagaagaagaggcaataaagcagaagttatgtgaagacttaagcaaactggatggaagat

SEQ ID NO: 30580 - DNA, 409 bp, Glycine max
  Clone ID: LIB3051-027-Q1-K1-C9
ctgagttttgacctacaacactctccaatcccctcttgtgtgttgtagccgccccgtgatcatcaatggcggaaactgctgacaaatctcaatctctcgccgaggaatattatgtgaatgacaagcaaacaactgtagttgaaaaagctgttgaggtcaaagaagttgaaaacccaaaggtagctgcttctgaggaaccagttgctgagaaaactgtggaagaaacaactcctgttgcccctgcagttgctcaggaaagcagtgaagtcacccctcctcctgctgaagaaagcactgaagagcaaagtagtggaaatgttgaggaaaactctggcaatgaagatgtagctgaagagacccctgaaattaagcttgaaactgctccagcagatttccgttttccaactac

SEQ ID NO: 30581 - DNA, 415 bp, Glycine max
  unsure (1)..(415): unsure at all n locations
  Clone ID: LIB3051-027-Q1-K1-D11
cccacgcgtccgtgctgattgaccgtatgggccagaaagattcagtcctggaagacgaagttagatatcgttataatagtgtcatcttgaattacaagaagtcacaagataatgctcagcgagtttctcccctaacttttgaacttgaagctactttgaaattagcaaggtttctttgcaggagagagctggccaaggaggtggtggagttgttgaccactgctgcagatggtgctaaatctttaatcgatgcaagtgataagctcatattatatattgaaatagctcgtctgtatggaagtcttggataccaaagaaaagctgcattcttctcaaggcaggttgcacagttatatctgcagcaagaaaatagactggctgcaattagtgctatgcaggttntggcaatgaccac

SEQ ID NO: 30582 - DNA, 438 bp, Glycine max
  Clone ID: LIB3051-027-Q1-K1-D3
atcaggttccagttttggccttacattattcttatgatcatcttctgccttgtcacgccagacgttggacgagcttcttatgcctataataaccttatccgcacttgcatctccttaaatccacaagcaatcatatgtaggttaaataactggaggaagttttttgtcaagaaagatgactttttactgcatgtagagagatatctaaacgagaatggaactgaagccttagagaaactcattgctagcaagaacaccaacctattgaagaacacaacttataaacctgatgcagaagcaacaaatgcaattatagcaactgataataatgaaacgcaacagacaaatgagacaaaactccaaacacagcaaaaaaccatcatagatttggaggtgattgagataaaagaaattcttgcaggccagcaagatatttct

SEQ ID NO: 30583 - DNA, 361 bp, Glycine max
  Clone ID: LIB3051-027-Q1-K1-D4
ccacgcgtccgcacggatttaattttgagtgacggccttggaccatccaaggtaatgtttcaatggaaatcttaatcttgaaccggaaggtttaaattttgtctcagtcgatggtgtttatttgggttttgtattacctcatcacatcagagagtggtggagtgacagaacaagtgatgtgcatgctttcaatttcgaactccactagggacagatgtgttgaggttttggataaagctatttcaggagtccttttggccactgctgagattgcattttttcaagggtggcttacttggcttttggttaagttgaacaaaatacatttcttgtacatggtaactgtgcttgcattcataag

SEQ ID NO: 30584 - DNA, 444 bp, Glycine max
  Clone ID: LIB3051-027-Q1-K1-D5
cgcaaatcacgtgatcgggaacgagtttttagtggtcatagtcgggaaagagatctgagtccgcataggagacatgagcgttctcattcacattcacattctcgttctcgatcttgttcacgttctcgatccccgtctcattcccattcccggtctcaatctcgtggatatgatgaccatccaagatctaggtccccccgaggtcgaagccatggtcgaagttatagggaagatagctatactgacagtcgatatgacaaaagtgaaagacgtagggatcgtgatgataaacgtcagtgggagcattattctgtggccccatctgcaactgttgttgtgaaaggtctttcacagaagacaactgaagaagatctataccaaatccttgctgaatgtggtcccctccgtcatgttcgtgttataaaggagagaaattctggtgtc

SEQ ID NO: 30585 - DNA, 307 bp, Glycine max
  Clone ID: LIB3051-027-Q1-K1-D9
aacaaatactatgaacaaacctttatacgagcaatatggtcgaagataacacatgatatgtgaatccaagttgataatgctaatagcggagctaataccttaaaggatgagagtgttatacatcatgattgattgattgtgtgctcaaggtcatattaattaatataaatagttgatatccaatgttgaagaacctgtgattaacttatctatctatttaagcgtagctgttgatgggctcattaaaagttgcttgatgagatagccgatgaacttaatgaacacatagtgaagattttgaaactga

SEQ ID NO: 30586 - DNA, 418 bp, Glycine max
  Clone ID: LIB3051-027-Q1-K1-E1
gcgaggttttaaagaaattaaatgcgtttttatgtgctaaagagctaggtaattatagaattcatctcacacatacttctttttactaccttttatcttttagattttatttttgaattatccttgtttaatggagtaatttaattcgttgaggggttgtggaatttgtgtagaagattttcctataagaatttttaattcgctaaagaaatcctcttgttgaattagattattatgagattaaattcttcacaaaattccacaactcctcaacaaattaaagtactttgttgaacaaagttaattcaagagtaaaatataggagatagaggttgtaaagagaagtggtgtgagatgaaatccataattaactagttgtttagcgcacaaaaagtgtttaatttttttaaaatctcac

SEQ ID NO: 30587 - DNA, 426 bp, Glycine max
  Clone ID: LIB3051-027-Q1-K1-E11
cctacctacctaccaatcaacacctcgctggttcttgcagtggcgttacacatggatcggattccgatctacacgccgatggtgctaatcggaggattcgaagcctggtgccacggatctacctactgtacagaggtgtggcgatcgtgttcgtgttgctcttaaggtcgctttcggaagatcgtttgttcaacgatcggagattgcagcacagatcgagtgaagaaagcgtggctgtgttcttcgcattccgatgtcggttcatgttgtggtattgaaattatgatggggtttttaatgggggaaattattgtgttgcgtgggttttatgaaacagagaaagttctggtaaactttgttaaccgacctttgccatggcaggtgcgcttgcatggcaggtcaaaaatattaataaaaaatcaaata

SEQ ID NO: 30588 - DNA, 231 bp, Glycine max
  Clone ID: LIB3051-027-Q1-K1-E12
cccacgcgtccgcccacgcgtccgacgtatagacatcgacttgaaatgacactatatatctcaagcatttcacacactagcagagccagtctgactatgggagaagagaggaatctacatgcggaggttagaggctgatacagagcctcatcattctcggtgaaccagtaccaatcttctattatcaggggccatgcctcaagacagtactaaccaggatgtcgcatgact

SEQ ID NO: 30589 - DNA, 437 bp, Glycine max
  unsure (1)..(437): unsure at all n locations
  Clone ID: LIB3051-027-Q1-K1-E4
gaccacaacatctctctgaaaatcactcacacgcaaaagagagagagaatcgaaacaccccgtaagcagcacggcacaatcgcaacgcaagagattaataatcaatttgcatcgatcgatcgatcgttggttaggtttttgttttgggggaatatgggcgagttgactcaggcggaggtgtactcgcctcggactcagcaagtgtggagggcactgttgagttggttggccttcttctttcagatcttcttccagattataagagccttaggtcactaccctctactctctttctcttctaattcttcttcttcttcaaacgcttcttcctcttcctcttccttcaaacctcttccctccgttgagattgctgaacacgattcgccttctnccttcgtcctcgatatctcaccacttgattattcccccgccgatca

SEQ ID NO: 30590 - DNA, 437 bp, Glycine max
  unsure (1)..(437): unsure at all n locations
  Clone ID: LIB3051-027-Q1-K1-E6
gttctgctaatgctgattctgattcctttgaaatggaacttgacaaggatgatgagatgactactctttcagaaactggttgcgatactgaagaacaagaaagcactagcagtgaggaacttgatgagttggcaatttctagagacatgcctcacctctatcctcgtccgcatatatcatgcaatgaagctgtatccaaatggaagttaaaaggaaaaaggaataatcgtaatcttgtaaaaaggtctgttggtgctgctgatgggaaaggtgttgttttatatgaaacagatgttgaaggattaagaagccgtttaaatcacaagaggttggtgcctagtatgcattattatgggaatggtattagtgatgtttttgctgacaccgatcaaatgtttgggtttgaagatgaatattctncaacttccaaagcacta

SEQ ID NO: 30591 - DNA, 443 bp, Glycine max
  unsure (1)..(443): unsure at all n locations
  Clone ID: LIB3051-027-Q1-K1-E7
cccacgcgtccgctgcaacaccaaaggatcctactgaacaatgtaaagctgcatggtgcttttcaacaggagatgaacttacaatacaatgggagtcatcacaatcagtgtcaggtctcacctttagtttgctaaatcaaacatctctagagtcatcggtacagttattgagagggaggcagatgcaatatcaagtaaagaaaacaaagtcaaagagaaaaggcgaagacatgaaaatcgagttagaggagaaagagatcgagggagaagaagacgaggagagttttataacagtagtccgtttcacagaagataacccagatggaaaagcaactgctcttctaaattggaggctattggttgttgaagtattgccagaagaagatgcagtactgatgcttctcctttgcctntcaatactcaaaagtgtatcagaaatgaag

SEQ ID NO: 30592 - DNA, 453 bp, Glycine max
  Clone ID: LIB3051-027-Q1-K1-E9
cccacgcgtccgcccacgcgtccgctcgtcttcaatcctttcgttattctcttattcatgcttctcttctgaataatccagatctctttctgcccttttctccgtcacgcttttcgtgaccggatctgtatggatttgatccagatctacacgccgatggtggttttggccgggtctttcatagatctggtgcgtagaggctcagatctacggtaccgaggtacaacagagaatcgatgacaagaacgcagatccgacggtagatccagccgattccgcttgttcgatcgctacagacccctgtatcggatcattaagcagcgtgtctcgcgcgttctacacgtgttgccgatctcggatgttgtaaaattagtttatgatgtgaagctatggagtggaaaatatgtggatgtaggagatttcgggatgaatggcctcaaacgctttgtcgtt

SEQ ID NO: 30593 - DNA, 438 bp, Glycine max
  Clone ID: LIB3051-027-Q1-K1-F1
gtttgtgtgtggtggtttgatcaacaacacacataaggggtatctcaaaaacacaacaacattggagattatggagctagcgcaaaagaaaggatttctggttcatcatgagtacgatgatcttgttggttctttttattcttcctcgacatcttcttctgtttctggaatttcaagtgggtcatcgttggaatctgattcttttgaagaagtaacatcccctgcctcttcttctccctcatcatcagttgatgatcaacttgtagttgttgctgatccattgagtgacatgtcttctctctttcaacaacttcccatcaagagggggctatcaaaattctaccagggaaagtcacaatcttttacttcactaacaaatgtgaggagcttggaagatcttgtaaagccagagaaccctcacaacaaaagattgaagtc

SEQ ID NO: 30594 - DNA, 138 bp, Glycine max
  Clone ID: LIB3051-027-Q1-K1-F9
cacacgcgtggcgagtatatgatccggttctaaattatcataaaatataacttgttgaggatatgagcactcgtgaacgagcgaaactatatctcaaacatggatcgtcaccactactaattaactcgattaccataa

SEQ ID NO: 30595 - DNA, 265 bp, Glycine max
  Clone ID: LIB3051-027-Q1-K1-G1
gtcttcttttcagaggacttcccgttctgatgggcttcctttggatgagttgcgtcgccggagaatcgacagatttggaggcagctgatcgtggttttcaggtcactgcaggatctggtaaataataccattggatatggccattgagatttagatttcacacatgttagctgttgaattataatgactttgcaatgaatgttttcatgctatgctagattgatttggcattttcttaaataaaatttggatacttttttctatt

SEQ ID NO: 30596 - DNA, 450 bp, Glycine max
  unsure (1)..(450): unsure at all n locations
  Clone ID: LIB3051-027-Q1-K1-G12
atcagaccgaccacgcctaaatcccaattcccaaattcctcccattagggtttctctctctctctctccaattcatgttctcttattcttgattgattctcttctattcgattcgattgttctatggaaccgcagcttcagcccaagctggaccccgcgccggaggttgttagcggtggcggtggggattcggagaagtcgcatgtcagtgatgtcaccgaggttcgcgacgttgacatggcgcaggcaaacggcgcttgttgcccttccgttttgaaacggaagcgcggtcgcccggccaagggaaaccgcattccgaaagggattataccgccgtcgaggcagaaacaggaagaagaggatgtttgcttcatatgcttcgacggtggaagccttcgtctctgtgatcgccggngatgccctanagcgtatcatccctcgtgtattaag

SEQ ID NO: 30597 - DNA, 412 bp, Glycine max
  Clone ID: LIB3051-027-Q1-K1-G4
gaaaagttttgatcgagagagatgggattggagtgtagcaaagatacggttccggtgacgcagtggctgaatcgaatggtctcagaaccttactacctcttccatttcttaaccttcttctcctatttcgtcgttcgcagctccgcaacccaaaacttagcgcctcatctcactcaccatctccttcgtcgcgaaatacaaacactgctagtgttcgcgatattggctttcatcaagggaataaaagaagaaacatgggaagcctttatagctgatgtgcttttcctggccaagatttgtctttttctcctagcctttacaatggatcgccgcttagccgtttggtatattcttgtatttttaggtacgtctagcaagctaacaccggtgcatttggaaagcctgcttacag

SEQ ID NO: 30598 - DNA, 420 bp, Glycine max
  Clone ID: LIB3051-027-Q1-K1-G5
ctctgacccattctctctctctctctctctctctctgtctctacacagacaccagacaacatatggcacacacaatgaaagaagaaacatggaaactccacgcatccatcatgccatcaaaaccaaagagtccacaccacccaacccaaccctctttctctctcatcaatggcccagctggaccaaaatttatgtagaagatagatatacaaataagaaagaatgggaaaacagatgaaagagaagttagatgtgttcaaatgtccttcaaccaaacccaccttacatctgtctttctctgtctctctctctcatcaaaaccatgttccccgaattgccctgttgcaagcccccaaaaaatcccatcttcatcactggtctttcaaaagaacaatatttttcaccgagttatgtgagctt

SEQ ID NO: 30599 - DNA, 435 bp, Glycine max
  Clone ID: LIB3051-027-Q1-K1-G7
gttttgttagttcacacactaagttctgaaaaatgagttccaaagtttttcttattctacttatgttcatggccactatactttcgatctcctctgaggttgcacccgatgatgcataccagaattttgacaaaacagatgggaagcgtagtgcaaatggggtagatgaaagcaaatattggcgtggtggctatggcgactatggtggttggcgtggtggtggttggcgtggtggctatggaggctggcgtggtggctatggtggtgggcgtggtggctatggtggctggcgtcgcggctatggtggtgggcgtggtggctacggaagttggggtggtggctctggccctaacgaacataatgaggctgggattgatgctagccctcacaactaacaaggaaactcgctaaagcttatataggatttaagttatc

SEQ ID NO: 30600 - DNA, 453 bp, Glycine max
  Clone ID: LIB3051-027-Q1-K1-H11
ctcgttccaaagaattgtgaatatttgaattgattccccaatttcattcaatctttccctcatcagttttagggtttcgcctcgcttccctttctcacccataattgagtctatatttgattcaaacttctctctttcaactctcggctttgcgttctcggcacgataatactcattttaggatttcatttgattttcctcggatctttctggtctggggtatctgcttggtaggacttcatttttggagagtttagtttaatgtctgaatcagaagctgagcttcctactgcctttgttggtgatgttctattgtggaagaggtggcatgtttccttgggtgtcattgttgttgcaacagttgcctgggtcctatttgagtggaccagtttaccatttttaaccaattgttcagatgtcttgctgattttgattgaacttgtgtttctgcat

SEQ ID NO: 30601 - DNA, 457 bp, Glycine max
  unsure (1)..(457): unsure at all n locations
  Clone ID: LIB3051-027-Q1-K1-H12
attttcgctttggttttggttcagtacgcaaccatggggttttcaggccaatggtacgattttctaatattattgttgttttctaggaattcccttttctaatccttactcaacgttcaacatgtggtgcagagtggtaattggttagcagtgttagaaagagagttggaggaaaggctgcgtacacaacctcaacagacaccaaagatgaaagcgtatgcacctgcggctgattacgggtacgttcaccaccgacaacatgggaagtctgacaagttcatcaagcaatccttcttcaggaaagtggcgcacgtgcaagaccgtagctaccctaaccccattctcagagatgcctatgcttatacccctcgtgtcgatccctcgcacgtgtaactagacaattagtctagtttttgcttttgttacactggataaataaatnaaatagaacaacttc

SEQ ID NO: 30602 - DNA, 447 bp, Glycine max
  Clone ID: LIB3051-027-Q1-K1-H3
ctctttgcacctcagcacagtttcccatcgaaaactagcccatctttttccctcgtaccttttgcttcagcaacaacaacatcgtcgtcacaaatctagagatagatagatagatagagagaaacggttgaattgaagatgaaaatcactgtcatgactgctgatgaacaaatcatcacgttagatgtggatccccacgaatctgtggaaaacgtcaaagcattgctcgaggttgagacaagtgtgcctcttcaacaacagcagcttctgtttaatgggaaggaagtgaggaattctgagaagttgagtgctcttggtgttaaggatgatgatttgctaatgaaggtgtctggtgctggcgctactgcttctagtggatctacgaatgatttgagcttaaatgctgatggatctgctgtcaaccctggttctttccagcagcacatt

SEQ ID NO: 30603 - DNA, 442 bp, Glycine max
  Clone ID: LIB3051-027-Q1-K1-H7
acaaaaactgcaaaggttgaaatatgattgcggcggctcgcgcttccttctatggaccatttcgggtgtaaactgtgccgatgactgttcttctgagaaggagatcgtcatgcatctgtgtgcacttcgatttgcgttcatgatccggcacctgcttagacgatcctgtaactacttctgccgtcactgcacttgaccctaccgcaccacaattagggttatctatgtattgcatcaaagattgccttataatacaagtacccgattcttattgtatcgcatgccgacgagtcttctttctcttcgaatctttctggctggtacattctgaagcacttcatagttgcgtgggtcatactgatgcatatatcacctggatgatctggatggccaatcccacaatgccagagtataggtgtcaacccactgacgttgagctgat

SEQ ID NO: 30604 - DNA, 283 bp, Glycine max
  Clone ID: LIB3051-028-Q1-K1-A1
gagcaaacagcaacagagttatgcggagactgcggcttcgaaaaggggaactttttcaccgagtatcgacctgatttgaaaaaaacgacggggaactccgacgaccatactggccctggacccctacatcaacagcaccattgtttgatttcctcgacatgttcgatctcggtcgctgcttcctcatttgtaaactctggaattgccatcgtgagttccagtcgaatcgaaaattctgtgacacgaagattcacaagtcttgtgctgaatttaccaaaaagcc

SEQ ID NO: 30605 - DNA, 202 bp, Glycine max
  Clone ID: LIB3051-028-Q1-K1-A2
gaggaaaagcagtttggattatgactagcctctttttttcaaagctggccatgttgtttatttcatcaaactccgttgtatgggtctcagcagttctcttggtggctgattgttcttcattgcctctttacagggatagatccaaaacaacttctaagattaaaccatggcaagggtatgcacatgcctgtgtaattgactt

SEQ ID NO: 30606 - DNA, 185 bp, Glycine max
  Clone ID: LIB3051-028-Q1-K1-A3
gtggatatggagctgcgcctatgcgaagcctcgattttcaagatgaggcactaggtgctcatgcttagaactgtgttgagactgatgcagatggatttttgagtggatattggccttagaaatccacaactaccgcgtgataatagacaacgataaagctttcatcgcggtgaaagaattttcat

SEQ ID NO: 30607 - DNA, 281 bp, Glycine max
  Clone ID: LIB3051-028-Q1-K1-A4
ctagtgttctataagttcacggtcagttctgaaaaatgggttccaaggttttgcttgttgtagttatgttcatagcggctatacttctgatctctgctgaggttgcacccaatgaatacgaaaattttaacaaaaaagatgggaagcatgctccaaatgggttatatgatagcaaatggggttacggtggttggggtggtccttggtatggcggctggggtggcccttattatggtggcggctggggtggcccttattatggcggtggtttgggcggtccc

SEQ ID NO: 30608 - DNA, 220 bp, Glycine max
  Clone ID: LIB3051-028-Q1-K1-A5
gtgatgattcctataatatacaacatcatctataaagtagatgttgaatgaaataagtgagatacttaggattatgatgtatgctgtcaggatcaaaattgagatcaaagcgaatcatgattctaatgttgcatggcaaatgtgaactaatcgtggtccagatcatatcatggactgtaatgactggaatctttacattgatagaaatgtatgacatcaa

SEQ ID NO: 30609 - DNA, 374 bp, Glycine max
  unsure (1)..(374): unsure at all n locations
  Clone ID: LIB3051-028-Q1-K1-B1
attctttctttcttntgtatttgaatctttttttttcttctctctgaattctcttttgttttctagtgctggtgtgtgatttgaaggaggaattttaaagtggcttgtgggtttagaattctgtgactaacgcgttctgggtcaccgtgccctcccttgggttccgctgctagtgttttttttgtgcaagtaaacagataaagttggtagctttattggaatatgatgaaacttggcactaccctttattgctcttgctaatttttaacctttgctggttctgggtcttcgagtatttcactggaaattttcaatttttggggggcttctgcttctggttttggtaaattctgagttgccttttgagggaactc

SEQ ID NO: 30610 - DNA, 334 bp, Glycine max
  Clone ID: LIB3051-028-Q1-K1-B11
aaaaaaaataaaaataaaaattaaaaattataaaaaaaaaaaaaaaaaaaaaatgataaaaaagaaaaaaaataaaatataaaaaaataaattaataataaatgaatgaataatataatattataaatatattgaagtctttaatggtgtatgatgatattatcgactgttagaaattatataagaataatctggatatggtttacagatcatatacacatgtaactgagtgtcaatacttctgctagtacaagtaacaagggtttacggattagaagacatatttactatataaatggtacataaattattcaatttgtaagagaaacaatat

SEQ ID NO: 30611 - DNA, 354 bp, Glycine max
  unsure (1)..(354): unsure at all n locations
  Clone ID: LIB3051-028-Q1-K1-B2
ccgaagctttgttggcggcaaggcaaatctgcattgcgatggcgcctgcgaagctcttcgtctttgcgctttctgtaaccctaattttcgccatcgttggggccgaagccgatatttccatcgaaggaagcactccagagcctgatacctccgccatcaggatccaattagatcaactcaattccaagatccaaattctcgagtctcaaatcagcgaaaagttggaagaagtgaagaagaaagacgaaattatagcagaaaaagaaaagttcattgaaagataatcaattaccatacaatccttgcagaatgagatngcttctcttcagaaaaaaggggcactggatgctgaag

SEQ ID NO: 30612 - DNA, 165 bp, Glycine max
  Clone ID: LIB3051-028-Q1-K1-B3
ctcaattcaactcagctattctctcttctctataagttcctctcctgcattgattttccctcccattcttccatttctgttctctcccatccctctcgcgcgctctctctcccatggaatcctccgctgccattcgatcttttaactaatcacgagcttacaatt

SEQ ID NO: 30613 - DNA, 231 bp, Glycine max
  Clone ID: LIB3051-028-Q1-K1-B4
gttctgattcggataagagacaacatcatctaggtttttctgttgaatgaaataagtgagataattcgacttaccatgtatgctgacaggatcagaattgatagcaaagcgagtcatcatgctaatgtcgcatggcgaaggtgaactggtcgtggattagatcatatcatggacttttatgcctgcaatctttacattggtacaaaggtgtgacatcaagtggatacaaga

SEQ ID NO: 30614 - DNA, 445 bp, Glycine max
  Clone ID: LIB3051-028-Q1-K1-B6
catcgttttcatattttagagagagagatagagagattgtgcgatccacgaaggtgcgttttgataatcaaccaagttgcagaagcgatggatctggaggtggcaggtcggcacgcgatgctgttcgacgacgacggcatggcggcgttcgtgaactcagcggaagctctggtcgaatggaactctctttccatcgaccggtacgatgtccgccatcttctctccgctccccttcccccgcgcctcaagcgccgcccttctccggccgaactcgacctagatcaacatgggtatctggatctcccttcctcttctgccgacgattaacaacaagattatggttcatatccagtgagttcaactggctttcatgctgtcgtctttgcgtatggaaattctaatgtgtccacggagacaaaggacaacgataccaagtctagttttg

SEQ ID NO: 30615 - DNA, 421 bp, Glycine max
  Clone ID: LIB3051-028-Q1-K1-B8
aagaaataaaagggaagaagggaagtgggaaaaacagaatagaaaggattggaagagatgagaaaaacagagagatcaaagaactccttccaaaaactacttacagaaagaggatccctatcacttattatctcaactcgtgctccatgaaatctgaagatctgattcatgcaatgttgagcaagtgttgctattggatatggattcgaaagagcaacaaaatgggcatacttgctcttataagatcattgatgacccaaatagtatctttgccatggcagtaaacaaaaattctgggctctatgttatcttctttttctgaaattaaagttttcaatgtttttgaagaaatcttgggggaaaaaggaatattcttggctatcccagctgctaacttctcttttgggctgggatctactac

SEQ ID NO: 30616 - DNA, 411 bp, Glycine max
  Clone ID: LIB3051-028-Q1-K1-B9
cacacgcttactgttggacatcaataatttatgtgaatggagtattagttatttagtgtagatcaaatgatgtgcgtacaaagctataggactatgtacgttcaatggccatccatttggtagtccactttcaatgacgaataagtaacattttaataccagattattgtgagttttggttggaatcctgagaagtcttggtccttatagcgttagcataagttagttcgagcattaaacttgaatttaattcttacgtctgcaaatactctgaagcatcagaagacgaatggcatgagccatgcaaattttggccaacatcatatcaccccaggacttacaacattgatggcattactggatttagcgaggatgactcccaatcagttatgaagtttatgcaatcagctg

SEQ ID NO: 30617 - DNA, 448 bp, Glycine max
  Clone ID: LIB3051-028-Q1-K1-C1
acagggctgtggatgcagtcatgggtcctcgtaccattcaacatgaaacagttgttacagaggctgctgctgctgcccctgcacccactgcaaatacttttggtggcgatgcatgcagcattcatacaaaggcattccaggattgcctgaacggctatgggaatgacattagcaagtgccagttttacatggatatgcttgcagaatgcataaagaactctggagccacgttgagcatgtaactgctacatttgcctgttttggagtttgcatcagtgccctgtctgctatggtttgaactgataatgtggctaggtattgcatttgaataaaataccatttgcccgaagatgcatacaaactaatataaagtcattttcaattggtactttattatttgatacctataattggtaacgtatttgatctgaataaaaaaaattgaatg

SEQ ID NO: 30618 - DNA, 446 bp, Glycine max
  Clone ID: LIB3051-028-Q1-K1-C12
agcgatcgctgataagagagataccaacatgaaaagaaaaaaagaagagttgagattccctttgaagaaaagatggcatcccatatgcaaagctatgaagctggtcaaactaagggccgaactgaggtaacaatcaatcacagtcacatctattattcttttcatgcaaacctcaatgtttcattctttttttttttttcagccaaaaagagataatgaaactgaggtatgcatgataaatgttagaaaacatgttttatctttgaataaaagataataagacgattaatatgaagtgtatgagaaagttctaactgaaagcatgattaattagcccgtataataactatttgagaaaaatgactatatataaaatcatcaccattaaagtcttacgtttgttttttcaaattacataaagaaaatgagtaaccttccttatgttt

SEQ ID NO: 30619 - DNA, 368 bp, Glycine max
  Clone ID: LIB3051-028-Q1-K1-C3
tcggtcacgcgttcggtgaacttgtatagattctcactgatggcattattggacttttattagattcttgtgatttcaattcttggttcattgaatgatgacatggtaatgactggacttgcattaaccaaatcctgtcatatttgcacaagtctttttccttaaggtgtagtcccttgttttttctgaatgattgaataagactgacatttttatgccatcagtggccttattctctgctgctcttatctctaaatgcgatgacgtcgtggtaagaattaagttcatgcctttctatctatagactgaaacttggttacttaaggctgtacattggtggattatctcggcaatggaatgccacatat

SEQ ID NO: 30620 - DNA, 95 bp, Glycine max
  Clone ID: LIB3051-028-Q1-K1-C4
ctcacgcttcctatactattcaacatattctaacatttggcgttcaaggacattcgtgagatacttgcgatcacaatggatgcagaacagaacta

SEQ ID NO: 30621 - DNA, 210 bp, Glycine max
  Clone ID: LIB3051-028-Q1-K1-C5
tagtgttttgttagttcacacactaagttctgaaaaatgagttccaaagtttttcttattctacttatgttcatggccactatacttttgatctcctctgaggttgcaccctatgatgcataccagaattttgacaaaacagatgggaagcgtagtgcaaatggggtagatgaaagcaaatattggcgtggtggctatggctactatggt

SEQ ID NO: 30622 - DNA, 89 bp, Glycine max
  Clone ID: LIB3051-028-Q1-K1-C8
ctcacccattgtcttcgtagccttacactttgaaattctcagttatgtcgtggcaagcgtatgtggatgatcacctatggtgtgaaatc

SEQ ID NO: 30623 - DNA, 420 bp, Glycine max
  Clone ID: LIB3051-028-Q1-K1-D1
tcgcccacgcgtccgcccacgcgtccgcccacgcgtccgaatttgtccaagtcccgcaagcccaaatatcagttatctcctccacagtaaccctaaatctgaaacaaccttgactccgatctgccacggctgataaaatagcgacgcggaaacacgcccgtattcacgatcctgcgatccagcgcggcgtgtccagcgattccggtctccgacgagtctgcgcaggctcaagagtcgcgaggccagccgccggtgaagaatcgcgcgattcgtctggaaatcgcgattcaagcacgattcatgcccgataaagatattcaaccacgattcatgaacagaaacgagacaacctccgattcgtatcggtagcagctggaatcgtatcgaatcgtgcgatacctatcgggaatattgaaaatg

SEQ ID NO: 30624 - DNA, 439 bp, Glycine max
  Clone ID: LIB3051-028-Q1-K1-D12
atgaaattgaaaagtgaagtttacagatggaagaagaaaaagcagcggcgtactacgacgagctggcccgtaagggcgagggagctgcgaggttcaagcaaggtctaggcttttcctcttcagcaccaaacgacgacgttccaaaaccctcctcctccttcctctccaaattcgtcaaagcctcctccgagtcggagaagcaagcgcagctccaatccatccacgacaagctcaagaaaaatccctcttccgagtctagggtttcgagcagcgacagaagcaggagcagagaaaaacgtaggaaaaggagcagaagcggagatagatacagggaaacgcggaggcgaagcaggagtagagagagacatagggatagtgaaagagggagacggatgagtagaagcgtttctcctcgcaagcaacgcaggtcggagaaaga

SEQ ID NO: 30625 - DNA, 234 bp, Glycine max
  Clone ID: LIB3051-028-Q1-K1-D4
ctagtgttctataagttcacggtcagttctgaaaaatgggttccaaggttttgcttgttgtagttatgttcatagcggctatacttatgatctctgctgaggttgcacccaaggaatacgaaaattttaacataatatatgggaagcatgctccaaatgggttatatgatagcaaatggggttacggtggttggtgtagtccttggtatgtgcggctgtagtggtccttattat

SEQ ID NO: 30626 - DNA, 447 bp, Glycine max
  unsure (1)..(447): unsure at all n locations
  Clone ID: LIB3051-028-Q1-K1-D8
gctctatgatctatactagaggcttagtttgggttttctgttaccggcatggatttcgagagtaggaggcttcattcgctcatctgcgtggttgccatcattgctcttagcttcacagctgaaaaatgcagggaacttgttggtgaggaggggtcatcccagagtggaaagttgacaatcttaaattgcttagatatgggttctggaactgtagcatgtgctgtcaaggaaggggtgaagctctattgatacaatattaggtcttctcatgctgaatgatcgaggagtcaagcaattgagtctgccctcattgatgctgtttctcatgggatgtccccaacagattcagcanatcatgcacagaaagaaggtaataaggcatcacaattggcttaccgtcatgccaagcggattataggtcccatcatttgctctggatgggacttt

SEQ ID NO: 30627 - DNA, 151 bp, Glycine max
  Clone ID: LIB3051-028-Q1-K1-D9
acggcacgtgtagcggattactacgccgtcgatacacgctactgctgaacgacgacaccgctggaatgacacaccgctacttagtcgtgattcttatagttatagcctatacattgaccattacctctattcgacttataatggcgactgt

SEQ ID NO: 30628 - DNA, 447 bp, Glycine max
  Clone ID: LIB3051-028-Q1-K1-E10
caaatgcaaaggaccccggtaccctcccaaagaatgttgtggggcttttaaagaatttgcttgcccttatgccgatgtattaaatgatttaacgaatgagtgtgcatcaaccatgtttagttacattaatctctatggaaaataccctcctggcctcttttctagtgagtgtcgtgaaggaaagtttggtcttgcttgtcctgcagtgccaccatcagcagtatcagcagatgacactgcaaatcaagctgtacactgtccatctctattgttgatgctcatagcctgcttcttaatcttgttattctgatatgtttctatacacaacttcattctttttctctcaatattgatgtataatcagttaccatttttctatatgtggtgtgtgaattactttttgcgcataaacaaaaaattggctatgtgcctggtagtttaagaaga

SEQ ID NO: 30629 - DNA, 290 bp, Glycine max
  Clone ID: LIB3051-028-Q1-K1-E11
aaaaaacataaaaacacacattaaagattaccaaggagtagatgtatctagcataacgtgcggctgcatgcgaggtataaggtttactagcgcgtaagagcaaatgcatacattagacatgggattgccacagatgagttgataggacgagctggacaacattattatatggcaacgatcagaacaaccttatgtgatgtgccttgatcgcgtacaggtttaagccagataggcttttatagcaagagcatagaaccaatcgcgatttgtaacagttgcggagcttgaag

SEQ ID NO: 30630 - DNA, 171 bp, Glycine max
  Clone ID: LIB3051-028-Q1-K1-E4
gtcgagcgatgcaagcacgtgtgccggatcgatcattggagatctcatacctgggcggcgttctcgcacccttagaggctatgcactctggctcaagctcagcgaacctcaacgtgtacgtactactcctctcagttaagatgcagaggatgcacctttacagagcgatca

SEQ ID NO: 30631 - DNA, 449 bp, Glycine max
  Clone ID: LIB3051-028-Q1-K1-E5
cgagaaaacaagaagtagtgagaagaaggtagagaatggaggaaaaggcaaaagctgagcagaagaagataggtatgaccgagacttggttgaagaagcaccgtcttctttacaatggagccactagacaccctcttattattagcattcgcgatggcaccatcaacactgcttacttcaaaacatggctcgcacaggattacttgttcgttcgggcgtttgtcccatttgtggctagtgtgctgataaaagcgtggaaggaatcagattgcagtggtgacatggaagtcatattggggggcatggcttctctggaggatgagatttcatggttcaagacagaagccaacatgtggggtatttcactttctgacgttgttcctcagcaagctaacaaaaactattgtgggttgctggaaagtttaatgagtccagacgcggaatatact

SEQ ID NO: 30632 - DNA, 108 bp, Glycine max
  Clone ID: LIB3051-028-Q1-K1-F2
cccacgcgtccggaagctttaatatgctttgggctcactcatctatctattataaccaaacactctctttgatagacttaatccgattcttgttcttgatcgatctga

SEQ ID NO: 30633 - DNA, 112 bp, Glycine max
  Clone ID: LIB3051-028-Q1-K1-F4
cacacgcgtggcgtgcatatgatcccgtacgttcttatgataaaatatacctcggcgacgatatataacccgtgaacgctcgggtctctatctcaaactcggattgtctcaa

SEQ ID NO: 30634 - DNA, 83 bp, Glycine max
  Clone ID: LIB3051-028-Q1-K1-F6
aaaaaaaaaaaaataaaaaaataaaaaattaaaaaaaaaaaaaaaaaaaaaaataaaaaaaaaaaaaaaataaaatatatgtg

SEQ ID NO: 30635 - DNA, 448 bp, Glycine max
  unsure (1)..(448): unsure at all n locations
  Clone ID: LIB3051-028-Q1-K1-F8
cccacgcgttcgnccacgcgtnncgccacgcgtncggattatttggtgtctntgatgatgatgggatgcttttgctaacctaattttcttcttccggggttggaattggctaatagctccaatgggtcctatggtggaaccaattgccccttttcccagaatcctaggagaatggccagcctttaccaaggcattgggcacctgcctaatgaccttaccggtgtgtggtgggtcacactatataataatggtcttggcagatattggacctttcactatggatggcagtgtgctgaacgctttcaggccaggtgcctgatgtatttgcacaccatacttgttggtgaactgacaggttggcacacttcaagatatggcatggtgctggatctttattggtcgcaatttcattttcgtcagttttttgtggttgtttaccatgcaaact

SEQ ID NO: 30636 - DNA, 171 bp, Glycine max
  Clone ID: LIB3051-028-Q1-K1-G1
cccacgcgtccgaattttcaaagccagacttacaaacatgttctagaatattgagtccaacacttcctcggtctacctcattatccgaaaggcatcgagtgctttgaccactgctatagatactggtgccgtgcctatactgattaaagcatttgagtgctgctctagtga

SEQ ID NO: 30637 - DNA, 205 bp, Glycine max
  Clone ID: LIB3051-028-Q1-K1-G11
gccacgcgtgcggacctagattgcgagctgacagcccgttgcattgcatgctaaagaaagacagggatacagggagtaggcacgtgagatgatcagatcagatctacagagaagcttgaatggctgtacagaccatatgtaccagatgcactactctagtgtgtcaaaggctcaatgtagaactcggtgggttccatacctagga

SEQ ID NO: 30638 - DNA, 98 bp, Glycine max
  Clone ID: LIB3051-028-Q1-K1-G2
tcgcccacacgtccggaattactccgacgctttttggtttcaaccgtatctcatatacgccatcactggcttcgacgacctcaatatgaccaagggtc

SEQ ID NO: 30639 - DNA, 128 bp, Glycine max
  Clone ID: LIB3051-028-Q1-K1-G4
tcggcttacattccgggcgaaagtcataatttgcaggttcatactatggagttaataatggaaggcagcgaaagatcctaacaagccagtgtggcctccaagtgcattgttcgtttgcatggaggaat

SEQ ID NO: 30640 - DNA, 382 bp, Glycine max
  Clone ID: LIB3051-028-Q1-K1-G5
tgccaactaattgagtaaataactcaggaataaatatggctactagacgtgttcgttactcccctcttgccacggatgaggatgattatattggtgataggaatagaccttttgacccacgatttgattatacaccgaaagccttggataaagttccctggaaatcaattgctctggcactgttcctgttattccttggtacaggacttttgttcctttcatactttatcttcactggtcatatggggggagaaaagtctcaagcatatggccttttagccctagggatccttagctttctcccaggtttctatgagactcgaattgcatattatgcatggaggggtgctaaaggataccgcttttctggcatccatgatta

SEQ ID NO: 30641 - DNA, 329 bp, Glycine max
  Clone ID: LIB3051-028-Q1-K1-G6
gcgactcaccaccactgctcagactgctcgccggcctctaatttatcaaagcttctgcgcctcccacgttattttcaatactctcttggggttcgcatagtgagatggggaagaaggcgaagaaagctatgaataatttgaaaagggcttcctttaataataagccatctgagggtgctgatttcttgcccttggaaggtggtcctgctcgtaagctcgccgcctcccagcagaagccgccggagaacaccgccacggttttgtatgtcggtcggattccgcatggattctatgagaaggagatggaaggttattttgggcaatgggaa

SEQ ID NO: 30642 - DNA, 448 bp, Glycine max
  unsure (1)..(448): unsure at all n locations
  Clone ID: LIB3051-028-Q1-K1-G7
attttaaagtttaaagtttctttgaataatgacacaacttgtattttgtattagtacatacatgtgttgacttatgatagtcatctgcttggcacaaccttggattcattacttttactatttatctcttgaaaatgtttaaaactttcttgcacagccaagataccctttccattgacacagaggtttaggtcaatgctacagaatggaatagaccttagcaccgtagatgttagctatgtcagcagtcgctcttggtacttcctcaatctgtttggattaagaggattgtttagtctcatattgngtgaagaaaatgctgtanatgatacacaacgtatgatgcaaatgggtggatttggattagatccctcaaaggttcaattaccaaatttgagtggtttactctagatttttcataattttgaatatcaatcattgaaaatta

SEQ ID NO: 30643 - DNA, 55 bp, Glycine max
  Clone ID: LIB3051-028-Q1-K1-H2
tcgaaaaaacataaaaaataaaagaatacaacttataagtttaaaaataaaataa

SEQ ID NO: 30644 - DNA, 421 bp, Glycine max
  Clone ID: LIB3051-028-Q1-K1-H6
cccacgcgtccgggcaggcgagtgacgctgtgaatccagaccgacttagagagaacgaaacacagcagtgcgtatcaacacactacaatggagcgtttggccaggtcagctcgaacgtggcgttggcattggcgttcattttcctctttccaaaccctagcttctcgctcctcacctccttcttcctttcccaaatttgcgtcttcttggtctacctcttcctctgtttcgagttccagagttttgcgcgaggattattcgttgcttccggttgtcttagctggtatatttgggacgggattcgtggaagctgcatatgcggataatggtgctgttgatgtccaagaaagtgctaagaaggaacgtgagcgaattgaggagttgcttagaagtagaggaattcgatatggctcttatcctc

SEQ ID NO: 30645 - DNA, 294 bp, Glycine max
  Clone ID: LIB3051-029-Q1-K1-A10
cccacgcgttcgcccacgcgtccgatatataaaaaaaataataaaaaataaaataaggggaaaaaaaaaaaaaaaaaaaaaaaaaaaataaaaaataaaaaataaaaaaaaataaataaaaaaaaatacggggtttttgttgtatcgtatcttagtttcaattccgttgattgctatggatttgtttttttttaaggtaggttaaattcattggactgccttttgttttgaactttgtggaatggcaatgccgttacctaacttatttgattggcgtaacatcccattttcttt

SEQ ID NO: 30646 - DNA, 294 bp, Glycine max
  Clone ID: LIB3051-029-Q1-K1-A2
gccacgcgtacgaataaacaaatagctttaatttctctatgaaacccatgttcatcggtatgcaacgatccactagaacgaggtcacaatttctacatcttcacatttcgatagcacctgaaatccaaagttatcgacactttcgcgccacacgaaatattgagaaccaatcaaaatatctatcacttacgaaccattatatccaatacccgtgcttatagatgacttgaaaaatgatgacctccaactgctggtaaactcaattcgtatgccatcaacaattgcacatgctct

SEQ ID NO: 30647 - DNA, 416 bp, Glycine max
  Clone ID: LIB3051-029-Q1-K1-A3
gttgcttctaatccagctaagatgcttgcaaaaaatttcttggctggcaatatcgttggcactttctgctgagcttagtatctggtaacgggctcataaacaacctgccagcattgctctgcatgtaaatagcccaggttaaatccagtcctagtctccaagactttccccatacatcgcttttgatcagactttttagatagttcataccacagtacctcactcattaaatctcttaattcaaaaaaaaaaaaaaaactggaaggaacagtttcacaaagttgctgttggggttcaatcttctttatgatcatgacataggcatgcacagatgctggtgaatggcagttttagagtgagcaaaagatttccatcgtctaagttagttttgatcaagtactagtataagataatgg

SEQ ID NO: 30648 - DNA, 383 bp, Glycine max
  unsure (1)..(383): unsure at all n locations
  Clone ID: LIB3051-029-Q1-K1-A9
cccacgcgtccgaaaaagggtttcacactttgtccaatctttcacactgaactctggaattttcaattctctttttcatgcaccactcttctttttcttcagacaccttcatcatctgcataccgcttagctccaaaaactacacacacaagaattctgtttctttctgttgatttgatggatccgcagatctaatggtttcacacactttcttcactacggatcattgtcttcttcatctggggcaccccaatagcttcttctaatcgatagtcaaattttgttggtttgtggtggatcatcttcgtcgttgtggtgactagtgaggagtgcangactatacctatctatatagtgtatgaaaattctggggggtgaagtcg

SEQ ID NO: 30649 - DNA, 409 bp, Glycine max
  Clone ID: LIB3051-029-Q1-K1-B1
cccacgcgtccgtttcaattttttttaagtgcttagtttttatttatgggacatggtacgtttgttccttgccatacaataatttctccagatgaccatagcatattgctatggaaagacatcgatagttgtactctctttggctctacgtttgtccccttggttccttttttactttttgggaacataaggaaaccatacatgtgagagatgaaacttgattaaattaagaatgcttatcattaactcattgtgttctagcttgctgccaacttagttgcaatcaatagattcagattatgcagtttcctggtagaatgcaaattctcattctccgatccttttcagatctctttctgatttaaaatgaactctagcatgacaattttcttttctttcaaaaagctga

SEQ ID NO: 30650 - DNA, 410 bp, Glycine max
  Clone ID: LIB3051-029-Q1-K1-B10
caaaaaagcttccagggaagcagaatatgcatttcaacccgccagagaaagagattccggacgcggccactctgagggatcaatggaggtatgccattaggcagtacagtaaatggtactctcacgcttggggcactgccattctcgctggcaccgccttcttcgccctcggctggttcatcaaaggagagaaccccataccctctttcaactctaacaaagacaaagacaaagacaaagacaatcacaattctcacccctgatgtcatgtgcccttcacttcttttcaggtaccattcactggaatcaagccacgcaagatctgcttttggttgacaatgccctggcaccttgcttgcaatggtctaataaggaattttgatgtttataaagtctcgtgacacagtggt

SEQ ID NO: 30651 - DNA, 401 bp, Glycine max
  Clone ID: LIB3051-029-Q1-K1-B11
gcagtaatggctaccaagcacccttagatcctggctatagcactggtgctgcacgagcatatagtacagcccaaccaagtgggcagccaggttatgttcaacccactcccactcaaactggttatgaacagtctaacacgcaaccagctggttatgcagctgtaccatcaagtgcttcggctgtgtatggcagaacattgtccccccagacggctgcttatcaatacgactccacccaagtttatggtgctcctcgataatgattttgtatgttaaccacatgctactattagcatactctaatcagatggctccttcgacgtaacctgctattgattaccttgatgctgtactgctttaaataatgaacatcaactgataatagatcttagctcgagtgc

SEQ ID NO: 30652 - DNA, 410 bp, Glycine max
  Clone ID: LIB3051-029-Q1-K1-B2
gacacgcgtgcgctcacagatgcactattattgatcgagatgaggagtgtgctgagtgtcgactaaaaattttaacatgtgtcaagcaatttcgcacgggccgtggctatacattagtaggccaaatggcacctttatatatctataccatgtggacatgccttccatgcagaatgcctgattggccatgtgactagctgtacagctgagacccatgctgagtatatactggatctgcagaagcaactttctttgatgggcagtgaagcaaggagagaatactatggtaccctttctgcataggagtccattcctagcatgaccactatacacaagcttagatcacaactggatgatgctatagctagtgaatgcccattttgtggtgacctgatgatccgtaagatttt

SEQ ID NO: 30653 - DNA, 338 bp, Glycine max
  Clone ID: LIB3051-029-Q1-K1-C11
gggcattgttgccaaagaaatcaatttttgtcacaggaaaacattttggcttttgagaatgctggagaagtcgtcattgcaaatcaatgtttgaagctgactgatattaaggttctccgtgattttaaacgacctgatggtatgactgacaaggaggttgatgctgctggagatggtgatgttctagtgatattggacttgcgtactgatgagtcattgcttgaagctggtgctgctcgagagattgttaataggattcagaagttacggaagaaagttgctcttgacccaactgacatggtggaggtttactttgaatcattagatgattacaaatc

SEQ ID NO: 30654 - DNA, 388 bp, Glycine max
  Clone ID: LIB3051-029-Q1-K1-C12
cccacgcgtccgcccacgcgtccgttcactcgtccggacgaagaaagagtatgaggagtagaataaaaagaagtaacaggagcaggaagaagagaagatatagcgattcagatgagagagaagacagcgagagcgatgactctgatagcagtggcagaaagaagaagaaacgatcttcttcctcaaagtctcgatccaagcgtatcagaaggagcagaaagagaacaaatagaagccctgaaacagaaggcgagggttctgatttggaggaggagaatggttctggttctggtgatgctaagagtaaaacaaccgttgatgaggtgatgaagacggagattaacgcggaggctataaagttgaaggaattggttgagtctcagaagaa

SEQ ID NO: 30655 - DNA, 319 bp, Glycine max
  Clone ID: LIB3051-029-Q1-K1-C2
caatcaccaagatgactacctcacgttgttttacataggactccctatgaacaagggtgttaaacagtatcatggcagctgatccatcatgccatgcgccactatcagtcaaagcaaaagcacgcagccactcctcggaaacagctgagattccggacatggaagtaccgtagagaatttctcaataagcggcgtcaggctattaaaagacaagctgcttgcaagggcttacaagcacggaagcaatgtcgtaaaatcggatggtcagctggtgtgcttgagacagtgaaccagcgttggcttttaaagagaaaaggct

SEQ ID NO: 30656 - DNA, 400 bp, Glycine max
  Clone ID: LIB3051-029-Q1-K1-C5
cccacgcgtccgctcacgcgttcgttagatgtacagatggtcaatagagatccaagtttgagtcctttttaagacttggtgtttgatgcattgttgtatcaggagaagggttttgttgtaattaagcattgagggaattgttggagtcaggcagagagagaggggggaggtttgttgtaagacacctagtattagtatcatgtagtggagaaaaagggttgttgatcctaatagctagacaaggcatgttgtagtagtcatggggtggggaagtccttttgttgtagcatgtaatttggtttagacttgtagtatgtcatcaattagatggataaagagagaatattgttatctacccgaggatgttacaatgtttgtttctctgaataaaaagttcaca

SEQ ID NO: 30657 - DNA, 358 bp, Glycine max
  Clone ID: LIB3051-029-Q1-K1-C7
ctctctctctctctcttcttcgccaaatcccaaaccccatttcaatgatccccctccctccaacaatgttcccacacccttaaaaaaccacaaaaaccaaaaaaaaaaaaaaacaccaaaccatgttttccttccctcacaccatcatcttcatccttgtctttccaatcattatttcttgctcctgggcctcgtcgttgggcctgagtagcaatgcgacgaccatctacgaggtcctgagcgagcacgggctgcccatgggcctgttcccgcagggcgtgcgggagttcgcggtgggcgaggatggtagcttctgggtgcgccttgaccaggcctgcaacgccaagttcgagaacca

SEQ ID NO: 30658 - DNA, 254 bp, Glycine max
  Clone ID: LIB3051-029-Q1-K1-C8
atcacgcggacgattatcaggactcataccctatatcaatggtaacacatataccagcattgactatggacatagttacaataacagctcacaatcacaataacaattacagctcaaaatcaagattaaatgtacgtatcatcgaatcattgcagatctcgtagaactgagctgaaaacaatggcgaaaccaatgtactctcgtaagtcaccttgcaagtcaacgctgactttcactctgattctgactttgat

SEQ ID NO: 30659 - DNA, 362 bp, Glycine max
  unsure (1)..(362): unsure at all n locations
  Clone ID: LIB3051-029-Q1-K1-C9
cccttgtccctatctcacgttaaacgtcatagccactgctacaagaagcagcagagttcgccgctgctccgcaaccttaccctatcaattatcgtccttgttttcgtaattgcagcgaagaatggggaagcgtaaggagcggattcagaacccggaacccttcgatccgtacggcgccgaccccgcgaaaacgaagaagcgctcgaaggcgccgaagcggcaccagcaggaggagcagttcatcgctcccaaactcagctccaagatcatgaagcaggcgctaatccagcagaaggaggaggagaaggaggaggcgcccgagaacaacgccgcanatttattcgaagaggttccggatgtcg

SEQ ID NO: 30660 - DNA, 410 bp, Glycine max
  Clone ID: LIB3051-029-Q1-K1-D1
ccctctcaccaaaccttcatcgatctctttgtttttttataaattataatattgatgacgaagttgtttctgtaaatagcaattcagagaccttaaaggtagtgagtattttcctccttacttaatctattgtgtgatcaaagtcgttattattaaattagataattgataaccatgtcgatgaagctgttattagcttccctatccatttcggtgtggcttttcatggcaacattatcccttgcccaatccaacaaccgctacgtctttgacacacatggcgaccctcttgaaactgacgatgaatattacatcaggccggccataacagacaacggagggcgtttcacattgatcaacagaaacaggtcgtgccctttgtacgtcggtctcgaaaacaccgacacacc

SEQ ID NO: 30661 - DNA, 382 bp, Glycine max
  Clone ID: LIB3051-029-Q1-K1-D12
acgtcaagacccatggttcctctactaccttgatccccctctctgccttccaaatttcaggggtctctttcctcccttaggtgatggatccattggggaaacgccctgctgccgaggacgattccctaatttccgattgcgagagcggggtttccgctggagacacgccgccgccgttcgtcgaaaacgccgacctcgtccggaccagattcgttcgtggcctcgtcgcgcactgcttcaaacccgaggttctggcagttcgcagaaacgtgtgctcctccgtcatggccctggcgcgtcaacattcctttcacgtcttctcgcgtgccgggggcgaattgctcggcggcaatgccaacgtgaagttcgtctgtacggtgcg

SEQ ID NO: 30662 - DNA, 300 bp, Glycine max
  Clone ID: LIB3051-029-Q1-K1-D2
ctccttctaccttccaacacaagctgtctctgtctttctagtcacagttgggttggttggtaccaaaggtgaggcaggggagactcagaaagagatggctgagctcggaggagttatgccagactgtgtatatgctccaaatccctaccatgaatgcacggaggcttgcgtgcataggatcaaggaagccaagcctggcaagccatctaaaactaaaaagggtaccgctttcaaagattatcgcagaagtgttacagatggtgaactgggcaaaacgatgaaagaagaaaaacgcatgcc

SEQ ID NO: 30663 - DNA, 414 bp, Glycine max
  Clone ID: LIB3051-029-Q1-K1-D3
aaaacatccaatcccaacccatctttctctttttctcactctctcccccccaaaccctagctttcaccatgcggttccaatcgctctaaccctaactccctctctccatcaccgatcttcgatccgcaccgccgttcctttgaatcgcttcagattctccgctgcttccaccaggaggaggagtttttcgcgattcgcgctcgaagcttccgttgccgccgatcgaagagattcgctccgaatcccaacgccctgccgtcaagtttttcgccgaagtaacaaatcctgttgttgttcttcttcgattcgattggattgctctgttttgccctaactgttgctgtggcttcttcggatttctgatttgagagggctttgctgcgcttgattcggattcgtcgcattttcatcatc

SEQ ID NO: 30664 - DNA, 339 bp, Glycine max
  Clone ID: LIB3051-029-Q1-K1-D4
agccttccaataattcttccattcataatgggtggtttttatcattcgaggatgaaatcaactccgctggggctcctgctactctttacaaggccctagttacagatgccgacaacgtcatcccaaaggctcttgattccttcaagagtgttgaaaacgttgagggaaatggtggcccacgaaccatcaagaagatcactttcgttgaggatggagaaaccaagtttgtgctgcacaaaatagaaagcattgatgaggcgaacttgggatacagctacagcgtggttgggggtgctgcattgcccgacacggcggagaagatcacattcgactccaaat

SEQ ID NO: 30665 - DNA, 410 bp, Glycine max
  Clone ID: LIB3051-029-Q1-K1-D7
aagaaagggcgtaaattggagaatgataatttttctgtagctaattctaattctaatgctaatgttaaccatagtggtggtaagagtagtgtgaataataatattgggaaagagaatgagagttccaatgttggggcttttgatgtaaataggcttcagaagcttaaaggaaaaaaagggaatgggaacgggaagaagaaagatgctcttgttgttgctgctgccaagggagagcccaaaaaggtggataagccaaacagggtttgggatcaaccggcgccgcaaaccaaactggactttactgatcacgtggatggagatggggatagaagcgctgactttttggctaaggagcaaggagagagtatgatggataaagaagagattcttagcagtgatagtgaggttga

SEQ ID NO: 30666 - DNA, 415 bp, Glycine max
  unsure (1)..(415): unsure at all n locations
  Clone ID: LIB3051-029-Q1-K1-E1
cccacgcgtccggtcggttccggcatcgtgctctgctctgcacacctttctctttctctctgtctgaggctctgagcagtgagcacaccacaaactgaaacaaatccctttgagcattcagcaagatgagccacgagctgttggagacgtacgcgtgcatgcccacgacggagcgcggccgtgggattctgatctccggcgatgccaagtccaactccatcgtctacaccaacggcagatcggtggtcatgatgaacctccagaaccccctaaacgtgtccgtgtacggggaccacgcctaccccgccaccgtggcgcgcttttcccccaacggcgagtgggtggcctncgccgacgcctncggctccgtcaggatctggggcacgcgaaacgacttcgttttgaagaaggattt

SEQ ID NO: 30667 - DNA, 408 bp, Glycine max
  Clone ID: LIB3051-029-Q1-K1-E3
tcgcagaattaagccatcaacaccaacttgttttttaattcggaacaataaacggttaactttccaaatcctaattttggtttgggttgggttaaattttgtccgaaaacatggttttaaggccaatggtacggttttctaaattttcttcctttttcctccgggttttttcttttctaatccttactcgacgttcaacatgtggtgcaaagtggtaattggttagcactgttaagaaacagttatggaggtaaagccgcgtacgcaacctcaacagcaccaaagatgaaagcgtatgcagctgcggctgattacggacacaagcaacaacatgggaagtcggccaaacgggactttgtggcaatttacgtggcgattgggatgatagctctgtccacagggctgggt

SEQ ID NO: 30668 - DNA, 418 bp, Glycine max
  Clone ID: LIB3051-029-Q1-K1-E6
cccacgcgtccgggccgatcaaaagctttcagaaccggcgcttaaacgtgagcagcttgatgaattcgtgagtagtctatattttgaacaacgaattcttgaactccgacttcttcaagacctcgagaacaatgatgaatgtaggaaaaatgggagcctgaaaaggttaaatgaccagagtgatgtctgtggatttagaagttgcttcaaaaatcattatgattcgcttccgaatcagaggtgcttgaggaatcgagaagaagtgattcaggagacgatggaaatggagttggaaaatatgatggaactgggcaccctcaagggcaagaaaacatattcttttaagaatggtacaagaagtgcgttgaaccttgagaacaccacaggatcctttctagataacaataaatcaaatgat

SEQ ID NO: 30669 - DNA, 92 bp, Glycine max
  Clone ID: LIB3051-029-Q1-K1-F11
gaatctgcgtaaggttgagaaagcagtcgaaatctgcatcaaaatcagaaacgatgggggctacaccggaccacctattgaacctccgcaac

SEQ ID NO: 30670 - DNA, 395 bp, Glycine max
  Clone ID: LIB3051-029-Q1-K1-F12
cccacgcgtccgtccacgcgtccggttttttcaatttcaatctacactacacaggcgtgaggcccctccttatcccccaccacagggttacccgccaccgggttacccgtcagcgccgccgcagcctccgccggggtacgtgccgtatccgccgccgcagtacgaaggctaccaaggctatttcaatcacgggtatcctctgccaccccctcccaattaccactgccatcacgctcagcaccatcacaatgataaccccggttttacttctttcttgcaaggctgcttgacagcattttgctgctgttgtttgctaaaagagtgttgcttggtctgataatcatattaaaagatgtatctgcaagttggtgtacctgggtggttatagctcttcg

SEQ ID NO: 30671 - DNA, 235 bp, Glycine max
  Clone ID: LIB3051-029-Q1-K1-F5
ccggaacctctctgcactgggggtttaagcagccaatattgcatcctaccgttcattatggcaatgtgtggctcctgcagataggcaaaacacaattaatctctaagagtttgctcctatggagttaaagcggcttgtagattgttttcctctgggtctagagtttccttttgtaacttaattttgaaatccattatatagctttacacaataatcacaggttatcatggttctt

SEQ ID NO: 30672 - DNA, 357 bp, Glycine max
  Clone ID: LIB3051-029-Q1-K1-F9
cccacgcgtacgctccctgtcattttctttgcatctgtactctccaaaaagccggccttagaggaggagctcttacgttcaaccccaagcaagctcaagatcgagcgggcccaccacatgaaccgccagctctaccgctgcttcgccttcaccagcaccatgttcctgtgggccctctttataatcgccctcaccgcttcatatctcagcttccaaggcttcgttgattccggcagccgctacctctgcggcttctggggcgggatccagtgggagaagcaggtccacacctacggccagatccaccggcaaggcggcatgtccgtccttgtcaccggcgctggcggctacgtcggc

SEQ ID NO: 30673 - DNA, 380 bp, Glycine max
  Clone ID: LIB3051-029-Q1-K1-G11
cttctctgctatcttatccctcctttgatgattatcatccctttcgtatctctatactgctgtcatcaccttcagcctgcatttctcactattccccctctacaccaactgttagctagtgtagtatatacttcgtttctatctactggaactataattcatatataaattactttaataagcctgttcatatataataatttgatgttcaccctgggtatttattacctagctagctagttctctcttctaattgcagattttaccattataccatacaaggtttttaaaaaactgctgggaatgcaatttcggccgcaaggtcatatggagtgtcagctactgcatcgcgattacaataggatccacaatttgttatc

SEQ ID NO: 30674 - DNA, 363 bp, Glycine max
  Clone ID: LIB3051-029-Q1-K1-G12
ctctctcctactgttaacgtttcctgtttttctttaagatggcgatgacgacaacgagggagtccgatctcgattacgagcttcgctatctcagtctcgccgtaaccgataccttcactgctttccaaaacctcttaccggatgcgatgacttccttttcagcttgtggactaatagaccctctttgttctcaaaacctcactcccaagcattccaccatcactgcaaccattgattctcagtcatcgatttgcgccactagtaatgttgggagcccagtctcagctaataaaccagagggcagagagaatcatacgaaaggagccacaagtggttcctctgagccatctgatgaggatgatg

SEQ ID NO: 30675 - DNA, 358 bp, Glycine max
  Clone ID: LIB3051-029-Q1-K1-G2
atggaaatcaagttgacaacttccacagtttcaatccatgtcacacctatcaatagttctgtttcacaagttgtttcggaaaataatagtttgacatcacatgagataatagacattccaccttctagcaaagttgtttccactcatgaagttactagtcacaatgaatttcaagggataactcctgttggaaattcttctgccgaggaaaagggagaatctacagcaaaagctgaggaagcaggcacatctaccctcgttggatgttctgagcaggaaactgcttcttgtcctgtcccaggaactgaaaaacatcattcttctgaaacttctaggcaattgttacatgacagcgatt

SEQ ID NO: 30676 - DNA, 415 bp, Glycine max
  Clone ID: LIB3051-029-Q1-K1-G5
cccacgcgtccgcccacgcgtccgttcacgcgtccggctaccttccttcaacgcacaaaccctctctccctctaccacccattctcttttctctctctttctttccccctccctctctcacctactcaatctcatcaccaccaccatcatcatcatgatcttctccaatctctataaccttcaatcactcaaaacctcaccattaaaccaaatgagttgacccatttgtgagaacaattctccctaagaaaaggtcaaaggctgcaactttttcttaaccaatctcacaacattttgcaacgttttttctggttcggattggttttctgggtcgtcttggaattcataaaagattccaactatgaagatgggtaggggcggaaccgacgcggcggcagtggagaacgccgaaccc

SEQ ID NO: 30677 - DNA, 421 bp, Glycine max
  Clone ID: LIB3051-029-Q1-K1-G8
cccacgcgtccgcactaagtttattagtattattatcactagctacctgctatcaaagcatcacaaatggcttctacagacaagcctggcggcgaccctgaatacagaacatcttcaactccagctcctgctggtgttgattactttaaatttgatgtcatcctaaggtttctattgtttgcagcatcactggtagctgttgtggtgatcgtcactgctaatcaaacagaggttattcgtgttccacagcctgtgccatggccagccaagttcagatactcaccagcctttgtttattttgtagctgcattgtccgttactggcctctacagtatcattacaacacttgcatcactctttgccagtaacaagccagccctcaaaaccaagttgctcctctactttatcttatgggatgcgc

SEQ ID NO: 30678 - DNA, 312 bp, Glycine max
  Clone ID: LIB3051-029-Q1-K1-G9
gtcaatcgtgagcaccaaccgatttttgtgatgagcgcctggaaaagaagaagaaggtgattgccaggaaaaataaaggggtggcgccggaagacgccataacggccattggcttgggttacgatctcaccaacgatctgaagctcaaatcctgcaagaaccactccagattgatcgctattgacgatgacaaccttcgaactgtcgaactccctcctcggatttccatccctaatgtccccaaatccatcaagtgcgataaaggtgaccgcatgagattgcgctccgatgtcctctctgttcagcagatgt

SEQ ID NO: 30679 - DNA, 361 bp, Glycine max
  unsure (1)..(361): unsure at all n locations
  Clone ID: LIB3051-029-Q1-K1-H10
ctacacaccacattttctttcatttcttctctctntagttgctctcttcgaacaacttaaactctttttttcacctaggagtctagctcagttgtgatttcctagttcttgagttcgattccttcgaatcaaaacataaacagtgccattgatctctatcattgttccattccttgatggctcccgtggactctgacactttggggcgccattctctgattccgagctacctctattcctctccctcgccgcagaagaagaagatggaggcttcgagtttcgccattcattctccgagagagaatcgaaatatagagatgttttcgccgtcgttctatgctgcttgcaccgttggtggaag

SEQ ID NO: 30680 - DNA, 321 bp, Glycine max
  Clone ID: LIB3051-029-Q1-K1-H2
agccttccgggggaacgtggtggataatggcggcgtccaatgtggcttatggtggcggccgtgggggctatggcggcggccgtggtggcgggcgtggtggctatggtcctaatgaacataacgaggctggggttgatgctaaccctcacaactaagaaggcaactttctaaagcttatatatgggtttaagttatcgcaataaataaaacttcatgagaaggttagttgtaatagaagtggaaaaactttgtaaggaataatacctttcatgaatttccttaactttgtgttggctctggttctggtttgctaaactcaaa

SEQ ID NO: 30681 - DNA, 278 bp, Glycine max
  Clone ID: LIB3051-029-Q1-K1-H8
cctattggtaatggagtatcgatgcttcagtttcaacttccaagcatgaatgggagtacttagggtggttaatttggcttagggtatatactgggttggataataatgtagcggctattgtaggtttatattataagttaatttaacttgagttttatgagccatataaaacaaactagagagagagagagagatcatgactgtagcttgtatttttgtgagttttgtctttgaagcttatattaaactgaatacaatactactgctctatatcaaag

SEQ ID NO: 30682 - DNA, 213 bp, Glycine max
  Clone ID: LIB3051-030-Q1-K1-A1
accacgcgtccgcccacgcgtccgtccacgcgtcccgccacgcgtccggttgccttgggtgtgcgagtcccattcccgtcaccgctaccgtcaacaccaccgatcactctctcacccaccccaactgatacccgtaaccctatcacctttctcttcttccctaacctaatttaaaactaaaaaaaacacctaccaattaaacaaatgtcccct

SEQ ID NO: 30683 - DNA, 248 bp, Glycine max
  Clone ID: LIB3051-030-Q1-K1-A6
gaaaagaagacaaaggaaatttctgagtctgaggctaaatatacaatcatgatagggaaggcttatgctgcggtgaatgatgaatctatacggaaggaagggtctgctcaagagcaacttgcgggtcatgcatgtgcaactgaatgactggttaatcttatgaagtatccacaatctagtagctcagaacttgtcattacaatcgggagcatgcatttatatgattaggcctatatgtagagtaagtg

SEQ ID NO: 30684 - DNA, 296 bp, Glycine max
  Clone ID: LIB3051-030-Q1-K1-B12
gctgactcttgtacacatatacacattttctataattaagtgcatgctaagttcttcaagtaaggagcatgaatcacatattatagacaaatcaacattacaatgctgatgaagagagtgcaaatcttgacctcacttccactggacttacagagcactcacgctatcttcggatcaactatctgttaacctatacacagcacttatattacactcaaagtgctaaacctggtatcctgatcctgatatatataagacttggagtcatagtacgactatctttcctttcagtgatc

SEQ ID NO: 30685 - DNA, 225 bp, Glycine max
  Clone ID: LIB3051-030-Q1-K1-B2
cattaatactagcattttcagctatctgtacataattgataatctagttcttagtcttgttagtttttgtttctggtttgaaatagaatgtaataatgcatttgtaggttctgatgtttgtatggtgcattttttgtcagtattgaattctgatgcatcatttatcatctatattattctgtaatgcttttaagctttttcactatacttcttttagagatattc

SEQ ID NO: 30686 - DNA, 346 bp, Glycine max
  unsure (1)..(346): unsure at all n locations
  Clone ID: LIB3051-030-Q1-K1-B3
gaaatagactaagatctggattacagagcacttgaaagtggatatgttgcagtgactgcgctgtctctttctcctgatattgagactgatattcaaatggcagcttctgattggatttctgctgtgcttcctggtgaacaataaatttagtatgattgtgtacatttgagatttatgatgattcttttttctctttttttctaccttaaagcaaaaatggagcagaagcggtagtcacaccaattcaatagtggatttccacttgtactatttttctttttctacattattntgttccctttttcattgtttcagtccctttggtcacttagttatttctgatttg

SEQ ID NO: 30687 - DNA, 424 bp, Glycine max
  Clone ID: LIB3051-030-Q1-K1-B6
gagactgcaagactgatgtccgtcatgtgcactaatccgaacatgcatactctgtgatgaggcatggagcaatgtccattagtcatacagcttgcgcaaataaacctcgtaatcagaggtcaataatagacagcgaactacatcgctgtaagacaggagcggtaactggcgaccgaatccattcaatcacaccagcatattacgagcagtctccaatagcatacaagaaactggaccaaatatatctatggaagatcctgatccgcgccaagctcagatactccaacatgatcgtaacactaagctaactgatcgtcaatggcccgtacgaccttgtggaactacacggaatcgccgcaatgttgctatctacaggtgcagtagacaccattcacccgatcataatgctggatacatactacat

SEQ ID NO: 30688 - DNA, 425 bp, Glycine max
  Clone ID: LIB3051-030-Q1-K1-B7
acgaggcagggcagaggagaaggccttgtgattcatcatgacgaatgaacccgacaagaggtacgatgtttttctgtgtttagttggcccagatacccgctacaccttcgctggtaatctctataatgctttgcgccgcaacagaatcaatacctttttcacagaagataatcatcatgatgagctactactcatgaatggcgaccaaatttcaccctttgctctaagagcaattaaagaatcaaacttgttaattgttgttctctctccaaactacgcatcatccccaaggaaatcttgatgaatgtgtggccatcgttcggtgtattaaggagaaggagccactggtggttcccgcttttaccaaatggaaccagggggaattatggatgccatatttaatggacctgatcaacaagcgctct

SEQ ID NO: 30689 - DNA, 331 bp, Glycine max
  Clone ID: LIB3051-030-Q1-K1-C1
gatgaaaggcctttcattcgtgcatataaaggagagtttcaaccaacatatgggtgtgctaatgtcatatcaaatgtcattagggcaaaatttgatgaaccagctccaagttggttgaaggtgtcagttgaccttcgcgataggtggtttggagagtttaagaaagagtataggtggcacccacaagaagagcaagccattagagctgtttttgagacaaaaggttcacgtattttaaaaagtgcaatgaacaagatcagaaatggtcaagataaaggaaagtggataacaactaatgttcgagtagccttggacgaacattgggggtcta

SEQ ID NO: 30690 - DNA, 250 bp, Glycine max
  Clone ID: LIB3051-030-Q1-K1-C2
cccacgcgtccgattaatttgaagcactaagtttgaagaatattgtggccgtttagtcgtaggtctttttatggtggatagggattaatatatgatatatggagctatcatccatttattttaggaagaaataaagatacgtgtattcagtattctgttcttgatttgaataaagctcctaattgttatgagtttgtaattcatttgctactttggttattatatattatacttcttttatttcatcttt

SEQ ID NO: 30691 - DNA, 311 bp, Glycine max
  Clone ID: LIB3051-030-Q1-K1-C3
agcggctatacttctgatctctgctgaggttgcacccaatgaatacgaaaattttaagataagagatgggaagcatgctccaaatgggttatatgatagcaaatggggttacggtggttggggtggtccttggtatggcggctggggtggcccttattatggtggcagctggggtggcccttattatggcagtggttggggcagtccctggcgtggcggtagctgtggttgctgaagaggttggcgtcgacctaatggcaacgctcacaactaagaagaagacttgctaaagcttgtttacgggtttaggt

SEQ ID NO: 30692 - DNA, 319 bp, Glycine max
  Clone ID: LIB3051-030-Q1-K1-C5
tccacgcgtacgtattgcagatcagattcttaacttcatcatcaaatctcaggtgttgtctaccaatagtcagtagtaatatcaactaacaaagaatactcagttttgaatattatcttaaacaaagcattaacgacacttttggtcactgacctttctttattctttatgccaaaatggtttttaagcatatagtggagctgtctgtgtatactggatcagtggatgagaagaatgttattattattagcgatgagtcatttaactagcctaagacttgatcgattgttagatgatcttctgatggactcagtgcaca

SEQ ID NO: 30693 - DNA, 428 bp, Glycine max
  Clone ID: LIB3051-030-Q1-K1-D10
gttttagacttcgcaaaaccctacgccgatcccaaacgattccgatcgcgaaaatggcagccggcgccgccagatcgatattccgatcatgctccgccagccggtcagcgtttcgcgtcgcatcggaatccaaaccggttcgttctccgttccgtatcgcgtccaataagcctctctcgcagtcccaatccactctcaggttccccgtggaattgagttcgtgtgttgaatcgatgatgccgtaccacacggccactgcttctgcgctcatgaattccatgctttcaatttcaagccgcacgagcgcttggattcccgaaggccaaaagcagactacttgaagatcaggaagcatagatgggattgcagggacattctatgatatgatgttcatcttgaaacaagattttgttggtgctaggaataat

SEQ ID NO: 30694 - DNA, 365 bp, Glycine max
  Clone ID: LIB3051-030-Q1-K1-D12
aagcaaagataatccaagcccgatttcttctaggcttactatgtcactgcttctgatggtattgtggcatctgaccatccaaagatgagacacaagaagaaccaaagacacagccagatgcctggtgaagaggtggaagtgcggaagcatgattgaagctgccgacactgtaaagactggggacatggcagacgatgacactgccgaagacatggcaaaggatgacactatggacgtcatcaccgatgatgcagatgctgtggtcaaaagggctgcaaatgttgatgaagtttaaaccacaaatatatgaactgaacacactcatatacttgagtatactccatgtaatatctagcatatatcta

SEQ ID NO: 30695 - DNA, 442 bp, Glycine max
  unsure (1)..(442): unsure at all n locations
  Clone ID: LIB3051-030-Q1-K1-D2
gaattctagatcttgttatcggcttcgacgaaggagatctggttgtcgcggatataacgcctgtccgacgcgtcggatgcacccgctgcctcctacaccgtgtcgaagccccagccagtggcagcaccgtccgatgcagtcgcgtatcttcgttaaccacctcccccgcgatcccttcctcgctccttggtagctcttgctcacggacgattgcgcgaaaatccctttctaaacaatagaaccttttcttagattctgtggaaaaagcttctcaagctttgaataagataaacaacaatgtcttcacttgcagctgctagagcagacaacttttactatcctccggaatgggaaccgagtcagggttcgctgaacaagtttcatggtcaacatgccttgcnggagaggggcaagaaaatagatcagggtattctgattataa

SEQ ID NO: 30696 - DNA, 279 bp, Glycine max
  Clone ID: LIB3051-030-Q1-K1-D3
ggagatatatgctttaaataatatcttatagaagctagtgttttgtgctgataaaaaagaaatgggtaaaaaataagtaaagaaaaaaaaaaataataaaaaaaataaaaaaaaaaaaaaaaaacaaacaaaataaaaaaaaaaaaaatatgtaccttaacaaaataatccaaaattaattaatagttcattcaaaattaaatctaacggataattgcactaaaatcaattcataagacaatacattcaaatactagattctgtaaaaaaagatactta

SEQ ID NO: 30697 - DNA, 281 bp, Glycine max
  Clone ID: LIB3051-030-Q1-K1-D7
cccacgcgtccgagagtacatgccaagtttaactggcagggtgatggatgaaagtggggctacattggagctgatggataggaacatttgcagtgctgctggtggtgttggatcttgcatccttctcacagaacggatagtccaattgtgtaatgtattgatatccaggtattatgatctgactgcaggtgattcgtacgatcggtagcggatcgggcagtcttttgactgttacctggatatggcacagggcacgcaatcattcatgccatgatctataa

SEQ ID NO: 30698 - DNA, 311 bp, Glycine max
  Clone ID: LIB3051-030-Q1-K1-D9
acgcccacgcgtccgcccacgcgttcgcccacatcgtacgcacacgcgtacgagactgccgaccgttttgttttataggaaattaagatgaatgatatatcaatgttacagaaagtatatataactgttgaactaaaaatgactcgtatcattctatttgttaattaactataattaacaatagaatggagagaacacaatattctgtagatgttaatgaccgagataactttagtgcgttttattttctgactttaccacaaaataacactctatctatctagaaaatggctgattgcatattcatggtg

SEQ ID NO: 30699 - DNA, 313 bp, Glycine max
  Clone ID: LIB3051-030-Q1-K1-E1
accacgcgttctgagatgcctcaactctcaattggagttccggaagcccctattcctggtagggtcttctttctatctatctaatcctggcgaccagagtgcgaaatcgctatgtgtgctgcagattagcaagttcaagatccagcttcaccatccgaagcatgcaatgcacccactcgtaagaagagcagtacctgccaaactccttcccacggatcacgacgccaacgcctaccggtccaacgtgctagccgaccgatagagttccgccgacgacttcgacgaagcacccgttatatccacgagaaatcgt

SEQ ID NO: 30700 - DNA, 102 bp, Glycine max
  Clone ID: LIB3051-030-Q1-K1-E10
atttactgtttgattgttacagaaaatcctgataggttctgtctcccaatgtgccgagtgcattatcaaggggcaagggccaatcgatgataaattattatt

SEQ ID NO: 30701 - DNA, 199 bp, Glycine max
  Clone ID: LIB3051-030-Q1-K1-E5
atctttttgtgctatcaatttcattattcattatccctgcctagtgagggctcatgaggcatcctttttttccgggttcaagagaggatccaccctgaagtgggtcctgggtggccctccttttatacttgtggtatgtatagtaggatgtcttgaatacatataaccatggattgacaccaaaagctgcaatttatac

SEQ ID NO: 30702 - DNA, 340 bp, Glycine max
  Clone ID: LIB3051-030-Q1-K1-E7
cccacgcgtccgcatatttcctattctcttaccacccatttactggctaggttgtgagccatttgtaatcagttccatcggtcccgcttctcattcatcactggattgtgtatcatctgattccacctatagcaagtcgactgaactatataattgatgtttttacatcaagacaagcttatccaattggttgatcttgatcattgttggaggcaatgtggcttagtaatgctaggatcttgtcacaacctatgtatatttggcaattctttttgctgtttatttctgtatacacagtgcaactgctgcaagttactattgagtttttgaccccttgact

SEQ ID NO: 30703 - DNA, 209 bp, Glycine max
  Clone ID: LIB3051-030-Q1-K1-E9
gtctaaaaaaaaaaaaaaaaaaaaaaaataaaaaaaaaaaaaaaataaaaaaaaacaaacagactgacttctcctttctaacatacacattcatacaccttccttactattatataccatcacctaaattcaatttaaaatccaattactttacaacgctcttaactaaaaaaaccctgtcaaaacccatcttattcccattttaatac

SEQ ID NO: 30704 - DNA, 410 bp, Glycine max
  Clone ID: LIB3051-030-Q1-K1-F1
gggaattggcactcgtttggtggatatgtacaaggagcattatgagagcattgagatggccaggtttgttgatacagtaactcctcaatataagcctaaatttgatgcccttttgattgagcttaaagaagcagaggagaaatctctgaaggagtctgagcgcttggaaaaggaaattgctgaagtacaagagttgaagaaaaagcttagtaccatgacggcagatgagtactttgaaaagcatcctgagctgaggaagaagtttgatgatgagatcaggaatgataactggggttattgatttttcaattagcaaaatgtcaggttgatgttgttctggctggtttaataataactacattgatttctttggaactcggttctctttttcagttcaaagggtcttattt

SEQ ID NO: 30705 - DNA, 328 bp, Glycine max
  Clone ID: LIB3051-030-Q1-K1-F2
gcctttcaaaagcaaacagaagctagcatcattggctcatttcaaatgcaatatttggagtcagttaccgtatgagttggcttgatgatactgcaacagtttggagggattaatggcatagctttttatgcaaactctatatttatatcttctgggttttcagaaagtattggaactatatcaattgctgccgttaagattccaacgtcatctattggcgtactattaatgcataaatctggatgacgaccacttttagctggtttctgcatgagagaacatgctgaggatgctttctggcattcttgacattccatttgctggactt

SEQ ID NO: 30706 - DNA, 352 bp, Glycine max
  Clone ID: LIB3051-030-Q1-K1-F9
atcatatcctcggatcaacatctaggtactactaacgcttatcgaattgaacctactgtggttcgagtctactgtgctagccggagtatggctgaccttgcaatgagccctaaagcgctaacggtacctgtagaacaccgtaatacaactttggccactggctatgctcatgtcactgaacggcatattccaaccattatgtctcgtgaatctgctcatcttgctactcaatgatgaaacattggctctgattaaaatacatttgcctaacaacatttccgatatgttaattacatgctatgtctctggcaataccggtcttaatgaaatatatatataggaatggctctat

SEQ ID NO: 30707 - DNA, 393 bp, Glycine max
  Clone ID: LIB3051-030-Q1-K1-G2
tgctagagctatgtctggtggtggcaaagaaagtcagggagaggttgatcgtgtaaaggatacgagaagagggaattattgactcaaaaacttctcattcacattcagtgggcattactaatgagaatggtgaaagcatacatcttgagcagtctctgaaaggtgtggagacaagggccggttatggtggtgataccacggagacctttgccaacaatatggccttgaatgaggaagtgaatggaacagcatatgatgtggaggagaatgatgctgagtataggagtgaatcccgtggggaagatgctggtggagttgacaatgaggatgatgaagaagattacctgcaacccggtgaagcttcaatagggaaagagctttggaattttttta

SEQ ID NO: 30708 - DNA, 187 bp, Glycine max
  Clone ID: LIB3051-030-Q1-K1-G3
tcggagcgagaggcatatcataacataagaccacatagctgtgttgcgcgttgaagagcgggtaggtagaagatgtcgggtatgggagatgggtacgttggcacacgccaagactcagttaggattcgacggttggggatgcatagagaagctgatcgtcgcagaatccaagagctgaaaaccaagt

SEQ ID NO: 30709 - DNA, 346 bp, Glycine max
  Clone ID: LIB3051-030-Q1-K1-G5
atctgcttctgggagcaacttgtaggaggatttaatagatgttttcacttcaaattggtaatgcactcaggatgatgagtccttgacagttctttcctgcaaacatctgtaccatcctgagtgcattaacaattggttgaaaataaacaaggtttgcccagtttgtagtactgaggtatctgcttctgggagcaacttgtatgaggatttaatagatgttttcacttcatattgaagaagatctatgctaagtcgtcggctactatccctcgatctaatagcattctcacattagggagatagtctctgctattggttccagctctctgatttcaagtatcacatg

SEQ ID NO: 30710 - DNA, 438 bp, Glycine max
  unsure (1)..(438): unsure at all n locations
  Clone ID: LIB3051-030-Q1-K1-H5
agacaccgaagaaattaatgcattgctttactcggacagctatggctattctacccaggatgatgatgatgaagttactagcacagggcactctccgagtacaatgaccactcatgataactgtgaaacctttaggagggataccgcagaagaagttgcaagctctgccaggaaaaccaagaagaggaagctattggatggctattatgatgacatacaactcattgatactgccagttctcagaatctgaacaagtcttctgcaacgggagatgatgacgcagaatcaagatgttctagtaacaacaatgaaggatccttgtctggcaataagaagattaaaaaggagaagatacgcgatgttctgagcattctgcagagcataattcctggtggaaaggataaggatccggtcatgcttctngacaatgccataca

SEQ ID NO: 30711 - DNA, 329 bp, Glycine max
  Clone ID: LIB3051-030-Q1-K1-H6
atactctcaaaacttcaaaactatgtagtacgtattatgctgcactcttgcgggccagctctattctaacgcccttactatcacatggtaatttcttgctactgtgcccgctcatgtgttctgtacttcctataggtgtgataccgtcatggaagcctcaagctcatacatatatacctatataagtatgctataatatgtctattatgattacatacagcttagtgaatctgacattatctcatattgctaactagtcttctgccacaggagatgatgacacagaatcaagatgttctagtaacaacaatgaaggatccctgtctggc

SEQ ID NO: 30712 - DNA, 410 bp, Glycine max
  Clone ID: LIB3051-030-Q1-K1-H8
agggtgagaaaatttcaagcacaaaaaatggcggagaagaaagtggtcatcctaggaggtggtgttgccggagccaaccttgcaaaaactatacaacatcaagccaacgtcacccttattgatccgaaagaatattttgagattccatgggcaagtttgaggggattggttgagccaacttttgctgaaaggatagtgatcaaccatagagagtacttcaaaaagggtgaccttgttgtatccagtgctgtcaacataactgaaaccgcagtggtgactgcagatggccagcagatagcctatgactatcttgttattgccactggacacacagaacctatccccaaaaccaggagagaaagacttgaccaatacaaaggagaaaatgcaaagatcaaatctgcaagttc

SEQ ID NO: 30713 - DNA, 97 bp, Glycine max
  Clone ID: LIB3051-031-Q1-K1-A1
ccccgccccacctctccagcgggccgccagcatgcccgagatcaagatcaacaatccggcacatcttataagttaaaaaagctactgaattgacttc

SEQ ID NO: 30714 - DNA, 436 bp, Glycine max
  Clone ID: LIB3051-031-Q1-K1-A2
gcctttgatacgtaaatgctgccttacttttctattgcacagtgatcgttgcgatgcaggactacgccaccgtctaactcctcagcttcgcaatcgcagttcgactattcaaacgcctgctactgctcctgctacttccccgatccctttcaccttcagcaacccgcatccactcactacgctgcgccctacgtcgccgtccactacgagcaaatccccgctcctacagtcgtcggtcccgttgcgcccgcccctgtacccggcgtatactccgccgtgccgcaatatcaggcacagcagttatttgagagggatgcgcagataataacgccggaggctctcgagaatgtcaaggcagcgattgcaagcagcgacgtggagcacataaccgatgccaaaaagaaagcggttcctcgcatagctgctggccacgctt

SEQ ID NO: 30715 - DNA, 422 bp, Glycine max
  unsure (1)..(422): unsure at all n locations
  Clone ID: LIB3051-031-Q1-K1-A4
cccacgcgtccgagatcagcaaacccatttcaaaatccatgccttggatcttggaaacggctgacttagtagacgaacaaacaacaacaacatccatacttttcaaatttgatgaaacaaacactagaccctctcaatcttccacttctgactcttcttcgattttctgaagcattacttccctgagctcctggaacccgaaacacagtttcccctcttcgaattcaactccaaatccaaaatattcaacctcgaaacccgaaacccgaaacccctaacattagttgagaaggaacctcaattgaatcggaaacccaaacctcacattctgagcacctatgtcttggtagcaaccaaaaaaccgagaatgtcgatctcaggtctgcgactaanaaatctcagagctagtcgatgttggctcc

SEQ ID NO: 30716 - DNA, 250 bp, Glycine max
  Clone ID: LIB3051-031-Q1-K1-A5
cagaaaggcccaatcgaaggcaatgaaagtagcgaaaaagttgaaaaccagtgagggtggcgggctattccaacgattcgaatccggttggtgactctaatctcaacgagaagtttgtctggcgcaagaagattgagcgcgatgtttcacaaggtgtgtctattgatgcgttttcaatgaacgcagagagcaagaaacagagagacaggtttgctgaatttgaaaaagctactcagtgaagagaggaatg

SEQ ID NO: 30717 - DNA, 242 bp, Glycine max
  Clone ID: LIB3051-031-Q1-K1-A6
cacaaacgtccaatcgaacgcaattaaagtagctaaaaagtcgaataccactgcgtagttttctattccaactattctaatccgataggtgactctaatctcaacgagaagtttgtctgtcgcacgaatattgagcgctatgatacacaaggtgtagtctatcgatacgtctgacatggaacacattcatggtatacgcatgccatataggatggcgtgaaattgaaacaatgtataaccga

SEQ ID NO: 30718 - DNA, 401 bp, Glycine max
  Clone ID: LIB3051-031-Q1-K1-B1
caaaaatgcaatctatgtccctgacgctgagcaagaggctctccaattcaaagcctcgcttcagaatctcttccaacctcgtcgctcacgcatcctccgccacaacctctccgccgccaccttcgccgccagtcccctctccatccgccctcaacagcctcctcaccgctccgtggtccgccactcagtcacgcggaatcacgctctctggatctgatgttcgagtcgggaatctcattggaaaccgaggacgcgctcacgaggttctcaaactgtatcgccctcttgaaggaacgggcaaagccactcttgaggttccgcctcaaagtgtagctggttatgccacagttgctactacagaggatggcgccgaaagggaaggaaccgaacagtggattgag

SEQ ID NO: 30719 - DNA, 326 bp, Glycine max
  Clone ID: LIB3051-031-Q1-K1-B11
cccacgcgtccggatctaactcgtcacagacagatttccccacaatttcttcttaacgattgtaacctgattgcggggaaaaagattgccctttattgattttttttgtcaaataaaattgtgtataaaaccatctgtgatctgggttcttttgcgtattttagtttttaaagggaaattgaggattttggtactgattactgtggaacatggtggtttttcgatctgggttcttttaaaaatgggctctttcgcgcatttagtgactttttgcatggaaaattgacggtaccggtactgattactgtggatcatggtggttttag

SEQ ID NO: 30720 - DNA, 426 bp, Glycine max
  Clone ID: LIB3051-031-Q1-K1-B12
cccacgcgtccggcgataataaccagaattttcgagagagaaaaaaatcaagaactcggaatgagggttttctctcagattcgtgaaaatctcgaaagaggaatacgatttaagccttaggtcgattcccttaagatcaaaccctaaatctaatattctcccttcccaatttatttcagagaaaaaaggaatttagggtttcggtctctctttcccggtgccggttttcacgatcagcgatacgactttattctcgaccgttccgtttgaaatcgttatagccggaaccgttaggcctagggtttcgttaagatgaacgaccaatcgcagatgatgatgaatttgaaccagatgagccagcctcagatgatgaatcaggtgcagattataggtcagtcgcagcctcagatgctctcgcacaatcag

SEQ ID NO: 30721 - DNA, 431 bp, Glycine max
  Clone ID: LIB3051-031-Q1-K1-B4
gttttcgcattgttatggagaagcagctcagcttcatgggaagtgaaaggaagaagaggaaggaatcacctgggaaacgtggtgacttaccaattcatttagcagctcgggcagggaacttgagtagagtgaaagagataattcaaaactattctaataatgagacaaaagatttgttggcaaagcagaacctagagggggagacccctctttatgtcgcttcagagaatgggcatgctttggttgttagtgagatacttaactacttggacctgcaaactgcttctattgcagccagaaatggctatgatccattccatattgctgcaaagcagggtcatcttgatagttttgtttaaatttcagccaaactaccatgggtgagaagcctggaggtgctgagagaactactgcactcctttcccaacttg

SEQ ID NO: 30722 - DNA, 356 bp, Glycine max
  Clone ID: LIB3051-031-Q1-K1-B6
acctttcactccacgaaatcaaaaacaagtgctaagaagctccgtgtctctattctggaacatgtagcaccaaacccaagttggcatccaagttttataacactaatactgcatataatattattataatatacataacaacagttattgatattgttgtgattgtgtgtgattttggtgtcgtccctttttcttatgtttaaggttgtacggagtttatgtgttgattcaattcgtcgataagaaaccttagtttgatattttgattggttctgtggagagtttttttttcttaggtgtggattttggtttgtgctgtttttggttgcgaataacaatggccgatgaaggaaaca

SEQ ID NO: 30723 - DNA, 383 bp, Glycine max
  Clone ID: LIB3051-031-Q1-K1-C1
aatgggtcacccatcactttttctcgtgcagcttcttgttacctctctcctctttctggctgttgattatggattcggtagggtggaactgacggagactcatcaggattttcccattcgcacgattgtaaagtatgacattgcggattattctgatccacagccaaataccaatccaaagaatgggtatgttttgagtcctccttcatctccaactccaattcatcctccaagtccttaaatggaagctcaagattggactttcaccacttgtttatgtctttctgaacggttttgtaactggggtagtgtgtgatcgcttccagtttgacacgggattcgtagaattaggatcatgatacttgtgttgctgtgaatttata

SEQ ID NO: 30724 - DNA, 372 bp, Glycine max
  Clone ID: LIB3051-031-Q1-K1-C7
ctccgcaatctagccaacacaacccgcaatttctgaggcttactccctctccgctgggcttccttgccttctcaaggatctaagacccaacatcatataccaacacctctcaaccacaccactaaccaacctaccttcattcccatacatctcacaatctcactcctgctcacatcacctctactgccctcgtccctattacttctcttatctctcttgctcatgacaacataccagcgtccagatacgttcaatgtcgctaacgccggttgtcaaaatttcttccggctattccgtgcaagtaagcctatttgtgcccactgaagacttcaacctcgcactgataactcttgatttggaatttgttaaaaa

SEQ ID NO: 30725 - DNA, 314 bp, Glycine max
  Clone ID: LIB3051-031-Q1-K1-D1
cttaacccacccaaaccccaaatctgaaaaccgtcctattcgtcgttcgaattaggggcatgtgctgaactggaacaaccagatgccagcgatttgagcgatgcacagtcaagaagaagctgcgtagtgcgtttgcgtttcgttcttccaaatggcggtttccgacagtcccagcggcggctccacgccacctcatcaggaacaacaagccaacagcaagtacggtttcaccaagcccctctctctcgcgggtcccaccgacgctgatctccagcgtaacaacgatttggacaagttcttgctcggatcgggtc

SEQ ID NO: 30726 - DNA, 417 bp, Glycine max
  Clone ID: LIB3051-031-Q1-K1-D11
cccacgcgtccgcccacgcgtccgcgggttcttccgatttatatttttttccccaaggcgggggacctccttcttcttctagcgtagtttttctcttccatcttcattcgtttcttttcccttaacttccaatcttttagtttcaaaatctctcttttaatttcgagaattatgagacccgcggttgaaggatccatggccgagaggtttgacgactgcgaaaaggagaagaagaagaagaagcgccgatccaatcgacgatccaagcaaaaccctccctcatcttcagcatctgaagtgaatgacgcccaggggttgtcaccagattcatggaaaattggaacacctactcatgcttctccatccttgggcaattcattgtaccaggtcaatgtgtgttcttctaatgagcaagga

SEQ ID NO: 30727 - DNA, 171 bp, Glycine max
  Clone ID: LIB3051-031-Q1-K1-D12
cccacgcgtccgcccacgcgtccgaaaaaaaaaaaaaaaaaaaaaaaaaaaaaaaaaaagagagaaaaaaactaaaaataataacactatatataatctaaaattcaaaattccttacatatacattaaccaaccaatctattattatacctaatactccaatttcaattc

SEQ ID NO: 30728 - DNA, 347 bp, Glycine max
  Clone ID: LIB3051-031-Q1-K1-D6
atttgacaacgttacgtggtgccgttccatgatttatgaactatgacccttcttgtggtcgtaatcttgggttccaaaagaacgagaagatgaacgttgatctggaatcattggcagaggcaacttctgtatccataggatcactgatcagcaccactattctctacccacttgacacctgcatgaccaagtaccatgctgaggctcgttcctcaggtcgaataaaatacaggaatctcactgatctattatcggaggcaatatctaaccgtcaggcgctttcactttaccagggccttggaacataaaatctccaatcctttattttacaatcattctacttctat

SEQ ID NO: 30729 - DNA, 422 bp, Glycine max
  unsure (1)..(422): unsure at all n locations
  Clone ID: LIB3051-031-Q1-K1-D8
gggccctggggtttccagctctggttacgggcctctatcagtcctacagggtgcccgtgacccacccggcaaggtcacgtcatcataggtaagtatgcacatcgctcaactgatttctgatttcatcttttgtttgcagggatatcgcctgcaagacacccagtggacccgaagaagtccaacagggtcttggagttgtcaagctctaattacgggtctctgtcagttctacggagtacctgtcacctncagcaagggcatcaggccccctactaatcgagctttcatcaagaagtactgcgtccccagacaggcgcagggcgaaacaccacagcagcattgggatggccggtagcgggcaatagacacaccgtcaccacctctaaagttcacctcaactcatccataaaaagggtagagtg

SEQ ID NO: 30730 - DNA, 396 bp, Glycine max
  Clone ID: LIB3051-031-Q1-K1-D9
cccacgcgtccgagcaaactcaaaaaaatcaaaaaccgtaacgaactcttccttccgagttcggagttccgagttgggcgactcagcaccgatggacgagtcgggttcagcctcctctccaacgcggccggtgacaatcgagggcggcgagtgcgacgcggcgttgtcgaagtcgcgggtgctgacgcgggaggaggtgctccggcggcggctccggcgagtgaggcagctggggcggtgctaccgggcccactactgggccctgatggaggagctgaggtcaaagtacagagactactgctggacctatggcaaaagccccttcaaggaggatcacgatgacaacaacaacaacagcgaccaaaacggcgtcgcttctggtggcgactatatcgt

SEQ ID NO: 30731 - DNA, 421 bp, Glycine max
  unsure (1)..(421): unsure at all n locations
  Clone ID: LIB3051-031-Q1-K1-E11
cccacgcgtccgcccacgcgtccggagggagagggcatgggaatccgatcggtattcgatggcggcgagctgagaagggaagtggagaaaagtggaattgacccaaaattcattccaaagatatggaagcatatcctcatctctgccaaagatgaagattgggattgggagaaacaagttccctccttgccctcttcggcctactctctccttcgttccaacttcaaaacccctctctcttcctctattcactccgttttccactctgccgacaacctcaccaccaagctcctcatccagctccaccacaatcatggacctttcgtcgaggctgtcattatgaggtacgatactcgtttgggcaaatatgccggccaacctcgccccggtggtctcagagctactctgtgtatntcttctc

SEQ ID NO: 30732 - DNA, 131 bp, Glycine max
  Clone ID: LIB3051-031-Q1-K1-E7
ctttgtctttgtgcacacatgagttatgactacttgtttagtttatgcacaacgaaggaagcaaagacaaaaatcttgattgttgaaattttagatgataaaaaatcacttggacagttatgaataccatt

SEQ ID NO: 30733 - DNA, 358 bp, Glycine max
  Clone ID: LIB3051-031-Q1-K1-E8
aaaacccataaatcctctcaccaaataaacctcaatttattgcattgcataataccatgtcaatgaagttgtatgcttccctcacccttacggtgtggcttttcatggccacattttcgcgagcccaatacgttattgacacaaatggcgaacccgttgacaatgatgatgagtattacatcaggccagccataaccgacaacggagggcgtttcaccttgatcaaccgaaacgggtcgtgccctctctacgtgggtcttgaaaacaccgatacgccactgggttatccagtgaaatttacccattttgccctcaacgttcaagatgaggatataaaggtgaacagcgacttgagaat

SEQ ID NO: 30734 - DNA, 431 bp, Glycine max
  unsure (1)..(431): unsure at all n locations
  Clone ID: LIB3051-031-Q1-K1-F1
cccacgcgtccgcccacgcgtccgatttttgattagaggtggctaattgtctgaaatatgctcttattaagtgcaccacatcctgcttcagtgcttccttgggcctcatattttatgttttaatattgtagtaagaggtacaatatttggcgctttatatattattcttggaaagcgaatctggtttttccctaacatccttgccgaggaagcaacactgcgggagttgttcagattttggcctaagaaagatgaagaggaaaagcccaagtggacaacaagacttttctatgctggggtagctgtgctgntcatattattgctgaggcatcatgcacncgatgaagctgccagaacaaggcaggtcctaaatatagtggatggaatntatccatccattttcagcttaaattcctttctagttggatcta

SEQ ID NO: 30735 - DNA, 432 bp, Glycine max
  Clone ID: LIB3051-031-Q1-K1-F10
gggaactcgaacaaatttctacaagaacccatcaatctcctacaaaaaacgtttaagcgtctgctccgttcttcagaacctccatgcttacaacatcgccgccggcaatgttcctcccgccgatccaccgcaagcgacttccaccgccaatgttcctcccggcaatccaccgcatctcactccctccgccagactcaaacgcagccggaatcccgagccaccggaatttctacgcgaataccgtgacgatgccccttcctctatgtcacaccacgattacatccaaaacagaaggaaagaagtcgtttcgtctcggaatcacgatcgcgttgaattgactgaagaagttttgggaaactctaattctactcttcccttggtggattatgatgcatgtgatgaagatactccttcagaatgtgaagaaacaca

SEQ ID NO: 30736 - DNA, 437 bp, Glycine max
  unsure (1)..(437): unsure at all n locations
  Clone ID: LIB3051-031-Q1-K1-F4
tcgnccacgcgtncggtgcatctcagacatggatccagtgccctagaaaaacagattaaaggatgtgtgaaggaagttcaagtcgaattgtcaaagccaggttttaattcctttggtctgggagactgtaaagcccccaaagtccttggtgacattgttgaatctattgcaagtgccatttttcttgacagtgggagggacactactgttgtttggaaagtttttcagcctcttttgcatcctatggttaccccagagactctggccatgcatcctgtgcgtgagctgcaagagcgatgccagcagcaagctgaaagcttaaagtataaagccagtcgtattggccatttggccacttgtgaaatattcattgatggggtccaagtaggggctgctcaaaatccacagaaaaaaatggcgcagaaattaactgcaag

SEQ ID NO: 30737 - DNA, 392 bp, Glycine max
  Clone ID: LIB3051-031-Q1-K1-F7
gaaagtcaaggcgaaagtagtgaccgaaaatatctcctaggtggtgaaatgtcaaagatgaggaaccatggaaaagaacttgcttatgaaaaagaactttgtcaattgtcttttgcaatatctcttagtttgcaaggtctggattgtgctaaagggaaagcttgggaggttaagagagttatgttgtttttataaatatgaataagggattattgggaggtttcgatgattatctgttatttattttttcattctgaaaaagtatcaatcgtgtaaaaaaaatgtgttttgtttcgtttgtcattattgtagtgtttttgaagagcacggcaaattgttcaagctatatctctattgatatcaatttattttaaatgaatgacatttgcaac

SEQ ID NO: 30738 - DNA, 432 bp, Glycine max
  Clone ID: LIB3051-031-Q1-K1-F8
ggtgggtctagcagtagcagcaaggacgcccaagaccttttccgcgctctttggtctgcttatgcttcaaccccaacaaatctcaagatcattgacctctacgtaatctatgccgtcttcaccgctctcatccaggttgtttacatggctttggtgggatcatttccatttaactccttcctatcaggagtactttcttgtgtaggaactgctgttcttgctgtctgtctcaggatccaagtgaataaagataacaaggaattcaaggatcttgcacctgagcgtgcttttgcggattttgttctctgtaatttggtgcttcatttggtgatcatgaacttccttggttaaattggttcgtgtggctgttgttgttttcgattgaacccttgaataataaaaattagtagtatacctagactttttgtaata

SEQ ID NO: 30739 - DNA, 433 bp, Glycine max
  Clone ID: LIB3051-031-Q1-K1-G2
caaggacagatttctccaaatttaaaacaagaattggacattgatgattctactgaagtttgtgggcgcaattactctacccaagagaatgatgatttgattgtgacatatttcaatacaagtattgctgattctgaagctagtgaggtctgtagtcattgtatgcgctgtaattgtgtccttcagagggagacaaactataaagaaagcgaagttgcagtgttgctgagcagccataagaagctctatttgctactaatcaacgttgattctaatgggtcaggaacacttttgagtgtattgagttgccacaaaattgaagaagtttgtgaggtgctagtaggaatgggacttcaagtgttaagggtaaattttgagaatggggaaacgtatctttttgtaacaagaagcattgagaaatcaagagaattac

SEQ ID NO: 30740 - DNA, 340 bp, Glycine max
  Clone ID: LIB3051-031-Q1-K1-G7
aaaaaaactaaatcccaaaaaactaaaaaaacaacaaaaaaaaaaacctaaaaacggcagtactattaaaatatataactaacaacacctacctaaaaaaacaaaaaacaaaaaaaaaataactcctcctccctgacagacccccattcccctccccgagaaccttctgcataatcatgctccattctcccacttgtatcatcatcgtcccatctacccacaccacactttccaaggaatccctgaaatccccactgtaatcctgctttccgctgaacccgctattcccatcaatgtacttctcagtcagccccctcctgttctaccgttcacatctata

SEQ ID NO: 30741 - DNA, 432 bp, Glycine max
  Clone ID: LIB3051-031-Q1-K1-G8
tgtgaaaactgcaagatttaaggagttggctccttatgatcctgactggtactatgggagagctgcttccatggcaagaaagatctacttgagaggaggacttggtgttggtgcctttcagaggatttatggtgggagcaagaggaatggtagccgccctcctcatttctgcaagagcagtggtgctgttgctcgtcacattcttcaacagttgcagaacatgagcatcattgaactggacaccaagggtggcaggaaaatcacttccagtggccggcgggatcttgatcaagtggctggacgcattgtggttgcaccttgatttgaaaacgccataagcatattgaggtttttggtttctggttagagagatgtgatgataacagattatgctaaagttttgattttagactgtcttttatgtatcggaca

SEQ ID NO: 30742 - DNA, 421 bp, Glycine max
  Clone ID: LIB3051-031-Q1-K1-G9
cccacgcgtccgcttgaatccctccctctctctctctctctctctgactctgtcactcgctatttctctcttctccacgtctccaaattcttaatgtttatggaatggagtctcactcttgattcctctcactcttcctcctccaccactaaccacaacatgttccccactttaggatttccggtcaaccttagcccctcctccgatcacaatcggacggtcctcggtgaagttgacttcttctccggtgctagaaacatctcatcatctcacaccaacaacgatcatggaaccccccttaagtgtgatccccatgtaaatactggtttgcaacttctcaccgctaacgctggaagtgatcagtcaaccgtggatgatggggcttcatcggatgctgaagataagcttgtcaagatcactg

SEQ ID NO: 30743 - DNA, 433 bp, Glycine max
  Clone ID: LIB3051-031-Q1-K1-H1
tgcttgcttactattactaaagtaggggatgactgtattgacttatgtaggccttggcaataatagtgttttttttgtcagtagaagactattgaaccatattagatactctttttcccataatagaagacttattcagcccaattggaacttcattatggtttgaaaattttattaaatcattaactgaaattggtcgcatttatattaataatttatatattacttattttaatgcataggatgatgagaaagggaaatcatagatggtgcttgaaattattggctgacaaaaaacaagtggttgcaacatgcctgagaatatacatgatgaaatgaggcctaatttattgatgcgacacatatggtggttgatctgttccatttccatgtacattttctaaaacttagttaaataatcttactataaact

SEQ ID NO: 30744 - DNA, 422 bp, Glycine max
  unsure (1)..(422): unsure at all n locations
  Clone ID: LIB3051-031-Q1-K1-H10
ctctctcttatctttccatttcgccacttccttctttccttgcttcccatgacttccgaccagatatgctaaacatggaaacaaacttctaacctccttcagatctacaccacccttgtctttttttccagtttcataaattctacaccatgggcacggaggttctacggccacaagattgtttcacccaccgcatcactgttccaccggctatgttttcccagagaagaacctctgggacacacaacaacaattacttcaggggcacgcggaagccggttacccgacccgaacagagaaaacgggttgtggagaaaaggcccagcttcgatgattcgaggttttcgaggttggagatggagaaggtcaccattctccggaagggggagtcgctcgattcgaagctgaaaaccggngctttg

SEQ ID NO: 30745 - DNA, 410 bp, Glycine max
  Clone ID: LIB3051-031-Q1-K1-H6
cccacgcgtccgcccacgcgtccgcccacgcgtccgcttccctcacgaagaaggtggaggattgcccagattttgtcttttcctgttcttttatggccaaatgaaagaaagtattctctgaagtaatgaatctgtgccatgtttgaagtagttgatgattatgatatcatacatacttttggatcaattgacatgatcatcaatgcccggcttttaggttcctacaggtcttgatcactaattatctgcaaaatatattcagaaactcaatgactgcaaatacgagtatttggttcatattcagtatccatcggtcaacctatgtatgtactgctatactaccatgacttgatcaataggataggcaatcttgactcaagctatggccattaccttttactggtgcacat

SEQ ID NO: 30746 - DNA, 428 bp, Glycine max
  Clone ID: LIB3051-031-Q1-K1-H9
cttcttttcaccactcaagagcttcagcgggttaaacaagaacttgccatgacttgtgatgcgatgaactaggcatggaatcatgctgatgatgcaactaaaattgccgagattcatgcatagaaagcagagttcatatcatctgaatcgttgcgactgaaggccttactagattcaattgtgtaaacagaggcatgagtgaatcacgttatatggaatcttagagcagatcttgtagctctcacggcagcacttgcttaagcagcacgctacaacgagtttaccgcgagacagagagagaaaacatggatgaggtgaataggccaacctgagatgattcgaggttttgaaggttagagatggagaatgttaccattctccgataggaggagtcggtcgattcgaagctgaaaaccggagctttgaag

SEQ ID NO: 30747 - DNA, 414 bp, Glycine max
  Clone ID: LIB3051-032-Q1-K1-A2
attaattatagcatcaatggccgacgcaaagaaaattttttacccaaaaaatcgaggcaggaaaggtactagttcctctcatacagaaactacccagaaacaagaacgcaagtttaccatgaaagatgtttgctattactcccaaccaagcaatattcctcctaaggattctgattcttcaagccagcaacagcaagcacgcacctttaccatgaaagacttttgctattataccaaaccaaacaatcctcccagtgtttccgatgcttcaacctctagggctggaacaccattacccactattaaaaagtcttttgctcgcaggacttggagctagtggatgaccacaccaaattattcctcatatctcatcatcaaccttcctagttcttagcaatattcaccacctactcg

SEQ ID NO: 30748 - DNA, 344 bp, Glycine max
  Clone ID: LIB3051-032-Q1-K1-A7
ctgccctgtactccgtgtcctgctttactgctggaaaatatgggaatggcaatccgtatccggccaacctaagtgcagctgttggtttaagtggctggcttccatgctcaaagaccttgagtaacaagttacaaggggtagatgaagctacaaggcgtgctcagtcctttcctgttttgctgtgtcatggaaaagttgacgatgttgttccttataagtttggtgagaaatcatcgaagtgcttaagttcaactggatttcaggatgtaacttttaaagcttataatgggcttggacactacacaattccagaagagatggcatgaggttgtgcttggcttaca

SEQ ID NO: 30749 - DNA, 346 bp, Glycine max
  Clone ID: LIB3051-032-Q1-K1-B1
gagcactccaagatccctagtatgcatctacatgctgtgcacattcttatgccacagatgaggattacccgtgaccgagataccagtcagcgcagtcgaagtctccgtcggagtgcttgacgtaccggtctccaacaacatacgatagcaaccatggatatttcacatgatgatactgatctccaccttctgacaattacctctagctgcacgttcagcatgatgaccccagaattactacctgctatcaaggctggtacattctgcttaatgataaagattgagcatactttgcgagaggattgttatagcagacttagaagagtatggccaggaaactatgtta

SEQ ID NO: 30750 - DNA, 426 bp, Glycine max
  unsure (1)..(426): unsure at all n locations
  Clone ID: LIB3051-032-Q1-K1-B10
ctaatcttcttctatgggttggcttagtcggttcataactgccgtggctttcttagcgatcggagtgatattctcaccggagacactggggtcaaaatcaaccacactttccacctacctcaaactcgctcacctcctctgcttctccaccgccttcggcgccgctctgtgggtaacattcatcggcggcatcatcatgtttaaaaatctgccgcggcatcagtttgggaacctgcaaagcaagatgtttccggcgtatttctcgatggtgggtgtctgctgcgccgtatcggtggcttcctttggctaccttcacccgtggaaaacttcctncaccactgagagataccaacttgggtttttgctctcttcctttgcgttcaatcttaccaacttggttgtctttacacccatgaccattgagat

SEQ ID NO: 30751 - DNA, 246 bp, Glycine max
  Clone ID: LIB3051-032-Q1-K1-B11
acgacagtgattgagcttattactctaattcgactgtactaagatggcatctctggtgcgtctttctactctcatggaaacgggtcactcttccttcgtgatccacaaactggagtctcctctacagccctagtcatgctatactgacgttacacattcatgcgcatgcgtcttggaccatacgacgagactaacctccaactattacagatattctcactgcctccgtagctgcctttgcatatg

SEQ ID NO: 30752 - DNA, 314 bp, Glycine max
  Clone ID: LIB3051-032-Q1-K1-B12
gtcactttctggttccctattactcattcttgtcttttctaataattatatcatgtgggtcttacattttgaatatccttattaaaatagactctaattagtcatactgaactcagaatgtcacacattcgctcatgcttgacctgaggctacacagacagagactatgcatcttactaacattaccactctcacttcctaatattacaatatttttactgcatccaaaaatcctactgcatattatacctctaacgcctattgaaacgctgctatgtcaacatattcacatatagaaccagattcttaaccat

SEQ ID NO: 30753 - DNA, 412 bp, Glycine max
  unsure (1)..(412): unsure at all n locations
  Clone ID: LIB3051-032-Q1-K1-B2
ggggatttcgatttccaagaccatgcagttggaaagttctattcaaacccctgggtccagtactttaaccgaaacccctagttctattcacgcgattccgcagaaccagagcgtcttctccagagaattgaacttttctgagtatggtttcgacccaaagactgggaacaatcagaatcaccattctctgaagccggaatccggcgagattctcagcttcggcgagagcaagagaacctnctacggcggcgtcaatgggaattccaattccaattcccattttttctccggtcagtcgccgtttgttgctgctgcggatgagaacaccaacaaaaataacatcaacaacaatgggaagacaaagtcaccgaattcgcgcggtagcaacgacgacggaatgctttccttcacc

SEQ ID NO: 30754 - DNA, 387 bp, Glycine max
  Clone ID: LIB3051-032-Q1-K1-B4
gggaaatctcttcttcaatggcggcagagtcatctcgcagtagcgctaaacgcccgtttatggaagaagacgacaatgaattctccaaaaagccaccagaaaaaagggttaggtttccaaagggaaagaaagtgaagccaggagatgaagtggtggtggacaaagcaaatgttgaggagggtgaagttgacttggtgaatgctaaaactgccaccaatgctgcaaaagagcgggaaaaactcagaaggtttctaaagggaaagaaagtgaagccaggagatgaagtggtggtggacaaagcaaatgttgaggagggtgaagaagttgacttgatgaatcctaaaattgctgctgccaaagaacgggcaaaactcagaaatcaaatta

SEQ ID NO: 30755 - DNA, 411 bp, Glycine max
  unsure (1)..(411): unsure at all n locations
  Clone ID: LIB3051-032-Q1-K1-C1
attttagtatcacatagactatccaacgtggcaaattgtcccagattgtgacacgtagagtggactttgatacaaaatttaaaaaattgtcaaatattttcttcttcacttgccatagaatcttctattttattttgtctgaaaaaaatcccatattttagttccatacagcaacaaatctggcttgaagtttttcttatttatttcctataaaatattcattgcctttctccatcatcttagccttgatatatccatgaaaaagggaagtataaatatgttgattaagagtccatccagcttttaacaatgccccaaataattcttctgcctctctcattcttccatcttcacanagaccatccagtaatgcagtgtangtgacgatatttaagttaactccaacctact

SEQ ID NO: 30756 - DNA, 422 bp, Glycine max
  unsure (1)..(422): unsure at all n locations
  Clone ID: LIB3051-032-Q1-K1-C2
agccttccgccaacccttccgcggagttaaaggaaaaattttgattgggaagaaggaagggttgggttgcaaaattgaaacccaggggaatcaagtgttttgcaccaagggtggtgatatggagttgtggtcggaggttgttatggggtctgggaacagtgggaggatcttcaagaagaacttgatggggagagtgagggatatgggtggngccaagattaccaatttggcctttggagggagcaccatgttcttgactaggaaggatcaacaatgtgttgaagtgtggcagagttcttctaaggagttttgatgagtttgntactttctttcttattttattccaaanaattgaagaatagttaccttgacaaagagggttggtttgcttgcatgcttgtaatgaacctttgctggcgtgt

SEQ ID NO: 30757 - DNA, 411 bp, Glycine max
  unsure (1)..(411): unsure at all n locations
  Clone ID: LIB3051-032-Q1-K1-C3
ctaaccttgggcacaggtaaccaacaatggcggcggcggcggcggcaaagcgttgccacggcgaagtcctcggcctcccccgcgactgcgcccccgacgagatccgctccgcctaccgccgcctcgccctgcagcgccaccccgacaagctcgtgaaatcgggtacgactcccaccgctcccaaatcctcttctccgaccccaacaccgtctccaactccttcgtccccgacctcttctccttcttctccaacaccgtctattccggctactccgacaccgcaaagggattctacaaggtctattccgatgtattcgataaaatccacgccaacgagatcaatttcgcgcgtaaattgnggctgggtgttgatgcggttagacaggcgcctgttatggggaacttggacag

SEQ ID NO: 30758 - DNA, 411 bp, Glycine max
  Clone ID: LIB3051-032-Q1-K1-C5
agcgaatgatatactatgtaacgtggatgattattacatactatgaacacttgaacggtgactttaatgaacaagtctaaagcaattatcaaaaatatgcttcttaacttaccatagactcttatatatcatattgtcacatgaacatcccatatcataattccatacatcaacaaatctcgcttgaactttatcttatgaatcatctatgaaatattcattgcatttatgcatcatcttacactcgatatatccacgaaaacggtaagtataaatgagtcgattcagagtacatccatctactaacaatgctccaaataattcttctgcctctctcattcttacatcttcacaaagaccattcagtaatgcagtgtaagcgacgatatttaagttaactgcaacctactg

SEQ ID NO: 30759 - DNA, 415 bp, Glycine max
  Clone ID: LIB3051-032-Q1-K1-C9
cccacgcgtccgcccacgcgtccgggaagagtgaaaatgaaaatgagaagggggtcggggggaatattgaacacaacacccactgcacagcttcataactaaaccgccatcgcctccaagactttccgtgcccaaaagatgagaaaacgcagcatttacgcatggctagtagcacttgtttgcttcctcctactcatgatcgtcaccccagccattccccagtcacaagaataccatgatttcgccgaccaccgcaccttcctcggtattcccaatgcacttaacgtgatatccaatttcccttttctgggtattggccctcgtggacttgtactctgtcatcatggaaattactttaggctcagcttgcaggtgaactatggggctggacatgcttctatgttggcgtggctgc

SEQ ID NO: 30760 - DNA, 305 bp, Glycine max
  unsure (1)..(305): unsure at all n locations
  Clone ID: LIB3051-032-Q1-K1-D1
acgnccacgcgtacgaaaaaaaaaaaattttaataaaaaaaaaaaaaaaaaaaaaaaaggaagggaaaaataaaaaaaaaaaaaaaaaaaaaaaaataaaaaaaaaaaaaaaaaaaagtaatgcaagattaaaacatcacaaacttaagtaatcgaaattgcaaataaattaatattgtgtaacaactcaaaaattaaatcaattagccccaaaaatagatggtgctaaatggcaaaacctatacatggccgaacttaaaaggattaaaccaaaatcagtattaggaagctgccgtatttgaaaa

SEQ ID NO: 30761 - DNA, 406 bp, Glycine max
  Clone ID: LIB3051-032-Q1-K1-D11
tccaattgttgtcgtcggagattaattctccctaattaaaaccctaaacgcgtcttagattgaactcaatcagagacaaaacagagctgatgattctgttgctaaacatagcacggtggacaaacgttaaagaaggctacagatctttgattcaggtgaaagcagattgaaggggagtaaaacaggaacagagcaacctgcataattactcaatcgaggtgtcatatacttgatgtatttgtgtatacaatctctttgaactgtgagagaacagccatggacagactcacgaacacattcaggccagggtcattgtcttacactgctatcactgccagcaccaccaccactataacagtactgaactctgagccatcatcctcttcatgccatgaggaacaacagc

SEQ ID NO: 30762 - DNA, 408 bp, Glycine max
  Clone ID: LIB3051-032-Q1-K1-D12
accaaacgtcgtggtatattctctacaatacttaatcaaaacggtagacacgaggtggagataactcaatcacagacacaactaatctgctgattctagcgctaaacatagcacgctgtacttacgttaagaaaggctacagatctacgattcagttgataactgattgaacgggagtaaaccatgaacatagtaacctgaataattactcaatagaggtgcaatctactagacgtatttgagtatccaatctctatgaactgtgagagaacagctatggacagactctcgaacacattcatgccagcgtcattgacttcccctgctatcactggcaccactaacactaccatatcaacactgaactctgagccatcatcctcttcatccaatcaggatcaacagcta

SEQ ID NO: 30763 - DNA, 341 bp, Glycine max
  Clone ID: LIB3051-032-Q1-K1-D2
aaaaaacatacaaaaaaacaaaaaaaaaaaaaaaacaaaaacaaaccataaaaagggctaagatacactaaaattctatctctcattacattataatacaatcagattgacctcttcctttattgcctctatttaacattttagactaataaagacgcctctaaattcatactatatcattgcccaaaatttattcatctctccccattcttattatcttcaaatgtattaccctcctgacatacataccaacacggtgtatttagcacaacttatgtaatcattccatgctgtgaacatatcaactttcaataataaaacattaacatgaatatcgacaa

SEQ ID NO: 30764 - DNA, 286 bp, Glycine max
  Clone ID: LIB3051-032-Q1-K1-D5
ggtacacacacttgtacagactttcttacggaacatattggcgctaccatgggcgggaactttcaagtcatggtcaagggaatgtacgataaatgcacaaaataccctgactactcacttgactcaaactttgagggaaatgtatcagattcttcatcacactatgcttgcaccattgacatcacattatacatcacatcatctaatggagcatgtcacagattattatccacatggtgaactgcatatgcaacttcataaacatcttactaaaccagcatcgagg

SEQ ID NO: 30765 - DNA, 410 bp, Glycine max
  Clone ID: LIB3051-032-Q1-K1-D6
gccacacgtccgtggaaacgttgcgcgacgcacctacaacccgacctctgctccggcggcaccacactgtccgccaaatggctctgccacacagctcacaacgcgcccccgtcgggcgcccctgatcgacaacaccctatccacaccggcagaggccgctcactcttccgtcgccgacgacggcgacgaagatccctcggaggcggcttctgctacgagcgcccgcgtcttgccggattccctccagtacccgcccagcttcatcagcgcgattcccgcacgctcaccgtccgacggcagcggcgacgggattgatgccatgacttatgtgacgaacattctctcttcgatgtgtatgacgtgcgcgattgagtctcctatgcaattggcgccaaagctctctgcgagac

SEQ ID NO: 30766 - DNA, 407 bp, Glycine max
  Clone ID: LIB3051-032-Q1-K1-D7
gcgatgttgtcaaacacaattcaaatgttccatcccaggtgttagacgttgctgggtgtcttgcaaaagttgcggatgtggacagaaatctaggggatgaaaagttagctactgatggatttcaagaagccatagacttactggaatcactcacgttgaaatctgaagctagtgggctcgagcaacggcggcaatcaatgctagacttccttagaagccaacttccagataaacaagaacaagctgaggcaccagtctgagataggtggtccacatgaagaaaggaaacacagattccgatgcaataaggggtttcggtatgccgtgggatgagtttgtaaaataagctcagcttaacaaaggcactactaatggaggaagaggagatctctgagtaatgaatattc

SEQ ID NO: 30767 - DNA, 295 bp, Glycine max
  Clone ID: LIB3051-032-Q1-K1-E1
atttatgccataagacgaatctactttgatgttcatacactcgttggacccgtggataagatgaagtaaaagtactattacccttgtaataacacaatctgcacttagtggacactggatggatgctatctcattacataacacgacggctgcgaataagtagctataacccttttcacgaattgcacattgtgttattacaagggtactagctctatgccttcttgcatgtcctgattcacatgatgaatccctcgtcgtggattactggtccacatgctttactgaggcgcgt

SEQ ID NO: 30768 - DNA, 403 bp, Glycine max
  unsure (1)..(403): unsure at all n locations
  Clone ID: LIB3051-032-Q1-K1-E2
gttgaaacctctgccaagagaatccaaccttaatttgaggaccaacaatctcaaagaacagagtccatagattgagggaatatggtagataataatcaatatctcttccagggcagttctgattaggtttacttggttaacagcccctagaactagaagtgtttgttgccaccacctgcaataatgttagtgttagtttgtattctatattgctcaagtgcgcctcgtatttctgtttttatagaaaaacttgtacatcttgattgttattgtggcttgaacgtatctatcttgacttgacataaatacttttctatttttttgacgtatatgtattgtttgattatttctgctgcaaccttttatttatttatttgttcatgtaaaaaaaaaaatnnaacat

SEQ ID NO: 30769 - DNA, 412 bp, Glycine max
  Clone ID: LIB3051-032-Q1-K1-E6
cccacgcgtccgcccacgcgtccgcccctgcgtcgcgaacgaatgaacgaagagcggagaacgacgcatatccaagactgaaagtttctagattcgtcacctgcgagaggtggagacatattttgtgataaccctatacccaatttggagcagtggtttgaaaagttttgggattgcggaaagaagtttgattgaaacatgcttcagattcggcttagtaaggctcctgcatcagaagggtcggcaggggtgaagctgtcgccggttgagactgttacagttgcgtgccctgaccatctggtccttgctgatcttcctgttgcaaagggcattggtgcggccactactgcctaccttgttaagactttgggccgtatgtcccgccgccagcttggcgagcgagtccatttct

SEQ ID NO: 30770 - DNA, 379 bp, Glycine max
  Clone ID: LIB3051-032-Q1-K1-E9
tatctttttgaccctcaaaacaaagtgaagcatatagtagaaaagaaacgaacacgggaatgcaaacgcgcgcagcgttgacaacaacaacaaaaaccaattaaccgaacatgaattcctattgggacaccggcgccggcggtggcggtggcgcgacgctcatcccgggtctcccaaacgacgtcgcggcgtcgatcctctcgatggtcccctactcccaccacgggaggctcaaagccacatgcaaatcatggaaactgcttctctcctcgaaatttttcttagcctcgctgaacggaaagaaccaccttctctgcatcttcccgcaagatccttcaatcgcttcaccctttctgtttgatccgaacgcgctcgcgtg

SEQ ID NO: 30771 - DNA, 412 bp, Glycine max
  Clone ID: LIB3051-032-Q1-K1-F1
acggtcatgcttcttccctctctctgctcttctctgcctctttgtcttccctctctttgcctggtctttgagtctttctcttccctctctctacctctttctcttctcttcatttccgatgttgcctcaattctcagtaaaaggagttcgttggtaccacacatacaaacgacgcatccttctctttctttcggcttcaatttctctctcctcttcctcctcaactcgatcccaattccactagggttagggttccatcaccctttccccttctcaagctttcctcttttatccgctattgttttcgcttattaattgatcattctttctcgttctgctcttttttggtgaatctaggattcaattctgatgcgattccgagcttgctagatccacgacaaggttccatttc

SEQ ID NO: 30772 - DNA, 408 bp, Glycine max
  Clone ID: LIB3051-032-Q1-K1-F2
cccacgcgtccggcaaacttcaacttgtaatcaagggagagagaaaatttcaagcgcagaaaatggcggagaagaaagtggtgatcctaggaggtggtgttgccggtgccaaccttgcaaaaactatacaacgtcaagccaacgtcacccttattgatccgaaggaatattttgagattccatgggcaagtttgaggggattggttgagccaacttttgctgaaaggatagtgatcaaccatagagagtacttcaaaaagggtaaccttgttgtatccagtgctgtcaacataactgaaactgcagtggtgactgaagatggccagcagattgcctatgactatcttgatattgccactggacacacagaaccaatccccaaaaccaggagtgaaagacttgaccaat

SEQ ID NO: 30773 - DNA, 402 bp, Glycine max
  unsure (1)..(402): unsure at all n locations
  Clone ID: LIB3051-032-Q1-K1-F5
tggacatatgaatgcaagaatgaacgggtttacatttcgagaccatcccggacccggcaacttaaaaaccctaaattgagggtgaatgtgtctgtgacttatgatttggatgataacattcctgatgctaaggtggaaaaggcaaaaacaagttccaaaaaaaccaaaaggaagcatcggaaggactctgattctggtagcgatagtgaggattctgtttttgagaccgatagtggcagtgggtcatcatctgttacggggtcggattattcttctgaaagtagttcaggttacagttcatcttctgattcagaggaggaacggagacggaggagaaagaagaagcagaagagaggaagacgcangaggtacagttcatcagaatcatctgattcagattct

SEQ ID NO: 30774 - DNA, 343 bp, Glycine max
  Clone ID: LIB3051-032-Q1-K1-F8
gtttgccaatcaaaggtgatttgattgaggccaaagttgtgcatgatcaactttggtcaatggctgagagatctgacagtgagctgttgggtccaaacaatcaataccttccaaaaatagtttcagtgtttgctgaggttttatgtgctggtaaggaccttgcaacagaacagacagctggtcgtatggttaatttactcagacagctccagcaaactttaccaccctctacacttgcttctacttggtcatctttgcagccccagcaacagcttgcattgcaatctatcctttcttcatagttttaattgctttgctgcatatccatcattccttaatagca

SEQ ID NO: 30775 - DNA, 394 bp, Glycine max
  Clone ID: LIB3051-032-Q1-K1-G11
cccacgcgtccgattttcttctactttatcctcatgaagcaactattgaaaacatatatcatcattgggagagggtgtgccttgttgacattggagaacaagctgttattcccgaaggcatcagcaagcatgtgcacaggagcagatattttattgcaggggggatagcaggagctgcttctcgtacagcaactgctccacttgatcgtctaaaggtggtcttacaagttcagactggacgagcttctattatgccggcagtgatgaagatatggaaacaagatggcttattagggtttttccgaggtaatggattgaatgttgcgaaggtagctccagagagtgccatcaagttttatgcttatgaaatgctgaaaaatgtaattggagatgc

SEQ ID NO: 30776 - DNA, 416 bp, Glycine max
  Clone ID: LIB3051-032-Q1-K1-G12
cccagccgtacagagcaccctcagcattcatcctactgaagcaactattcaaaccatggggcatcattggcagagggtctgccttgctgacattggagaacaagctgatattcccgagagcatcagcaagcatgtgcacatgatcagatattttattgcaggatggatagcaggagctgcttctcgtacagcaactgctccacttgatcgtataaaggtggacttacaagttcagactggactagcttctattatgccggcagtgatgaagatatggaaacaagatggcttattagggtctttccgaggtaatgtatagaatgttgtgaaggtagctacagagagtgccatcaagtattatgcttatgaaatgctgaaaaatgtaattggagatgctcaagatggcaagtcagata

SEQ ID NO: 30777 - DNA, 329 bp, Glycine max
  Clone ID: LIB3051-032-Q1-K1-G3
gtttcagatggacctaatagcaaaactacattacccatatattgtggagtacaaagatgcttgggtggagaaggatgactacatatgcattataactggctatggtgaaggaggagacatgtaagttgggtaatatctgttagtgacaccatggtttttagcttaaattaagtttgtgagtaatcaataattggggattaaagagattgccatggcctattaatatatgttagaaagtaaatgtgttgtgagagctatgtgtatgaactatattggtatagagtttaacactttgtgtgagatccagagtgtgatttacaaatctttaa

SEQ ID NO: 30778 - DNA, 396 bp, Glycine max
  Clone ID: LIB3051-032-Q1-K1-G5
atcactacctgcgtaaaaagtgtacttcactaaccattactctgactattactatgtcaaatctgcttcactggcaagaaacatctactttagaggaggactcgcttttcgtgcctttcataggatttatggtgggagcaagaggaatggtatccgccctcctcatttctgcaagatcagtggtgctgttgctcgtcacattcttcaacagttgcagaacatgagcatcattgaactggacaccaagggtggcaggataatcacttccagtggcctgcggcatcttgatcaagtggctgtacgcattgtggttgcaccttgatttgaaaactccataagcatattgaggtttttggtttctggttagagagatgtgatgataacagattatgctaa

SEQ ID NO: 30779 - DNA, 270 bp, Glycine max
  Clone ID: LIB3051-032-Q1-K1-G6
aaaaaaaaataaaaaaataaaataaaaaaaaaaaaaaaaaaaaaaaataaaaaaaagataaaaacaaaaaaaaaaaaaaaaaaaaaaataaaaaaataaaagaaaaaaaatttaaaaaaatttaaaaaaaataataataaaaagcaagaggaatgtttaccgataaaaattagattcttaataaattcagttaactagcccttagaattttaaaacacttgaagaacatgtttattgatgaaataaactcttatttttgggtgaatatca

SEQ ID NO: 30780 - DNA, 329 bp, Glycine max
  Clone ID: LIB3051-032-Q1-K1-G8
catactcataccatacaaattacctcactgaatggacgcatacgaggcacttattgtcactacgcatactctgcacactgctcctaatctctctcgtggcgactgagccatacaaagatgctacacatgcggaagaaccaacgacacggacagatgcctgtacaactgccgtaagcaccttacatggcggctgtcgtagatatggcagaagctagggacacgcttcaagctatgcacatcctggacactggccacacgatcctgcacgttgtcatgaatgctcataccatcagccaaaggcttacataacctgctaactaataaaagca

SEQ ID NO: 30781 - DNA, 413 bp, Glycine max
  Clone ID: LIB3051-032-Q1-K1-H1
gaagagagaggtttctattttacagagagaaactctttagagatagaaagtcagagacaagcaccacaagaagtgcctagcacccaaaaacgacgccacattctggataaaaatctaatcttgatcggtcttagatccattgagtgtgtgcttgcacattatgattatacgtgggtcaacacccggatgagcacacagcagaacgacaagggtgtgaagagatgggtatgatcatgaccctttagatgagtcacatgcccatctagctcactagttccaatcgagttcattatcatgtatgatatgaactatgatcatgtgggtcatgctagttccatgcgatcgacgagatcgttcacattacggttccattcagacttatggaagatatatattgcgtgatatatgagtca

SEQ ID NO: 30782 - DNA, 433 bp, Glycine max
  Clone ID: LIB3051-032-Q1-K1-H10
attttcctttcactttccatcactttctctcgtttccccttcgcaattttcccctcggaagagacatcgaagaaaatcacgtcacggcaatggaggaaaagcacgcagcagccaatgaatctgcacacgccgaatccaacggcgtctctcacggcgccgaccacggttggcagaaggtgacctacgctaagaagcagaagaagaagaccgttaacgccgccaacagcgccgattcccgtgcgaattccaacaagctcgttccgaacggcacgctgtccggcaacgatggcgttttccggtcgctcgagctgcagtcggaggaccggccgccggaaaattgtggaggcgaagaagctggccgatgccgcgtacgacgacgaagacgcgccgttcagatcgaagcagcggcaccacgacgacgacgaatacgact

SEQ ID NO: 30783 - DNA, 432 bp, Glycine max
  unsure (1)..(432): unsure at all n locations
  Clone ID: LIB3051-032-Q1-K1-H12
tcgaacattttgaaggcggtcatgtgaggtactgtggtttattattatcaatgccctcaaggttggcattttattgataaagggaggcaaaaagtattcagtggatgtgaaattaatgatcaacacttcagccttgggaaaatccagatcaaaccagtccattttggtcatttcacctgtgttgattgaaacaatctgtgcttcaaagggttggtcctcgtatctagaccattctttggggagtagtccattttcttttcgtgtagccataactagccttcggtgttgatgaatgctgccacggttgctcaaatgaagagcaaggtccctcaatatatcatgttgagtgacagaaatctcaaagcaactgctatacatgcncncgacacgtgcctctagtactatagtgagaagattcttgtttgaaagctc

SEQ ID NO: 30784 - DNA, 397 bp, Glycine max
  Clone ID: LIB3051-032-Q1-K1-H2
gtagaacttgacatgcactcagatgctgttcatggccttaatcagacattaattgaaacggtcattgaaattggttctgttggaaagggtctcagtcaaggtgttaaaaacttttttgctcatacaaaaggggattcttctgccacaaatcagacagtggctgccttgaaacgtgcacaggagtcactgatatctgaaaacataaagatagcatctgcaagtgcctcaaatcctgggatacctccatcctctttaatgtcctttttggaaaagaatcctgcaatctctggtgttgtcctagaagattttgactctgtctttgtcaacaagttctaccatagtcatcttgatgatttatcaaatgtaaattcgtcagctgtagttgctgctgcttctc

SEQ ID NO: 30785 - DNA, 414 bp, Glycine max
  Clone ID: LIB3051-032-Q1-K1-H4
ctctctcttttcttcccattttgccccttcctcctttccttgtttccgaggagggccaaccacatatgctaaacaaggaaacaaatttctaacctccttcagatctacaccacccttctctttttttccagtttcataaattctacaccatgggcacggaggttctacggccacaagattgtttcacccaccgcatcgctgttccaccggcggggttttcccggagaagaacctctgggacacacaacaacaattacttcaggggcacgcggaagccggttacccgacccgaacagagaaaacgggttgtggagaaaaggcccagcttcgatgattcgaggttttcgaggttggagatggagaaggtcaccattctccggaggggggagtcgctcgattcgaagctgaaaaccg

SEQ ID NO: 30786 - DNA, 309 bp, Glycine max
  Clone ID: LIB3051-032-Q1-K1-H9
gtctttgaccccagcaaacagcaagagagaaatggaagcagcatcgtccacaatgctggtactgatactaattctagctctgatatgctcacggaaggttctgtactggttatggctgagactatagatactagcataactgctcaaatagcaaggtttacgaggcatttcatacacatgcaccttgaaggactacacgtagctcacaggattatgaaatgtatacgatagctcatgaatgtgatggggactttcacaggggcatatggggtttcttgtttgaagtgattggatttgaagcattatgag

SEQ ID NO: 30787 - DNA, 386 bp, Glycine max
  Clone ID: LIB3051-033-Q1-K1-A10
ctttggggagtttttcttcacccttcacaagcttccgttccgcctcatcatggttggaggtgtacgccgctttctccacattcatgatgcttctgagaaccgcgatcaacgatctcataccccaccaagttcgcaccttcatagtcacaaagataaaggctttgttctcagatcgccaaaatattaaccaggtctcactccagatcaacgagatttgggatggccaaatcaaccagctcttccaagccgcccaagagtatctccctgctcaaatatcccactcttacaagtccctcaaagttggaaagctcccaaagcacaagaacattgcggtggcagtggatggaacacaagaggtcgtggatcttttccaaggcatcaagctc

SEQ ID NO: 30788 - DNA, 386 bp, Glycine max
  Clone ID: LIB3051-033-Q1-K1-A11
aaaataaatgaagagaaaaaggagggtaaggaggtgacaaaagaaaaagactaaggagcgaaagtaccttattttagctgggcatgattctaaactgatccgaaaccaacgaaaaaaagcggaagatcatgcaaacttgcacttaaaagctggtttttgcctcattctcttccttctgttagtccacgcttcatgctattgcttcctatctctttctcatgaccccttcatggagtccactttgctcaccaatctactagtcttcaacaacaccctccaaccagagttaatgaggagtgtgcatgtgtaccgccgaggggatggagagaaaagggaagttgagagagagtttgtgttttcagagagcggctcctatggggaaatgc

SEQ ID NO: 30789 - DNA, 292 bp, Glycine max
  Clone ID: LIB3051-033-Q1-K1-A12
catttacagaatacatattcacacacagtctctctggtgtaggtgcgttttgagaccggagttgtcacttgataggtatactgacccattatacaccttcgcttctgaatcgaatgaacctaagatggtaaatgatgcattcgatcagactcgtatcgctcacatgcatagtaactgtgtggaggatggaatgcagaccagtgacgcatgaatgatagtgatctaagagccctatcatgcgtgatctacttcatattgctattggatacacgttgtgcaaactagtaagcgg

SEQ ID NO: 30790 - DNA, 313 bp, Glycine max
  Clone ID: LIB3051-033-Q1-K1-B10
ttcactcgttccaaatattgatagtctctaatcgatagatatttatattactaggaagggttagataatgctcattatgtttgcactaaatacattatctcataataaagttaatttatagaatattcttttgagtttgcatatcagaattcagtttcaccatattacctgcttttcaaactgacttttcattttctaacttcttttacagtgaattgcttaatctataacattatattattaattcaactcattatactcaaaatagacttttcttacttctgtttttactatctatccttatcttaatttc

SEQ ID NO: 30791 - DNA, 288 bp, Glycine max
  unsure (1)..(288): unsure at all n locations
  Clone ID: LIB3051-033-Q1-K1-B11
agcgtncgccaaatactaatgttaaataccctgccaatactccatcatatcatgctggcgaattgaagttttgatggggttgagatcatgggctcatggctacctgctgagcatttatgaagaaaagtgatgaccgacagacgatatgtggatcctgagaaccgtgcgattgcttggaagtgttgaagctgtgtaatgagataggggcggcagagtggaataggctatcgcattcgcagaaattcagagtctggagacttaatcaaaagaatggggctttacatgatg

SEQ ID NO: 30792 - DNA, 402 bp, Glycine max
  unsure (1)..(402): unsure at all n locations
  Clone ID: LIB3051-033-Q1-K1-B9
ttcaattcttccttggtattgttagtctctggtcgtttgttatttattttacttgtaatgttttgatgatgctcattttgtttgcactagattcattagctcagaataaggttaatttatagaatattcttttgagtttgcagatcagaattcagttgcaccataggacctgcttttcaaactggggtttcagtttctaagtgggtgtccagtggtttgcttaatctagaagattttattatgaattcagctcatttgacttaaaatagacttttctcagttctgttttgattttcttcccttatctaatctgcacaaacatgtngtcccacttttagctgtagttttgttaactaagcaagaatagttctgttgtgttcataaaaaaaggaaagaaaagaa

SEQ ID NO: 30793 - DNA, 338 bp, Glycine max
  Clone ID: LIB3051-033-Q1-K1-C11
cccacgcgtccgcacctcgcgcgatatggtattgtccctttccatttcccattaggttcgtctcctcacgcccgctcatgagccaccatcgcaacaaccacgctgcgctcactgtttcaaccggcgatgcgaatcccgatgactgtcaccaaccggtcgatgctcccctttccgcagcagaacagattagggttagggtttcatcggaggacaacgcggcacccgcatcctccaccgccgatcgcttcgaccgcatcaacatccacgccgcgtcgagcagaacgtctgaattagcaagattcttgaactccgaggtgaaatcgcttgctatcggaatt

SEQ ID NO: 30794 - DNA, 424 bp, Glycine max
  Clone ID: LIB3051-033-Q1-K1-C9
ctgattctatgcctacgtcttcctccaaatcacaacacacccaattacaccctctgttctctgcaaatgcggtgaaggagaacacttggctttaatttggatctggatatggcgattgaagcacagttgtatcccaacaatgctcctccgtttccttttcacgtgtcaagggtagacaaatctccagcagcatatagtcatagtcacaggcaacaacaaccaggtggctggcagatgaatcagaacattcctcttgttcctcccaacttttcttgtttttccaattccaattccaattccaattccaatgtcctccaaaacgccttcaataagaatgttgttcagccttcagcctcatatcctcaatgcttggctattgagtttgatcaacagagggagattgatcaccatatcagatcacata

SEQ ID NO: 30795 - DNA, 422 bp, Glycine max
  Clone ID: LIB3051-033-Q1-K1-D10
ctcaccctgatttgatacatgcattccaagctgccgcagttgctgggggatctggaagttcaggtgcatctgctaacaaatctctcaatgctgcagtaatgggtgaggcactgcccagaggaaggggaattgatgaaagggctgcacgtgcagctgctgaagtcaggagaaaggctgcagcaaggggcctgatgatacgtccccatggtgtaccagtccaagccttgcctccccttacccaacttctgaatattataaatccaggtgtgacttcagatgctgtggacaatggaaatgcagatcgagtaaagaaggaagcaaatgacattcctccaagtgatctaattgataccaagaaaggccaaacaactcctgtgcaacaacaggaacaagctccggttggtttgggcaagggcttgtca

SEQ ID NO: 30796 - DNA, 378 bp, Glycine max
  unsure (1)..(378): unsure at all n locations
  Clone ID: LIB3051-033-Q1-K1-D11
ctctctcccaacaagagagcgaacgagcccattcctgtttctccaccaccgaacacacacacgccctttgcttccggcctcacctcgcgctaacctgcaccccccttcttatcctgcgcaccccttctttatccaattctttcctcagattcggagcaccgcgcgcgccaccattgggaaaagaggttccggtgctgggggcctagggttagggtttctgagagatgtgggatgctccatgcattgatgagccttatcgcgcgctgttggaagccgttcgggcacggtgacgatgccggtaatgccgccgccggaagagaatgcaaggacggcctnctctggttccgcgacatcggaaagtttgcagccggcgatttc

SEQ ID NO: 30797 - DNA, 392 bp, Glycine max
  Clone ID: LIB3051-033-Q1-K1-D9
cgcactcttgcagatcgaacgcacccaaagaaaccctgctactgccaccgctctagctagggtttcattccacccactcccaacaatctcccaatagaatgctgaaagagaattgctgattatcgcttcactcaactctaccaaatcgcatcactgaccaatctggtggagccgattccacagtagatgacatgaaaccgtgcttgcggacaaagcctcttcttcttctgctctctctgctacttctccacaacatcacattcgttctctccgatgattccagcatgaaaaacaccttccgcgagcgcgaagccttcgacgactcacctcgataccccgaaatagatgaggatgcacttgtgaattcaaagtgccccaagaatttggagctc

SEQ ID NO: 30798 - DNA, 420 bp, Glycine max
  Clone ID: LIB3051-033-Q1-K1-E10
agacatggcgaaatcggcgtcgaattctctgatgcagagcctgaagcggttcataaagaagccatgggagatcacgggcccgtgcgcggaccctgagtacaaatccgcattgcccttggccgtggagtaccgcctcagctgccccgccaccgtcaaggagaagcccatcatccccaactccctcccggagaccgtctacgacatcaagtacttcacccgcgaccagcgccgcaaccgccctcccatacgacgcaccgtcttgaagaagcccgacgtcgagaagctcatgaaggaacagaccttcgccgtctccgactttccgcccgtttatctcaattccgccgttgaggaggacatcaacgctcgcggcggcggataccagtgactcacaggtttgtgctattgtgggatgacattatt

SEQ ID NO: 30799 - DNA, 420 bp, Glycine max
  Clone ID: LIB3051-033-Q1-K1-F12
atcgccagcaggcaaaccctgtcaggcgaaatgactatgagcaccctagatcacatacgtatgaatgaaatcactatcaatgccgtgactgtagttcaaggcatggatatcactcatcatgaaataatcacaacgctaggtccaatacttcacctggattataccacagccaaagcttcacaacctacagctcattagatttgaacttcacgaaacagctagagtcagcacaggcatcattatcagtgttcagccaatcaacattatgtgctagatagaagaggatacatgcatcaacttccaccacctgactacagctgcagatcaatccactctggtcacggaatatcctatcctacgaattgaaaactgtagtaccatatattggacttgcatgcatcctattaactctagtcgaga

SEQ ID NO: 30800 - DNA, 317 bp, Glycine max
  Clone ID: LIB3051-033-Q1-K1-G11
cggacgcgtgggtttccggtgaccttgatgttgctaaggatgctcttgtgcaagcacttgcacggctaagagcaaatctttttgataaggagcgtgctgtctcaggattccttccggtgcttccatatcttcctgcttcagttgatggatcagatggtttgaactatgacagtagagatggtaaacgacatggacgtggtggatatggcggcggacgaggtggctatggtggcgggcgtggtggctatggctgctggcgtggtggcagtcgctatgactatggtcgtactgaacatatcggggctgtggttgatgct

SEQ ID NO: 30801 - DNA, 421 bp, Glycine max
  Clone ID: LIB3051-033-Q1-K1-H10
ctcaccgctgccgatgaagatctccggcgactccacccgccctctgcgtccatggccgccggccattgcagccccctcgccggactccgatctccagccgctccggagggccacccgccgccatccccgaactccgtccacccgcctgaggcgcgccggaggacacaccggaaaacggagcaggcccgaaacccccttgttcaagtggaagatccacgacggcgtcagggagaggagcgtcggcggcgatccgctcgaggaggtcggccggaagaaggaggcgccgccccatgcctccgtgtcggcgaggaagctcgccgccgggatgtggcggatgcagctgccggaagaggcggcgggtgatagtggaaggcgaaggggttcgagaaagatcggtgaagatcgtttgggagttcagcat

SEQ ID NO: 30802 - DNA, 397 bp, Glycine max
  Clone ID: LIB3051-033-Q1-K1-H12
gacaacatagctgccattaaaaatatgaggcagcagcttgaaactcgcatagagtcgcaacacaaggctcacatggagatgcttgcttctatgcaaactgtaatacctaatcttgtttcatcccttgacctttctctcaaggttgtgtcttctttcaaccgtcgtccttttgctcctacaccttctctgcctcagcctgatccaaaactgagtcccaaaaaaccggttgaactaactcaccgtttcaatgcggaaacctgtgctgatggctctattgaggcaaacttgacaaatcccaagaatcaaaagcccaaaacatctatgcattcaaactcagcatttcaagtagagtctgagaaggttagtccattagcggtggttcgatcaatggtcactg

SEQ ID NO: 30803 - DNA, 422 bp, Glycine max
  Clone ID: LIB3051-034-Q1-K1-A10
cagaaactggtcatgatgctgaagaacacgaaagcactagcagtgaggagcttgatgagttaccaatttccagtgacatgcctcacctttatcctcgtgacttaataacatgtagtgatgctgtgtctaaatggcaacttaaagggaaaaggaataatcggaatcttgtaaagaggtccgttggtgcttctgatggaaaatgtattatgtatggagcaagagcagatgttgaaggaaggaatggtcatttaaagcacaatagaaagggtccaagtttgcactgctacaaatttgattttggtgatactttggatgatgatgatcaaatttttggactggaagatgaatattctctaataacttatagatctatatcaaaaagtcaaaataaaattcatcatggtgtagcttggaatgatttg

SEQ ID NO: 30804 - DNA, 435 bp, Glycine max
  Clone ID: LIB3051-034-Q1-K1-A3
cccacgcgtccgggaaaagcacgcagcagccaatgaatctgcacacgccgaatccaacggcgtctctcacggcgccgaccacggttggcagaaggtgacctacgctaagaagcagaagaagaagaccgttaacgccgccaacagcgccgattcccgcgcgaattccaacaagctcgttccgaacggcacgctgtccggcaacgatggcgttttccggtcgctcgagctgcagtcggaggaccggcgccggaaaattgtggaggcgaagaagctggccgatgccgcgtacgacgacgaagacgcgccgctcagatcgaagcagcggcaccacgacgacgacgaatacgactacgatgacgagaatgtggaccgttctgcggagaacgggaaggccgaggaggcgaagaagtgaagcagaagaagccgaagaagcct

SEQ ID NO: 30805 - DNA, 438 bp, Glycine max
  Clone ID: LIB3051-034-Q1-K1-A4
cgattgcaagcaatggactccttcaattccttcttcgattcaacaaaccgatggaatgacgagactctcaaaaacttccgtcaaatttctccggtcgttcagaatcacctcaagcaggttcgctcctaatttttacggttttatgattgattttgattccttcatcaattagcaaagaaattctaaagcgatggattttctaggttttgccatatcgcgttaacaataatgtctcctatttcgcacgtgtcaatttttgtgatcttagggtttacaacaattgaagttatagaatctttaatttgcaagttccttgatatctttaatttgtaattgtgattgattgcaggtttattttactctgtgtttcgccgtggttgctgcggctgttggggcttaccttcatgtcctcttgaacattgggggttttcttactac

SEQ ID NO: 30806 - DNA, 127 bp, Glycine max
  Clone ID: LIB3051-034-Q1-K1-A5
aaaaaaaaaaaaaaaaaaaaaaaaaaaaaaaaaaaaaaaaaaaaaaaaaaaaaaaaaaaaaaaaaaatataaaataacaaaataaaaaaaaaataaataaaaaaataataaaaaatatataaattaa

SEQ ID NO: 30807 - DNA, 440 bp, Glycine max
  Clone ID: LIB3051-034-Q1-K1-A6
ccctctgccacgttcatctcccatttggtggttccttccaaaaattgagggcattctagtaaaactctaacacaacacacacaccaaatctgagagctggatttatgtctctgtttacttctcattggctgcacctcttcacaaactagatggaatgttattttataatccttctccatcttttctcttgagccttccttcccacaccaatcttctccaccacttcacacaaccttaaatccaacccaaaaccaaaagaaacacacacactcagaaacaccaagagaagaattttatttttttcaagaattcgagaagttggtgtgatctgatgctagtgtttcgaagataatctgagaagaacaaaaagagaaaaaagtttgattggtttctttttccaatggagtcagatcttcggcagcacccttccatgtttttgg

SEQ ID NO: 30808 - DNA, 313 bp, Glycine max
  Clone ID: LIB3051-034-Q1-K1-A8
gagtttttgtgtgctcttggattggttgttagaatggagggtcagagtaagggtagtgttaatgtgatggaagggagtgagggcaaaggaagggagtttgtggtggaaaagtctgcatcatcaatagtgggaacttgtgatttggttctaaggattttggcctttttactaacccttgtggctgctgtagttattgggacagataagcaaactgccattgttccaatcaagcttgtggattctaatccaactttgtacgttcctggtgccactaaatggcattacttggctgcccttggctattatgtggggg

SEQ ID NO: 30809 - DNA, 419 bp, Glycine max
  Clone ID: LIB3051-034-Q1-K1-B1
cgcatttacactttttattcatttctctctctctctctctctccttcccgtgttcatgctgggcgggcgagaaccccacctgctccggcagcagctacagaacttagcggcaggtgaaatgatcgaacttgcagcgtaattatttcagtccagctgaaattgaaagtaactgctttctgagattctgcaaccgcatgaaaccctagaaatgagtgccgcaggtggtgcatttggtggcaatagggggctccgtccagtgccttccgaaaaggggatatttccattggaccacatgcatttgtgtgacctcgagaaaatagaatatctcaattgtctaaagactgctgggcaccagtctgaaaaatgcaggcaattctcaaaaaaatacctgcagtgtcgcatggagaagaacttgatgg

SEQ ID NO: 30810 - DNA, 441 bp, Glycine max
  unsure (1)..(441): unsure at all n locations
  Clone ID: LIB3051-034-Q1-K1-B2
gtttagtatttgggtccatgatgtcaaattcaaatattttttttttcaaatatatatagagtggtggcatgttagtttgaacctgtgacctcctgcccccagaaactaaccaaaccactcaccactaacccaagcacagtggcttagttcaaatggtttttaaatgcgagaattgtaaaacaatgactattcttaaatgtcttaatttccttctagtcttcctgctataattgatgttactcgaaagcagtctaatatataggtgacttggccgtanaatagctgaggaaaatttatttgatgttanttgaacttttctttggcttatttggcaatgaatctaactatcaatttgtcattaaagagattcatatattgtgtaagtgaaatagcttttaataggaaataaggttatggagtaagaaaatgtacattgtgcaa

SEQ ID NO: 30811 - DNA, 386 bp, Glycine max
  unsure (1)..(386): unsure at all n locations
  Clone ID: LIB3051-034-Q1-K1-B3
ccgacctcggctaaggtgcgtaccccttatatgctatacgtcgtttttcaagggtgcgaaatgagattagaatctaactaataaaatagtgaagacatgagtaatggcacaatcaacacaagacaaagatgaaactggagtgttgttgttccaagttgccgccgccgcgttcatcctaggccagaatgaggcggttgcgttgcgttgttgttcctcctcggtgagtattcagtgttgttcgatctggaatggagaacgtgttttatcatgattntcattgttaataattttaaagaagcgtgccacatcatcgtcgacctcttctgaactagacaagaacacgcgtatgtgtttcatttcaaaaaatgtataccaattttattttg

SEQ ID NO: 30812 - DNA, 381 bp, Glycine max
  Clone ID: LIB3051-034-Q1-K1-B4
attccaacaacaccacaatgggaagaagaccggcgaggtgttaccggcagataaagaacaaagcgtacccgaaatcccgtttctgccgcggcgtgccggagccgaagatccgaatctacgacgtgggaatgaagaagaaaggcgtggacgagttcccgttctgcgtgcacctggtctcgtgggagaaggagaacgtctccagcgaggctttggaggcggcgcgcatcgcatgcaacaagtacatggccaagttcgccggaaaagatgccttccacctgcgcgtgagggtgcatcccttccacgtgctccgcatcaacaagatgctatcgtgcgccggggccgacaggctccagaccggcatgaggggcgcctttgggaagc

SEQ ID NO: 30813 - DNA, 174 bp, Glycine max
  Clone ID: LIB3051-034-Q1-K1-B6
cttagctagatcagacactctgatctgaaaaatgagatccaaagatagactaatgctaggtatgttcatagccactatgctaacgatctcctctgaggatgcacccgatgatgcataccacaattatcacaaatcaaatggctagcgtatgcaaatggtgtagatgaaagcaaa

SEQ ID NO: 30814 - DNA, 224 bp, Glycine max
  Clone ID: LIB3051-034-Q1-K1-B8
cccacgcgtccgcccacgcgtccgcacattggcgtagacaacagctaatgatggatgagatatctgctctttcctctcccaactggaaaaattccatgcctaatagtccatcttttcgtgttcctttgaatgatcacactggggagttaaataggctttcaggggtgaagcctgctaaccttgaagatatgtttggatcgctcgatccatcaattttgtctaaa

SEQ ID NO: 30815 - DNA, 263 bp, Glycine max
  Clone ID: LIB3051-034-Q1-K1-B9
acagattcagtcacctaccgtcctacccttttctctctcgccgcctcttcttctcccgcgcgcatactcaacagaagcccaaaaaaggggtctttagaaggttctgattgatgggcaggagaggggtcaagctattcgatgaagaaaagaacggtcttttttcaatttccaattttgggtctcaatggggtggtggtggtgttcacgaccctgtgaatttggctgtgatggcaagcattagtcgaatgggaatggggtttggt

SEQ ID NO: 30816 - DNA, 431 bp, Glycine max
  unsure (1)..(431): unsure at all n locations
  Clone ID: LIB3051-034-Q1-K1-C10
agagaggacacagcgccgcgccgcctcaacaactgaaacaaacactatccctaatccgtttcttcctctctgcacgctcttgcctcctccgatctcagtactagcccatgcgattgtaaccgctgttgcacttgcttcttcaccttcttcacactattctctcactcactcttcttcgtttcggttcttcagatctcttctccgattccagaacctacgcactgcattggaagatacaagaatatcatcagtttctcctattcattaactccagttactcactgaagataacattggaagcattgggcaataaaaatgagcaattcctctgctggaacctcatcaaaaccaagagcagcttcctcacaaccatcagaaacttcgtctaagcgcanaagaggagntttccaaaaagaatcacatgatgtatg

SEQ ID NO: 30817 - DNA, 218 bp, Glycine max
  Clone ID: LIB3051-034-Q1-K1-C11
tattatacatacacaccttttaaaaaaaaaaaaacaataatctataaatatgcttactttgaaattctatcttacatacaccttcttacaacaacatatctcatatataatattacctaaattcatatcactcaccttctttttaaaacttcttatctataaaaaccctaactttacccaacttaattacctctcaatatattcccatttcaccattt

SEQ ID NO: 30818 - DNA, 426 bp, Glycine max
  unsure (1)..(426): unsure at all n locations
  Clone ID: LIB3051-034-Q1-K1-C2
aaaagattgaagtttcatgtagttactttttcatcatccattgaactgaaccttaaattaattgtagaaccatgtttgcaactaccaattcctccactttgtcacctttattctctttcagtagaacaacagcaacctctctgccttccaaacccacattctggaatttggttccaatgaaacaatcttcttctccggggcacttggccttagccttagacaatccacgtagaacacttcacgtgtcttggggctccacatcaccacatgctttccagagatcatcaattcaagggggtgaagcttttttcaagggtgggttggaaagtatgcaatctggttacttgaacagaaatcgtactgctaaggccatattggaccttgntcactctgctgagaataactcattatgctatgatcatcttg

SEQ ID NO: 30819 - DNA, 448 bp, Glycine max
  Clone ID: LIB3051-034-Q1-K1-C3
cccacgcgtccgcctaatataaaatcagctttgcgttccaaattaccaagctttcatgtcgtaaagcagctcaccatatcaaatattaaagaagagatggagaaaacattgcattggctggttctgattgctacaaacacggccaaagcacatcatggttttggttgggtaggggagtgggcaagcactggttctgagctaaataagaagaccatgaaggctgatgtgatgcggattgaaacgcttcaccatgccgataaagctaaagtagaaaattatattcttgaacttctcatatggcttcaccgcttggccatcaaaagtaaagatggcattgataccggagaaacgaggtctaccttaaagtctcatgttggcactgccattcaaactacaagtcaacaatcaacaaaagccttactgccattgttaacaactgacgagcaga

SEQ ID NO: 30820 - DNA, 258 bp, Glycine max
  Clone ID: LIB3051-034-Q1-K1-C6
cccagcgtccgcgcagaggaacgggatcgggtctcaataaaaagggtcacagcttggtgtttccagtgataatagaaatatcgaggcactgtttttgtattctagaagtagaaggagagagagccctagttcgcgttctcgtcacacacgaatgcttctttgaccatggcttccacagactcttcgctcctccgagcttctacgtccaaactttcttcttactactccgcttgtctatctagaaccttcgctcgctac

SEQ ID NO: 30821 - DNA, 312 bp, Glycine max
  Clone ID: LIB3051-034-Q1-K1-C8
ggataatattccgtgttattaaaatttaattaatatagagagtttttataataggggaggattttgatataataatatatcatatgtgtaggttgttgttttagagaatagagatagagaatggccggctggctggagaatcctgtccagaactcacatcacatgagctgacctttgtgtcgcttatttttcacaatatatggcttactattatttcaatgaaatacagctgatctcattaattatggtcgtgcttacgacggtgacactaacaagcaacatgatgctactgttgcctgtccccgaacacac

SEQ ID NO: 30822 - DNA, 445 bp, Glycine max
  unsure (1)..(445): unsure at all n locations
  Clone ID: LIB3051-034-Q1-K1-D1
tattcaaatttcaaaacaaggaaatggagtcactacttcccaagtcaatctacggtggcatcaagagttacttgagaaggcggcgctaccggcgtctccacggcggcgccaccgtcgttagaaggaagatggcgatcatccgcttgagagggccacgtaggtattggaggatcagagcagttccaaggcttagatgggtgatgagatcaccattgacgattttgacaaagctcaagaatgcttatatgaactttatgttgaagctgtcagggaacgtangtgctatgaacagtgataacatctttgaagtgaaacggattccaaaggctcgtcaagtgtctaagggctattcccgtgatgaatttgaggccaggctcatttttgagatttctaagaccttggttgcttcctatgaacttcatcccatgtangtgtgttctatata

SEQ ID NO: 30823 - DNA, 330 bp, Glycine max
  Clone ID: LIB3051-034-Q1-K1-D11
gttatgccagctggcttgcgaactcttgccaagccttacgagttggagcatgccatagatcctaggatgcatgacacacagccacataccgatattggactggggaatgcccatttacaagatccaaagcttgaccagtctgatccaaacactcattaaacttggccctgcacgtgagaatgacaagcaacatcttacatggcaacctaatgcttgcaaaggaatttcacaggtaagtccagcattcttgccaaataacgtgcctactggtgcacctacaggactaccagttgcagtagacacagaattggctatggccatcactgcatc

SEQ ID NO: 30824 - DNA, 265 bp, Glycine max
  Clone ID: LIB3051-034-Q1-K1-D2
cttggagatgttcatggtttttgttttgcggaaatgacatacaacctagtggagacctgtagaagctcatacggaacccaagagaaagggaataaaagagggatagaaagaagtctcaagtttaaacttgtactctcgtattgcaaagtatgacactattccgaagatgtttcaatcgggagggatagaaagaataagtctcaagtttaaacttgtactatcttattgcaaagtatgaactattcctaaatgtttcaatcggact

SEQ ID NO: 30825 - DNA, 320 bp, Glycine max
  Clone ID: LIB3051-034-Q1-K1-D5
aattccgagccacgcgtacgcattcaaattctataacatggaaatggagtcactacttcccaagtcaatctactgtgtgatcaacagctacttgagaaggcggctctaccgtcctctccactgcatctccaccgtcgttagaaggaacatagctatcatcctctcgagatgtccacgtatgtattggaggatcagagcatttccaatgcttatatggatgatgagatcaccattgaccattttgacaaatctcaagaatgcttatatgaactttatgttgaagctgtcacggaacgtacgtgctattaacagtgataaca

SEQ ID NO: 30826 - DNA, 235 bp, Glycine max
  Clone ID: LIB3051-034-Q1-K1-D6
aataaaaatataaataaaaaattaaaatataaaaaatacatatcaaactaaaaaaaacgtgataaaatctcatactcggtcttaaatatccatacttactttcacgttcataacaacatcttaactttaaactaatactaccaaatttcaatacattaccctatttctaacaacattcattctagaaaaaccctaacaattcctatctacaataaactttatactatttcatttt

SEQ ID NO: 30827 - DNA, 438 bp, Glycine max
  Clone ID: LIB3051-034-Q1-K1-E1
gataatttcttcctacttaacaaaaagatagtaagagccatacggtatcttatcccataggtcaccatgatccttccattagaagttgcaataacgtgatagaaatggctttgagacactttcttttatggctagctatatattctgaacccgatcccccctcacaagacttttaaatcacacaattcttttttttttttattgtgtatccaattccaaattcacccgtaaaataccttcctttgtctcaccagccatatgtgtatgatggaaggagatgagaatattcaagcatcaacaaaaggaaaaaatgtggaaagcttcaccagcttggaggcaccaaggaagaaaagcaagaagatagaaaacaagaagaggtttagtgatgaacagataagatcactagaatgcatatttgagtcagagtcaaagcttgag

SEQ ID NO: 30828 - DNA, 416 bp, Glycine max
  unsure (1)..(416): unsure at all n locations
  Clone ID: LIB3051-034-Q1-K1-E12
cccacgcgtccgtgcgaaattttgaagattcaagtattcaacgttccagaagagttctttgtttacatttatatatagcacctgaaattggctttggagttcttatactgtttgtttgtttggttttgaaattctggattttggattgtgttctgctcagttttgttaaagagaaagtggngtttgagagttttggcattatttattattagcgtgtttggttccacattccagataccccagacgtggtttttcgcgtcagctaagaagctggtagttgtaactttcacatccctgacgtgatttcttacttctcaacagagaattgagttgatggggggtaacaattctaaggaggataataacaattggaggcagaattcatctgtgcgttcaagttcctctgcgtcttcttg

SEQ ID NO: 30829 - DNA, 412 bp, Glycine max
  Clone ID: LIB3051-034-Q1-K1-E8
caacggtggaagaaatgtgtattggctccgaagctggcatggtggtcaaacatggagtcctaacctaggctaggttgcacagattcactgagtgcatgtcgcatgctgccctgtctctacaaaataagagataaaatatttatctttcgatctggcaatcgcagccctgatagccgtcagcacaggtctatggtatacacatgaaattcacgccttcctccaaattcttaggcttttcaaatcacttccactcccttctcgcaccctctttctctccgaccccaaagttctcatcttccttttccgccaccatgtccactctttccactcagaacgacaccgtcacccacaaaacgcagcaacctttgcagattgcaaagcgcttagagaaatttcagacaacaatcttcac

SEQ ID NO: 30830 - DNA, 423 bp, Glycine max
  Clone ID: LIB3051-034-Q1-K1-E9
cccacgcgtccgcccacgcgtccggattctgattcatgcagtggcagccacctctctggtcttctcttgtcttttgaatcgaatcaaatcactgatccacaacgacatggcactctcgcgtcttcgtcaccctctcttctctcgctcccttcgcatcctctcttctcccgccagatccctctccagaacttctaattcatccatttttaccctcggaggtgatcatcacaatataataaggcctgcattttgctccaggcttactggaattcatgatagatctttgaagtcaaagtggactgatgtcaaatacttttcatcttcagattcttcacatgaagtccttgggatgcctgctttatctcctacaatgacccaaggtaatattgctaaatggaggaagaaagaaggagaaaagataga

SEQ ID NO: 30831 - DNA, 442 bp, Glycine max
  Clone ID: LIB3051-034-Q1-K1-F1
cccacgcgtccggaagcgggatgctcagggatcaggatctgacagtagttcatcagtgaataccggcaatgttgctgctcctgttggtcgtgggttcacctacatcagaacagaatctaagcccgaaggcagcttgggtacgacaacatagtttatttcttaagatggtgttggactgcgatttcatcagagtgctttttcatgtccgatggcctaaaaattggtaaaaaaaaaattattgatgtacgaagatgcctgccctaaattttcgattttttcatatgtacatggaagatattttatatctaagtgtctatgtaagtaaagtaatgacctttctaaaaaaagaggtaaatgacgttcaataatgtttatttttttatgtcatcggttgaagctacaggggaggacattgattttgttagagtgcacagatgagaag

SEQ ID NO: 30832 - DNA, 405 bp, Glycine max
  Clone ID: LIB3051-034-Q1-K1-F11
cttgattctcccggcaatgaaagcttcggagagcattttttttccagccagaatgttgagtggatttagtgtttaactttgagatctgctgtgcaaaatctgttagccaaaatccaatattagaacagtaatttattataaatttggagtaagatgtctggtgaatcggctcccaaacccaaaccacgattagtgttatgtcctaaatgctggcaacttcttccagagtctccagattatgatgtgtacaagtgtggtggatgtggcaccactctttaagctaagaaacgaagaaatggggcttgtaactcagaatccaacacacatggaactgaatcatctcctagaaatgcattggacaaggtatccagtacacgtgaaactgatgcatctgctggtaatgca

SEQ ID NO: 30833 - DNA, 438 bp, Glycine max
  Clone ID: LIB3051-034-Q1-K1-F4
cccacgcgtccgcccacgcgtccgagagtataaatcctaggttgcctccacctttgttgtcgaaagaagactggcgtgttgcacaaaggtttcatggtggtgggtcttcttcaattgagggatttggggactggaggaagaatgtagctcccaatggcgatagttcgtctctattttcaatgcagccaggattttctgtgcaacaggtagagaatgatttgatggaactgagcaaagccagtggatggaatgtctctaggcagggttcaagtcagatgctcgacagacatatgggtggtttgacaagaatgtcaggagctggtcttggtgggaggagaacgagttatactgacattcttcagcaggaaggacttgagcaacctacaatgttgtctagcaccatgtcacgtccagcgagtcacaatgcatttggtgata

SEQ ID NO: 30834 - DNA, 438 bp, Glycine max
  unsure (1)..(438): unsure at all n locations
  Clone ID: LIB3051-034-Q1-K1-G1
cgaatatctcggtttgagacttcatattggtctccccaatttcttccactatcttgaattaggttaagagccttttcctctagtcattttaatcattctctttgtaaatgatagttgttagatgtggtagaagttgaacaatctcattctgaatttttgccaaacttttctgcaagagtccagcaagcgaaaatatcagtctgagacttcatattggtttccctattttcttccactatcttgaattgggtcatcacaatcgttcactttgtgaacggtagccgttaattgtggtagaagttgagcaatctcattttgaatttttgccaaacttttctgcaagagagtcctacaagtgaaaatattgatttgatacttcatattggtctccctaatttcttccactgtcttgaattgngtcaagagatttgccttttc

SEQ ID NO: 30835 - DNA, 380 bp, Glycine max
  Clone ID: LIB3051-034-Q1-K1-G10
acgcgacttcagccttgatcttccaagtaacttaacttccgtaaatggttgacagatacgagaaaaggagaaagttgaaagagagagaaacatcgagctgcagttctgttactacggctacactactcttcattgctagttaagaatctccaatctttcaacactgcgtcactcgctttgttcccaattcagtccacaatttactttttccactttcccctaacctcccactcggaactcgtcgttacctatcgataatgaatttggggttacctcacttacattcatccgtgtttactctgtaattaggaaccatgtcgaggcccatgttgcttgttttcttgctgattatacttataatcacctcacagtttgagtgg

SEQ ID NO: 30836 - DNA, 218 bp, Glycine max
  Clone ID: LIB3051-034-Q1-K1-G11
aatgactctcgatgcaatcttcgacagatgtcatattgtagccgagcatgatgggagtgaacctttatcaagctatgctcatacctatgatctgattcacgcgacaagcattgtatgacttataagggatcgcagctagtgtcagatgcagatgtagcctacgagatgtgcgtgatgaacttgatcgaatgatacgcccagaaggcactgaccacagt

SEQ ID NO: 30837 - DNA, 183 bp, Glycine max
  Clone ID: LIB3051-034-Q1-K1-G2
ctttttcttcttcgtcaaactcatcaatttgaattcaccatggattcccttccttccgtctcgccctccatggtcctccctccgagccatcctttccgccgcctccctcccagcctcgtctcctcccgaaccagaagccgccgccgccgccacgtgtcggtgtcctgcaccctcgccggcaac

SEQ ID NO: 30838 - DNA, 423 bp, Glycine max
  Clone ID: LIB3051-034-Q1-K1-G4
cccacgcgtccgagcaccgcctccactaatggctatgagatcgtgggtgagtcgaggatccgtgactcgtttgatggactcagcaaatcgaggggctttcagtcgcttcttcagcgacaagggtcgcgttctcagcgaggaggaacaggccaaagaaaacgtctacatccagaaatgggagagggagaggttggagaaacagaagcaacaggctgagaagaccaaggcagacaagggcaaagatgctgctgctgataagaaacctgaaagttctcaaaaaggctgagtttatccttcacacaacccggcaaggtcactttgtgggaaataagcatgatggagaataaaacacattgacccttaatgaactttggtctttgtatagattgtgtttcttgtttatttgtaagttcttgacggatg

SEQ ID NO: 30839 - DNA, 439 bp, Glycine max
  Clone ID: LIB3051-034-Q1-K1-G5
gtcgacgggcacatgtattttatttccatcaagaagacattgacccacagacgccacaaagtgtgaacgaggctaactttcgtatcagagtacccctcaatttttgcagctgctgcttcctttttattgtttccttcgcttggagaagaacgttaagcagacaaaggatatctctttttctttccaaagaaaatttattattctcttttgcacaattcaactccaaaaccggatctacttcttcaaccgcgtcattcatttcaaccttcaagctacggaagagcgatgaactcatgatattgattagcatctaaaaatgtttattcttcgtcaccatacaaatctcgctatagtcctcactatcttcatagcttgcacaacaagagcacaaaacctcaccacctgcaatggcaaatgcggggagcacacccttcagttc

SEQ ID NO: 30840 - DNA, 53 bp, Glycine max
  Clone ID: LIB3051-034-Q1-K1-G9
acgtacacacctaacattatcacaagctatatagttgcaccatgtcattaatt

SEQ ID NO: 30841 - DNA, 444 bp, Glycine max
  unsure (1)..(444): unsure at all n locations
  Clone ID: LIB3051-034-Q1-K1-H1
cccacgcgtccgcccacgcgtccggaaggaaccgtctccgttaaggtcaaatttcctcaaccggcaactaaagcgcgccggagctctccgccgccgcgtacggcgaatcccgacgcctcttattcttatgctatattcgatcgcccgcgttccgcgactctcgtcgacggaattcccggtgactcaccggtggcctgtggaaaatcgcttcgttgaatattattatgaagaatctgagcaaggacaaggattgcagcaggagcaagagcagcaatggattcgttccttcttccttcaagttcatatcgtcttgcattaagaccgccttttccggcgtccgctccgccggagccttcgtcgccgncttcatctccggtgacggacacgaccgcagagaccagttcttgatgtggaagacgcctncaatgtaagggagcttgtctc

SEQ ID NO: 30842 - DNA, 432 bp, Glycine max
  unsure (1)..(432): unsure at all n locations
  Clone ID: LIB3051-034-Q1-K1-H11
gcttctttcaacaacttagcattgtattgtcttcaaactttgcttcttccatactttcttctttttccttagccatcattgattgttgcctttcttggctttaaaatggagttcgaggaccgcttcagacaccaggctcagagaccaaaatatgactgccttctttttgatttagatgacactttgtatcccctcaaatctggtcttgcaaaatcatgtctccaaaatattaaagactacatggttgagaagcttggcatacaccctagcaaaattgatgacttgtccaacctcctttacaagaattatggaacaactatggctggtctaagggcaattggatatgactntgactatgatgaatatcacagttttgttcatggaagattaccttatgagaacctaaaaccagaccaagttctgaggaacctg

SEQ ID NO: 30843 - DNA, 430 bp, Glycine max
  unsure (1)..(430): unsure at all n locations
  Clone ID: LIB3051-034-Q1-K1-H3
tctgttctgagaatatctgaaatgctacatttattatctacagagtcctgaatctgtgtatgggttcaatgttgatgtaacatgttagactgattctgccacacttctgattttatgacattaaaaggagtctacacaattttttttatcacaccagaattttttcatgtattgctggttgataggcttgcagtcatgttattaaatattgataatcatctttcgaataatggggttttagtatggtaaaggcaccattcaatgtaattgctgaaaaaaatcttgattggcctttctgacatcttaattttttttctggtcgaatatttctccttaccaagaattttggaattggtaacacattgatgattgggattcattttgcttaacgtgcaactaacctccagagtccagacctncccttcccctg

SEQ ID NO: 30844 - DNA, 432 bp, Glycine max
  unsure (1)..(432): unsure at all n locations
  Clone ID: LIB3051-034-Q1-K1-H7
atcaaacttgtatattactccaggtgcactgatgctggaccatgagaataagaaggcggttgattccatgactacaagatggttggagcagcttaactcattacaagataagaatggtgaagatgtatcaaatatcaatgttcaagcagaaaaaagcctggttaaagattacttggtaaaattttctttgtggagttttttcatgattccttagttttatttatcttgtgaatttagactagacacatattgtaaagcttgatcttttctttatgaaaaggttgaccataatgcaagatctcagaatagaattataccagttcccagcccagcatccattgaggatatgagggcaacgatcatagagaactcattaaaattgatccanacagaaagcaaaatcacacgtctggcagcatctccaaatagaac

SEQ ID NO: 30845 - DNA, 429 bp, Glycine max
  Clone ID: LIB3051-034-Q1-K1-H8
gaattatctgccatttctggaaattttgattccctatgctgatgcaacaagtaccatgaaccaaatccaaatttctcaatggaatgcggctcttaagatacgctggagtagtgccctgaccacatcttctttcttcaaaatcaagggccccaaattttttcaaattaacaatttgcgatttgagcttggtatgaccctttttctttgtggtggaatcctgcgagagagggctttagaagttttatcaaccgatttggttcaatctgccaccattttcagacaagctgctggcatttatcatcacctagcacaagaggttcttccccacttagagcctgaattgccaccagaaaaaccccctgaagctcttgctgcagtatcctccattatgagcctcatttgcttggctgaggcccaggcagtaaccat

SEQ ID NO: 30846 - DNA, 118 bp, Glycine max
  Clone ID: LIB3051-035-Q1-K1-A1
accacgcgtccggtttggagttggattgagcgtattgaggcaatgacgcgaccttacggtgtgaaggggggccagaagcgaaagcacgccgaacccaaatacgacggagaagaccaag

SEQ ID NO: 30847 - DNA, 282 bp, Glycine max
  Clone ID: LIB3051-035-Q1-K1-A11
cccacgcgtccgaaaaaaaaaaaaaaaaaaaaaaaaaaaaaaaaaaaaagagaaaattataaaaattaaaaaaaaaaaaaaataaaaaataaaaaatcttccatctaattataatgttccatatttcctttcccttgcttgcatcttcataacttttttatagttaaaccttatttcattaacctgctccttaatttttactacgtcttccctgttaaaaccctgcctttatccattttatttcctcttcatttcttcctactttacccattttccttttta

SEQ ID NO: 30848 - DNA, 65 bp, Glycine max
  Clone ID: LIB3051-035-Q1-K1-A12
gcctatttgaaaatttccacacctcttttaattgtcgtaatgatgtgtgaagtgtgtgttatttt

SEQ ID NO: 30849 - DNA, 193 bp, Glycine max
  Clone ID: LIB3051-035-Q1-K1-A2
cccacgcgtccgcccacgcgtccgggaaaactccggaggtcaactcaagagaaagagagagtaatgagcattgcattgagtctcacacactctttgaacgcatgcttctaatgaagacgacgcatcagcctgaagcatcctaaggcgatccctgtgaaggtgactcaattctttttcttggtatttatgtggg

SEQ ID NO: 30850 - DNA, 371 bp, Glycine max
  Clone ID: LIB3051-035-Q1-K1-A4
cggtgcttcataattataaattccaacaaaattgagtttcttcttcctattatatacttgcttcatacattctcttaattaacttaggttcctgctttctccttctcggtttggggctaaataattaagcttcgtagatttgcataaacctagttatgggttttatgagcgaagtaaggatggtagcttaaatttaataaacaacagagttggttatggtggggtcatacatgatgtgattgctgaatggatttctagttttatgggaatgttcccgttgttgacatccttcatgctgaattaatcgctttatattaaggttggttattgctgagtctatgaatgtttttcaactcatttgtaaaactgac

SEQ ID NO: 30851 - DNA, 375 bp, Glycine max
  Clone ID: LIB3051-035-Q1-K1-A7
gttcaataaaaaaggaagaatcaaatgctaacatatgctattttgatgattcctgggagtttggatatcgagcaatatttttagttaacgtggatagttgaaatacggtgacttgtggtatgtattttctttttgcccacttttcatctgtagctttgattgaatgcaaaactgaatcacccctaatttgtaactcattttgccaggtcatttcatgtatcgaacaggtaagctcccctggctcaggtcatttcgatgcactgttgtgcaaaagcaaatgtggctaacatagatttttctaaatcaaattatgtagatttggatctggtattggatgatggatccagttgagaagtgttttttttccttgtcttg

SEQ ID NO: 30852 - DNA, 423 bp, Glycine max
  Clone ID: LIB3051-035-Q1-K1-A9
caattttcccacaaccttttttttcctttcatttttttaatttttttttgtaaattcttccatcgtttttttccttccttcagagaaaataaaccataacgattttgtttcagctcttcttagctcaccccaaaccaaatccaattccatcactgcattgatccgtttccttcaaattattcagcaatggacgagttcggcgttttgaccgaaaagttcggtctcaaaccgcaaggaaaatccgctccaatggcaagggcaaagcgacctccgaatgtcgctgattcccaaacacgctccaatcccaaattcccccttaacggatccccgtctcaccaaaattccaccttcgatttcgattacggagttttcagcaacagcaacaccgacaacaaaacgcagcgtttcgacgacatcttttgc

SEQ ID NO: 30853 - DNA, 359 bp, Glycine max
  Clone ID: LIB3051-035-Q1-K1-B10
cccacgcgtccggcgaaggggttgaagaagtgaggcttaggggccaatccttctgcagcatgttgattgatattgttattataattaggcttttagttttcattaaaaaaaacaaaagacaaccaaagaagagttcccccacaacctttgtatttttttggttgagggatacgtcttatgaaccagtgaaaaaaggctaaaggtgtaattaactaatatactgtagaaatttgtaaccgctgattagaattactttttactcttcctttattaatgtatgtttataaatcgttatagaagacatccatctatgaaggaattaatgactattttttttaatagtccatttttgtaatggt

SEQ ID NO: 30854 - DNA, 429 bp, Glycine max
  unsure (1)..(429): unsure at all n locations
  Clone ID: LIB3051-035-Q1-K1-B2
cccacgcgtccgaatgatgagtcagaccaaatcgaatgaaaacggagaggagagctttgaggagttgcaacagttgtttgaagacatgtttgaagcagatattggattggacggaggcccttctcttgcttcttctgattgctcaacttcatctgcttacatgacttatagtgaaagttctagttcaaataaacacaattcctctgagatgaatttcgggaaggcagagaattcttctgtctttgatgctggttaccagaatttctgttttgggacaggtgaaccaactccaagatataaagaagaaaaaggggggaattctaggaggaggtagaagtagacacagatatggcagaaaggcaaatatgtnctatgcccatgatgtttaatcgaatgactaccctgnaaatttcacaaagtaaatgacct

SEQ ID NO: 30855 - DNA, 364 bp, Glycine max
  Clone ID: LIB3051-035-Q1-K1-B4
cccacgcgtccgcccacgcgtccgcccacgcgtccgtgactttgaccctcttgatgttactaagacttggcctgaggacattatacccttgcagcctgttggtcgcttggtcctgaataagaacatagataatttctttgctgagaatgaacaacttgcattttgccctgccattgtggttcctggtgtatactactcagatgataagatgcttcaaaccaggatattctcttatgctgattcacaaaggcacagacttggaccaaactatctgcaacttcctgctaatgctcccaagtgtgctcaccacaacaatcatcatgaaggttcatgaatttcattcacagggattgaggaggtaaat

SEQ ID NO: 30856 - DNA, 450 bp, Glycine max
  Clone ID: LIB3051-035-Q1-K1-B5
cccacgcgtccgactttctctcgtttccccttcgcaatttcccctctcgaaagagacacgcatcgaagaaaatcacatcacggcaatggaggaaaagcacgcagcagccatcgaatccgcacacgccgaatctaacggcgtctctcacggcgccgaccacggctggcagaaggtgacctacgctaagaaacagaagaagaagactgttaacgccgctaacggcggccccgattcccgcgccaattccagcaagctcgttccgaacggcacgctgtccggcaacgacggcgtgttccggtcgctcgaactgcaatcggaggaccggcgccgaaaaattgtggaggcgaagaagctggctgatgccgcgtacgacgacgaagacgcgccgctcagatcgaagcagcggcatcgcgacgacgacgacgaatacgactacgatgacgagaatgt

SEQ ID NO: 30857 - DNA, 324 bp, Glycine max
  Clone ID: LIB3051-035-Q1-K1-B6
gaactagtttgcaattgtttgacattgagttaggaaaaatgggttccaaggctttgctcgttcttgttatgctcttggcttctgtcctccttctttcagcggaagttgcatccaaagatgtagataagaaacttgataaaaatgatggtaaccatgatacaaaaggagtcgatgaaatgaaatattatggtggttgggggtctggttgggatagataccgccgtggttggtattgccccaatggttgttgtcaatggagctactactatcaaaccttgtggaggtgctgctattatcctggtgaacaatgtgatgtgcgtactg

SEQ ID NO: 30858 - DNA, 191 bp, Glycine max
  Clone ID: LIB3051-035-Q1-K1-B7
cacgccctcaatcgtatgatggtattcatgcgttactctctcggccaatactgtaaacgggttacctatcttgctcgccatcatccatttgtggcatatatttggcttcagttgaggctgcatccttctgcattaatagaaccagattatgctggtgttgctcctggcaaatctgtgatggtggttgaaga

SEQ ID NO: 30859 - DNA, 424 bp, Glycine max
  Clone ID: LIB3051-035-Q1-K1-B9
agaagagaagagaaggatggctgtggtttttcagtgtttatggtgtgctcggagtgaccccttcctcactcttcctttccaacgcaaaccacttctttgctctgtctttctttcctctcgccctcgtaacctctgctcttcaattgtcgctgctgcttccaaaaacaaaaacaagcaaaaaaagtctcgtgatcatgttactaaggacgatgaagatggcgtggacgcttttgagctgctcttcaagcaactcgaagaagatctcaaacgcggtgatttgtcagacgatgatggtgaggatgagataagtgaagaagacatggcattgcttgaacgtgagttggaaaatgctttgggggactttgatggtgaattgttaaactcggatgtaatcgacatcgaaactggcggtgatccagaaaat

SEQ ID NO: 30860 - DNA, 439 bp, Glycine max
  Clone ID: LIB3051-035-Q1-K1-C1
cacgccctcaatcgtttgatggagttcctccgttactctctcggcgaatacttgaaactcttacctatcttgctcgccatcatccatttgtggcaaaaattttgcttcagtttaggctgcatcctcctgcattaagagaaccagataatgctggtgttgcacctggcaaagctgtgatggtggttgaagatgaaataaatgctggttacatatccattgcaatgcttttgggtctcttgaaacaacccctttatttgaggagcatagctcatcttgagcagttgctaaatttactggatgttatcattgatagtgctggaagcaagtctagttcatgtcataaatctcagatatctactgaggcagtagtgggtccacaaatttctgcaatgggagtagatgtgaatattgatcagttacatcttctgctcttgacgca

SEQ ID NO: 30861 - DNA, 446 bp, Glycine max
  Clone ID: LIB3051-035-Q1-K1-C3
aaatcaggttgggcatccaatcaggcccttgctatttacattggtatgtcatttttccgcactgcagcacacaagttccacaaatttctcaaaaagaagtgccccaccgatgttgccaagtacctggtatatcttgggccgagtgatgaggccatgaggtttttgtttcctatatttgttgagttttgtttggagaattttcctgatgagatcaagaggttcaggagtatggttgagtcggctgacctcacgaagcctcacacttggtttccgtttgcgcgggcgatgaaaaggaagataatttatcattgtgggccgacgaatagtgggaagacttataatgctttgcagcggtttatggaggcgaagtccgggatttattgtagtccacttaagttgttggcgatggaaagttttgacaaggttaatgcgaaggggatttactg

SEQ ID NO: 30862 - DNA, 353 bp, Glycine max
  Clone ID: LIB3051-035-Q1-K1-C5
cccacgcgtacgttcagaatttacgtacaacccatcataatcacacatgtaccagcaagtaaactgtgatccaactgaagaaggaagcctctgtgccatcatgtgatcactttgcatttctccaaaaccacagcatattgaatttcaatgattgatgctgtgggaaaatggctcgagatttaggttgacagataacactagatttattgtgaagcgatctgtgttattcacgcttaactggatctcctttaaccttattatgtgtcatgctatgttcatctttatcgtgtctgttataaggaggatgttatatcattttgtgccgactaatagtgtgaagacttataatgctt

SEQ ID NO: 30863 - DNA, 82 bp, Glycine max
  Clone ID: LIB3051-035-Q1-K1-C7
cacttgcaacgcaacaacgtaacgttgctaattgcttgcacttcccatggtcgcttctggtgtttcacattagctgcatctg

SEQ ID NO: 30864 - DNA, 442 bp, Glycine max
  unsure (1)..(442): unsure at all n locations
  Clone ID: LIB3051-035-Q1-K1-C8
gggcaaactggagtaatcgcgaatggaggggctcaaggtctccaaagcgaacttaacagtatacattcacccttccaaaagtaaccaagtttcccaagccgttctccgccaactcagctctttgcttttcacgttcagcgaaatcttcgacggcgtcgttttggcctacgatgtcaattccttcgacacgtgcgcaaagatcctctccggcgttcacccttacttcggcgtcaaactcaaggtcaatctgttgctcttttctcccaagccaaacatgctcttagggaaggtggttaaggttacgcatgagtccattcacgttgttgtgcttggctttttcctcttgcgatatatctgagaaagatatcangggaagagttcgggtgcaaaacgaacgaggggcaaaggtgtatgtgagcaggtctcacaagcggcatgtgat

SEQ ID NO: 30865 - DNA, 431 bp, Glycine max
  unsure (1)..(431): unsure at all n locations
  Clone ID: LIB3051-035-Q1-K1-D10
caaaaaggcttggggaagtgaggatggtggtgtagccaatggctccgtggagaagcccaagtccaatgggaatgctgccaagagtccgaatccgaagaagaaggaatccggtagcaggaatgtggcttctgctaagaaaccgaagcctgaaacaaatccggagccggcgccggtgccgtccttggagtttaaggagtctgaaaggatggagattgatcaaaagcctgatggtggtgatgcatgtttgtttttgcgcgaattggttcgatacaaagagggtgccaatgtttctaggctggatgaggatgatgtgaagagggggttggagttgattgaggaatcaaagagggcagagttgagggggaagtggaagaaattacatcatgctgagatggaactgtttgcgaatcgctcagaactgattggngagc

SEQ ID NO: 30866 - DNA, 424 bp, Glycine max
  Clone ID: LIB3051-035-Q1-K1-D11
cccacgcgtccgcccacgcgtccgatggccgccaattccagtagccgagggatcaccgccttagggaagcgagtcgccaaccggatctggacttccaacgcacctcctctcacttcaaggaggggagcatacagtagcggctcagtgtacgacaagaaccctgatgatgagatccagtctgggcaggtcccagacgatgtgatccaggcggcaacacaatccggcaaatactgggccccacatccacagactggggtatttgggccccccggaggaggtgaccaaactgcttctgccattcactctgatgcgctggaggagaaagcctggtttcgccccaccagtctcgaggatttcgagaagcctcacacccttccttaacaaccattggaggacatcatattataatactaaattaaataaa

SEQ ID NO: 30867 - DNA, 303 bp, Glycine max
  Clone ID: LIB3051-035-Q1-K1-D4
gtttggacaaatgttacaactgcaaccaatggtccttctgctagattttctgtggctggtgactgtttagacccttttaggagtggtgttcttatattcatcggtggttgtaataaaagtcttgaggccctggatgatatgtattacctatatacagggattgctcgagaaagtgaacagagaccagaaaaattatctttaaagaagcaattgaaactgaaatgtctagaacaaaatcccaatcctagccaaaatcaaggtctagttagatatggagtgggttctgatgtgggacagaccatg

SEQ ID NO: 30868 - DNA, 449 bp, Glycine max
  unsure (1)..(449): unsure at all n locations
  Clone ID: LIB3051-035-Q1-K1-D6
cccacgcgtccgcccacgcgtccggcaccctggccattgtccctatggagtgcatttccctttccattcgtcaaaatcatctttttttttttttttctttcttctccttcagtaaaaatcactgaacagttctaaaatcaaatcacctaaatccacatcagaagcccattttttttttcacacccagaatctttcttggtctttttcttgaattcaagtaccaaagtttgagtctttttcgactttggttgaactccattgaaggagtcgcatctgggtgttcgtgtgcatgcgagttttttctttctttccaaagtttgaagtttttccccattctgctgcgacccaattgatgggactctaatgggttccttggaatcagggatcccattaaagaaagggagcttgtttggttctcagttcancagaaaagagaagaaccctttttc

SEQ ID NO: 30869 - DNA, 187 bp, Glycine max
  Clone ID: LIB3051-035-Q1-K1-E1
acgtgggcgagttggtgatgcacagacaactcactggaaactcggttgaactcggtgtgtgtagaaatggcgaaacttgtagccaagctagggatgatcttggactcggagggtcagttcttctccggcaaggaccatcttccttattgtgactgtgacttcgtagctggatgggaaagataggtct

SEQ ID NO: 30870 - DNA, 432 bp, Glycine max
  Clone ID: LIB3051-035-Q1-K1-E10
gttcttttgtaagataaagaaagtaactcagtttgcaagttaaatgtatgtttttgtttgagttagatacataatacatagttttcttcatttttttaatgtcaaagcaaatgcttcttatcaatgttgtcttcaggcattgctttgtatgatagcatctgggaaatgtccctttggtgcttcatgtctttccagtggtgcctttctactcctgctgtgtctttccagaagtttcttgatagttcttgatatcattttgttattcattttagaaagtgcttttattttcttaaaatcagaaagcattatgtttttgtttcagaaattccatccaactggaatgggtgaggctgaaaaactgagtaataagctccttgagcatagttctgatgctggtagtgacttttcagacaaagttttgaagtcaagaat

SEQ ID NO: 30871 - DNA, 388 bp, Glycine max
  unsure (1)..(388): unsure at all n locations
  Clone ID: LIB3051-035-Q1-K1-E5
gtgggcgagttggtgaagcaaagtcaactcactggaaactcggttgaactcggtgtgtgtagaaatggcgaaacttgaagccaagctagggatgatcttggactcggtgggtcagttcttctccggcaaggaccatcttccttattgtgactctgacgtcgtagctggatgtgaaagagaggtcttggaggcagaaaaacaatcatctcaagagtatatgcaagactgtctcctgcgtttatcatgggctcttgttcactccaaacacccacaagatgtgcaccgtgggatagccatgcttgaatcatctttgcctgctacagaggacccactgcaacanagggagaaagcttatcttctggctgttggatactatagaaatgctgat

SEQ ID NO: 30872 - DNA, 96 bp, Glycine max
  unsure (1)..(96): unsure at all n locations
  Clone ID: LIB3051-035-Q1-K1-E7
cctcaattcatcagttgccaataaaatcaagaaatgaggcgtgtcttccgaattaatcgtgtttcaaagctgcattccaaaaacacncctcaattc

SEQ ID NO: 30873 - DNA, 427 bp, Glycine max
  unsure (1)..(427): unsure at all n locations
  Clone ID: LIB3051-035-Q1-K1-E9
cccacgcgtccgaaaacacatgttttactaaaaaagtcggcagcgattgatggttggtcacaccaccgaagaaggcttcaggaatctacatagctttttcctcagagcgttgaaaattcccacactcgctcgcttccccaaaatttcacccctttcattcaattcttccctcttctctgctactgatccatccctcgttttctccgaacaatggctgctggtgtcactgtcaagtccgaggttctagaatcttctcctcctgaaagagtttgttccaacacggtggaaaaccacctggtccagaccaatttgtctgatgggtcacccaacaagtctgtgccagcatctggacttgatgcagtgattcctagtgcatatcagcttaccatcttctataatgggagtgnttgtgtctatgatggaatcc

SEQ ID NO: 30874 - DNA, 430 bp, Glycine max
  unsure (1)..(430): unsure at all n locations
  Clone ID: LIB3051-035-Q1-K1-F11
gcagaagaaagatgctttagagttgttgaaagccaagggtccatcaccaaaggcttcaaagaagaagaggagcaagaagggtgggctttctatgtttctgagcggcgctcttgatgaagccccgaaggaggtggctccccctccaccaacaccaacaccaaaacacgagggtcctgcatggggtggggcgaagttcacgaagggttctgcttctcttcgtgaaatccaggatgaacanagcaaaattaaaggtaaacaaaccggctgggagcaaagataaggttgaagatctttctaattttggcagtggggcaaaattaaagttgagttcatttcttccttccagcccaatccctgttacctcgtctcgaagttcccaggtatctgatggagaaataagcacccctccttgggctgcttccggaactcc

SEQ ID NO: 30875 - DNA, 441 bp, Glycine max
  Clone ID: LIB3051-035-Q1-K1-F4
ctcttattcatccttctcttctgaataatccagatctctttctgcccttttctccgtcacgcttttcgtgaccggatctgtatggatttgatccagatctacacgccgatggtggttttggccgggtctttcatagatctggtgcgtagaggctcagatctacggtaccgaggtacaacagagaatcgatgacaagaacgcagatccgacggtagatccagccgattccgcttgttcgatcgctacagacccctgtatcggatcattaagcagcgtgtctcgcgcgttctacacgtgttgccgatctcggatgttgtaaaattagtttatgatgtgaagctatggagtggaaaatatgtggatgtaggagatttcgggatgaatggcctcaaaacgctttgtcgtttgtgggtattgagtcctgagtgatcttgtcatccg

SEQ ID NO: 30876 - DNA, 199 bp, Glycine max
  Clone ID: LIB3051-035-Q1-K1-F8
atcatattcatacttatgttctgaataatccagatctctttctgccctattcttcgtaaggctctgggcaaccgaatctgtatggattcaatccatatctacacgccaatggtggttttagcctgttctttcatagatctatagctaggaatctcatatctacagttctaaggttcaacagagaatctatcacaagaac

SEQ ID NO: 30877 - DNA, 408 bp, Glycine max
  unsure (1)..(408): unsure at all n locations
  Clone ID: LIB3051-035-Q1-K1-F9
gttcatagcggctatacttctgatctctgctgaggttgcacccaatgaatacgaaaattttaacaaaaaagatgggaagcatgctccaaatgggttatatgatagcaaatggggttacggtggttggggtggtccttggtatggcggctggggtggcccttattatggtggcggctggggtggcccttattatggcggtggttggggcggtccctggcgtggtggtggcggtggtggctggggaggttggcgtcgacctaatggcaaccctcacaactaaaaagaaaacttgctaaagcttctttacgggtttaggttttcgcaataaataaaactttatgagaagtgtagttgtaataaaagtggaagtctctcttctcttgtgatatanaggaataatagtnttat

SEQ ID NO: 30878 - DNA, 374 bp, Glycine max
  unsure (1)..(374): unsure at all n locations
  Clone ID: LIB3051-035-Q1-K1-G3
ctttgaaactccctttcctgttgaccttgttcctcgcactctcccaagctcaaccgcattccgatgatccaccgccgccaccctcctccaacgtctgcgtcatcggcgctggcatcggtggctcctccgtcgctcacttcctccgcaaatactcgccgtcctccactccctccaccaaaatccgagtgttcgagcgcaacggccgcgtcgggggacgcatcgccaccgtgacggtggcgggcgagaccttcgaggccggagcgtccattctccatccaaagaacctgcacacagtggattacgttaagatcctgaagctggaggtcanagagccgaccgcgtcggaggattccctctctctcggcatttgggat

SEQ ID NO: 30879 - DNA, 301 bp, Glycine max
  Clone ID: LIB3051-035-Q1-K1-G7
cataaccacatacacttcggttaatccgaaagaagctcatcggaatcgcaagacaccgccgacgacatggccgccgccgtgaccgatatggcccgccgtcacacgattagccaaatactggtcgacctcgtcaagttcgccgtcggttccgccatcgacggctcacgcagaatcatccctggtaggaagcaggtagataagatggtgccagaaggattaataaacatacccttgccaacccctttaaaggccaagaaacaccctgatttaaaggttgcatatgacctcccttttgagacaa

SEQ ID NO: 30880 - DNA, 185 bp, Glycine max
  Clone ID: LIB3051-035-Q1-K1-H2
cccacgcgtccgaaaaaaaaaaacataaaaaaaaataaaaaaaactaaaaaaaataaaggactgcgggtcttttatatacattccatcttaaattaagctgcaattaattatccaaattatattgttacctaaagtgaattcactttactgggcatctcatgacatcggcttaactgtcaaaaca

SEQ ID NO: 30881 - DNA, 321 bp, Glycine max
  unsure (1)..(321): unsure at all n locations
  Clone ID: LIB3051-035-Q1-K1-H5
gaaaagtccttcacattggcagaggcctgtggagagaagtggttatgctgctgtttctgaaaataaatttgaggaaaggaagaaaatccaaccatcaaatgcaatttctaccacaagaattaatgttcctgctcctcccacagcatctgagcaggtaactcctattaccaaacctcagcatgtggagaaagtggaaccagtagcaccacaaccaccagcttcccaaccacaagctgaaacatcaaagcaagctacagacacagttcataatatccctccanaagttgactatgctacagaccttttcaacatgttgtctat

SEQ ID NO: 30882 - DNA, 302 bp, Glycine max
  Clone ID: LIB3051-035-Q1-K1-H7
tgcatacacagggaaggaactcaattctttgagtcttgctcatactgttgctcaagttattccactgccttatactgattcaactgaacagcgtctgcatctaattatagacacaaaccaacacgcatacctatacccaagaactcctgaagctattggcattctgcaacgtgaattttcaaatgtgtactggtactcagttgatgctgataatggtgttatcagaggtcatgccttgaagagcaattgcattcacaaagtagtggatgaatactgctttgacttcagggattatggtctat

SEQ ID NO: 30883 - DNA, 76 bp, Glycine max
  Clone ID: LIB3051-036-Q1-K1-A10
tcgaagcaatccggttttgatggcttaatgggccaattaatgcacccagtggagaaccgggtggtcaaggtttaaa

SEQ ID NO: 30884 - DNA, 362 bp, Glycine max
  Clone ID: LIB3051-036-Q1-K1-A3
cccacgcgtacggattcacatgcaaaggttttgcttgttctactaatgttctgggccaggatacttctgatctcctctgaggttgcacccgatgatgcatacgagaattttgacaaaatagatgggaagcctagtgcagatggggtagatgaaagcaagtattggcgtgccggctatggtggcggctatggtggtggttatggaggtcgtcgtataggctatcgaggttgtcttgaaagctatggatgaggacatgagaatatggctgctgtcaatgtggctatggtgtatagcatattggctatctcggatggcttagtatgcaatcgtcttggctatggtcctaatgaacataacgaggc

SEQ ID NO: 30885 - DNA, 444 bp, Glycine max
  Clone ID: LIB3051-036-Q1-K1-A4
cccacgcgtccgaaaccaactgtttgtgcacatatttgaaaatgtattcgttactaaaggaatgggctgtttggtgaaggatcatgaatgacttttatatctttaagcatctcttcatgcaacaaccctttgggcttaaagtttggacattgtacaagcccactctctagtctctaccttgtgctgaaattcagtttattttatttagaagagtgggagtgacaataattgaacccttgactaattttgcataaagactctgatacatgtcaactaccaattctcctaaaagcctaatgaatttagtaaacgctcattaattggttttaatatcttatctaatacaaattggaaacccaaaaaatatccagcaaaccatatttaagtagcaagaaaatgaaccaacttgaatgccaaccttgtgggtcttcacaagtttctttt

SEQ ID NO: 30886 - DNA, 350 bp, Glycine max
  Clone ID: LIB3051-036-Q1-K1-A5
cccacgcgtacggaatcacatgcacacccttcggttgctactatggccaaaactgttcggtctggggccaacattgtctataacggaaatcccttaaatgacctatctatgactgctttcctggacaaattcatggagaagaaagcgaaacgaatcacatggcatggtggttctcagattgaacctgccaagcagatggatgttaacaaccaattgattggagcagaaattctattactagctgaggaagatgtacctcctgacgatcttgactgccacatgttctacacaaacaatatgagttcactctactaaaccgaagaatatgaaaaagacgtcagctgatgaag

SEQ ID NO: 30887 - DNA, 422 bp, Glycine max
  Clone ID: LIB3051-036-Q1-K1-A7
tgaagtgctgagagaccgtgcacattgaaatgtttaagcacttaaattcattttcatatcagaatctactaggggttacctttaatgaattacctcttcatgctttgtcatctgcagagcccatcttgccacagatatataactcgtatccaataatatgaatctgaaggctgatgggtttaaagcttttggcagttattgttgtaaatcccagtgtgctggacttgtattgtatgagcgtgactctatggatccagatagattacttggatgaaaaagttccttgttctaactttggcaagtatctatagaaaatttcaaaacttgcatttatcaatatttaatttgcttcttgaaaaaaaaaaaagatataaaagaacaaaaattacatacccatacattcaacatcataactattatat

SEQ ID NO: 30888 - DNA, 390 bp, Glycine max
  unsure (1)..(390): unsure at all n locations
  Clone ID: LIB3051-036-Q1-K1-A9
agccttccgcgaaaatcaattttctgtcttctctgcgtcttcttcctctatcaatcgttttccatggctcgtaccaagcaaaccgctcgcaaatccaccggtggaaaggctcctaggaagcaactcgccaccaaggctgcaaggaaatctgcaccgacaaccggtggagtcaagaagcctcatcgctatcgccctggaactgttgctcttcgtgagatccgaaaataccaaaagagcacagagcttctgatccgcaagctccccttccagcgtcttgttcgtgaaattgcgcatgacttcaagaccgatttgaggttccagagtcacgctgttcttgcgcttcangaagctgcggaggcttacttggtgggtttgtttgaggacaccaac

SEQ ID NO: 30889 - DNA, 144 bp, Glycine max
  Clone ID: LIB3051-036-Q1-K1-B10
cttcgaaaaaaaaaaaaactaaataataaaaaaaaaaaaaacaaaaaaaatattaaaaaactaggtgtgcataaacaatatactaaaagaaattctataaaaatgaaagggctatatgtttaaaagaatccaggctaaataccc

SEQ ID NO: 30890 - DNA, 441 bp, Glycine max
  Clone ID: LIB3051-036-Q1-K1-B4
agaaactggagaaaaccctagaaagcaaaccctgtctcgcaccgccatctgcctccatagcgataacactgtgcttgctacagtcatggcggacgtcatggtaatgaaggagatcgaggacacggcgctgcgtctcggcgtcgatctctccactctcgatctcgacgccattcgcctacctcccggcgaagattgcggcatcgtcagtgatgacgaggtggtttaccaggaggagaatctcgagtatgagtctggatttggtaacatcattgtcgcggataacctgcccgtggttccgaggggagaagttcgagaagcttgaaagaatgggtcggaaaagttatagtcaaaatggggttatcaaagaagatggcctctggatgcccggtggtcctgaaaccgataaaaccctaggttactggttcattggatacaataccc

SEQ ID NO: 30891 - DNA, 330 bp, Glycine max
  Clone ID: LIB3051-036-Q1-K1-B5
cccacgcgtccgaaggctttttccttactctcttcccttttcttttttgccctgctttgtggggtttccactctcaaatgctcttcacccttctctctctaatctgcttttttattcttcttcttcttcctctctcagatcctaagggctttcatctgctgctgcaactcagattctcttgcttctggacttattatcttctgcgttcatgcctgctcttgtcaattacagtggtgatgatgagctgtacccctggggttctttttgcccaaatccagtggagttgggtcgcttgtacactactattggctccaatttggatgtgtacta

SEQ ID NO: 30892 - DNA, 377 bp, Glycine max
  unsure (1)..(377): unsure at all n locations
  Clone ID: LIB3051-036-Q1-K1-B7
cactctctgaaattacttccccccagcccacactcctccattatccctccgccggcatgtccccgtcctccgaacaccacggcggaaaccatcgctttcccggggaagaaatcaacggcttcggcaatggccaagcggaaatgtccgctccttccacggcctcctcgtcggcggtgcgctgcatcgtcgactcaattccgtcgaaggagcgggagaagctccggagaatcctcgtcgcctcggcgaagggtttctcaatcggagccggcctcaagggaggcctcgctctcttcgcgatcttggcgcgattgacgcgcanaaagccgncaaggaagggaattgtggtttcgaacggcgaagcgattgtggcggctctg

SEQ ID NO: 30893 - DNA, 204 bp, Glycine max
  Clone ID: LIB3051-036-Q1-K1-C1
gttctataagttcacggtcagttctgaaaaatgggttccaaggttttgcttgttgtagtgatgtgcatagcggctatacttctgatctctgctgaggttgcacccaatgaatacgaaaattttaacaaaaaagatgggaagcatgctccaaatgggttatatgatagcaaatggggttacggtggttggggtggtccttggtat

SEQ ID NO: 30894 - DNA, 179 bp, Glycine max
  Clone ID: LIB3051-036-Q1-K1-C11
cttcgccgaccccttggttccggccaattacccgattctttggcccggttaactaacctcaggttccttgacctttcctttaataacctttaaggcccaatcccaagttaattttccaagttgtccaacctagtttccttacccttggaccggaataggctcacggccccaatcccgga

SEQ ID NO: 30895 - DNA, 201 bp, Glycine max
  Clone ID: LIB3051-036-Q1-K1-C12
agccttcggttttgttgaaggcccgaaccattcctgacttccaaatcgtcctctgaactgggtattagggccaaaggattattcaaaccgtttataacctggttccttccaaagtttccttaaggttacttgaaccccccggccaattttattcgggtaaagccattgtttaaaggcttgggggccccaaggccttgaact

SEQ ID NO: 30896 - DNA, 433 bp, Glycine max
  Clone ID: LIB3051-036-Q1-K1-C2
aacaaagggtgcgaacaggattaaccgaaaaagggcatcacaagttggaattacaccaagaagtggggttacaagagcgaagaacaaaaacatttgtgttgtattggagttatttatatttatacgctcgtaactcgcacatagtatccctcagtcattccgtgtccatagttgcaagttatctaagcccagtttgtgtttcactcacacaaccgttccagtaacaacaaaacatcatgctttctcgcccttacattaaatttttctgtttctgaaatccggcctttcttttaacttttcaaatggttctgcctttgtacttcgaattcaaacaacaggaaattttcttggggaaaagttcaatttttcaaattctggccgtgaatcatttgggggaagaagattgaaaggaaggtgattacctttttgaaat

SEQ ID NO: 30897 - DNA, 406 bp, Glycine max
  Clone ID: LIB3051-036-Q1-K1-C3
acaaagcgtccggtttgaaaaggacctaccgaaggttaacaggacagaaactccttggtggatggttctaatgcattcaccttggtataatagctacaattatcactatatggaaggggaaacaatgagagtcatgtatgagccctggtttgtgcagtacaaggttgatgttgcgtttgctggtcatgtacatgcctatgaacgatctgagcgtgtttacaatgttgcatacaatattgtaaatggtctttgagctcctgtaaatgataaatcagatcctgtatatataaccattgtggatggaggaaaccttgaaggtttagcatccaacatgacggaaccacagtcaaagtattctgcattccgagaggccatctttggacatgccatttttgacataactaac

SEQ ID NO: 30898 - DNA, 410 bp, Glycine max
  Clone ID: LIB3051-036-Q1-K1-C8
cccacgcgtccggcttatcttatctacttgctttcttcagttttcttttcttcatttggggtagggttttcttttaaggtgttaaatgtttgaatgtttattctctctttaatgtttttgtaatttgtacagtaggattggtggtgggagtatttttcttatataaagtctttgtcttcatcatgtagcacttgttttatggtacgtacagcgctgttgctgttctgatcctgcaccggggaacagtgtaaacatcgtgagaaagttttttttattttattttatggggtaccattgacaaggagagtgacaggggtatgcaatgacaccatcgggtttggtattaaaagagagaaatgtgtacgtcgcttataatactatttatgaaaccagagaggacagaagcaacg

SEQ ID NO: 30899 - DNA, 398 bp, Glycine max
  unsure (1)..(398): unsure at all n locations
  Clone ID: LIB3051-036-Q1-K1-D1
gttcttcatcactgcttggaccgaaccaagacggagtatcgtgccgtacctgtctccgagaccagcgaaacgcagcacccattgcatctctctcttctttctttcgaagcaacgaagaaactaaattataatcatcgagttccctttcgacagaaccaaaaccctcacttccgatcgatcaattttctcccttttccgaccaatttcccctcttttccatcggattcaattcggaagaagaaaaggggaacccgcgaatcgatggatctcgggttcggtgtgaggagtggagggttgntgaggttgggcccgtgatgggattgaaatccgttggattgattgaaggaagcactttcgcggtggtggtgatgagaagaagaactgaaggggcaataatg

SEQ ID NO: 30900 - DNA, 371 bp, Glycine max
  Clone ID: LIB3051-036-Q1-K1-D10
agccttcggccattaccggcattaagaatggcttggtttattccggccatttggaaaggacccaggcaagggttaccatccgacgccaagctgcaaagcttcgttccattttacaggcgccaaagctcagaatatcccaggaggagatggtgactatacccttgattggttctacttatgacagctatgcggcaacatggagtgataaatacaaggacaatgataaaaaaattagtggatcagtcacgaatcagcttccatcatctaaagattaccttggggactttcttgtatggaaacctcctgtcgggttagggaaaaatcgagctttctgggttggcctaacaatatggttgggattagttggagct

SEQ ID NO: 30901 - DNA, 306 bp, Glycine max
  Clone ID: LIB3051-036-Q1-K1-D2
ttcagaaaaaaaagaaacctaatcgccgatcgcgtcgaaagtccctaagcttacatcctgcttctagatagttggtaatcttatctgagggtagtagctagtaccatgggagaagtggcagtaatgcactctgagcctctgcagtttgagtgcaatgacattagtgtgaatatgactgagaaggaagtgtatcctccagaatcaaatgtggagcgcttacctggagaagaatcgagtcaatcaacagaccacaaaaatatcaatgacttgcaagagagaggatatatggaattatgaatgtcagca

SEQ ID NO: 30902 - DNA, 211 bp, Glycine max
  unsure (1)..(211): unsure at all n locations
  Clone ID: LIB3051-036-Q1-K1-D3
gagctgtaaccagaactccaccatctgctgggaccaggggatcactggatcggctgggcctcgggagatactctggtgctttgcctaatacaaaaattaccaacatttttacttccccaaaagtacaagcttgtatagcttcaggtgtgcagaggaagctggatatggcatatgacgatggaattaatagcacganatcattgaagactac

SEQ ID NO: 30903 - DNA, 440 bp, Glycine max
  unsure (1)..(440): unsure at all n locations
  Clone ID: LIB3051-036-Q1-K1-D4
gagctgtaaccagaactccaccatctgctgggaccaggggatcactggatcggctgggcctcaggagatactctggtgctttgcctaatacaaaaatcaccaacaattttacttgcccaaaagtacaagcttctatagcttcaggtgtgcaaaggaagctggatatggcaaatgaggatggaattaagagcaagaaatcattgaagactactcaacaatcaaaatatcgattaccaggaaaaggcagcccaacttctataaacaaggggaggactgcacgtggggtttcagaaacagctgagaagttggtcaatatgtcaatcggtactcgaagactgtccttgggacatacccgtacgccttccatgaaagctggagtcaattggatatctgaatctggaaactngctcatgtccggacaacaaattccaactgaaaga

SEQ ID NO: 30904 - DNA, 149 bp, Glycine max
  unsure (1)..(149): unsure at all n locations
  Clone ID: LIB3051-036-Q1-K1-D5
gtactgttctattagttcatactaagttctgaaaatgagttccaaggttttgcttgttcgacttatgttcttggccactatacttctgatctcctctgaggttgcacccgatgatgcatacgagaattttgacanaatagatgggaagc

SEQ ID NO: 30905 - DNA, 401 bp, Glycine max
  Clone ID: LIB3051-036-Q1-K1-D8
cccacgcgtccgcccacgcgtccggtcatttttccctcattttctcgagaaaataaattgccaatctttacactgagattctcttctcaaaatttcttcccactttaattctttccccttctcattgtttgtttccactgatttctccatatccccgtcgtggagaacgctttgacctttcttagatttgttcttccaatccaaagtttttatctttttttcagatttttaagttggagcatggtttttagtcaactgagtctcttccaaatctttaaattgttctaaatcttttctgggttgaaaatttttgcttctttgtgtctgtgtctgtatgtgtgtcgttgttggtggatatggattctaaggatattaatggttgcctcatggataaacataaa

SEQ ID NO: 30906 - DNA, 139 bp, Glycine max
  Clone ID: LIB3051-036-Q1-K1-D9
cttcggcgaccgcttgggaaaaaattacctttagaaaaggaaaattcctatgtgcttcgctgggtttctagattgtgccttaccctaaaacctacctttggccaccgctgatacttatttcaacataaatggtgatttc

SEQ ID NO: 30907 - DNA, 312 bp, Glycine max
  Clone ID: LIB3051-036-Q1-K1-E1
cggacgcttccgcccacgcgtccgcccacgcgtccgggcgttcaaggtggtggtggacaaggacgccaccactaccacttcctgagcctattccaacgactgagccaccaacaccttttacaatttcactttcaccaccttcttcaaatccaatagatagtgccagagtgcattcgcaaactggatactgaggtatatgcatactaagaattctcgtttcaatagcaacaacagtatctacgcatataccctgatgaatttcttgaccaatctgatgcaatggagaaaggtgattatcagattgactatgtg

SEQ ID NO: 30908 - DNA, 445 bp, Glycine max
  Clone ID: LIB3051-036-Q1-K1-E2
agaatggattcctgttaaacctaccccaaatgcatttattatcaatgtgggggatataggtcaggtatgttattagtacatgattttgttaacatcaactcttgaagtattaccctttctcctaaatggtccctaaagtcaaaaaaatacttaagtagtcaagtatttgaaatcattctaattagtcttccaaatgtaaaagaatccttttcaaattggttcttaaactttactcaaatatgtcaacttaaggactaaagtgatacatgttcaacgctttggagattacttaaaaatagtttattactttaggggacaacttagagaaaggattatactttgaagaccaaatttgtggtcaaatgtactaaatggattggttctttttcacaaaataatattctattaattagttcttaaaattagtccttcataagctgatgtg

SEQ ID NO: 30909 - DNA, 380 bp, Glycine max
  Clone ID: LIB3051-036-Q1-K1-E8
cccacgcgtccgtgcagggtcagggtgtccgtcttactcctccgcccgctaacatgggacagcaagtccacggggctatagggtaggacagcaagcatcatagggactgataaacaactgcagtagaatgagtccgataaggacttaatgctttgtatggtagaggcatggatacttaaacaatacaccaaattacctgtacactatacctttgtaattgctacattttcaaattatgatgtggaagtatcgagatttcataagaaaaactagttacaagttaagatattaatataattagttacaagttagttattcttgtaaccaattatgcaacaacttattagtattagttatataagatacaatcattacaaaag

SEQ ID NO: 30910 - DNA, 412 bp, Glycine max
  Clone ID: LIB3051-036-Q1-K1-E9
aagaaatcagcggtgccatcctcatctagtagtcctccaagaaacttacctgttcaaatgaagtcagaaaaccaaactagagttactggagatcctgttcatgtcaggaaaacatcttttggtgtctcacaatcaactgataaagaggcgtcttcatcttcaacttctgtatcacaagtaacaattggtccaaaaacagaaatccagaaagcttcacccccaagactaaccgaaagatccatggcacaagtggctatgttgtcaaggccatctagtgctccactagttcctggtggtcccaggcccactgctgctgttgtctccatggttcaaactgctccactacttgcacgctctgtgagtgcaactggtcggttaggtcctgatccctcacctgctactcatagttatg

SEQ ID NO: 30911 - DNA, 317 bp, Glycine max
  Clone ID: LIB3051-036-Q1-K1-F3
ttcttctattcattcagctggcactaagcggtctgtaagagacagaattggaagtaatgcaaatagttctgggtggcatggaaatggacatagcggcaataaacgacaccgaggagatgtaagcatgcaaaatggactggatggcaatgatctacgattgaagctcatgcgaaaaagtgcattggggcaggctgacagcaatggcagtaagaggcatatggacctccgtgaaaagctgtcaaaggcaagtcaccctctggctaacacttataattcgaagcagcatgggccagattcaaaggaaacaagtttgaagc

SEQ ID NO: 30912 - DNA, 397 bp, Glycine max
  Clone ID: LIB3051-036-Q1-K1-F5
cccgtgacaggccttcgattgtatttggaaggaaagagaagcaactgcttggcaatccatgtacagcacctctcttccctgcccaaaactttccaactccaggatgagcctaacgggaatgcgtctaatgactcttcagaacgcaagtactatgagaaggtccagtggaagagtttctctcacgtttgcacagctcctgttgattcagatgatgacaatgctgtcgtgactggtgctcactttgaagttggagatactggccttaagaaagttctattcctaaaacttcatttctgtaaagttgttggtgcaacccgtgtgaaagtacccgaatgggagggttctcctggctggacccagaaatctggattatcttaccatggatcagcactacctt

SEQ ID NO: 30913 - DNA, 441 bp, Glycine max
  Clone ID: LIB3051-036-Q1-K1-G1
gcgattccggctccatgtaccgcaacacatttacctcaggtattttcttcttttttccttgtttggctttcacgacagcttcgtatctaatttttttttaaccttccttttctctgcgagtattttccgttatggctgaagaatttgtgaatggctttgttcatcaaaacgacatcgctgtcataacccacaatccccctaaaggcgatttcggctccatgcccacaagttgttgaagacgagtttttaccacaacacattcacctcaagtatttccctccttttttttctttcaacaccgcttcgtatctaaatttttttaacccttcctttcttttgcagtattttctggttttgcccaaaaatttggggatggctttggtcattaaaatggccttactggcataatccacaattcccccaaaagttattgggaagaaa

SEQ ID NO: 30914 - DNA, 315 bp, Glycine max
  unsure (1)..(315): unsure at all n locations
  Clone ID: LIB3051-036-Q1-K1-G10
cccacgcgtccgggaagtgatctaaagaacttgtgcacaactgctgcttatcggcctgttagagagctaattcagcaagagaggataaagagtctggataaaaagcagaaagcttccaggggacagaataaagatgtccaagaaagtcgaggacaatccgtagtaggaaatactcaagatgctctagatgaagaagaggaagttaaacaggaaagagttattattacccttaggccattgaatatgcaggatttcaaagaggccatanatcaggttgctgcaaagcttgcagctgaaggggctggaatgggtgag

SEQ ID NO: 30915 - DNA, 337 bp, Glycine max
  Clone ID: LIB3051-036-Q1-K1-G11
tcggccacgcgttcgggaagtgatctaaagaacttgtgcacaactgctgcttatcagcgggctagagaactaattcagcaagataggataacgaatctggataaaaagcataaagctttcatgggacagaataaagatgtccaagaaagtcgaggacaatccgtattaagaaatactcaaaatgctctagatgaacaaaacgaagttaaacaggaaagagttattattacccttaggccattgaatattcatgatttcaaagaagccaaaaatcaggttgctgcaagctttgcagctgaaggcgctggaatgggtgagttgaaacaatgggactatt

SEQ ID NO: 30916 - DNA, 410 bp, Glycine max
  Clone ID: LIB3051-036-Q1-K1-G12
aatccgttggatgttgctagtggctgtcttgggggtaagagttaggatggtgtgccaaacttgtaaactctacatggtactggtttttaagttcaagttatttgcttggtgtgtttgagggagtgttgacaaaattgattttaaatgaaattggttttgcaaaattgattttggttcaaattgattttgaagtgacgtgatttatgtttaatagtaaaatttagtgaaaattattttgatccaatgcaaaatctatctaaagtaacttttactcgaaatcaatttttctcaacgtagaatcgaagatgtaaacatttatctaaaattcggttagttggtttttgaacgtgattctggataagtcaatgttaaaccaaacatgcactttgtctgtccctattatttatagt

SEQ ID NO: 30917 - DNA, 333 bp, Glycine max
  Clone ID: LIB3051-036-Q1-K1-G2
tccactcgtgctccaagtcgtgcgacctatgtcccatgcatatgcagatgcaacaaacgcgacaggatctgaagaccactgcggcaccaatctggacctatactcattcttctactcctagttcctccggcgactacacctccgatgcaccatcgaatcaggtagctgaagcacctgacaagctcatacaagacgaacgaatcatcggagacatgctaatacggcgcctaccgcctcatcacagcgctctacgaccacgcagcgcatcctcaccaaggcaacacgtctctccaagtgttactcatgcagactcatgcatgcgatagtatctta

SEQ ID NO: 30918 - DNA, 175 bp, Glycine max
  Clone ID: LIB3051-036-Q1-K1-G3
aaaaaaaaaaaaaaaaaacataaaaaaaaaaaacaatgacataatcagatgcaacaaacacggcagggatctttaagcaactacggcaccatatatggacctatactaatactggtactccttcttaatggggccaatctaactccgatgcactgccgaatcatacatctcaaac

SEQ ID NO: 30919 - DNA, 383 bp, Glycine max
  Clone ID: LIB3051-036-Q1-K1-H1
agacgggcttctgttgatatcttcttaaaggcagctgggtatcttgactgtgctgtaaggcatgttcttccacagttgcctggcgaactcaggagaaatttaccagtagatcttgcagaaggagttcttcgagcactctgtctacaagcattgggacagggtgtagatattcaacttggaatggcaattgatagtaccaaagccactcttgcagtgaagcgtagacttgcatgtgagatggtgaaatattggcaacaggctcaagataatattatgaaccttccattagaaaatggatggggtgaaagccttggccttttgggaaatggaagtatattgaaacgaaagctgcagcatattattatcatggattgagtcttgat

SEQ ID NO: 30920 - DNA, 258 bp, Glycine max
  Clone ID: LIB3051-036-Q1-K1-H10
tatactcgtaatacaatacctaagttaccaactctcaaactgacatatagagtacggttatagaaatatatggaatgcataagatatctccatatatctatacttgtcattacactcaataacaagattattttacatcaaaaacatacaaatcctatataccacctacatcaactattgtctaaatttactgcaaatactatttgtacaaaatttattatcatactaacctagactataatgacaccaatgaataat

SEQ ID NO: 30921 - DNA, 391 bp, Glycine max
  Clone ID: LIB3051-036-Q1-K1-H12
gtcaagaaataatgacggggtcgtctcattctgactgatctgagtgtgggcgctggtgctcacgctaatgttgggagttatcaggagctggaacgtggttgctatattcaaaggcccttcttcaaccatggaaggtagggttctcctctttgtccgctgtagacggccggaaacaccaccttctggatttgcaggagatcgagacggttctcaccgacgttaaagctgacaacgttaaggttataccagttcccaagcactgcgattgggctgatttcatggtactcgacactggcaggtgcacctggcacgtcaagaacatcggccaagccctaatttacaaggcttagcagacacagagaggagttgaacgaatgatgctaccaagtgt

SEQ ID NO: 30922 - DNA, 245 bp, Glycine max
  Clone ID: LIB3051-036-Q1-K1-H3
cccaggcgtccggtcttttaagttgcaaggcaaaccaaagctcaccacagaatggcgatgcttagtccaaaacagatgcatttctgaaactctgaaaggtatcttgtgaatgaatctttcgcgagtggcgatgagactgagtccatgatgcagatgatggatcagtttgtggatgatttcgacgcttcttgcaccgcctctattactttaccaagaaccatgataagttctctgatgattacttt

SEQ ID NO: 30923 - DNA, 445 bp, Glycine max
  Clone ID: LIB3051-036-Q1-K1-H5
accacgcgtccggtctctacaatcactccttcctctcatcctctataaagaaagtgcttagtttgtgttgttacttggttcagtttccatggattgggggcttgctatatcttctcatcctaaaccttattcagtcacaactggtggaaatctctggcggagtaaacacaccaccaagaatatttactttgcaagttcttggatatcaaaagcttcacgacacacaagggaaactcaaatagaacataatgttttgaggttccaacaaccaaatttggatcatcattacaaatgcatcaaaaggaggtctacatatcaagaatgccatagaaaatttggtgttaaagccatctctaaaccaccttttggttttggagctcatgctttcaatcctaagaacattttggactctgtcaaaaatgtattgtctgctttctactggttt

SEQ ID NO: 30924 - DNA, 437 bp, Glycine max
  Clone ID: LIB3051-036-Q1-K1-H7
ctttgacactgctcccaagaagttgttggcatctgactctcgtctacgtcctgatagaatggcccttgagaagggtgacctatccacatctggttatgagaagagcagtttggaggagaggcaaagagctgagaagagaaaccgagaggccaagggccataagttcactcctagatggtttgatttaacagatgaagtaactcctaccccttggggtgacttggaagtttaccaatacaacggtaaatatacccaacattgtgctgccgttgatagttctgagtgcattgaaatgcctgacatcagaccagaattcaacccttggcaatatgataatttggatgctgaatagtgagcattcttggggaattctttctattttttttaaatatcattttggtattaagtttggaatggaatcctgattggaatgcttg

SEQ ID NO: 30925 - DNA, 423 bp, Glycine max
  unsure (1)..(423): unsure at all n locations
  Clone ID: LIB3051-036-Q1-K1-H9
agccttcggatttttcaatattaatataaaaatcttaaattatgcattctcaaatggaggaaatggtatcttggaagtactttttttgtgtgtgagagatctcggaagtactttctatgtactccactacacatgcagcttattttagcatttaaacttatttatcctagtgacacagccaccatgaaagtcgaaatttcctggaaatttcctttggcaaaatctgatagtcagtctgacaaagacattaataatagatatcaactcaacagccatcacacaatgaagaaattaaaataagaaggaagttggtactatttactatataaaaaatatttaaaatacattcacatttctatttacattntatttttctttcctatttctctccatttattatcacatcatttgtcatatttctct

SEQ ID NO: 30926 - DNA, 408 bp, Glycine max
  Clone ID: LIB3051-037-Q1-K1-A1
ataacatccactcataatatgcttaatgtttagatattgatgtgtgctaagcatagttgagcaaaaacaattaaaatataacattgtcggtggattcatggatttttgatgtaaagccaagctaagctaaggttgacacttttttacaccaacttttctctctctctgtgtacagcctaagcttaagcttatccctccccacttgttgcctctgccgtatgttatagccaaaagggtgtgtgagagagagaaacataaacacaaccaaccatcaagggaagttagagagagagttgagttgtgttgagagagatagagagatagaagagaagatgaacggtggtgaatcttacggtgctattgagacacaatacataaggaggcatcacaaacatgaaccaagggaaa

SEQ ID NO: 30927 - DNA, 429 bp, Glycine max
  unsure (1)..(429): unsure at all n locations
  Clone ID: LIB3051-037-Q1-K1-A10
gcgaagagtgcaggcaagagcagattgagatagacgaagccaaagagaagaataggaacctttcttcatcgatgaaagctttaaggaacaaggagcagagaaataataataataaatccacgtcgccaaacaaggcgcaacaagactactcgttccgtacgggggcagttgcggcggcgtagggtacaagtacaacgtaggattcctcgagagaggaaccaacaaatgaacgaacggaactgagggcagtgttcccggaaaaggaaagaaaacatttttagaaaagaagaaaaaaaaagtgtgactgaaaaggaaagtaaacaaagggaagttaagttgcgagctttggtttacttctcttctttngtttctttctttctttccacgaacaaagggtctcaaagagaaaggggatttttgtgagctgtg

SEQ ID NO: 30928 - DNA, 379 bp, Glycine max
  unsure (1)..(379): unsure at all n locations
  Clone ID: LIB3051-037-Q1-K1-A2
nccacgcgtccggcactggtgcaggaccagaaggagaaaggaaaggaaaaaataaaaggagaaggaaaaggagaagggtttggtagttggttacttagtttgtttgattaacgacggcgcactacacgatccncacaatccagaggcttgttattatctccatccatttaatttaattcccacaaccacgctcacctaagtttcaatttcaatcccttttctttttcttttttatttaaaattccaatttcgcgaaccccaaattccctccctccttttccctttctctctgntctgtaacgtagcatttacagcgatcaagttatagtgagtcacttaagagaagtttaggtatcatcgatcatctatggcagggtac

SEQ ID NO: 30929 - DNA, 279 bp, Glycine max
  Clone ID: LIB3051-037-Q1-K1-A5
tgaaaatttacagctttgctgtgttcaatctcatttttgttaatgtatagatgttttgcgtccctttagcgattgaacagcgctatagacagatgtattatttaatttcacatagtgaatataccctacaatacataacgagccatggctagtccaacaggattatctgtattatctactgtcctgttttggggaaaaaaatattttattgtaaaatttctggaccccgacacacgaaatggtatgttctccaacaataaatcttttgtttgtgttttc

SEQ ID NO: 30930 - DNA, 138 bp, Glycine max
  Clone ID: LIB3051-037-Q1-K1-B1
cgttcaatttacgaaagaggaagaaatacaaagtttttgggacctcttctcttggcttataaaaagtgcaaaacaggagccttcttggtgttttgatgtcgattggaattatatcatagaaaggaagaagctttgagg

SEQ ID NO: 30931 - DNA, 373 bp, Glycine max
  Clone ID: LIB3051-037-Q1-K1-B5
cagccatattctatctctacgccgctaactctctctcactctcgcgctctctctgtcacaaccttcactttactctctctgacagctaaaatgcaaggaggatttcaatcatttttgtcacacgggaatgtcattagaaatgctgctctacaacgggtgcgcatggtgaaccccctgttacagccaattgtctcttcgcggtttgaatctgttacacctgctcgcattgacgagcatggttttgagagcaccacaatttcagacatcttgaatgataaaggcaagggtgctgatggctcctggctttggtgcaccacagatgataccgtttatgatgctgttaaatcgatgacccaaaacaatgttggagctt

SEQ ID NO: 30932 - DNA, 349 bp, Glycine max
  Clone ID: LIB3051-037-Q1-K1-B7
gctacatcatattctctctctcaccctgttcttctttcaagtttcaatggatcgaacccggatccttctcgttggattaccaatcttcctcttcttctcagacattctcaacctcttctctcctcaaccctctcccaaaccaacccatcatcatctccctcccatccaccccaaaccgcaccctcaaccgcaccttcaacaacccctcgagttccccacgcagaaacaaagtggtattggccttattggaattggcaacaccgtgagcattgacttctgcacttcctgctcttacaagggaaatgcagtaacagttaaaaacatgctggaatctgaatttcctgggatt

SEQ ID NO: 30933 - DNA, 408 bp, Glycine max
  Clone ID: LIB3051-037-Q1-K1-B8
cccacgcgtccgctgatcactgcaccagttggtatgcataacttaccaaggttaatgttggtgaaaccaagacttcattgaagaaaggcacgaggagttgaaagctggcaaaaaaaaaaactgcattatcctctaatgctgtgtttggttgagggggaggagagaaatagaaaagttgtgagggttccatgtggatttctcgcttcctacaatatacttaaatttgaatatatcgcttatatttttatcctctattttcattctctggtccaaacacattgcttcaaaagatgaagggaaaagaataaaaaaaaaaaagatggaggcagaagaaacatttttttcctgttgtaaatagtgtgtaacttgaacaatgctgattacatgaaatattgatttgagctttgg

SEQ ID NO: 30934 - DNA, 373 bp, Glycine max
  Clone ID: LIB3051-037-Q1-K1-B9
tcccaaatctggaagaatatcttgggaagcaggtcttagaggctgtttcattgattgaagttagaaggcacttcattgaagcattatccagtccgtttggaaggccagttgaagctgatgctgtcttttgcaggaaggcaacttttcttgctgcatctggtgttttcacgttcctgaagcagaagaaataccgtgtgacagaaatgttgggatccaattgcaagatatgggacttgagttccacattggaagtaatgagattctaatgtgggttttataagaccttgggctctctgactacaatgattagcttttgtggtatgattcactcaaagttcttatcaattggtattagagcttttcattatgtctc

SEQ ID NO: 30935 - DNA, 328 bp, Glycine max
  Clone ID: LIB3051-037-Q1-K1-C1
cgcatactactacaacatccagtccacgtacctcggcttcattggcggcgtctacgacgcggactggaacgcttccttcgacttctcctaacatgacctttttatcgtacttgaccaagctttagctctcaagcgcaaataatatccttcccaaggccttctacaacccaatctccccaagctggaccaactaatcgacttctacgatcacaagctgtaaccgaaccagcttcgctacttggatgaaatcctacgcctccagggactcaccggtgacattcactgaatctcaaccgattctacggatgaattctattttgacaggtat

SEQ ID NO: 30936 - DNA, 419 bp, Glycine max
  Clone ID: LIB3051-037-Q1-K1-C12
gtcaccatgactttcaagcgcaggaatggaggtcgcaacaaacacggccgcggccacgtcaagttcattcgatgctccaactgcggcaaatgctgccctaaggacaaggctatcaagaggtttctggtgaggaacattgttgaacaggctgcagtcagagatgtgcaggaggcttgtgtctacgaacaatacacgcttccgaagctgtatgtgaagatgcagtattgtgtttcctgtgctatccactctcatgttgtgagggttcgatcccgcactgataggagaaagcgtgagcctccacagcgattcatcaggcgcagggatgatgcaccaaggcctggtcagcctggtcaagccccacgtcctgctggagtaggagctcctgcccgagcttaaaagaaaattccaagtttttgggg

SEQ ID NO: 30937 - DNA, 430 bp, Glycine max
  Clone ID: LIB3051-037-Q1-K1-C5
attaatttcactgtgctggaatgaattatgatccccattaaaattcattgacagtgccggtagaataattgccacatttgagtgggagtttattaagatgagctgaatggtcatttttcagtcatgaggataatcaatggttattggtgatgtacgtttgagtacatgtgagcaaattaattgtttattttattagctaggtagtcagggggaggggaaatggttagtatcaaaccttcttcctcatccagatacagctgccactgggccatatgcctagctgctactgcctttaaatcatttcagtataaatgatggaatcccaagtactactgccttttctgcttcttgcttattattcttttcagttttgtaacttgagttgtgtgtgtagatatcttatttcttgaactgtacttgagttgtattc

SEQ ID NO: 30938 - DNA, 434 bp, Glycine max
  Clone ID: LIB3051-037-Q1-K1-C6
cggacgcgtgggcggacgcgtgggcggacgcgtgggttccacgtttctttctacacactggattttcaaaacaaagatcgtagaaaagcggttgcgttccggctcggttaattaacacaccaaaaccaaaccaacctttctccgtcaacatttaattccttccgtcgctagaaaaatgcccaagccacgtctggatcggaaaaattagggcgctagggttttgttcgcttcatccgattctgcttcggattccgatcggaaatgtccgaacctcattcatcgtcccgaacctccgcgtatctcgacgcgctctctcaggcgatccacatgaagcttcagcgggcgttggctaattcctcgcagaggcgcaatttgttgcaggagctgtttgcggacatagctttagaagtcgatgaccgagccaaagatgtgat

SEQ ID NO: 30939 - DNA, 433 bp, Glycine max
  unsure (1)..(433): unsure at all n locations
  Clone ID: LIB3051-037-Q1-K1-D1
tcgnccacgcgtncgnccacgcgtncgcaggggtcaaaatcgatcgtcatcgagtttggaccaacgtgcattcaatctgcaactctcggtagtactacagtgctatatagaagaaacgaaacgaaactctatggtgcttaatagtggtggttgagtttttaggttgagaaagaaagaaagacacggcgacgaagacggagaacagtggtggttcttcttcgcacgtgcgagcgtgctttaccatcgtctgtgcctgcaggtgtaggttcgtgtgggtttgtggttgaaaaaaaagaggtggttaagatcacggtttttgagtgaaggaacagtgagaatttttggtttttatttttttgaaaaatgcctcacagagcaacttactttttcccgaggcaagttcccggaagaggattggatgaatcttcgaagc

SEQ ID NO: 30940 - DNA, 353 bp, Glycine max
  Clone ID: LIB3051-037-Q1-K1-D10
ctcactcgtccgcacatgcgtgctcccacgcatacgatcacgcggataagaggcagactactgatagtccacaatctcgcaagtaatagaacgatacgacggatccatccactagagctgatgccggtctcagaaaagttactgtatcagatcataccctatcacaaactcacttgataagtgatggatgccaatctcgattatattcacatacgataggtcatggattccatcgctgtttatcatactactgatgcaccatgcatgctcattaggcaattcgcattcgctgctagcgatatgcatgcgacagatcaagatatactacaacgtgcactgggacccatcaccat

SEQ ID NO: 30941 - DNA, 318 bp, Glycine max
  Clone ID: LIB3051-037-Q1-K1-D2
tcggccacgccttcggccaagccttccgaaaaacaggaagtttccaccattgactaccacccgggttggtatctgactttgctttgcattcctttactacgcggttgaaggagccaaggttagtttcaataacaagtgctcatacacggtatggccaggaaccctaaccggtgaccaaaagccccaattatcaacaactggtttcgagttgggtccaggagcatccaactctgtggacctatcatctccatggtccggtcggttctgggcccgaacaggatgctccaacaacaacggaaggttcagctgcgccaccgc

SEQ ID NO: 30942 - DNA, 358 bp, Glycine max
  Clone ID: LIB3051-037-Q1-K1-D6
caagaatcttacattaatgcgacacaaatcttagtctgtttggttgctcgttactaacgctagatccatgtctgggctgaagccataatttataggttctgcatattatttgatgattgatacaataatttataggttctgcatattatttgatgatcgatacaaaaatttggcgcaaaacttgaagtcacaaacgtgtgtttgaaacacggtactaatgccaagacatacaacttcatggaaaactatattgcagatagataaaccaatattgtgatgctcatactagaagctattgatgaggctaacttgggatatagctatatcatatttggaaggagatggtttgccagacaca

SEQ ID NO: 30943 - DNA, 320 bp, Glycine max
  Clone ID: LIB3051-037-Q1-K1-D7
acgcatgaatcttacattaatgctactcaaatattagtatcttcacatttccatgacgtcaaggcgatcacatgtatggcatggaccattacatatacttaacgactattatcctatgactgatccaataacctataggcaccgtctataatctgagcattcatccatatttgaagcacacgaatcgagacctaaaccggagagagctataacgctcttcaagcctgtcgtacattccccttgctcattctctctcactctcgattctgaccttatgaaaagaactaggtaacaatcaatatctgtggtccaaacaatgt

SEQ ID NO: 30944 - DNA, 341 bp, Glycine max
  Clone ID: LIB3051-037-Q1-K1-E1
accaacttctccatcgtcttcgttggctcattcgattccttagcttcacatctccatggcgctgcaccggttactgaagaggaaaggaggcgtcgatgaacttaacgacgatttccctctcgcttctccggcaaccaagattcgccgtctcgacgctgagttgccgccaattttggaagaggacgaaccgttacctaacgaggagagagctctcgttctcttcaagcctctcgtccattccccttcctctttctctctcactctcgattctgaccttatgaaaggaattaggaacaatcaatatctgtggtccaaacaatgtgagcgcgtgacagagttag

SEQ ID NO: 30945 - DNA, 354 bp, Glycine max
  Clone ID: LIB3051-037-Q1-K1-E3
cggacccgtggtcggacgcgtggggctaaagatacctctaaacattcgcgcgcaacgccgttcctgctccatggatgatggcacaatggaacttgctggacactctagagcaagtgaaacatcagcaatatccaagctcaaggtgagagttgaacctgaagcatgtgggaaagggcttgtgccatatcaaatatgcatatctgttgtgacagctgatgatcgagaagagcaatgtatgcatctttccttgtagcttataccccactggattctgccttcaaaaagcgttcactttgacatgatgagctgtcatggatggctaggttgctgctggatgtgagacggtatgatata

SEQ ID NO: 30946 - DNA, 378 bp, Glycine max
  Clone ID: LIB3051-037-Q1-K1-E8
gggcccaacaccaatgttgggccagaaccgtgggctaaattggagtggatggatggtggctcctgttaaaggtgaatcgattccaatcaaactggttcctcggtccttatgagctgaccccacacatcgtaacattaataacaaatttagtgtgaagtactttttaaatcttgtgttggttgatgaagaggacagacgatatttcaagcagcaggaaatcacaatgtataagctgcaagaagaaacttcatgattacttatcattcggggagtgagtattaggtttggtaacaaataaaaaagattgtgatggacattcttaaaatggcttagtgttctagcttgctttcatcactttcggtcatgtacatcgacaga

SEQ ID NO: 30947 - DNA, 408 bp, Glycine max
  Clone ID: LIB3051-037-Q1-K1-F10
gctgaaggtttcaatggtcctgaaggttgtccaaaaggggttggaaatcgggaggacatgggaaaatctcattctacaaatatgtgatgattatttcttctatgaacaaattgaaaattacaataagccttttcttgatgctctggcccaatatgatgatgggagggacctatctgattatgacttcaacgaagatgaattagtttccccacatgatgatgccaacaaaagaaaactggcatataggcatcgagtcattgcccaaaagtacttacagggtttacggaatattttagataataagaccataaaactttgggatgaattgtatgataaaactgatgaatacactgacaggtggctttcatcagcacggacctttttgaaggagtgttcgggtgaagataa

SEQ ID NO: 30948 - DNA, 292 bp, Glycine max
  Clone ID: LIB3051-037-Q1-K1-F2
gtgagtcgcagaaccctcccatggccgccgtggcccctccgcggcgcaagcctggatcagtacgccaaggcctccgtagttctctccgttcttctcgttgtctccgtcatcgctctcttggtcctttcgttgaacaagttgcgtgcgttccaactcgggggatcctatgagacgattactgtcattaacgttatctcttactactatatatccttactctactgcctcgattatgattgacttggcacattatcatagtatactgatctgtattcgatttctaccacttagt

SEQ ID NO: 30949 - DNA, 324 bp, Glycine max
  Clone ID: LIB3051-037-Q1-K1-F4
ctcacaattcatttgttacaacttatatttatatatttactggtaaatattaatggacacgttacaaatttggtcattgagcctgtaaactgatcactatctacaatcttatgtcaacctatttacaaatttaattgaatcgactactgttctatcctttgaatctagacagaagcagtttaaatcttatctatgcaatcttgattacaaatatgctgaaatatcatcatgttaaggcctgatgactacacagatttattatttataactttaagtttctgaacaactatttcttcagctaacaattttaaaccatcgaacata

SEQ ID NO: 30950 - DNA, 234 bp, Glycine max
  Clone ID: LIB3051-037-Q1-K1-F5
aaaaaaaaaaaaaaaaaaaaaaaaaaaaaaaaaaaaaaaaaaaaaaatataaaagatacgggctacaatactcctgcatcctacactaatatataatgtctcgtaacttcaaaattctgttatctggccaacaacttacaaccatggtaactgctattactaaggcaactctaatgctaattcacttcgtatccctttctcattttgccagctggcctaccaggtttaacccca

SEQ ID NO: 30951 - DNA, 409 bp, Glycine max
  Clone ID: LIB3051-037-Q1-K1-G1
cccacgcgtccgcccacgcgtccgggctccaagagaggattttcctgcagaacaaggggaggtggatgttaatgcccgtaatttgctgcccatggataccacaggaaatgctaattttgaattggtgcaacttttgggagatttacaggcccttgctttaaatccttttcatggtattgaaagaaagatcccttcagctgttcagaagttctttctgcgattcaggtctcttgtttatcaaaaaagcttgtttgtatctccaccaactgagaatgaagctcctgatgttcgtgtcactaaacctccttccagtgtcgggatatctgacagtcctgatgagtatgtcaaagcttcaccggttgtaaaacctttgaaacatattgtttggcctgatgatcctacaaaagct

SEQ ID NO: 30952 - DNA, 421 bp, Glycine max
  Clone ID: LIB3051-037-Q1-K1-G12
tccacaaggaatccgtcaccaaggtacccaacgcaaaacctggcagagagagtacggatattgaaatatatggaatgcaagggattccaccagatatcttggctgctcattacggtgaagaagaggatgatgttccgtcaaaggcagccaaggtggatattccaccaactcagcttgtaggtggaatgattccacctcctttgggtacaggatatcctccgcgaccaaccttgcccacaatgccaccaatgtataatcctgctgtacctgtgcctccaaatgcttggatggttccacctcgacctcagccatggttttcacagcctccagctgtttcagttcctcctgctgccccatacacacagcagccattatttcctgtgcagaacgtgaggcctccactgccagctactgctcctgc

SEQ ID NO: 30953 - DNA, 432 bp, Glycine max
  Clone ID: LIB3051-037-Q1-K1-G2
gaaagagggcactgtagacaacgagttcatgcagaagaagagttccaagatgtgctgtgtctttcataaacagaagccctttgacgaagatgatacgtgatgaggatgaacatcactctgatgaacaccctcacgatagtgggttttgctgcatgaatcatgatgatgctggcccaagcagttagggaactgattaagctgagaggttattaatgaaccatgagaggcatatattatgtagagtaaatgattcaagaaacccttgaacttgagtctgaatgtcaggagatatttataatcgcgacattggaactagaggaacattcagtgtcagtttgagtgtcacaaataattggcctagtttactaccaaattggtttcactaacttatgtcatagatgcagttgttaaaagatctatgatgtaatcatg

SEQ ID NO: 30954 - DNA, 374 bp, Glycine max
  Clone ID: LIB3051-037-Q1-K1-G5
tcgagaagcttttcttcgagccttgaatgggatctggtttgctgggaagcacattaagcttggacctggtctttccaagattggaacctggattatgcaacaatcacagaaaggaaaagattaacctgattttggtcataggttgagggacaacctatacttaagggataataaagcaagaatgtcatctggaattaatgcatctggggtcagcttggaaaatggatataatcagggatttcggtctgaaacacagctacctggttttatggataactcactggttcatgtgaattctagcattcacaagaccacaagaggggcatttgctggaaaagtatctggtggttttgaagcctgtaatgctattgatg

SEQ ID NO: 30955 - DNA, 180 bp, Glycine max
  Clone ID: LIB3051-037-Q1-K1-G6
cttccgaaaaacaatctggggcgaaagggggagtctcttattccttctagacgcttacattgatcggcgaggtctgatacatggcggagcatcacgaacacatacgaactgaagggtgagtccttgttggaaaaaataagggggaggatcttttaagactccctacttgtcttccccgga

SEQ ID NO: 30956 - DNA, 437 bp, Glycine max
  unsure (1)..(437): unsure at all n locations
  Clone ID: LIB3051-037-Q1-K1-H1
nccacgcgtncgaaacaacctcagttgggattctcatgaatcccataaattatctggaattacttgtggaaattgtcagtatggtggctcaaatcagaacctggagaatatgatcggtacagtcatttgtcagtatggacaagttacaccaaaattatcaaacagtcaatgtggactcttacctgtttctggggttatctccaaccttaagtctgagggacatggtaatgttttcacttctttgttctatgcacaatctggtattcaccctatgtcgagtccaaaacctgtctgccagaatgagagttctccctttcccacaagtacctncacccagtcctatcctgaaagccacaactcagatcaactacatgactgctccaatgatgctacttgtcttaatcaaaatgtaaaggataatactgattcagatcacg

SEQ ID NO: 30957 - DNA, 419 bp, Glycine max
  Clone ID: LIB3051-037-Q1-K1-H11
ggcttgggtaactgattagatcgtagccttactctcttactgcccttggaaacagtgaatgcagtggatcctgaggcacccagtgttggtagtactgatgctggcaacagcaatgtaaataagagtgaagaggtcgctggaaattccaaaaataaaaagaagaataagaagaagagtggaagaactgctcaagaggaggaagatttggacaaacttcttgcagagcttggtgagacccctcctgtaccaaaaccctcaactccaccccaggatgataaagttcagcctactcctgaagttgtactggttgctgatgcttcgggggaaaaggagggtgaagaggagactgtagacacagctgctgcaaagaagaagaagaagaaaaaggaaaaggagaaggagaagaaagcagctgcggc

SEQ ID NO: 30958 - DNA, 201 bp, Glycine max
  Clone ID: LIB3051-037-Q1-K1-H12
gtaaaaaaataaaaacggggtcgtctcattctgactgatttgagtgtgggcgttggtgcgcacgctaatgttgggagttatcggagctggaacgtggttgcgatattcaaaggcccttcttcaaccatggaaggtagggttctcctctatgtccgctgtcgacggccgtaaacaccaccttctggatttgcagaaatcgag

SEQ ID NO: 30959 - DNA, 316 bp, Glycine max
  Clone ID: LIB3051-038-Q1-K1-A11
tcgaattgaaccatttccatattaccgtccacatatgcctcctactggtcttgcaaacccaccacccccagttcctcctggagcttgacccaaaaggcaccataagaatggagatgtctacaggcctcatatgcctgatgcctttattcgtccaagcattcctatgagacctggctttttccctggttcaatggtctatgaaggatattacagtcctccaatgggctattgcaattcaaatgaacgagatgttcctttcatgggaatggctcctggaccccctgtctataataagtactcaaatcaaaatcccccc

SEQ ID NO: 30960 - DNA, 454 bp, Glycine max
  unsure (1)..(454): unsure at all n locations
  Clone ID: LIB3051-038-Q1-K1-A2
gcggaagctcatgattctctctctcgccattttcgccattctccctcccattttcttccacttccgcctncgacgcctncaacagctgcaactcacaaagtgccgttggctcaacgatcctcctctagtctgcgcccacggtggcgattcctccaaggcttctccaaacactatggcgtcgtatttccacgctcttcagtctcgcgtcgactgcattgagatcgacgtttctcgttcttctgacggagttctctttgctctccatgacaggcagggatttgcagcgcttaaatggaaacactagttctaaagttggttacatgaactcagaagagataagaaagctcagtgctttaacatcagtctacctcaaagtttactgatgaaagtatacttacaatccaagatgctctgatgttgactggcaaatcagtacgacagataggtctagatg

SEQ ID NO: 30961 - DNA, 334 bp, Glycine max
  Clone ID: LIB3051-038-Q1-K1-A4
tcggaactaacgtgcaagttccaaggcggagtaaaccattatggccaccaaccaagagagggattttgagaaccagaagaatgaaggagaacctgagccttttgggtttgggaaaaatggcgccattgaaggcttaatggggggggccaaatctttccggtttcccaaagcaaaactcggaactttggaaatctgttgttggaaccgtggaaaacactgtaaccaccgttctgggtcccgtttaccacaaattcaacgctgttcccaaccacatcctcctttttgtcgacaacaaggtggatgaagctgctcacaaattcgatgagcatgcacc

SEQ ID NO: 30962 - DNA, 391 bp, Glycine max
  Clone ID: LIB3051-038-Q1-K1-A6
gtagatcgtccagccgactgtttattctgagctcctaccctgtgaggcagctggtgaggcacctgactcacaatttgacgaattatatggcccatacaaagaaccacttataaaaacacttacagtcagtgtatcaagatcattacttggagatggcctgacagatgatctaactgtggccaatgattgccataatgaccaatctgatgtctaggccgatgcagtgaatgcttcagaacttgatactgagaatctcactgaaaaagttactgttactaccatcactgacaaatcttctaacgtgtctgatgatggcgaagatgcccaggagaatgaagagaagtctgatgtcattgctaatcagactgactctctaaatcatgtaactaaa

SEQ ID NO: 30963 - DNA, 235 bp, Glycine max
  Clone ID: LIB3051-038-Q1-K1-A7
cccacacgtccggagatgcataaagcgcatacaggtcatgtattctcaaattctgaaagagcgatttatcagtccgcaagtgctaccaccactttctcagagataatggatgtgatgcccaaacacgacacaaatctatcacagcatgtgtctaccatacccgtgaaaccccgagctggagccccatttggagagactcttacattccaatcatacccatacctattagtcaatg

SEQ ID NO: 30964 - DNA, 330 bp, Glycine max
  Clone ID: LIB3051-038-Q1-K1-A8
cccacgcgtccgctagtgctttgatagttcacacactaagttctgaaaaatgagttccaaagtttttcttattctacttatgctcatggccactatacttttgatctcctttgaaggtgcacccgatgatgcataccagaattttgacaaaacagatgggaagcgtactgcaaatggggtcgatgaaagcaaatattggcgtggtggctatggcgactatggtggttggcgttgtggctgtcggcgtgacggctattgacgcttgcctgctggctatagcatggcccgtggtggctatcgtggctgtcgctcagactatggtaatggtcg

SEQ ID NO: 30965 - DNA, 336 bp, Glycine max
  Clone ID: LIB3051-038-Q1-K1-B1
aagggctaaactaatttggcaaatttaacccattcaaaaataaaaatggtaaaaaaacaaatttgggagttttcaaaaagctaaattacaaatcctaacctttggaaaaactcaaaaaaaattttaaattttttttttcccggggggggttcaccacttaccatttgaaattggatatcctaaaataaccaggctaatttttaaacttttttttttcactggtgcaaaaatgaattggataaagggttatggaccaaacacccactttaaaatatttcaaaaaaatattggcatttttggatttaaaaaaaaaaattcccaattttaaaatttttt

SEQ ID NO: 30966 - DNA, 430 bp, Glycine max
  unsure (1)..(430): unsure at all n locations
  Clone ID: LIB3051-038-Q1-K1-B12
cccacgcgtncgcccacgcgtccgctcgatcccaattccactagggattcaattccgatgcgattccgagcttgttagatccacgacaacgtttcgtttcccagattcttttgtaaaaaaaaaataatcttcctttgcccaacaggtaagttggaaaaaaatggaccatgacaagactgggtgccaagctcctcctgaaggtcctatattgtgcatcaacaactgtggattttttggaagtgcagctaccatgaatatgtgttctaaatgccacaaagacatgttgctgaaacaggagcaggccaagcttgcagcatcatccattgggaatattatgaatgggtcttcaagcagcactgaaaaggaacctgttgttgccgctgctgctgctaatgttgatatcccagttattccagtagagcctaaaact

SEQ ID NO: 30967 - DNA, 253 bp, Glycine max
  Clone ID: LIB3051-038-Q1-K1-B5
gtgttgatgaatttggctgtgtgatcatttatgtgtaagtagagtggtattgagaagctgttcgaggttggattggatgaaccaatattggcgaataggaacaatggattgatgaacgcattcttatatgaagttgttagtctcactagttcacactgcatagagcgaatgaaattcagtgcctgacatatgctgagggtctctaatgtctgcaaggatgtttacttgagacagatagatgtgatcatgcatg

SEQ ID NO: 30968 - DNA, 374 bp, Glycine max
  unsure (1)..(374): unsure at all n locations
  Clone ID: LIB3051-038-Q1-K1-B8
nccacgcgtccggttaattntatcttcattgtggtttaatgtaattagactacaacatgcatatatacatataattacgttttattcttattgttatacaacaagattttgtcattttggaacttaagggtcttggcaatactcttgtaattagggtgctgagatagattttcgaacttgtcaacttctttctagttgcgttcgtagcaccaactggtattctctatttctctttgtggttgtgcatcttgcgcttatactaatctatttttcttataaaaaattatctataaaaaagaatcacaaaattattattaaatataactttctaatgtaaaattctaggttgcaatagaaaaaaaaaggtgaatttt

SEQ ID NO: 30969 - DNA, 432 bp, Glycine max
  Clone ID: LIB3051-038-Q1-K1-C10
cccacgcgtccgcccacgcgtccgcggtctcgtgggtttaatgatagaatgggctcaccagaaactaccacttccagttcacttttaccttagtccaatctcaacaattttccatagcaagcgggctggtactaaaaaagttgatgatgtactacatgatccatcttatctgattgaagttgccaaatgtggacttttctttgttttaggtgttgaagcaatgtccatttgtcatggcactgacattccttctactgttgaacaagtatcattgacatggaagttacattccttatctgtcagtttccttgttggaatggagatacttgaacaagatcggagcatggttacttttgaagctttgcaggatctttatggtgagcttcttgataaggcaaggttaaaccaaagtgaagaagttatttcctatga

SEQ ID NO: 30970 - DNA, 431 bp, Glycine max
  Clone ID: LIB3051-038-Q1-K1-C12
ctcgaacatctggtcggatggagctcctcttctgaagaaaataagacatatcaaacttcaaatggagagactataaaagcagatcttcattttctatgcacagggaaaccacttggttcaacatggattagagaaactcttctaaagaatgacttggatgctgatggaaggatcaaggtcgatgagcacttgagagtgaagggcaagagcaacatttttgcaattggagatattacagatgttcaagaaatcaaacaagggatgtatgcaagtgctcatgctcaagtggttgccaagaacctgaagctattgatagagggaggaggcaaagagcgtaagttgggaacatacaaggcacagccaccaatatctatagtttcacttggaaggaaaatagctgttgcacagttcccattcatgactgtgcttgg

SEQ ID NO: 30971 - DNA, 289 bp, Glycine max
  unsure (1)..(289): unsure at all n locations
  Clone ID: LIB3051-038-Q1-K1-C2
ncgccacgcgttcgaagctttatatggtggccccttttctagcatcattgaaatcatggatttcaacacaccaacctgctatggctccaaggcccgatttgcctcttaaaggaatttgcgtgtggaaagcaaaacccggttctattggaagtagctccacagtaatggatatccagccaacaaaacctgaacctgattctcacacccctgacctggggcctggcaagagctttaagaatttcagatttgatactgcctccattttacaaagcatggaaacttgcttttc

SEQ ID NO: 30972 - DNA, 402 bp, Glycine max
  unsure (1)..(402): unsure at all n locations
  Clone ID: LIB3051-038-Q1-K1-C4
cccacgcgtncgatgatcccgcgtttgtttgggtcttttctcaattcttcaaccaacccattcctgtaccacgcgtcattctccggccaccgtccacgacggagcgccgttaccggtttaatatttgcccaaaaggcttcggcgaccgcccgtgatggataaagtcttcaacaagctccgcaatttggacgcttacccaaaagtcaatgaagatttttacaaccgcacgctcgccggctgcgtcgtcaccgtcgtttccgccgctgtcatgctgtatctcttcttctccgagctaagtctatacctctatacagttacggagagtaagcttttggtggatacttaaaggggagataccttgcacatcaattttgatgtcactttccctgctgttcgatgttc

SEQ ID NO: 30973 - DNA, 264 bp, Glycine max
  Clone ID: LIB3051-038-Q1-K1-C5
aaactctcaaccgtcactctctctctctcgaaatcttctctctttctctctcatcaaacaacctcttctccggcggccatacttccgcgcgctgcctcgcggttctcccccgaatattctgttgaggtcttgaattcactaataaaggaaagttgatattttcagtaaatctttgctgtactaaaagttttggaagtttttgcaatgggtgcaactgaagatcttgggaacagcacacaaggtgccgcagaatgtcaggaaaac

SEQ ID NO: 30974 - DNA, 279 bp, Glycine max
  unsure (1)..(279): unsure at all n locations
  Clone ID: LIB3051-038-Q1-K1-C7
gatctgcagtttcaccaagctattgttgatttcattcagctaatctgattacaactaattaagtcaccaattataattatgtctcagttttattaattatggtcattttgtgttaattttnttccttcttgtctgtgttgctttaatttccaataaattattgttgactttgcttatgagaaaagttgagatatacagaggaaaataatattgacgcttgacatatcgactgggcttatgatcttagtcacgttggttcatcctcaagacctgtctttt

SEQ ID NO: 30975 - DNA, 440 bp, Glycine max
  Clone ID: LIB3051-038-Q1-K1-C8
gaaaaataatcagcggcatcacacaccgtttccaccacgatctaattttcatggacgttgagattgatggctctgttactgtcgaaacagtaggaaatactgctataggtgaggttagtagcatagcggatgacaacagagaaggtggaagttctgttgaaccaaatgacaaccaagatcaacatgataatgggactcaagattcctctggagggatcactatcccatctgcaattcccacagtatcggttgtttcagttgaagagccctatgttggtcaggagtttgggtcagaagcagcagcacatgcattttataatgcttatgccacagaagttggatttatcgtacgtgtgagtaaactctcgcggtcaaggcgtgatggaactgctattggacgtactcttgttgcaacaaagagggattcaaaatggctgaca

SEQ ID NO: 30976 - DNA, 423 bp, Glycine max
  Clone ID: LIB3051-038-Q1-K1-D1
gttttcaaatcgctaaacctacattgatacatcactgccttcacaaaacgactgcgcctagcttctagccaccctacaatcttcgtcaacgttacttgtccacctagttcgagggattcaattgagagggatagggactgatggctgacaacacacagtcttactggcaaggctacaaagcgtttaggtcagagaggttttcctttttgagcaactattcgaggttcatcaaccgtgataaacccatcccttcctggtcaagctctgatgtcgaggagttcattgcttctgatcctgttcatggacccgtcctgaaaagtgctagagaagcagtgcaatttggcctcacaggaagtgctttgggagcattatttactgcacgctatgccttgaaatattcaaagagtttacatggcgctggac

SEQ ID NO: 30977 - DNA, 262 bp, Glycine max
  Clone ID: LIB3051-038-Q1-K1-D3
gcggaacgtaggtgtttgtaggttttaggacaaaatcaagttgaaccaatcaccttgttattagtggcttcttaaccgtgggattcgcacagtatgttattttttctaacataggattactgttgtaaattcggctggggcgttgcagagtggaggctcattgttattattatttttttctttggtcctacctttatttgtgtagtattttttttaatatatatatatagtgaactagtcgttatagattttttttccagct

SEQ ID NO: 30978 - DNA, 274 bp, Glycine max
  Clone ID: LIB3051-038-Q1-K1-E4
aaggtaactaacttttgtttggagtctcagtctcagagtatggacactcagaaagggccgtcttcatcggctgcagctgttacttcatgtcgaaagaagaagaacgaagaagccacttttttggaggacttgaaggatcacattgacgagtttattaatgcttctatggatgaacataagacttgcttcaagaaaacagttcagaagatgttcggaatgtccaaagcttgtgcagagagggacaccaatgctggcaaagaagttgagagttctc

SEQ ID NO: 30979 - DNA, 253 bp, Glycine max
  unsure (1)..(253): unsure at all n locations
  Clone ID: LIB3051-038-Q1-K1-E5
gcctgccgtaccgtccgtnatcccggtcgcccacgcgtccgccactagnatctagtgcactcttgttatttcaggccactagaaatctagtgaatgtaagcctgctattgagatttgacaatctatttaaagttttgctgcattataagctgtgccccttcaactagcctctttaccacttcaccagcatgcttacattcactagatttctagaggcctgaattaacatgagtgccacttgatttttagtggc

SEQ ID NO: 30980 - DNA, 407 bp, Glycine max
  Clone ID: LIB3051-038-Q1-K1-E7
aaattattgagggacttcctgtacagtcttaggttttattaccctcacattcgttattttcttatgtgtttgctctgcgtttgatggtgtacggtaacctggtagtgtcagagttattgtgtgtgattctaacaggcactataagagtattgggaggcactggagtttttgtggacaatttgtttgcttcatttgggtttttggagaactctgcgacgatgttcagcaggctgtggaaggcagtggccggagattactgatggacttcctgtgaagccttacgttttattaccctcacattaattattttcttatgtgtttgttctgcatttattggtgtacggtcacctggtagtgtctgatattgtgtgagatcctaacaggaactataagtattgggaggcact

SEQ ID NO: 30981 - DNA, 371 bp, Glycine max
  Clone ID: LIB3051-038-Q1-K1-E8
cccacgcgtccggtttttgggtataacattgaattagctttgtctaatgaagagacatggaaaaatcgtaataggccaaaacctatatacagcaaggatatcctgtccgatgaaccggctcaacaaaatggaaatttggagaaaaaatatgaatctgatgaattatcagtttccgccatggcatccttgggcatgaagaacccacaggatatttggagtctcaaagaaaattctagaatatttcttgaagcatttagacttttttttacaaaaagggaaaaggagattggcaatctaaagcttgataaagatgatcagttggctgtagaatttgttactgcagcttgcaacataagggctgcttcatttgg

SEQ ID NO: 30982 - DNA, 407 bp, Glycine max
  unsure (1)..(407): unsure at all n locations
  Clone ID: LIB3051-038-Q1-K1-E9
tcggcgacacttggccgacgcgtgggtctgtgtcgtgtantgttattcccaatttgaaaatggtgacagaagaaaaagaacgaagaaaaagggaaagggtttcgatttcggaagaagaataataaggagcttctgaaagaagaggttcaatgttcgaaaatgaagacgacgataggcggcaaggtcatgaaccctaccgatgcttaccgaaaggagattcggaagaaagaattgaaaaggaataagaaagaaagaaagaatgtgagggaggttggggttttgaagaaagatcctgatcaattgaagaagcatattgagaacttggaaatgatgaacgctgatggtgctttggataaagcaagaaagcacatgatgagacagctacgagatacacttaatcttgtcat

SEQ ID NO: 30983 - DNA, 383 bp, Glycine max
  Clone ID: LIB3051-038-Q1-K1-F10
cccacgcgtccggggagacggcgaaggacactacgcagaagatcaaggagacggtggttggcaaggatgatgatgatgatgatgatcatggtgatggtcatggtggtcttaaggatgatgatgttgtggagatgaggaggagagttggtaagagattaccatgagaagggttattagagaacacagaatcaatggcttcatttagtacttccatttcttactattatgccgtatctatgtatttatgtttctagtgatgtttttttcttttttttttcaacatgcggataacttggggatatcaaggttgttagttaatatgggcataatctttttgtccagccatgatatcctcttggaataaaagtttatatattaatcat

SEQ ID NO: 30984 - DNA, 428 bp, Glycine max
  unsure (1)..(428): unsure at all n locations
  Clone ID: LIB3051-038-Q1-K1-F3
tccccctctccattcaattttctttctcttgctatctgaaaataaataaatgattattgtgctattcataaattgactgcagtttaatattattcttatatagtgccggatattgttgcgggttttcaaaaattaggttattgttttcatgcataaactcactttctgatatacataattctgttgagtgagccttttgaaattctacactcgctcttgcttaccatggattgtgcgcagaactagatacaaaataatttggtatttgttcccatgagttttacccgctcaacaattngtactgtagaacatcatttgtactttttggcgtgtattaccaaatacagaanaagaagatcgcatccaatcaactggttaattttggtttccatttcacctccttccacttatgattttggtgatatgtt

SEQ ID NO: 30985 - DNA, 427 bp, Glycine max
  Clone ID: LIB3051-038-Q1-K1-F6
gcctaaatgtgttgaagtgtcttgttgatatggataatgttgggattccactaccgcgggctgatcttgagcggcttgcgtgggcttgtacccgtgaagatcactacattgttgtgaaagagctgtacaaccggataagagaaaggtatgataagatcagcttgtctgtctgcaaccatgcaatccggttgatgggaaaagcaaagaaatggtgggcagctttggagatatatgaagatttattggacaaagggccaaaaccaaataacttgtcatatgaactgattgtctctcacttcaatgctcttctcagtgcagccaacaggaaaggaatctggagatggcgtgttaagtagttgaacaagatggatgataaaggcctactacctggatgtatggaatggaatgcagttcttgtggcctgttc

SEQ ID NO: 30986 - DNA, 387 bp, Glycine max
  unsure (1)..(387): unsure at all n locations
  Clone ID: LIB3051-038-Q1-K1-G1
nncgccacgcgtncgcccacgccgtccgtggacactggttccagccttttcaattagttgggaatatgcaaataaatattaatgtctgacaagtttaggccttggtgaaacaggagattgaagcttttcttactgctatttcttatgtttctttgatttgcattaatttattctctatgtatactcccagtgtttttgaatgttggtgatgatgagataattgatgatgatgattatcaatcatgtgctgaaggaactaaccttgaaaatagtggatggtcttccaggaccaggtttgtttgtgcaaaactctagtaactaacctttctctgcatagaaagtaattgaactattttttccctaattgtggtttgtaatcattaattt

SEQ ID NO: 30987 - DNA, 457 bp, Glycine max
  Clone ID: LIB3051-038-Q1-K1-G11
catgcatccacgcctccgcacctctattctgcaaagtagcaatgatattcctaacactagtgtgccaatagataatggtccacaatccaaggagttaccaaaggagaactttgtgatttctgaggaaagtactcaatctttccgcaacattgatctgaatgctaacttaaatgaaaacgaagacaaaaatgctggcacagctgttccggcttcattgcctgagcccacttccatggacactgccatggagattaaacatgaagaaattccaggctggtccctatctgatgtggacaagatgggcattgacactatgcagcttgcaaacctaggtagtcgactagaagaggacgaagaagattatgacgaggaagggtaaataacatacactttgggggattaactctgctggaagctcatggtaacagtagcagagtaagtacgtactagtgctatt

SEQ ID NO: 30988 - DNA, 445 bp, Glycine max
  Clone ID: LIB3051-038-Q1-K1-G5
aaaaaggataagaaggagaaagagaaggatcacaaaaaggaaaagaaggataaagaggagggtgagaaagaggatagcaaggttgaagtttctgttagggatattgatatagaagaaataaaaaaagaaggtgaaaaagaagataaaggaaaggatggtgggaaggaagtgaaagagaagaagaaaaaagaagacaaagacaagaaggagaagaagaaaaaagttactggaaaggacaagaccaaggatcttagcactctgaagcagaagcttgaaaaaattaacggaaaaatacaaccactccttgaaaagaaggataaagaggagggtgagaaagaggatagcaaggttgaagtttctgttaaggatattgatatagaagaaataaaaaaagaaggtgaaaaagaagattaaggaaaggatggtgggaaggaagtgaaagaga

SEQ ID NO: 30989 - DNA, 409 bp, Glycine max
  Clone ID: LIB3051-038-Q1-K1-G8
cccacgcgtccgtttccactttgactgtaccaaagtcacgcttgctccctctcttaaccgcttccatctttgctctctctctctctctctatggacacacatccttggtcttgaacaggtttttgggtgaaggagtagtgttggtggctttgtatatcttttagtggataaggatacaacagcatgcggtggtggcttagtctctcagttgatgtataccgcaaagtgatttccttgaatctgtattgcaaagttattctgtaactcttaagtcccttttgatcaaaaacctttttcaatcatctcactcatctattccttgccttgaatcaatgggatccaatttttttggtgttgttccttggtatgtccgtcagattagctgaaaacccccacccctatcttgttc

SEQ ID NO: 30990 - DNA, 443 bp, Glycine max
  unsure (1)..(443): unsure at all n locations
  Clone ID: LIB3051-038-Q1-K1-G9
gcaaaatcttatcttagcaatagctacctctatcacaacaatactctattaagcaaaaacaccaaatgggagaagaaaaagagcagcctaagaatgaaaccgagaagaagcccgaagaggccgncgcagcccccaagaaagacgacggacccatcccttgtcgttacaagctcgacttgcattgcgagggatgcgtcaagaagatcaaacgcacatgtcgccacttccaaggtgtggaaaccgttaaggcagatctatcgtcgaacaaagtgactgttaccggcaaattggacgccgagaagctgcgagataagatcgccgagagaaccaagaagaaggttgacatcatctcagctccgcccaaaaaagaagccgccgccacggaaaatccaccggagaggaagggtgagagaagaaacctgaagagaaaaaaccagaagaaa

SEQ ID NO: 30991 - DNA, 409 bp, Glycine max
  Clone ID: LIB3051-038-Q1-K1-H1
ctgctattggagatcatttggatgtagtgaatgcaatattggatgttgatgtgagttcaatgatgatagtaaggaaaaatggcaaaactgcattgcacaatgctgctaggtatggcatccttcgcattgtaaaagcactgattgcccgggatcccggaatagtctgcatcaaagatagaaagggtcaaactgcactgcatatggctgtgaaaggacaaagtacttcagtggtggatgagatattacaagctgatcttaccatattgaatgaacgagataagaagggtaacacagctcttcacatggctaccaggaaatgccgtcctcaggtagtaagcattttgttaacctacacagctctgaatgtcaatgccatcaataatcagaaagaaacagccttggatttggc

SEQ ID NO: 30992 - DNA, 421 bp, Glycine max
  unsure (1)..(421): unsure at all n locations
  Clone ID: LIB3051-038-Q1-K1-H12
accagcgtccggccagcgttcgaccagcgtcctgtccagctaaggaatcattcagaagccaaggtgattaagtactagagagatcatatttcggagtagtaaaagttaatcataagcatgggatctttcaagggtcatgctttgccagggactttgtttactctagtttgagtggggcacgtatggcgctctgcggagagatatgttcgcaatccaatggcatatcaagtcagagcttggaatcctgtgccatggtttgatgggaggctgaagcacctgtagctatatgtgattgcaattggagctctcgttgacatgtgcatcgagctactgtattcaccatacctcacgatttttgtcgatggagtccttaacccncgttaacatgaatgactttgaacactctggaatgctacttatg

SEQ ID NO: 30993 - DNA, 431 bp, Glycine max
  Clone ID: LIB3051-038-Q1-K1-H2
aggcgttattggagatcatttggatgtagttttatgctatattggatgttgatgtgagttcaatgatgatagtaaggaaaaatggcaaaactgcattgcacaatgctgctaggtatggcatccttcgcattgtaaaagcactgattgcccgggatcccggaatagtctgcatcaaagatagaaagggtcaaactgcactgcatatggctgtgaaaggacaaagtacttcagtggtggatgagatattacaagctgatcttaccatattgaatgaacgagataagaaaggtaacacagctcttcacatggctaccaggaaatgccgtcctcaggtagtaagcattttgttaacctacacagctctgaatgtcaatgccatcaataatcagaaggaaacagccttggattttggcagataactacgatatgga

SEQ ID NO: 30994 - DNA, 282 bp, Glycine max
  unsure (1)..(282): unsure at all n locations
  Clone ID: LIB3051-039-Q1-K1-A11
cttgtactgttctattagttcatactaagttctgaaaatgagttccaaggttttgcttgttctacttatgttcttggccactatacttctgatctcctctgaggttgcacccgatgatgcattacgagaattttgacanaatagatgggaagcctagtgcagatggggtaagatgaaagcaagtattggcgtggcggctatggtggcggctatggtggtggttatggaggttggcgtggaggctatggaagtgggcgtggaggctatggagggggacgtggt

SEQ ID NO: 30995 - DNA, 384 bp, Glycine max
  unsure (1)..(384): unsure at all n locations
  Clone ID: LIB3051-039-Q1-K1-A12
cggtaggttacatactcctggccatggctattccaggttccctatacattgggtctattttaggtggcatgtgttatggaatgaggcttgccattacagtccctacaacctcaaagttatttggactcaaatattatggtctcatctattacattctcatgcttaacctttctctcggttctttccttttctatggtctgcttgctggcatactctatgatattgaggcaactacaacacatggaggaggcaacacatgtgttggaggtcattgttacaggctagtctttattgtcatgactggagcatgcattgttggattcttcttagacattctgntgtcaatcataaccaataatatttacaccaagaatttcacgagca

SEQ ID NO: 30996 - DNA, 318 bp, Glycine max
  Clone ID: LIB3051-039-Q1-K1-A2
tcgtgtcaatatggacatgagtctacattcaatggaaggtgcgaacaggctgacaacagctgttgaactaccatctcaattcattcacatgtacataactaattggatagcatcttgtgtgggcatcaaggataaatacatgccgaacaagcttgtgagacttgtctggggttttctggaaagccttatttcgaacaatattattaatggtgaagaactcttcattgaagttcaagccgtttgcattgaggtttcacgtattaaagaagcaacttggttatttaaggtggtcaagtcatttgaaagaatggtggttta

SEQ ID NO: 30997 - DNA, 414 bp, Glycine max
  Clone ID: LIB3051-039-Q1-K1-A3
accacgcgtccggaactgtcacccctttccggacggccattcaaacatttcctctttcgtatatgcttctttttctctcttcactttcaaacacaaaccctaattcactttctaccaattcattcgcaaacaccttttgcaatttccaacacacaccaaccatgggctacgaagacaatccgtatcgtgacgaggacggagagcccttgatggactacgacgacattcaatccgatcgcgagccatctcccgagccttgccgccaggacgacgatttcgatgaggacgtcgacgagtggcgcggccgtgatcggtcgcagacgccggtctatgacaccgatccgtcgcggtcgaagccgcggaagaggctgatcaagaagagcgacgccgggaagcaggcggtggagccggagc

SEQ ID NO: 30998 - DNA, 431 bp, Glycine max
  Clone ID: LIB3051-039-Q1-K1-A5
cccacgcgtccgaggaaatggaaaagaagaagagaaggtcctctctagctcctcttttatcgcgatcgtatttgttttgtttttctctctctgtcaaacagtttccctctccgagtcccagtttttctcggtgtgcccaaacacgccctttgtctgaagctcctttcagctgagatctaccctctctttctctcatggcttttgcttttgcactgaacaagaactgttaaaactactgcaaatgaaagcatttggagaggttaaagccagtgctgtatccaactctattttctattctgataagcgcatctcaacccaaaagcctcatgatgaacaacttgaccattgagactgaggattcttttgcaagcttgcttgagcttgcagctaataacgatgttgaaggtttcaagcgaatgattgagagggat

SEQ ID NO: 30999 - DNA, 414 bp, Glycine max
  unsure (1)..(414): unsure at all n locations
  Clone ID: LIB3051-039-Q1-K1-A6
gggagagcattctgccggaactctttccattgtcaaagaaaggatgaagggctttggcaatggaagtaccaatgtcgacacttggaccctctggacccaaggaattgccggtgcctagagtaacaaaagctgccatggcctttaagaaagggcgggaagcagacttaggtaggcaaatggagtttggaggaaaggatcttcttcttggacagcagagtcaaaacgttaacgaaggaggtttatagcagagacgcaataacacctccaaaagtcggaactagtactacttgtgcccatattgtctcaataggcgcttctctcagccatgaagcgccttgattaggaatcccatcccagaacaaatcataaatttcatggaccttatttattacatgtcanaaaaaaagannnaag

SEQ ID NO: 31000 - DNA, 358 bp, Glycine max
  Clone ID: LIB3051-039-Q1-K1-B1
gggatactcacacggtaactgtgctcttgttggggatacagaggagtgtactgaattgaacactctgcctcatgaagttgatgaatatcgaattgctaaacaaattccgtgtggatttggtgggcctatctatccctcatgcaaaactatggcacttagtcacacatgaacatcaaacttactgtgaaatatagcatggttgattaaggacacgactgtagacaattctcacagagtgctgacagcttgacacactctcagatatcggcatttagtggactcgctggtatgcaatgatgcatctatcatcatgagaatcctattagcgactatgctgatgtagacagatagcatgaaa

SEQ ID NO: 31001 - DNA, 431 bp, Glycine max
  Clone ID: LIB3051-039-Q1-K1-B11
cccacgcgtccggctgttgttgttgttcatggtgttaagtgatagataacagaagggagagcagaacctagaaatcgcgttggttcgttggtttatgacttggagtgaaaccctaactaatattgaagatgagcattcggaggttgagtgccgaagaatcgcaaacactttactctctcctcagagcagagcaacgttcgctccatgagatcctctcccaattcaacgctgcaatcccttccacccgccatttcactctctcttcctatctcctcatcctattgcaggacaataaggtgctcagcaccactgagcggttaatagcttttgctctgctagttgaggcttattcatcccagaaaccggcttcaaatcccttcataagctttattgtaaatgcttcctgtaatgaagggtccgaaaaagttgag

SEQ ID NO: 31002 - DNA, 434 bp, Glycine max
  Clone ID: LIB3051-039-Q1-K1-B12
tcgcccacgcgtccggctgttgttgctgtttttggtgttaagtgatagataacagaagggagaggagaacctagaaatcgcgttggttcgttggtttatgacttggagtgaaaccctaactaatattgaagatgagcattcggaggttgagtgccgaagaatcgcaaacactttactctctcctcagagcagagcaacgttcgctccatgagatcctctcccaattcaacgctgcaatcccttccacccgccatttcactctctcttcctatctcctcatcctattgcaggacaataaggtgctcagcaccactgagcggttaatagcttttgctctgctagttgaggcttattcatcccagaaaccggcttcaaatcccttcataagctttattgtaaatgcttcctgtaatgaagggttcgaaaaaagttga

SEQ ID NO: 31003 - DNA, 310 bp, Glycine max
  Clone ID: LIB3051-039-Q1-K1-B4
ggatcgagtttcgctgtgtgacaaaaatgttgtaagaccaatcattgcgaaaccacatactgccgacgtgatcgagcagagctactacattattgacctgatactacgaaaactctaacggaatgcgtaactaccccgagactacacgcccatggcagcacctcaacttacagatccctcaaaaccacaattttattcgcgcacagctaccggatggccatcgctatgctgaattgagacctcttcctacagaacctcctcgggaccaccgagggcgtcaccctagtggaacgcctatgatctgctacat

SEQ ID NO: 31004 - DNA, 423 bp, Glycine max
  Clone ID: LIB3051-039-Q1-K1-B7
gcgaaaaaccttgagcggagttgaagctatgggaagcagattgggaagaagagtggtgcagttcgcgaacctccccataaagcttctgatgccgaacagcttcaccaacatccacgaaatcgctctcaagaccattccttcggccacgaagatcgagatcaagcgcgtccttcaatccctctacggcttcgatgtcgataaggtcccaacgcttaacattgagggccagaagaagaaaccttgtggcttggtgaatggcaaacccggcttccaaaaaggcttacgtaaccttcaaaacccttttttcaatttcccggaatctttacccgatccgaatcatcgttgaggccaggaagaggttcattaagcatgccaagtccagcctcgttcaggaccacgaggcccacaccgaggcccaccacc

SEQ ID NO: 31005 - DNA, 434 bp, Glycine max
  Clone ID: LIB3051-039-Q1-K1-B8
gttgcgtgttgcgatatcataacatcgatggcctccatcatccaaatctcacaatgtcgtcaactcttctcccagtgacagcaactcccattttcactctcaccaaaaccctccctctccccaaaccctacctactctcctataaattcaaattcaacaccctcgtccgccgctgctccctctccgaccacgaggagcagcgctggctccgcgaagagcagcgctggctccgcgacgaacaccgctggctccgtgaggagcagcgctgggctcgcgagcgcgaccaactcctccgcgagatcgccgacctcaagctccaaatccaggcgctggagcgtcgcctcttgacgcgcgatttgtcctctccggcttccatctccgacgccgtcgccaatgtcacgttgctcttgcaggtgctcaaggacaagaatctg

SEQ ID NO: 31006 - DNA, 429 bp, Glycine max
  unsure (1)..(429): unsure at all n locations
  Clone ID: LIB3051-039-Q1-K1-C1
cgccgatgccaaacgattccgatcgcgaaagttgcatccggcgccgccagatcgatattccgatcatgctccgncagccggtcagcgtttcgcgtcgcatcggaatccaaaccggttcgttctccgttccgtatcgcgtccaataagcctctctcgcagtcccaatccactctcaggttccccgtggaattgagttcgtgtgttgaatcgatgatgccgtaccacacggccactgcttctgcgctcatgaattccatgctttcaatttcaagccgcacgagcgcttggattcccgaaggtagctagcatctctaggattccttgatgttctttctacaattaattttcgggccaaaagcagactacttgaagatcaggaagcatagatgggattgcacggacattctatgatatgatgttcatcttgaa

SEQ ID NO: 31007 - DNA, 405 bp, Glycine max
  Clone ID: LIB3051-039-Q1-K1-C10
ctcaatcctcagtcgcagaaaagggcgagacagagagcaaaggagtttcccatcttctgctggtcattaatttcacggccttttttcattcatggtcaattattgcagcacagaagacacaggtagttccacttagaagtgtactcatagtctatggaaatgcattcatcaattacatttgatttagcttaaatttttattctttcattattgtatatttggtaaaaaaattagtggcaattttgagtagaataatggctggtttttacgtgaatagtttctgtattataattgttgctgcgctactgctgttattttcagtagaaagcatagagctagtaaaatataaacattccgctggttaaaaaaaaaaaaaagatcaaaaaaaagataaagccaaagcca

SEQ ID NO: 31008 - DNA, 434 bp, Glycine max
  Clone ID: LIB3051-039-Q1-K1-C11
ctaactaaagccgagcagcgagagagagtaaaccctagcaaaaatgccggctggtcacggtttgagatcccgcaccagagattccttctctcgtgccttcaggaagaagggtaccatcgccctcaccacatacctcagaacctaccacgtcggcgattatgtcgacgtcaaggttaacggcgccgtccacaagggaatgcctcacaagttctaccatggccgcaccggtcgcgtctggaatgtcaccaaacgtgctgttggggtcgaagtcaacatgcaggtcggctacagaatcataaggaagaggattcacgtgcgtgtggagcatgttatgccatcaaggtgcactgaggagttccgccttaggaagatcaagaatgatcagctcaaggctgaggccaaggccaagggtgagaagatcagcaccaagagac

SEQ ID NO: 31009 - DNA, 117 bp, Glycine max
  Clone ID: LIB3051-039-Q1-K1-C6
cccacgcgtccgaaaaaaaaaaaaattttaaaaaaaaaaaaaaaaaataaaaaacaatggcaattatacaacaaaaacaatctcaaaaacaagaaataccactaaaaaggtcgacca

SEQ ID NO: 31010 - DNA, 346 bp, Glycine max
  Clone ID: LIB3051-039-Q1-K1-C9
tcgcttctctggtctcagatctcactcagttccttcgccggagccatagttcttgattccctcaccaccgtgattcgtctttccaaacttcttttcacttcgagtgagaatgtatagtaatggtggatcccaacccggagtacagcagcctcaaacaagtttggcttcaaatccttttgggagcgcctttaatggtgctgggtcaagactcattccaagtggattgggtgcctatggagggaaaatattaggatcgagctctgagtatgtcccaagccatataagtcgggatttctctgatccccaatactactttcaagtgaatgaccacgatgttaagaacaaa

SEQ ID NO: 31011 - DNA, 419 bp, Glycine max
  Clone ID: LIB3051-039-Q1-K1-D7
tgcacagttatggcatggggtgtcaaagacaatggcagagaagagcgcgtgggccttggcaatggacagaggagtgaacatggtgtccatcaacgcaggcttattgatggcgcatgatctctccgtcaaacacccttacctaagaggagccgcagagatgtacgaggatggggtgttcgtgaccgttgatttgggcttcttggtcgacgcccacatctgcgtctacgaggatgtctcatcctacggtcgttatttgtgtttcaatcacattatcaacacccacgacgacgccgttcagctcgcccgcaagttgacgcctggtgcctcttcctccttgcagcaaagtgatgactacgggaagagttttatcgaacagagaattaacaacaagaagttgaacaaattgatggtggacttcg

SEQ ID NO: 31012 - DNA, 430 bp, Glycine max
  unsure (1)..(430): unsure at all n locations
  Clone ID: LIB3051-039-Q1-K1-E12
gtgtccgccaataggtatagaaggtttattactcaagacttgccaaagtcctgcccattaaattgtagaaacaaggcatgtcactacttattttaagaaagtctcccataagggaaagggagaaaggatacaacgaaagcaactactttagttgttcagtacttctctatttcctgtggttccacgcactttctctatctacgttttcaaatttgaagtcaaacacgtccaatcgtcgtctttgtgattaattcccatattgtttccacggcagctttttctagcagtcgatggaaccatgaaagatggggtggatttgattccaatatcaagccgcaattcaaagcctccaggtgttgaattgtgggcagttcttgatgtccctgacattaggttggcgcttcttgganaaatttaagccattcactat

SEQ ID NO: 31013 - DNA, 438 bp, Glycine max
  unsure (1)..(438): unsure at all n locations
  Clone ID: LIB3051-039-Q1-K1-E4
cccacgcgtccgcccacgcgtccgaaataaagtccactaagttggggcacgtcacccatctcgcccttcccctcgctcatctcaaatccatgcttcggaattagggtttccattcggatttcgtaagtctggtgcccaatttcgtgactccgagcgacgtaaaaggggaagggaaagggatgaggatttggggatcggagatcgtgttcgccatattgctctgtgggaccctttcatgcaccgctcaagctcatcacatcactgccagcacctgcccggctcgctccatcctcgatttcgtgttagggttttcagatttcacatgccaacttcccaattctcttggatccattgccgtcaccgagggagatgaggtttctttgcagaaggttctgaatatggttcacangaacaatcatgagcacgtggctgtgctct

SEQ ID NO: 31014 - DNA, 301 bp, Glycine max
  Clone ID: LIB3051-039-Q1-K1-E8
aacactcatacgacaacgcgtatcaactttgtaatcaacatgtacaggaagtgcgaagacctaatagagaaacgtcaagcgtactaggacatttctgacccacaccacttgtggtgtaactatatgattgctacactttgtctattagctgagtggaaactgtcaattgatttgatccggctcatgtttgctgtaaacgcactcatgtatcaattaaatctagtcactgtgacacacgctcgctagcatgtgcatgctgttgatcgatttgtaacgaacatgtatgcttatagtgctagga

SEQ ID NO: 31015 - DNA, 433 bp, Glycine max
  unsure (1)..(433): unsure at all n locations
  Clone ID: LIB3051-039-Q1-K1-E9
tcgtccacgcgttcgnccacgcgtccgnccacgcgtccgggttttagttgccagaccaccttcctctacggtgcgctccaacgcacttgaacatttatcacgcgctttgcttttgttttctttatgcattttctctagcttccccacacactcaaaccatcccttttattgaaatcctcaagcttcaatttgctttgtgctcactcatctatctattataaccaaacactcttcttcatattcttcttcttcttcttgttcttgttctatctgtgacgagcatcatggcctcgagagcagtgctattgttggctatgtgtgtgcttccggccatggttgtggccattcgcccagcaaagaaccctttttgcgtgaagggtcgcgtctactgtgacccttgccgtgctggttttgagacctcagcaaccaccta

SEQ ID NO: 31016 - DNA, 427 bp, Glycine max
  Clone ID: LIB3051-039-Q1-K1-F11
gtaccatgttgctgtcacaagccaaactgcacaacaacaacaacatctacaatgccattaacatgattatgaagaagaagggtaataacaataacaacaatcattgttcacctgctatactttatcactacccttgccctgatggtgcttttgctgcccttgctgcacacctttactttaaggccacttcatcattctctcctcttttctttcccaacactgtcttcaaccccctcagtgctgaagatcttcctctgaatgaaattggtgatctttatctcttagattttgtggggcccgatggttttgttcaggaaatctccaccaaagttccaagggtgattgttttggaccatcacacaactgctcttgagaggctaggcaatgaggcttcactttgtgagaatgggttaaggttattgacatg

SEQ ID NO: 31017 - DNA, 409 bp, Glycine max
  Clone ID: LIB3051-039-Q1-K1-F12
tttggctaatttcttcagccacacacgaggttttgttacatgcatgcttgttgtgttttagaacgaaagttgtttcaatttggtcagctggaatattgtttcatttcctgcatgttgattgcttatggaagtttttctgtggtgttgtttattttcacaacgatagtgcctaaggtgaccctgctttgcccattcaagggtagcaacaataggattcatagggtggtgttgaagaataaaggtgtcatttttattttcacatatgttgccaccttgctcaattttaattgtatttattttttgtttaattaaagggatttatgaggcccttgaattgagagatggagcagtttcttgccattcacgacgtttcatgacgtttcttatctcaaccggagcagtttcctgc

SEQ ID NO: 31018 - DNA, 429 bp, Glycine max
  unsure (1)..(429): unsure at all n locations
  Clone ID: LIB3051-039-Q1-K1-F8
cggacgcgtgggcaaatacaatgggttctcttatggcaggatgggactctctgatcttggatcctgaatcagctacaatagagaggaatcgatcactcaccaaagaagaaattaatgcttactggagagtaaagaaggagacagagttagaacacctcagagctatgtccaaactatctgagactattcaggcccgaaaatttgaggattcagagaattctcataagtcaagtaccgtgaccttggccagcataaaggagtccttaggcatggacgttgaccagaaaagtttagagcaacttatcaagaaaaatggctggtggaccaaaagcagctgggcatttctgaatgaaccgccagtgatagaagctgcttccaataagtatgcatcacagtttcacgtggccaacttgnggtctacgaaactta

SEQ ID NO: 31019 - DNA, 425 bp, Glycine max
  Clone ID: LIB3051-039-Q1-K1-F9
cccacgcgtccgctttaggatggctaaccaacctacaaattttgaaaatgggaaggcaatgctctgacgtgttgttcgaccttaatgttggtgcaggagagttcccacagcttcaagtatttcagatgaggggaatgaaactcagaagctggagattggacaaaagtgcaatgccacatcttcaacatctgctcattgaaggctgtgaatacttgaatgatcttcctgaagaagtatggtccttgactaccttacgaaaagtgcatgttttgtggccttctgaaagattggcaaacagacttcaaaatgtgaaattaaagaatggctgtaagctcataatctctaatgctcctccaaatggtcaatcagatcagaatgcactgacacattctgtatcagttgatgcctgaaacaggatcattcac

SEQ ID NO: 31020 - DNA, 398 bp, Glycine max
  Clone ID: LIB3051-039-Q1-K1-G10
ctcttttggtgggaaggcaattgccgagattaagaagcaatatgcagtgtttgatgcgaaggtgttgagcaagatacccagaggacctttgaaagataaaaagaaagattgaagtggcactagattctgacaaatatgttttagtggggtttcatgaatgtcctgttaaatttagattcatcatcagttaaaaccctatcatgtcatattttatttttttagggtccttttactagacattgtggatgaagagtatcttgtatatttttcttctggctttacatgtacctctcagaaatcctatatgcttatggatgacttgttattgtgttgtatttacatcatgaatacatactctgcatttgaatgctatcgtagaaaaaacttgcaataattgc

SEQ ID NO: 31021 - DNA, 425 bp, Glycine max
  unsure (1)..(425): unsure at all n locations
  Clone ID: LIB3051-039-Q1-K1-G11
cttctcggcatcgtcttggtttcaatggataaaggctccttatcgctctagtacatctgctccaggatccagcagtaggatagaaaatattgaagacccttttgcaattccatctgactatacttgggttactgctgaagcaaagaaaaagaagatgcaagagaagaacaagtcaaagaaaggaaaaagtcataactgactagcccacttcataagtaagctctacacttgggaagtactttggttatttagagaacttgggccatttgtctggaaattgaatttgaggctatatctttcatgtaggagtgagtgagtggtcctccaaggagttgtgcgttgacaatttggggcttgtggcataaggaaaagacacattgtgattcttgcaatagttgctggagttttcaactntacaccaaaga

SEQ ID NO: 31022 - DNA, 424 bp, Glycine max
  Clone ID: LIB3051-039-Q1-K1-G2
ggaatgggcgttcacagcagttaggttttgggtgaagtggaggagattaaacagaggtttcatcaattctgattctctgaccgccagaacatggtgttttttctgttccctaatgcttcgttagaacccgaaatgaagatggtgatagattggtggacgagaattctattccgaggattctccaagtcttctcttcgcttgaacatctggtgttaattctgcagtctttgaacgagaatgagaatgagagtcagagtgaaggtgtccaagttgaaagtctttgcttctcgatcccctcattgaaatggttcgagctttgttccgatgaacaggagttcaatgttgttgtgaaggcagaaaatcttgtcaactttgtatgcgatcttgagggattgcacaaggttgcaacatgtgaaattacctc

SEQ ID NO: 31023 - DNA, 429 bp, Glycine max
  Clone ID: LIB3051-039-Q1-K1-G4
cccacgcgtccgcccacgcgtccgaaaaaaaaaaggatggtgaggagaagcatatcaaagtccctgttggaatgtctatgttagaagctgctcatgaaaatgacattgaactagaaggagaagtcaaaagaagaaatttcaagtgctttgaaggaaaattgatgcagaaactacaagaaaaagccttaaaaaaaagttggagatttggacagctcgcttagcgcacaagatcggcccaacgcggttgcttgcttagcggtcagctcacacttagcgcgaagaaggctgacgagaaagtccaaggttgtgcttagcacaaactccgcattatgcgcatgattacattgtcactcccgctaagcccaagaatgcgcacttagtgcgaagtcagtgtagaaagtaaattaccttaggtctatgagtaggaag

SEQ ID NO: 31024 - DNA, 384 bp, Glycine max
  Clone ID: LIB3051-039-Q1-K1-G7
attcatttgttcatggtcagctcctacattgtgggagcaggacgatggatcctggcagtttacgaaacagtcttggctactactctcatgtgggtttataacaaggttaacgttgacctcagagatttctgtgctgtatgatgatgcttatgcttaacattgtggcgacaacttgtggcacttcaaacgatgtgtcaagagctatattttgtcttagattctccattagcctgaacaagagacagtgcgagaatatctacatgtgaaaaaatttcgctagatgtttacatggtggaggcgtaaagcttttttagagcgcaatatgtgctgtgccaggagatatcttgcgttctactggggtagctgttattgtaacagctcaca

SEQ ID NO: 31025 - DNA, 420 bp, Glycine max
  Clone ID: LIB3051-039-Q1-K1-G8
cccacgcgtccggttggcttaggatgcatagcaggagtaggagttcaccccagctggcaccatgatcgagttcgaatccttgcttctaaatctgaagaactaacactaaaaaggtggtggtcgtggtcgttgtttccttctgcttctgcacacgagactcatctgtgtcgaattagggcgaggcgtccgcgttgtgtgcctgataatagagaagctggggctggaaaggaagcggaagaagaacaacaactagagttagaatggaagctcctcaccagaaggattggcgattccggaataatatcttcatgcttggtcggtctcctcaccggcgtcgctgtcgtgctcttcaattatgctgttcatgaaattcgtgatttgttctgggatgggattcccaatcgaggcgcctcatggctg

SEQ ID NO: 31026 - DNA, 431 bp, Glycine max
  Clone ID: LIB3051-039-Q1-K1-G9
cccacgcgtccggttaccctttcttccctcttccgatttgaatctggttcgggttccctgtgatcaaaatccaaatcatcatttggcgtagcatgctctttggcttcttcttcacctgccaaggcgcttcgcagaatcctggactccccaggggtccaccaaggtcctgcttgcttcgacgctctcagcgccaaactcgttgagaacgccggcttccaattctgcttcagcagcggcttctctatttccgccgccagcctcgccttgcccgacactggcctcatctcttacgccgaaatgctccatcagggacaactcatcacccaatccgtctccattcccgtcatcggcgacgccgacaacggctacggcaatgccatgaacctcaagagaactctcaagggatacatcgcagccggattcgccggaat

SEQ ID NO: 31027 - DNA, 394 bp, Glycine max
  unsure (1)..(394): unsure at all n locations
  Clone ID: LIB3051-039-Q1-K1-H5
gtcagaatcagagtcacatccacaaccaactattgaacaacagcaacaaattctacaacaagccaacaacaataacaagaggaagaccatggaacagggcctttcacctgagactgacagaacaagaccaagatacagtggcatagccactgtggtatgatcataaaaatcattggcaaaaattttcttgaatttcaaaaaatgtaattctcatataactttttttttctttcttttaaaaacaaattaactcaagtgttggttaatataggctctataggagtgtaatagagttgtttcctgtacacattttcctggaaatatttccttccaattntgctaccacccaatataatgaanaggaaaaaaaatattgaattgagtaagaaatatc

SEQ ID NO: 31028 - DNA, 261 bp, Glycine max
  Clone ID: LIB3051-039-Q1-K1-H7
accacgcgtccgacgaattggagtatcctgctgatgataatgaaatggcggaggtagaagatgacatgcatttcagtggtagagtgtttggtgattcaaagtccgaatcagacgacgatgatgaatatgactccatggaaaatcggatgacagatacctatgctgcaaaagctaggaaaggaaaggatttccaaggtattccttgggatagactaaccattagtcgtgagacgtttaagcaaactggactagagcagttca

SEQ ID NO: 31029 - DNA, 430 bp, Glycine max
  Clone ID: LIB3051-039-Q1-K1-H9
ctggtgtatctcaatgaatacacatttcatattcggcatgcttcaagcatttgaacctccacttgacatgagccaggacgtagattttagtgaagatccacatcctgaatcgacccaaaaagatcatttagtttctgaagggattagtgcttgttcatgtgagtcagtccctgtgagaataacatgttctgtatctgatcaacatcgttgtgtggaaggtggcaatcatacttgcatatcacaagcacaaatgcattccaatgaggaggtggacattgagagttgccaccagtcaaatactgggagccattctccaagcatgatacatcctaaagaaactagtgaatactggtgaagtcctattgctgattccaatggcaatgtaccggtcacgtcatcacaacaacaatggttggatccatctttaaaa

SEQ ID NO: 31030 - DNA, 432 bp, Glycine max
  Clone ID: LIB3051-040-Q1-K1-A10
acgttctctttcacacactaagcgtgaactaatatcgaaattcaattataccctgaccctgtgttagtttcgtgtgttgagaagcagagagaggcagagatgcaaggaagcgcagctgacggtgaagccttggatttcgagcctgaggacgatgacttgatggacgaggacggcgcccccgacgccgacgcttctccgcctcaacctaagctcaaatccgccatcaccgccgccgccgcccccaaaaagaccaagggtcgcggattccggcaggacaccgacgccaaccgtgacactcgcctctccggctccgacttcgactctctcaccaccgagggcggccctggccctcaaagatccattgaaggatggatcattctggtcaccggcgtgcacgaggaagcgcaagaagacgatttgcaaaacaccttt

SEQ ID NO: 31031 - DNA, 431 bp, Glycine max
  unsure (1)..(431): unsure at all n locations
  Clone ID: LIB3051-040-Q1-K1-A12
ggaaagtctttcttttttgggtcaactttgtgccttgcatatcaacagaatattagactcttctattttatattttaaaacagaatattagacttttttttagaatattagactttgagtttcatccgttcgacgacatggcctttgcttttagtttattcttaagtaggcttcaagtttttgtgagctaagacccaatctcattcaacgatcataattcacaatatactcctattatttattagggtccatgagagggaatggtgctcatattttcctagaattttaaaaaataaaaataatttagagcagtgagttatccttagacttatgatcaattttattagcttttatgctactaggtaatccttgtttgagtctattataagtgcaaaggatttatntaatgaaccaagctgtattcgactttt

SEQ ID NO: 31032 - DNA, 271 bp, Glycine max
  Clone ID: LIB3051-040-Q1-K1-A4
cccacgcgtccgcccacgcgtccgcaaagggaaaaatgtattggaatctcttccaaaaattgagcaattaactcaaggtgttgctgatgttaacatagagtcaggacaagatgatggtgaatgggtggtatatgcaaagaagtccaagaatagagcccgaagcacaactgttaaaccatggagtcctccggttcataattctagacccactggaaatacaaagatggctcacaagccagttactcggaatgatggaggagttggaagggct

SEQ ID NO: 31033 - DNA, 193 bp, Glycine max
  Clone ID: LIB3051-040-Q1-K1-A5
cccacgcgtccgactttactagaatctctgtttaggattcttcctaaacttagtggcatatttgaaaggctcttgctgtactttgctgttttgctttattttagggctagggagatcccgggagggtggtggagggtttgggcagtggtttttagcaacagttggggctgctttagcagcaacatcattaata

SEQ ID NO: 31034 - DNA, 430 bp, Glycine max
  unsure (1)..(430): unsure at all n locations
  Clone ID: LIB3051-040-Q1-K1-A6
cccacgcgtccgctcaaacaaaacaaaacaaaacgcgatcatttctccgccgtagcagtggaacaaactccaccgactccgttatggacaactccggaaatcctcaagatgtggttgtgccacctgttgaaggtgttgcaggaggtggtacggcttatgggtggaatgatggtggcacacatggcttgaatgtcaagggaccaattgaccccacagaaattccaactaaggatttagtgcatgtatggtgcatgccaaacacagcaaatgttggacctcaagatatgcccagacatttggagcctataaacctgctggctgctagaaatgagagggagagtgtgcanatagctatccgaccaaaggttcattggggtggtctagtgttgcagggactgtgcagattcagtgtagtgacctatgttccaca

SEQ ID NO: 31035 - DNA, 431 bp, Glycine max
  Clone ID: LIB3051-040-Q1-K1-A8
cgaactagtttgtaattgtttgacattgagttaggaaaaatgggttccaaggctttgctcgttcttgttatgctcttggcttctgtcctccttctttcagcggaagttgcatccaaagatgtagataagaaacttgataaaaatgatggtaaccatgatacaaaaggagtcgatgaaatgaaatattatggtggttgggggtctggttgggatagataccgccgtggttggtattgccccaatggttgttgtcaatggagctactactatcaaacctgttggaggtgctgctattatcctggtgaacatgttgatgtgcgtactgatgctcaacctcgcaactaaacatgaacattgtgcttaaagtatacgctattgttatctatataaataaaacttcatgggacgtgtacttcatgagacgtgtactt

SEQ ID NO: 31036 - DNA, 284 bp, Glycine max
  Clone ID: LIB3051-040-Q1-K1-A9
cccacagcgttcgaaaaaaaaaataatttttaataaaaaaaaaggtgaattgatatcatggatccacagagacgaatggatgcattctacatcatagctctcatatagctatacgtactttcaatcatataggcaatcgttttactaacagcagtgactagcaaaactatgggatgaccaaacttaatgacttttgtaatattatgaattttgactgcttgactaagatcgtagagaaaagcattgtcgagcattacctgtatctgttcaagatgaacgatgta

SEQ ID NO: 31037 - DNA, 411 bp, Glycine max
  Clone ID: LIB3051-040-Q1-K1-B11
gtttttgtagatagaagccatcttttattgataggcttctatcatcgtcttcacggccggcttttacatttctcactcgattcgaatctgcaactgcaagattcaatttctctccgtcaacacgttctcactctcacttgaagcggctctcctcaatttgttgccagcatgcaaatccatctcctttatcctcttccactccctatctcgcttcttccaaccaccccattaattttccattccttttactcttcttcagatccctacacactcgaatcccattctctcaatcaaatcaaaaccggggctattccaaaaccaatggtcataacagctaggacgcttgtaatactttctgctcttgctatgatcttaatccaaccaactattgcaccaccagcttttgcaacc

SEQ ID NO: 31038 - DNA, 431 bp, Glycine max
  Clone ID: LIB3051-040-Q1-K1-B12
cggacgcgtgggttggaccttatatggattgattgcatctcagtttggagatataacggaaagaatgccgggtgaagataacaagatggtgaaagatttcgtagaagactactttggtttcaaacatgacttcgttggagtgtgtgctgttgtggttgctggcatcgcagttgcctttgcattaatcttcggtgttgcaatcaagacctttaacttccaaaagagatagatggatagactgaactctttctccaacgtcaaagattctttatattttctctctctctctctttgcttgtttttgttttctctataaacttataatatttgtatctatcatttaatcatttgttcaaaaccagccagtttgaaggttgtcctttataaatgtatgatgaatgtcaaaagaaagatttttgatacttaccaca

SEQ ID NO: 31039 - DNA, 351 bp, Glycine max
  Clone ID: LIB3051-040-Q1-K1-B8
cccacgcgtccggatcactccaagcgaaggaaactatgggcaaaacgttcctttttttctattctattgcttggagtgattaaggtttggggtttgttgatttcgtgtagtgattaagagaatggcagaagaaagcgagggaccgatagaggaaagggagatcatacctgtttggctctctggttcgttggtggtgactacccaatgaggactcgaggagacaaagtaaaagagaggagcaaggaatccataaattttctgttggttcttttctttcctcttttatatgttttcttttttaattatggatgttggggacgtgcatgtagccgatcgcaatacgtgcccatg

SEQ ID NO: 31040 - DNA, 373 bp, Glycine max
  Clone ID: LIB3051-040-Q1-K1-B9
gtttttgtagatagaagccatcagtcatggataggcttctatcatcgtcttcacccccttcttttacatttctcactcgattcgaatctgcaactgcaagattcaatttctctccgtcaacacgttctcactctcacttgaagcggctcttctcaatttggtgccagcatgcaaatccatcttctttttcctcttccactccctttctcgcttctttccaccaacccaattaattttcaatcctttccctctctttagaatccttccacattggattccaattctctcattcatatcaaaaccggggctttcccaaccccaagggttatcacagctggcactcttgaaacactctgtgctcgcgctgagatct

SEQ ID NO: 31041 - DNA, 411 bp, Glycine max
  Clone ID: LIB3051-040-Q1-K1-C4
cataatggaataccaacaacagaaacaacaatggaagaggtcacaaaggacaaaaccctcttcttcttcttcttctcacatcaacaatctcgatgatggttgtcttatgcacattttcaacttccttcctcctattccagatcgctttaataccgccctcgtttgccacagatggaattacttggcatgtcatcctcgcttgtggcttcgggttgatcgatcagttaaagagttatctgaacccggtgttttcccaaacattgaaaccgctgtatctgcttcaagaccaggtgataccattttaatagcagctggtggaactcatcgtgttgcaaacattcaaataaggaaaccactttgcttaattggtgcaggtgaagttccagatgacacaacacttgtttgttctcg

SEQ ID NO: 31042 - DNA, 338 bp, Glycine max
  unsure (1)..(338): unsure at all n locations
  Clone ID: LIB3051-040-Q1-K1-C7
cccacgcgtccggagacggcgaatgacactacgcagaagatcaaggagacggtggttggcaaggatgatgatgatgatgatgatcatggtgatggtcatggtggtcttaaggatgatgatgttgtggagataagaaggagagttggtaagagattaccatgagaagggttattagagaacacagaatcaatggcttcatttagtacttccatttcttactattatgccgtattctatgtatttatgtttctagtgatgttnttttctttttttttttcaacatgcggataacttggggatatcaaggttgttagttaatatgggcataatctttttgt

SEQ ID NO: 31043 - DNA, 150 bp, Glycine max
  Clone ID: LIB3051-040-Q1-K1-D2
tcgcggacgcgttcggccacgcgttcggcaaccaccatgggttctctggggttgctccccaaaaaggttatcatcaccaggaccccactcttctactcgcacgtgcgccgcacgagccttcttcccgggaaacaaccaacaccgcattga

SEQ ID NO: 31044 - DNA, 358 bp, Glycine max
  Clone ID: LIB3051-040-Q1-K1-D3
agagggacaaatctgaaaagtgaagaaacccaatacataagatgttggaagcgttattatggagttttttcatttccccactgaagattgtgtgggaatctctgagaattctagagagcaacaagctagtatttacttccatcctctgtttcacaacgctccctctctccttcctaaccttcaccctcgcaatctccaccttccccctccaatcccgcgtcctccacctcgagtccgtcgcgcgcgtcgccggcacgcgcgtcgaggcgcgccacgtctggcacgagtcccgcgacgacgccgtctcgcttcttgcgcacgcgcgccctcttcgccctcctctgcttccccctctccc

SEQ ID NO: 31045 - DNA, 418 bp, Glycine max
  Clone ID: LIB3051-040-Q1-K1-E10
gacttgtctaagaaaggtataattggcagccaagcaaaaaggcaggtatcagaagaatctgaagctgttacgggaggtggaattgatgttactccagattgtttggctgtgccagaaacggcaactagtgatggggcttcatctttgtgctcttcagcagaagggagtgaacatgtggacagcttgtctgagaaggatttagttggcaaccctgtagcagaacttgacactaaagtatctgaagctggtgtttctgaccaggaaaatcaagtagtgcaagaaaatgcattggaagatatggaacatgaggagaacttgtccgagacgggtttagttggcaacgccgtagcaaaacttagcaccaataaatctgaagctggtgttagtaaccaggaaaaacatgaaaatgctttgaaag

SEQ ID NO: 31046 - DNA, 408 bp, Glycine max
  unsure (1)..(408): unsure at all n locations
  Clone ID: LIB3051-040-Q1-K1-E12
cgccatcatccatttgtggcaaaaattttgcttcagtttaggctgcatcctcctgcattaagagaaccagataatgctggtgttgcacctggcaaagctgtgatggtggttgaagatgaaataaatgctggttacatatccattgcaatgcttttgggtctcttgaaacaacccctttatttgaggagcatagctcatcttgagcagttgctaaatttactggatgttatcattgatagtgctggaagcaagtctagttcatgtcataaatctcagatatctactgaggcagtagtgggtccacanatttctgcaaatggaggtagatgtgaatattgattcagttacatcttctgctcttgacgcatctcctcatgtccatgaatcctccaaacccacacctcccag

SEQ ID NO: 31047 - DNA, 407 bp, Glycine max
  Clone ID: LIB3051-040-Q1-K1-E5
cttgctcataaaaattttggtaaattattaatggttttatactttttttgaattccataacaatagtatgcaatataatagtaggtcttacgcaaatggcaatggatcctgacatatttgcacacgtaagaacaatataagattatggcgagtacctgttttgattgtgttgattggttaatgattcatgcgttaggactttgagaactatctcccctgaaaatggaactcaccaaagtggatgttctagttgaagccattagggttggatttagaaagctcgtacgaaacacaaaggagatgagaacagacttcttcagtgtcaatttatcaaaacctatcaaaattttgagactagtcagcacagaatctacatgttaattcaacaagaggcccataacaatcaa

SEQ ID NO: 31048 - DNA, 382 bp, Glycine max
  Clone ID: LIB3051-040-Q1-K1-E6
cttgctcataaaaattttggtattttataaatggatttatacttgttttgaattgcatgagcaatagtatgcaatataatagtaggtcttacgcaaatggcaatggatcctgacatatttgcacacgtaagaacaatataagattatggcgagtacctgttttgattgtgttgattgtttaatgattcatgcgttagtactttgagaactatctcccctgaaaatggaactcaccaaagtggatgttctagttgaagccattagggttggatttagaaagctcgtacgaaacacaaaggagatgagaacagacttgttcaatgtcaatgtatcaaatcctatcaaaactttgagactagttaacacagaatctacatgttaa

SEQ ID NO: 31049 - DNA, 432 bp, Glycine max
  unsure (1)..(432): unsure at all n locations
  Clone ID: LIB3051-040-Q1-K1-F1
cttttattcagatagtaacactaacacagcttttctacatacaaagaacctttataaaaaatactagaaaaagaaaagtataatagaaatctatttaattgttattctttttaattttaaccgacatcagattacggtgttggtctaccacggtaggcttgcttgcaaacagagctaggtttctgcgcgggggagcacagctgcgacgaccctgggcacgcctgcaggcaattgtcccccaggctgccggaaaccgctgttccggccgtcaccagccccgacggcggctgtccgacgaanaagttcccgtcgaaggaacagcctcttcatggacttgatctgcccgtactccagcgggatcgcgccacgcagcgcgttgtaccgaatcgacaggaaagacagcgcgggatacgcgccgagattcgcgggcgc

SEQ ID NO: 31050 - DNA, 427 bp, Glycine max
  Clone ID: LIB3051-040-Q1-K1-F12
atttccacttgttcttcagcaaactcacaaccacaacccaaccaacccacctgaactactgaacaacaacctcttcttcttctctctctctctttagcataatcattcatcaccacacaagagaaaaaagaaaaagaacaaagaacaaataaacctttttttttttataaaaaaagaaagaaaaggaaataaagttttttgttttttcgatgaaccagaagttcatcggaaagccgccggcgacggtggacctggatcggatgccggagcgtgggtcccaccaccggcgttcccactccgacacctccttccgcttcgccgcgaacttcgacgaccttctcctcttcgacccctccgacttcgacatctccggcctcccgtcgccgctccctctgccatctccggtctccgccggctgggttccgat

SEQ ID NO: 31051 - DNA, 424 bp, Glycine max
  Clone ID: LIB3051-040-Q1-K1-F4
cttgcagaatcttttctaaagggtgtgttggctgcacatcgtggaggatatatggattcacagaaggaggaagggcctgctccattgctgtggagattttcggacttcttgaagtgggcagagctttgtccctctgaaccagaaattggacatgctttaatgcgtttggtgattactggacaagaaataccacatgcgtgtgaggttgagcttcttattctgtctcaccacttctacaaatcatcttcttgccttgatggagttgatgttcttgtggcccttgctgcaactagggttgatgcttatgtcttggagggtgattttccatgtttggctcgcttgataactggagttggaaatttttatgctctcaatttcattcttggcattcttatagaaaacggtcagttggatcttcttcttc

SEQ ID NO: 31052 - DNA, 402 bp, Glycine max
  Clone ID: LIB3051-040-Q1-K1-F7
ctttctgatcatggacatccaagcttgcacttaactcatgttacattcagtcctgatggacacgaggttctcctcagctatagtggagagcacgtttacttgatgaatgtaaatcatgctggagtgaatgagatgcaatatacttcaggagatgattcaaagctgatgacatactctccaacaattaatgggacagagatgcagccttgtgtatctaatgtcttcccaaatggatttcctattaaaaagaacatcgctgcaaagcttgacaagtgcaggaaactaataaaatatgctaagaaatcattggacaatgggacaccctattatggaattgatgcatgtaatggaggttttgaatggctatagccatattattgggcctgcactgaaacatgaatg

SEQ ID NO: 31053 - DNA, 368 bp, Glycine max
  Clone ID: LIB3051-040-Q1-K1-G2
cgccaactcgattccactcgcgtccaagaggccatggcttccatcgctgcttctgccgaagctgatcgcaatgccatgcgcatcagggaaaaagaattggctgctgttaagataaatgcagcagatgttgatataattgcaaatgaactagagttggacaaaaaggttgctgaaagaactttgcgtgagcataaaggtgatgcagttgctgctattcggcacttgcttcactagagaggtgggaatgaacaagagtgaatgctttagaaagttatatttatatgtatcagcgtatattgtttttcatcaaaattgaatctcaaatgtaactctgacctaattcattcagaaatcataactgtgttatt

SEQ ID NO: 31054 - DNA, 428 bp, Glycine max
  Clone ID: LIB3051-040-Q1-K1-G5
cggaaccaccgtttctctctcacggtgctgccactgtcactcttctctactttctgcttcccagattctctatttttgcgcgtaatcgaatgtggaactttgcatcgaattgcattgctggaactgtgggactaaaaaatgattcaaagcctactcactctgcttcagaatgttctgatgatgagacttctgttataggcagagaggaagggctggaatgcccaatatgctgggaatctttcaatattgttgaaaatgtgccctatgttttatggtgtggccacaccctttgtaaaaattgtatcctcggactgcagtgggctgttgtgaaatttccaacactgcctgttcaacttcccctttttatctcctgcccatggtgcaaccttatgtctttccgtttagtttaccggggaaatcttaaattc

SEQ ID NO: 31055 - DNA, 324 bp, Glycine max
  Clone ID: LIB3051-040-Q1-K1-H4
acgcgcgtcgcaggtgtgtgactggtgggacttggaatagaacgccaaataggaatagtgagggaaatctcaactcaacgcatctgccttctgcctcgcttgccagatctcttctctctgatggggggttcggtggtggaggacaaccacgacctcgaccacgacctcgacctcgacgatactcccttagcatctgcctcttctaaatcccaccagcaattccatagcttcgatttcgaggatacaagtgttctagatttgcggcgctcatccatctttaacataacacgtatgagcaggagtatttattctgtcttaattaag

SEQ ID NO: 31056 - DNA, 423 bp, Glycine max
  Clone ID: LIB3051-040-Q1-K1-H9
tttcaatcctgttgtcagtcgaagttttaccatgtccttaacaagggattgcatatgtcctatggtgcttacccgtggcagtgatcagcttccagtcagtacgaaatttgatatgagaagtgatctgggtgtggtaaggaattatggaagactcttattggaaatggcttcagttgttccagatgggattgtatgtttctttgttagttactcatatatggatggaatagtcaatacttggaatgaaaatggaattttaaaggaaataatgcaacataaacttgtctttattgagactcaggatgtggtagagactacattggctcttgataactaccgcaaggcttgtgattgtggaagaggtgctatctttttttctgttgctaggggaaaggttgctgaaggtatagattttgatcgaca

SEQ ID NO: 31057 - DNA, 416 bp, Glycine max
  Clone ID: LIB3051-041-Q1-K1-A1
cccacgcgtccggaatgtggcgcctagtgctaatgctgaatcagaagtggagactgaggttgattctaaggataagaagacaaagccggacgaatttcaggcccctcctagcgtttctgctgggcctgctgataatttaggcttccagaaccatgatagtttgcagtacttgaatccagaatccaacaaaccagattctgtcttcccgtctgatgggaccagaaattttcatcatgtgcctgcttttgatgggctgctatcaaactcaaggagcaactatcttactggaaaactggaaacacctgagaactacgaattataccagccagcaggtgactacaacattgcaggttgacattcaatattattctgatgactgtgattagctgtaaagaattgctggtgtggttttgggc

SEQ ID NO: 31058 - DNA, 437 bp, Glycine max
  Clone ID: LIB3051-041-Q1-K1-A11
cccacgcgtccgaaagagtccttagggaaagagttacgggatatgcaatgttatgacccactttaagcaaacatggagcctttatttgttactaattaagtcttttcttcttaaaaggccaatcctcctgtttttggatggatttcagtcgtggcggctaacaatttatttattaataaatgctttaaaattaaaaataaagtcaaggaatgaactcaaacaagtcagtaatacagaagtatgtgggacttaaaatgtcgttttacgaaataaatgtacataacctagaaaatcaagaacgtgagtggtctagcaacatatgattgaatttattccactttattaatgattaaattttatggttatccgtgatattttcggttcagacttcagacatctagttataatattttaaaaacatatctgtctacactatc

SEQ ID NO: 31059 - DNA, 352 bp, Glycine max
  Clone ID: LIB3051-041-Q1-K1-A3
tgtactagctagtgttgtataagttcacggtcagttctgaaaaatgggttccaaggttttgcttgttgtactcatgtccatagcggctatacttctgatctatgctgaggttgcacccaatgaatacgaacattttcactctaaagatgggaagcatgctccaaatgggttatatgatagccatatcagagagtgagagaatgagatggagagcgacagccactgcataaagtcggtgcacaaagagaaggagatgaagaagatgttggccctggatcacattgatcaacctcttgctgggaagaagctctgcatgcgaaccctaaaacttgatcgtagagctgccgaacac

SEQ ID NO: 31060 - DNA, 428 bp, Glycine max
  Clone ID: LIB3051-041-Q1-K1-A5
gcgtttgtgcgtgttggagttggctatttgaagtgggtgcatgctgaagttatatgtgtatgtgaaagatgaagaacaatagagataaagaaaagggtaacgacgttgaccagaggtacagacagcatcacacgttgtcaatgccaatgatgtttactggtttgaacagagagaaggagatgtaagccatgatctctgctttgacacatgtggttagcggagaagatgagcatcatggtgctgattactctcttattaatcacaatattaataatactaatagtgcacttgttggtgatgatgattttactgtaacatcaaatatggcttgtggttctatgccaccttcttctacttggtcatctcaaggtggcaactctgttctcaagagaagacgggaatatgataatacaaatgatttcttacgt

SEQ ID NO: 31061 - DNA, 428 bp, Glycine max
  Clone ID: LIB3051-041-Q1-K1-A6
gctaatgaacactagcatgtaaaaagtatggatttgatacatgggtacaacatattctgggaaggaccacatttacttacacaggtgcagaaattatttttccgttataagaaccgggcagactaccatttacttggggaaggggagtgggatatcataatattgtgcttaccattgaaagacatgtatggatctcgatcagtggatatgtcttttatgaaatttgttatgagcttttgtctgatgaggagttcttgactcacctgattccatacatggtatttggagattgtgcagtcattgagttatgtgccacataaaatatggcttttggttctatgccaccttcttctacttgttcatctaagggtggcaactctgttctcaagagaagacgggaatatgataatacaaatgatttctaacgt

SEQ ID NO: 31062 - DNA, 348 bp, Glycine max
  Clone ID: LIB3051-041-Q1-K1-B1
atctatccattcgcatgatcaaacaaaactttctctctctatctcaatctccttctatcgcaagcaccctcccacacactgcataacgttaaccgatcaataacccatctctgtctacctctattcgatccaaattcggcttacacaaacttgtaacatttcattcctgcgagacttacctacaccgatgcacactgatatgcacgaatcctggatgtctgcgatacatagtcaacctatgcatgtgcttatacattctatctctgaagatcatatatgccactcatcggaaacttcactatcgagggatcgtgttcaagcgtaccctgaaacgccagagttgctact

SEQ ID NO: 31063 - DNA, 266 bp, Glycine max
  Clone ID: LIB3051-041-Q1-K1-B10
cccacgcgttcgcccactcgttcgctctatttccattccacttaggattcaattcctaagcgattcccagcttgttagatggcccacaacgtttcaatttccagattcttttggaaaaaaaaaattatctttctttgcccaacaagtaaattggaaaaaaatggaccattacaagacttggtgccaaacttcttctgaaaggcctatattgcgcattaaccacagtggattttttggaaattcaaatatcatgaatatgtgttcta

SEQ ID NO: 31064 - DNA, 413 bp, Glycine max
  Clone ID: LIB3051-041-Q1-K1-B2
ctctatccattcgctgaacaaacaaaactttctctttttatctcaatctctttctcttgcaagcacggctcccacacactgcacaacgttaaccgatctataacccatctctgtctacctctattcgatccaaatttggcttacaaaaacgtgaaacatttcattcctgtgagattttcctacaccgatgcacattgaatgtcacgaatgctgggtgtctgcgatacgtagtcaccctttgcatgttcttattcattctatctgtgattatcataatgccactcatcggaaacttgtttatcgagtgatcgtgttctagcgtaccctgaattccctgagttgcttctccagaggacttcgtcttttacctggaacgatacactggatgcgtattcgccacgtatacttgttga

SEQ ID NO: 31065 - DNA, 433 bp, Glycine max
  Clone ID: LIB3051-041-Q1-K1-B4
cccacgcgtccggaagaatagctagtactagctcttgacccttcttcccacctttttctggtccctgctagaaatggcttccaattccattcttcttctttgtatctttcttgtggttgccacaaaggttttttcctatgatgaagatctcaagacagtggttcctgcacctgctccaccagtgaaggcaccaactcctgcctctccagtgaaatcaccatcttaccctccagggtcagtgaccacaccaactgttaaggtgccccctcctcctcagtccccagtagtgaagccaccaactccaacaccagcccctgttaaggtaccccctccacagtccccagtagtgaagccaccaacaccaacatccccagtggtgtaccctcctgctcctgttgctccatcttcaccagctcctgtagtgaaatcaaag

SEQ ID NO: 31066 - DNA, 436 bp, Glycine max
  Clone ID: LIB3051-041-Q1-K1-C11
gtggttgtggatggtggacgagggtgaagaagtggtggtggtggattgaaaaaggagggaagttgagaggttatgattgatggtgaattcgaggaatcattgatcattattgtgttgtggataagtgctattttggtgtgtttggtgatggggatgaggaatgatgcacagaagcaacagcttcttcatcagggtaatggtggtggcagaaccaatggtttcattccaagttctttccgtgctctctctagctacctcagagttgtttcctctggtgcttctactgttgcacgttctgctgcatcggttgcatcatcgattgtggagagggatgatgaccctgaccatgatcaggttatctgggctgggtttgacaagttagagggtgagggtgaagttattcagcaagtacttcttctaggctatcgatctggat

SEQ ID NO: 31067 - DNA, 355 bp, Glycine max
  Clone ID: LIB3051-041-Q1-K1-C6
gcgtacggctatttactacatcagacaatttgagtatgtatatacacaatcgatcatactacattcgtaaaattgtacaggaatcttgagacttaaaaattattacacgctattgtagcaatgctgaccatatgaacaccagcaatactaaatgcagaagcatatatgagtagcatatgtcatgagcaagcaataacttggtaatatggcataggacataatgtctatgtagtatctggacatgcgtaacattatgtaccgtaagcgcaagccagaagatgttattgttcgaactgacagacatattatgctgtctgaatgcaagctcttactcctatatgctatgagtatgaac

SEQ ID NO: 31068 - DNA, 267 bp, Glycine max
  unsure (1)..(267): unsure at all n locations
  Clone ID: LIB3051-041-Q1-K1-D11
gcgtgcatttgcagagcacagggttagcaaaatatctgatctttctccctcccttgcactgagtaggcaatggcggaggaagcacagtactcatcgggacccgattccgcgcccctcaagcgcaagtacgaagaccaacccttcggcatcgagcttgccaagcagcgtgctcaggaagtcgccgcacgccttctcaacgccgctccttcttcgncactcgacgccaagcgttccaaacccgacaccggcttcgattctctcgatttg

SEQ ID NO: 31069 - DNA, 394 bp, Glycine max
  Clone ID: LIB3051-041-Q1-K1-D2
cccacgcgtacggacacatatatcgctttactggttttgatgtacgcagcattttctctcttcctgctaaattctactatcacggcgcacgtcccagcgccaccatgtacttctacaattccatcctcaatgtctcctttggcaccttctacaccaccaccgtcccggactcttcctgctcctatcaacgtctcttacgccgccacttccatctacagattccgctcccactcctccaccacctattggatttggaggaggaggtggaagtggaattggaaaaggtggtggtggctcaagcgttggaacaggctcatgaagtgttagtggtggcgtacatggaagtataggacacagacctgatgcccatatatgtagtggcgttggcagcggt

SEQ ID NO: 31070 - DNA, 426 bp, Glycine max
  Clone ID: LIB3051-041-Q1-K1-D3
gggacctatatttcatgatggaacaaattaatggagttgttgcaagaaaagaagtcatgattttagcttgtttttggaaattccaggatgcaagacaggaaaacatacaacagttaagcaagttattacaccagtgaagaagaacaccatgccctctccaactgctgtttcttctaccaatgcatcatcaaaggagtcttgtcccagatgtcggcagggtttcttttgctcaaatcacggctcgcaaagcaaacctgtaaatgttgttggagacaaggctgcaaatcttgctggagatgtctctgctgataataattcaagtgttgaggctccgaaacctaagaagatagttgatataaatgaagcccaagtatgtaaaaataaaagatgcggtcaaactttcagggaaaggataatcatgacact

SEQ ID NO: 31071 - DNA, 378 bp, Glycine max
  Clone ID: LIB3051-041-Q1-K1-D4
cttaaccatcacttatgaaagctctctttaacgattttcaccaatgtcactcacacacgaatcagggttcacacccacattccaacgcattctgtctggattgcatcccaccatgtagcttaaagggcctcaaattaaggcacccattatggtccttaaaacggtccttgttctaaccagtgccacagcttatgacgtcaacgctatataatcacggaaactcgatgagaccactcaagggtctgacagaaaccgtgctgaagaaaagtgagacatcatgtgctgataccgcttatgaggcgtcacctgctactgatctacgagcagaggctccacaaccgactacgacagataatacacctgcatctcagtattgtc

SEQ ID NO: 31072 - DNA, 438 bp, Glycine max
  unsure (1)..(438): unsure at all n locations
  Clone ID: LIB3051-041-Q1-K1-D9
ggaggtttggaactaacagggccgacataacacagttctcctttctctgaatttttcgttagagaatggggaagagtagcggaagagaccgaagacgaagaagatcacatgactctgaatccgactcaccttccgattccgactccgacagacgccaccgtagcaatagtcgccggtcacggcgggactccgatggcgacaggaagatgaagtcctcgaagtctgaatccgagtcgccttccgattccgactccgacatacgccaccgtagtagcagccgccggtcgtggcgggactccgacggcgataggaagaagtcctcgaggagcatcacagaagaggaaattacaaagtacatggccagaaaggcccaatcgaaggcaatgaaagtagcgaanaagttgaaaaccagtacggtatcgggctattccaacgatt

SEQ ID NO: 31073 - DNA, 401 bp, Glycine max
  Clone ID: LIB3051-041-Q1-K1-E1
agctacccaaacaaaatccaaaccaccctttcggcctttaccttaccccaaacaacaagctatccccttcctgactgtgcctgaaattgtgaaatgcgaatctagccgacaccaaatcgcggaatcgattgagctgagacgcccaacgccacgctactacttgctggctgtgtgggtgctaccgctcgcttgcaaattctcttattcagaattgcagattgatgtcgcaactatttagttcacagttggctggtgcaagattggtgatgtagactgactgagccaagatgccattctgaacagagataagctggctcgctctttctgtagtcactgtatctatggcatctatcatcatgcatctatctttgacaaagttgtggactgttaacatagtgcag

SEQ ID NO: 31074 - DNA, 427 bp, Glycine max
  Clone ID: LIB3051-041-Q1-K1-E12
agaaaagcagcaatgtgctgttgctgcttcaaatatcatcaggaacttctctttcatgccagataatgaagttataatggcccaacatcgccattgtttggaaacagccttccaatgcatagaagatcatcttaggatgaggaacttgtaacaaatgctctagagacaattgttaacttagctccacttctggatcttcgaatatttagctcttccaaaccttcatttattaaaataacagaaaaacgtgcagttcaggccatcatggggatgttggaatctgcagtcaaagcatggcattgtgctgctgctgaattacttgggcgtttgatcattaatcctgacaatgaacctttcttgcttccattttttccacagatacacaaacgcttaattgatctcatcagcatgccagctctagatgctc

SEQ ID NO: 31075 - DNA, 346 bp, Glycine max
  Clone ID: LIB3051-041-Q1-K1-E5
aaaaaaaataaaaaaataaaatttaaattaaaaaaaaaaaaaaaataataaaaaaaaaatgggcaaatggtattgaggatccacgtatatacacgaaggatatccagttctatgaaccgtatcatcaaactgtaaaattagtagaatgaatatgaatctgatgaattatcaactggcaaaatggtatccttagccatgaaaaacccacaggatatcaggagtcttaaagaaaattctagaatatttattgaatcatttagactgttttttacaaaaaggtacaaggacatagtcaatctaggctttgataaatgatgatcagtattatgtacaatttgttactgca

SEQ ID NO: 31076 - DNA, 312 bp, Glycine max
  Clone ID: LIB3051-041-Q1-K1-E8
tataagttcacggtcagttcttaaaaatgggttccaaggttttgcttgttgtagttatgttcatagcggctatacttctgatctctgctgaggttgcacccaatgaatacgaaaattttaacaaaaaagatgggaagcatgctccaaatgggttatatgatagcaaatggggttacggtggttggggtggtccttggtatggcggctggggtggcccttattatggtggcggctggggtggcccttattatggcggtggttggggcggtccctggcgtggtggtggcggtggtggctagcgaggttggcgtc

SEQ ID NO: 31077 - DNA, 225 bp, Glycine max
  Clone ID: LIB3051-041-Q1-K1-F11
ttcatccacgcgtacctcagtagatgaaccccaagtataataacaacaatcctatattatgcgaagcgggctcctaatgaggaggatatgatagcaaactgggatacagcggttgaagaagccctatgaatccggggtatggtggaccataatatagggagcgatggtgtggcccacattatggacttggattgcgcgggacccgtcatgaagatcacactcaca

SEQ ID NO: 31078 - DNA, 403 bp, Glycine max
  Clone ID: LIB3051-041-Q1-K1-F3
agccttcggttgggtggcaactttggcaagtggatcaaaatcctggggaaaacctttttaggagaagggtaaccaccattactgggtcaaaaaggaattggggttataatgactggccagccagtcagccacctccaaaggaaagaagctctatatggggttgggatctcgaggcaaacaatgatactgaaactctggaggaatatcataaagagagtggcaaggaattaagctatggtaccttgaaggcggtcttcgcaataaaggcttcaagcgaccaccttatattaagaatacactggatgatgtttcatcttcattgggggacacttcagtccagaatgaaggatctttgcctacagcaaggacttcaattggttctgatgctcgtgttcaggacaag

SEQ ID NO: 31079 - DNA, 399 bp, Glycine max
  Clone ID: LIB3051-041-Q1-K1-F4
cggacgcgtgggaaaagcacacacactctctctctctctctctccgattcgcactgtccaatctgtgattttattctttccttctctcaagttctattcgcttactgcactatatgcttcctagaaagagagtgagggaaggaggagtggttgtagaagtagacagtgacgctaccaccaccaacaccaatagtgctgcggcgtcgtttcccaagaaggctcggatcgggagctttgctgcctgctcgggtgccggtgctgcggattcgccggtgaacgtcagcggccagggattcagtagcggcggcggcggcgacaacagcctcgggaactcggtcggaggaatggctttggggaattcgcacccggcggagatcgacgaggatctgcacagtcggc

SEQ ID NO: 31080 - DNA, 177 bp, Glycine max
  Clone ID: LIB3051-041-Q1-K1-F5
ctggccatctcaggaacatcttagtaactggcgcttcaagtgcattacgtcatgatccgggaacactatcaaaactaggtatcaactataacacaatcacttgatcacctaagcacaatgactcaatacatggctagaaagccgaagatgttatacaatacacgactacacacggag

SEQ ID NO: 31081 - DNA, 341 bp, Glycine max
  Clone ID: LIB3051-041-Q1-K1-F8
gttcattttccaacttgataccgcgttcgctcactctcaactcaacttcaattaatcaaatcccacactttctctctctttccttcaaatctcaattctattttgcaaaatctgaatcaaacacagttaaagacgcacaagaaaacatctcgctcaacaccaccaacacttcggatctacgtttccactcttcgaacatcaaaaaaggaaagaaaaaccgatttacagcgacaacaacgaacgaacgatttctcgaagcgctctcaaaatggcgcgtgcaccctttacttcattccccttcgtcctcattacccttctctcaattcttcacctttcgcact

SEQ ID NO: 31082 - DNA, 228 bp, Glycine max
  Clone ID: LIB3051-041-Q1-K1-G11
tcggccacaccgagcgaaagatcgtgaaaaccaaacttaccgggttttttttgacatatccacatgcattaagggccattaccggattattgtaaacacctgttaaacccttcaaaaaagtgtgtttgaaaccttcaaccaaaggtttattgaaaggaccccgcccaaaggggttttgatttgaaccctgaattcttttggtcctttgaaaaagggttattaccggtg

SEQ ID NO: 31083 - DNA, 303 bp, Glycine max
  Clone ID: LIB3051-041-Q1-K1-G12
aaaaaaaaaaaagaaaattccataattgagaacatacaaaaatggagggaaaacgggaaagataccaaagctaaacgcgctagagtagtagatacgaaagactaaaaattcggcacgcacttgcagtacacgggtggatgggggaacaagtgtgctctgccaaaacttggaggagtgtgaagtaaactgcgttgcgaagccagctgctatagccagcggactgggctatgaaacggactatactattcgacctgcctagcaggggaacggcctgattgagcaattgggacgcaccgtgtagcg

SEQ ID NO: 31084 - DNA, 199 bp, Glycine max
  unsure (1)..(199): unsure at all n locations
  Clone ID: LIB3051-041-Q1-K1-G3
ncgccacgcgtncgcccacgcgtncgnccacgcgtncgggggcttgctatatcttctcatcctaaaccttattcagtcacaactggtggaaatctctggcggagtaaacacaccaccaagaatatttactttgcaagttcttggatatcaaaagcttcacgacacaaaagggaaactcaaattgaacataatgttttga

SEQ ID NO: 31085 - DNA, 121 bp, Glycine max
  Clone ID: LIB3051-041-Q1-K1-G4
aattagacactacctagctctaacattctagaccttcggattactatttaccatatggcaaaatctagaatgagaccaacaagggcaacatcatcttggatcaagtcaacagctgtaatat

SEQ ID NO: 31086 - DNA, 323 bp, Glycine max
  Clone ID: LIB3051-041-Q1-K1-G9
cacctctattctgcaaagtagtaatgatattcctaacactagtgtgccaatagataatggtccacaatccaaggagttaccaaaggagaactttgtgatttctgaggaaagtactcaatctttccgcaacattgatctgaatgctaacttaaatgaaaacgaagacaaaaatgctggcacagctgttccggcttcattgcctgagcccacttccatggacactgccatggagattaaacatgaagaaattccaggctggtccctatctgatgtggacaagatgggcattgacactatgcagcttgcaaacctaggtagtcgac

SEQ ID NO: 31087 - DNA, 306 bp, Glycine max
  Clone ID: LIB3051-041-Q1-K1-H10
ctgaaacggactgattaacgaagtagattccataatttgggatcatacaactatctaggtcttgcggcagcatatgaatgctgcacgcctcgagtagttgatacgttgaagaagtattctacaagcacttgcagtacacttgtggatggtggaacaactgtgcttcaccttgacattgaacgagtatgttgcaaacttggatgataagccagctgctatagttacctgtaatggtctatgtgtcaaactgtgatattctttcaatattgatgtagatcgtaatttcgattaattagttattcattg

SEQ ID NO: 31088 - DNA, 279 bp, Glycine max
  Clone ID: LIB3051-041-Q1-K1-H12
cccacgcgtccgatgcagttgtgcagctccgaccaacattacaacatcttaattctggtggttcaaaacggaagaacgctgcctccactggagcaaatgctactgtcaaaattgagggctcaaatgaagagaagtctgttgctacatcaaagaagcagaataagcagacaggaccttctattattgagcaaaagagtgatggtgatgagtgctgggttcctctaaagtaccatagctgcaagagtgatatatcctctagatatttgcagcaaatggtga

SEQ ID NO: 31089 - DNA, 433 bp, Glycine max
  unsure (1)..(433): unsure at all n locations
  Clone ID: LIB3051-041-Q1-K1-H2
agaacacataaccacatacacttcggtttatccgaaagaagctcatcggaatcgcaagacaccgccgacgacatggccgccgccgtgaccgatatggcccgccgtcacacgattagccaaatactggtcgacctcgtcaagttcgccgtcggttccgccatcgacggctcacgcagaatcatccctggtaggaagcaggtagataagatggtgccagaaggattaataaacatacccttgccaacccctttaaaggccaagaaacaccctgatttaaaggttgcaaatgacctcccttttgagacaaaaatggaggaagtgaaggaagacatgaataacctaaagcagcagtacgaagcatcaatcaaacgtgttgaagaatcacagccgncaaacaaatctgatggcggctttaaggaaatcaatcttgtgc

SEQ ID NO: 31090 - DNA, 432 bp, Glycine max
  Clone ID: LIB3051-041-Q1-K1-H3
taaaaaaaaaaacactgtaatttgtaacagaaggtggcgtctaccagctacactcgctactcaatcgtgtcacaaactgaaccgagtctcacatgacaaacaccgaagaagaagaagcaactcctccgaaccctaagaattacactcaacactccaccaacgacgatgtggaacctcgtgacgacgaagacatcgaagaagaccaagaaaacgatgaagacgacgtcgttcaggaaccgaatcgcggaattccccaatctgcagcgtccaagttgcgggaacagcgtttcaaggtggaaaccctatcgcggcgcttgtcgtcggagctggttccgatccgagtccacgacgtggtcataaacggcaacacgaagacgaaggattgggtgattgaagcggagctgaaaggcatcgagaacgccaccagcatgc

SEQ ID NO: 31091 - DNA, 403 bp, Glycine max
  Clone ID: LIB3051-041-Q1-K1-H4
gcacggaagattcgtggcatgaaagccatggtgaattttcctgaagcatcacgtacttcttctgtagaacgttacactgtacatacacaggaatgtcttacaactgttaagaccaatctgcttcacaagaccatagcatttacacttaacactgcaccagctacaacatagaaccttatgacgacgaatacatagatgaggaccattaaatacgatgaagacgacggctatcatgaaccgattcgtgtgatgacgcaatctgctacttccaagcagatgaaacaacgtttcaaggtggaaacgctattgagatgctagtcatgctagctggttccgatcctagtgcatgacatggtcatcaacgggaccaccaacacgaacgattgtgtgatagaagcggatc

SEQ ID NO: 31092 - DNA, 429 bp, Glycine max
  unsure (1)..(429): unsure at all n locations
  Clone ID: LIB3051-042-Q1-K1-A12
aagaattttaatttataagaattttctgccgctccaaaattccttccagcttcgttccagcttgtatgttcgttgctgtttgctcgatcccctccaacgtgtccctccacccaggcagggtttctatttcacttttccttccaccgatactaccaaagaacaaggagatcgcaatcgcaattcttaattctcagacgcactttcgccaaatcgaagtacattattgattccttccgtgatgagagagcccagagatggagccaataacaagccctctaaagccgncgccgccgccgccgcatcaccgcctcagtccttccctctcattctcgacgtcgacgatttcaagggagacttctcgttcgacgcgttgttcgggaacctcgtcaacgagcttcttccgacgttcaaattggaggaatctgaatc

SEQ ID NO: 31093 - DNA, 394 bp, Glycine max
  Clone ID: LIB3051-042-Q1-K1-A3
gcagttacaatgaatcatttgctcagaagtttgaaaattattgtaaagaagtggagtccacgagctacatgggggggacaactagaacttggtgccttgactcactgcttgaagaagcatattatgatattttcagggtccttcccagatgtggagatgggcaaagagtataaatctgatggtggcactggcttgtctaattcgagtatcatgctttcttatcacaagcatgcttttgggctaagagagcattataattctgtggttccaacatgatcaaattgggcatatatatcatcatagggatccttgcctatcatgttgccttctatcatttttaattacagtcaaggatttggctttaagtctcttaaaaccgtaatttgtgaatttg

SEQ ID NO: 31094 - DNA, 268 bp, Glycine max
  Clone ID: LIB3051-042-Q1-K1-B3
cccactcgtgcgacttgtactgttctattagttcatactaagttctgaaaatgagttgcaaggttctgcttgttctacttatgttcttggccactatacttctgatctcctctgaggttgcacccgatgatgcatacgagaattttgacaaaatagatgggaagcctagtgcagatggggtagatgaaagcaagtattgtcgtggcggctatggtggcggctatggtggtggttatggaggtggtcgtggaggctatggaagttttcg

SEQ ID NO: 31095 - DNA, 225 bp, Glycine max
  Clone ID: LIB3051-042-Q1-K1-B5
agggatcccccaagatggtcctggtatctctgattgaaaacgaaatggagtttaaagcagttcatgctgatctgttcaaagtctacaataaagaacctgagttacctaagctgcatccattaggatcccttcctgttattcaagaccgttattatactctctatgaatctcgtgcaataatcctatacttatctgacaagtataaataccaaaggactgacttat

SEQ ID NO: 31096 - DNA, 342 bp, Glycine max
  Clone ID: LIB3051-042-Q1-K1-B6
caaacacgctgatgaatcaatactgggacttcttcaatggcagatgaagctatctcgccatattgaatttgaaaaagccagttagtgctacagccagattgtgcaaaaccttggtgtaaaatctgtgttcaatcctctgttttgttgctgacattgaagactcttaaacaattaatcaagaattgttctagtgttttggttctggcaccagttgatctactattgggaattggtaacaaggatcactttctactacaacattcaactagatttcttgtactttcattttcatcaaaaattacattcttctatggatggtcttagttgggatgcctcacaact

SEQ ID NO: 31097 - DNA, 173 bp, Glycine max
  Clone ID: LIB3051-042-Q1-K1-C10
tcattgtcttaatgttatcaatgtcttcctctttctccatccatttcttgctccttctctgaatatcccttttctcagtttgatacttatcatcatcttaagcttccaccaccatatcacacccctatatcctttccattaataatgactcttcatcaaatttatactacact

SEQ ID NO: 31098 - DNA, 399 bp, Glycine max
  Clone ID: LIB3051-042-Q1-K1-C2
tcggctcaatggctctatttttccatttcatgatttattgtggcaaattccgaggatgctgtggtatgtgtgaaacttttttgggttgttatatcatgtagtatatgtactgcttacattacaagtactacatatactgtcacttgacgccagtagaatctgttgattggatttaggctctccctttgctaggattctagtttctttgcagagttacttatgctatattgtagctgttacttgcctcacatgaccaaaacacattttttagaattaaacattgtttttaacaatttaaatattagcttcaagttcaaaagcaatatggtcagtgagtcaatcaatgctttgacttaatgtacaacttgtttactaaagtcttaacttgtcttcaatggt

SEQ ID NO: 31099 - DNA, 333 bp, Glycine max
  Clone ID: LIB3051-042-Q1-K1-C3
cccacgcgtccggattcttacaaagaatcaaggatgaagaaggtgaaggatgcaatgtgtatggttgcttggaagtaaataaggttgcagggaactttcattttgctcctgggaaaagctttcagcatctggtgtacatgtacatgacctactggcttttcaaaaggattcttttaatttaagtcaccacatcaacagattagctttcggagagtatttccctggtgttgttaatcctcttgacaacgtgcattggacacaagaaacaccaagtggtatgtatcagtattttattaaagttgtgcctacagtatacactgacctgagtgggca

SEQ ID NO: 31100 - DNA, 430 bp, Glycine max
  Clone ID: LIB3051-042-Q1-K1-C6
ttctttgaagaagccaacatgtccaacaacaatcatcacatgtttgcaagggaggaaggtcaatttgaccggttcaaagctttgaatgcaccaccctttgagaccaatcacaacaacaacaacttccatttgatgtttggttccccttgtgatttggcatcctttgatttcaaggaggatatgcaaggaggagtagtagggatggatgctcttcagaaacagcctgatatctctatttggtaccagtgaaaatgacagcttaaagcttgaaacctcctcatcatcttcatctatcatggactcttttattttccttctaaaagggttggcacccccctaatcatgtgaagttcctttggccgaataagggtttcactgcaattttcttcacatgtaatcctgtatgcccagtttaaactaataatatttt

SEQ ID NO: 31101 - DNA, 297 bp, Glycine max
  Clone ID: LIB3051-042-Q1-K1-D11
aaaagaaaattaacatatgtgaagttgcagaaattcaagcttctcgaagttttactgtagcctagacatgcttctctgtgttcttacctgtgaagattccaattcagtttttttaccttcaatttttccgccattttgctctttgttcagttgttgtttttccttctgaggcttatttgtgtggcttagcagattctggctcattttgcatgtgctatttaccttcaaagttgttgatcagagactgtgcacatgaatcatatcttattgtttattccatgaatttcttttactatt

SEQ ID NO: 31102 - DNA, 418 bp, Glycine max
  Clone ID: LIB3051-042-Q1-K1-D4
cttctctcttctctgcattgtatgcagttgtcagattttcacatcttgcagtgagttgcaatctggtacaagacagtatgtaagtaggtacttccgtactgctgttgaggttttgtctggtgatcaagtatcttgttcctaccttggaggctgcaccatcccagcggaatgcatcaagttaagccattataggggttggaacagggattcttgatcaaccaacctgagtacagaattcttctggtgaatctgcagaaaataattactctgataaaaagaagcgcttgagttcatccgcaagttttgtcagtgcggtttgtttgatgtactcggcgcaagggaattaaattgttgcaggtcaattgagatttgaggggcagtcacaagatatttttttaaaccatttaagcttgggttg

SEQ ID NO: 31103 - DNA, 386 bp, Glycine max
  Clone ID: LIB3051-042-Q1-K1-D8
gtagttataaatttaaatgtatttgtattagttgttaatatgtttgggaggtaatatgtagtcaatttttggatgtggttatatgataatttgaatgtacttgtgtatgatgcatatgcccttaagatgaacgaagatcaatggacgtatgactatatgatgtcacaagaagttcatatggattatgattatgataatgaataagaatgtggtgtgaatgaaccacatgttgattgttcaaatgcttttaatacgtctcaggtaattggtactcgagatgatgttttgcagtgggctcgaacagttgcccatgaaaatggatttgttgtagtgattatgaggtctgacacagattccggtagcagaggaagaagttcatttggctt

SEQ ID NO: 31104 - DNA, 440 bp, Glycine max
  unsure (1)..(440): unsure at all n locations
  Clone ID: LIB3051-042-Q1-K1-D9
gccgattcgattaccaatttgcttaaactcaatcaagcttcgcagcgtgaatcattctattagaggtgatcataatccattttcggattgctatatttaagtagttgtagtgtagtttgattggtaaatggcatcctccgatggtagagttacgtattcttcactatctaagctagaaaacgagaatacccattttggctacgatgatatgaatcatcatggtgaatctgtgtggtctgagcctatgcctggcaccccgtgtggccaattaggcccaacgttctctaacaaagagtcattgtatcagtttccctccgaggatgatgacttgtttgatggaggttatgaatcaggtgatgatgcacgcggtatcgtaccctctaacaggcctnctgaggtgaacttgaaaaatgtgctttctgggatctttgctattttga

SEQ ID NO: 31105 - DNA, 397 bp, Glycine max
  Clone ID: LIB3051-042-Q1-K1-E2
ctttttctatattcaggaacaatatcgtcctcagtacgaggagccccaatctcaaagttcctacaaaccccagaaggtggatgaaggtgaagatggatggcagactgttggtagaaagccttcaaggcatccacataaggtttatcttttaattttaataatcaatatgtcaaatgaaaaaactaatgtggctttttcagtgttttgtatcattttaaacagattgtatttttatgtttaatattgctgttacaggtatatcttctttgaaatctactatatgttaactttgttactgaatttgtgatctaatcagttctgaatgttttatgcttcatccctgtctgaatttgaatgatgaatcttatcaacttgatgtatgttcaaaaggacaact

SEQ ID NO: 31106 - DNA, 337 bp, Glycine max
  Clone ID: LIB3051-042-Q1-K1-E4
gtttggtgagatgaagggtgttctttccatcagcttcttgttttgttgcttgctgctgacttttggagtcttcagtttcacttcctctatgcgttgattcaagggcaccctttaccttgaacaagacacttgggttttgtccttacaatggaagcacgtgttgcaactccacacaagatgcacagattgagaagcaattccgagcaagcaacgtttcagatcctggctgtgccttggttttgaaatcaatactttgtgcgaggtgcgacccattttcaggggagctatttactattcaatccttacctagatcattttctgtgctttgctatttcac

SEQ ID NO: 31107 - DNA, 347 bp, Glycine max
  Clone ID: LIB3051-042-Q1-K1-F1
ggcaaaaagtgaggcaaaaaatgcgttggctcagcaagggctagcgaagtcagctgcaactaaggttccaagctctggtcaactaaatctaaagcgagtggatggtaccatgcttgaagctcacataaggaaaaagttgaacaaggatgaaaggttggcattggttagagcaggaagggaggaaagaggaaaataccaagctcgaactgctgtgaaacagaataagacgggtgggttaagcaacagacaaaaggaacacaagaagaaaatgcccttggctgcaaagagagataaagtatcaagaactcggatagagaaaaagaggaaaaatcagcgatctggcaaac

SEQ ID NO: 31108 - DNA, 417 bp, Glycine max
  unsure (1)..(417): unsure at all n locations
  Clone ID: LIB3051-042-Q1-K1-F11
ctacgattttagatactctctcattgatattccccttgtgtcaataatacgatccttcatcatcgtctgtgtttatagtttgtgtgatggaccaaggctttcccgtggaccttatttggggatcacgaccatgtgctctgttttgtctctgatgtttgtgtcgttcaaagccgtttacatcttcagtgtttcgggtattgatcgaagtgggtatgttcgtgccaccgaaatagctctgttcgtgtgctcttgtgcgttggccgtggggcatgttgtggtggcctacagaacaagttgcagggaaagaagaaagctnttggtctacaaaattgacattgaagctatttcaacttgcaaaaatgggtatcccaggtattcgaagattcctcatgaagatagaatcaaatgaactcacat

SEQ ID NO: 31109 - DNA, 386 bp, Glycine max
  Clone ID: LIB3051-042-Q1-K1-F3
ctttcatagcaagtaaaaacagtaataagaattaacatataagaaagcttaaagttatttttacaaatcatgcaattgatttccccaattcgtcccaattgcatatccaaccgtccttggccattgacttctcttaaattagctggtaggttctcatcaaactctatcccccatctttcacttagttttccattcttacctggtcaattagaaattaaactgagagaaagtataatatcaggaagaatagtggtaagtaactaaactatgttagaaatccctaaaacatgtttggtcattagttgtttgaaaggatctaattatgctatagttcaattgttcatatgaggaagttttaccatacatcttatgcttttgagctttgc

SEQ ID NO: 31110 - DNA, 459 bp, Glycine max
  Clone ID: LIB3051-042-Q1-K1-F4
gtactgttctattagttcatactaagttctgaaaatgagttccaaggttttgcttgggctacttatgttcttggccactatacttctgatctcctctgaggttgcacccgatgatgcatacgagaattttgacaaaatagatgggaagcctagtgcagatggggtagatgaaagcaagtattggcgtggctgctatggtggcggctatggtggtggttatggaggtgggcgtttaggcttttgatgtattcgtgtttgctattgttgtttacattatatttttggttttttcttaattatctattttattgttctttatatttactttctttatatattgtttcatttatgatttcttttttttttctctatttttctatttttgtttattttctttttttctaatattttatatttttttgattttttatttttatattttttttttttttttttttt

SEQ ID NO: 31111 - DNA, 409 bp, Glycine max
  Clone ID: LIB3051-042-Q1-K1-G11
tggggatgctgagggtgtttcaaaggtgtctgaaggagctagtgattgagaagccaaacctgtcaggcgatccgtgaaaagggcacttggtcagaagtctgatgcgaaaaaaactaatgtggtggattcagtaaaaaaaggaagtgggacagcaaatgatgcagatgctaaaaagcacccagccaagaaattagatgaaaacaaaaaggatcgtgatggatcatcttcaagacaaatggaggacaagaaaaagggcaggtgggggaaggctaactctgaagcaaatgtagtaaagtcatctgctatggatgtggacaaggaaatggtttcttctctgaggtctggtacaaagtcaactaaaaatgaaaattcagaggagactcccaagacaaatgtgaaaaggaaacgc

SEQ ID NO: 31112 - DNA, 367 bp, Glycine max
  Clone ID: LIB3051-042-Q1-K1-G4
tcggagtgtctctttggctggtccagatggtctagtaatggtgggcggacttgctgatcggttggtagctgctggtccagtgcaggttgtagtggccagttttcttcctggtcaccaattggagcataaaaccaaaaagcaaaaggtggagcatgtatcaactattaacccttcacctgttaatcttatcactagtgaggaaataaaagtaagtcttaggtggagtaaagcctattatgacccctgctgcttatcaagaagagaatattgcttattttaacaatgttcaagactctaggaactcatctgctgatgacaaagatcctttgcactgaaaaggagtctaacctaaaccaatcaaaatctt

SEQ ID NO: 31113 - DNA, 407 bp, Glycine max
  Clone ID: LIB3051-042-Q1-K1-G9
gccacgcgtcgccacgctccggaccattcagaagaaagaattgatggacatggaacctatgctatcctacaccagcatgaaaagattgagtctatatgattgccagagggagtggatattcgggaagatatgatcatagttgcataaattctcacaaaagagctttaaattctttgctgactttaatttgattctatatctaatctagtttcattagatgctttttatttcttttatttttatctttatgttttttttaatatttgattttttttttatgttctttattatatattttattttttttttattttatttttatatctatttttttttatatttttttatagtttttttattttatttcttttgttttttttttttattttttttatttattttttttt

SEQ ID NO: 31114 - DNA, 340 bp, Glycine max
  unsure (1)..(340): unsure at all n locations
  Clone ID: LIB3051-042-Q1-K1-H1
acaagtttgaggctaatgttgtcatttcatggagggattactttttgagagttgtaccaactgcttgtggaactgcaatggatgttaacttgagcaatgtatctctagttttcatctctgtcacatttgctacaatgtgtaaatctgctgctccaatttttctccttctgtttgcttttgctttcaggttggagacaccaagtgttaaactattaagcatcatcttaatcatctctgttggcatattattaacagttgcaaaagagacagagtttgacttttggggatttgtactttgtatgcttgctgcntgtatgtctgggtttcgttggtgtatgac

SEQ ID NO: 31115 - DNA, 417 bp, Glycine max
  Clone ID: LIB3051-042-Q1-K1-H2
gcggtgtgccgtcccttgttctttccgttgccttccaaaattccatcgtttgaagatgagctcaggccagagtactacagcgtatcctccaccgtcatctgcacctgctcaaccacctattggttatcccaccaaagaatctccacagtaccctcagaaatcagtggtggaaaccaagtccaagggtgatgggttctggaaaggatgttgtgctgcattgtgttgctgctgtgtcttggatgcatgtttctaaaggctgagagattgcatatacagaatgttttccttcccctttctattttatattattgtttttcgaataaattatgtatcgtttgaatgaataaggcaatactttattacttatttttcagtgttattcattatattttaggtagatccgtaatgtaattatat

SEQ ID NO: 31116 - DNA, 226 bp, Glycine max
  Clone ID: LIB3051-042-Q1-K1-H7
tcgcccactcgtccgctgactcgtgtattgcattgcatatcgtttgccagggcctttctgtgtacactgtgacttatattgagtctccacaagcaaaaaaaccaacaggaggaatagttgtaatgattctattgctggtggtggtcaaggcgttataagcatttgtttgaccatgatatgactaatgcgtaattccaatcttttatggataattttttgttcatat

SEQ ID NO: 31117 - DNA, 370 bp, Glycine max
  Clone ID: LIB3051-042-Q1-K1-H8
gtcaatatcaaaaatgaattttagaaaagaaggaggctccacttgcagagccagggaggagcgaagggtatctgtggatgaatgacgatcatgccctcgttgttgctttgctcgttgtggaaaagaatataatgaattgcgcaaacaagtggatctgaattcacatgggactcagccacaacaagaaaactttgctttctcctctgctaagagtaagacccaagcacttgttactgcttctatagttattaagtcatagaaagagaaacacttcatcgcgaatcggagcatggcggagctccggcactcttcctcccttggcagccgagccttcaattctccgatgaagcgagacgccggcgccggcgcc

SEQ ID NO: 31118 - DNA, 433 bp, Glycine max
  Clone ID: LIB3051-042-Q1-K1-H9
cccacgcgtccgcccacgcgtccgttatcatttcatttgttgtctgttgcgttaacgtcgctgcctccgattctttccacttcttactttctttctagtttctcttttccctctcacacaacacaagagaacacgaataaaacgcactgcacgtgaatcgcaattattagggtttacacaccctcgcagatggtttgagattgcgaattcgacgacgatgatggaaggagcgagcaatggagggatgctgtaccacgaggtgcaggagtcgaagctctgcgcggtgcattgcgtgaacacggtgctgcagggcccgttcttctcggagttcgatttggccgcgcttgcctccgatctcgaccgcaaggagcgtcaggtcatgctcccagcgctcgcgtcggcggatttcgagtcgcacaatgtcttgctcgac

SEQ ID NO: 31119 - DNA, 385 bp, Glycine max
  Clone ID: LIB3051-043-Q1-K1-A11
acgctaggaagcagttccaaccttgataatagtggagaactactaacctcaggatatggaacaaatgcatggcctgacttgtctttatccacttcagctaacattgatcagggttccctgggtactgaagtatctaaaaatttaagtgaacttagcaaattcagttcatcaagagaagaaactacacaacatgaaaaggatgctgaaattttccaaactgctcatgaaggtaaagagcaaggtgattttgttgattatggatgggtcaacataggaagttttgatgaccttgatcaaatttttagcaatgatgaccctatatttggccatgcaagtcttgataattctaatgagctttggtcctctaaagatgtgaagtaaaatg

SEQ ID NO: 31120 - DNA, 346 bp, Glycine max
  Clone ID: LIB3051-043-Q1-K1-A4
cggacgcgtgggcggacgcgtgggcggacgcgtgggcggacgcgtgggtgacccctaaattcgtgcccattcccacaactgcacattcttctttctatatattccaaatcccttttccgatttccaccaaaatctaaaccgaaattcccaattacccttcccaattttcaccaaaacctaatactcccacaccaatcttcgatcatggacgccgattcacaaccttaacaactcgaagagagaacagaggagcaagaactgaagtacctggaattcgtgcaattcgcgaccatacaggctctgatgcgctgcgccatcctctactcatacgccaaggagcgcgcgg

SEQ ID NO: 31121 - DNA, 370 bp, Glycine max
  unsure (1)..(370): unsure at all n locations
  Clone ID: LIB3051-043-Q1-K1-A8
gggtaagggtcccttttccttccgccgctccgcctctcgccgccgacccaagaagaccgccgccccgcctcctcctccgtctccgccgcagcctccctacgcggccggaatcgccacctcacccgacgacaacaacaaccgtctcattgctgccggcgccggcagcagcgccttgacgaaggcgaagaagaagaccggcggcgcccgcttgtggatgaggtttgaccggtcgggccggtcagaactggtggagttggagaagaacgccatcatccgccacgcagcgattcccgctagagacctgagaatcttgggccccgtcttctcccactcctncaacatcctcgctagagagaaagcaatggtgggt

SEQ ID NO: 31122 - DNA, 359 bp, Glycine max
  Clone ID: LIB3051-043-Q1-K1-B12
gaaaatgtgtatgctggtgtgagaggcatggggagtttgggagctgttaacaacagtatcgaggatgcgaaattttctagttcgaggaggttgaagaatcaaccgaactattcttcgtcggggagaatgtcgtccattgctgaaattggggacaaagggtatagagaaagtagtccagacagtgaagcttttgctgatggtaacgattttatggccggtttccaagttggtcattgggatgatactgcaatgatgtctgacaacgttggtggtctcaaaagatttagtgaagaagattcaaaaccattttctggcttaaatgcggttgagactcagaatgaaacgggacagactcatgc

SEQ ID NO: 31123 - DNA, 404 bp, Glycine max
  unsure (1)..(404): unsure at all n locations
  Clone ID: LIB3051-043-Q1-K1-B3
cccttcttcctcgttccgctcctcctttgcatacatggtttgtgagcaaccctaatccaccccaacccaacccaaccctattgaattgaattgggggaagaagaacattagaagaagaagaagaaaaatcggcacaattgttgtaattgaacgatgtctgctgcggtgtgcggaagcaagagatctttgttcgaagagcttcccccttctccgccagtatccaagaggctccgctgttcctcctcccctattcgcctctctctcccttccctcatcgaccaccttcgctctctcttccctcatatggatgaccaggtcctcgagagagcgctccaagaatgtggcaatgacctagatgctgccatcaagagcctncacggnctctgtttgggatctgctgatga

SEQ ID NO: 31124 - DNA, 356 bp, Glycine max
  Clone ID: LIB3051-043-Q1-K1-B8
gactcacgtgcgctctaaagagaacttagaagcgaatgtggcagcgactggggcagaatcaccatgccagctacgatgccgacaaccaactccagattcgactctgaggcgttgactcaggcgttgattccggagactgggtcacagactgtatcacaatatatctagattaatgcaaggctgaatacagtgctgcaaatagtcctgtgattcatactgtctatctggataactatggtgatgatgatggctataaggatggcgtataataccatgtagattaccatcttatcaagcaatgcatcagctgatgcatctgctgatattacatttcatatatgatctgatgtcagtta

SEQ ID NO: 31125 - DNA, 297 bp, Glycine max
  Clone ID: LIB3051-043-Q1-K1-C3
gcagcctcgtattccttcctctgggttgatgcctgcaagtgatgttcttattcgtgcaaaggaggttagtctactttggtcccccctccctccaaatggttatggttgtttggcaatcaccatgtaatattgcctgactatttttcttgtcgtaaagttacattagaacactattcatgcggaagcttttatagtacttccaattagagttcaagagttttatatatccttttgactttcatattctaaatataatctctccatggaatttcttggttgcagattttgccccaaaca

SEQ ID NO: 31126 - DNA, 408 bp, Glycine max
  Clone ID: LIB3051-043-Q1-K1-C5
actctctcagagtttgctcacccctactcttcttccagtctctatctcaatctgggtcaaatttaactatggctactgaagaggttttggttgatgaaatcacttaccctaccaagatcactactaccaagcccctatctttgcttggccatggaatcaccgacatggagattcacttcatccatgtgaaattctattcaatcggggttaattgggagccagaagtagtaggccacttggaccagttcaaaagaaaatctgcaaaaggacctgaagaatatgaagagttcttcaatgcttctcatttctgccccggtggagaagtttattagacttgtggtgatcaaagagatcaagggtgcacagtatggggttcagattgagactgcggtgaggggataggtggca

SEQ ID NO: 31127 - DNA, 413 bp, Glycine max
  Clone ID: LIB3051-043-Q1-K1-C6
ttctcttctttttaatttttttttttgttcttctttttcttcaacccctctattcgcaaaggaagcaacggaatcgattctgttcagttttcctcgttttgagtttaaattcacagtattttgaggaaacaaattaaagggtaatcgctcgcttaatccaccgagctcaattcccacatccccacaaaaaaaaaatcaacaaaatcagatttggtgaagaagagagtgtgatttgatgattatgaattgaagtttgaggtggagacatgaacgtgagccatgcttcggttcatccagttgaagaagctccaacgactgaaggtggtggtgctgaccaaaacgtcaacgctcctagggtgaggatgaaggatatccaaggcatgcccggcactgccggtggcctgtctctgcgt

SEQ ID NO: 31128 - DNA, 64 bp, Glycine max
  Clone ID: LIB3051-043-Q1-K1-C7
cggaggcgcttatggcgtcgggtcggagttcgaagaactgagccttccatcactccattccaaa

SEQ ID NO: 31129 - DNA, 378 bp, Glycine max
  Clone ID: LIB3051-043-Q1-K1-D10
ggatttaaagggctactattcaattgctatcaagacaacggatctttcaatctttgtaactgtctagtatgctttatctggttttgaatgtaagacagtaagagtgtcttcatgactgcagttccccgaaactccaaacttgtatgttaaattcatttttacttgatgtgtgttttgatcagcatcactgaactgtggacgtgtcacacttgaaggtctgttatttatgaaattttatgtgactctcgcagaaatgtgacatagacctctagacgtagaatcaatctgacccttagtcataaaggattggggatctgctttcagttagcattcatagctgaagtgaaatgcatgtctaaatttttcataactaaattt

SEQ ID NO: 31130 - DNA, 368 bp, Glycine max
  Clone ID: LIB3051-043-Q1-K1-D11
ggcacagacatacgcgtaggccctcacgtaacccatttgacgttccttctccactttcgaagcggcatctccgactccacctacctttataaaaattcatgatttcaccgcaaactaaacaatccttcggttcactcttcctccttttcctcgtgttgttgcagaagcgattcgaaatgggcgtgatcgtagaaaaccctaatagttccaagccaatcgtgatccgcgaggtctgggcctccaacctcgaatccgaattcgaggtgattcgtgaagtgatcgatgattaccctttcatctcaatggacaccgaatttcctggcgttgttttccgcccccacgtggtggaccccacaaaaccctacctc

SEQ ID NO: 31131 - DNA, 162 bp, Glycine max
  Clone ID: LIB3051-043-Q1-K1-D2
gctttctatatttaatattttatatatctttttactaatgttaaaggaattttatttgttttataaattaaaaataataaaaaaacataaatttaaaaagattaaaattcatttaataaaatgatgtactaaaaatttaaaaaatatataagtatattagat

SEQ ID NO: 31132 - DNA, 395 bp, Glycine max
  Clone ID: LIB3051-043-Q1-K1-D7
gccctgtccgtggcattttcgtctttctctaatttcttcttctttctttctctcagttctcttttgaatcaatctcatctcatccctaacaaccacacatgcacgcaccaccatcagatgttgttctgagataatccagataccctttaaggttttttacttcatagctgcagaattccttgcactttgcttggtttttgtctctttccttgagggttatcggattcttcctttgccaaatcttgactgctatgttcttcagttgggatgaaacatgatgaagacttcggctcgattttacaataaagggatattggtattcagtgaagtgaagttaacatttgagatacagaacaagagaaaagcaaatttgatgtaactttttctgatttttt

SEQ ID NO: 31133 - DNA, 386 bp, Glycine max
  Clone ID: LIB3051-043-Q1-K1-D8
ggaaggagcaacaaaattagcagaatcattgctcaaaggaactgaagagtttgtgaaacttgacctatcatattgtggtctaacatttaactttgttttaaacaccagtgttaattttttttgttctgtcatagagctgaacctggaaggaaatcctatcatgcctgaggtttgttgccttgactagatttctattgctaatattattgtaatgcatgcttcattggctggttttatttgagtgttactatgtattacttcaacactcaaaatagaatctggcttttcatactatttctttacccttaaaacactggcttgcagtttatagatttaggtatagctgtggcattttggtgataattttgagtttaaccagtttctta

SEQ ID NO: 31134 - DNA, 377 bp, Glycine max
  Clone ID: LIB3051-043-Q1-K1-E12
aaaaaaattaagttagtatgtatggatgtatgtgttcttagtaatcataaagtgctaagtcaaatacaaatattgtttgtgtgtggtggtttgatcaacaacacacagaaggggtatctcaaaaacacaacaacattggagattatggagctagcgcaaaagaaaggatttctggttcatcatgagtacgatgatcttgttggttctttttattcttcctcgacatcttcttctgtttctggaatttcaagtgggtcatcgttggaatctgattcttttgaagaagtaacatcccctgcctcttcttctccctcatcatcagttgatgatcaacttgtagttgttgctgatccattgagtgacatgtcttctctctt

SEQ ID NO: 31135 - DNA, 256 bp, Glycine max
  Clone ID: LIB3051-043-Q1-K1-E2
cgctcatgttgctcgcgttctcgccatcagatcaaaacggcgtcgtttacgcgtcgacgtagcgaaggtggtgggaaaccggatcagccggtgccacattttggggtttcttgaaggttccgatgggattgcttcgtttcatgttttttttttttaagttacggtgttaatatgaaaagggaattaattgtaaaagcagaaagtgaaaaaaaaaaacagaatagaaagggatgaaggattcattgtattgcggcat

SEQ ID NO: 31136 - DNA, 411 bp, Glycine max
  Clone ID: LIB3051-043-Q1-K1-F12
caatgaaggagcatcgttcatctagtccacaacctttaccacttccatcccctcagggaggttgtgcattgaaggctattggcagctttaagtctgtgacatcaggtggctcctcttactatgcttctggacctttgccactcccacctactgggtcacttcggaattttctgtacgaggaaattgctgctgcttgccaccatttctcttctgatagatgcatgtcagaatgtctttcatccaccatatataaggcttccttcggtgacgatgtttcaagttcgaagaagtttgaagctactgtcacacggcttcacccatcttctcagggcttgaaggaattcataaatgaagttaatactcttgcatctttgcaacatccaaacctttgtaaattgctaggaattcatg

SEQ ID NO: 31137 - DNA, 382 bp, Glycine max
  Clone ID: LIB3051-043-Q1-K1-F3
cggacgcgtgggcggacgcgtgggcggacgcgtgggttctctcacgtaatggcgtcttgggctcaagtgcctaacctcttcggcggcgccacctcagctccgccgccaactccggcggcgcaccatgacaacatcatgtgctcatccgacgccgccgatgcgctctcgcgcctactccagcgccttccgcccacgctctccctacccacgcgcctaccctcgccttcctccgcagccgccacgtgtcctacctgcctctcccttaacgacgtcctctcctgcgtttccaaactcggttacgcgcaactcaccgatcactcagtcccctccgaactcgccaactcggccgagtcagaagcgctggcactattcgacctttcgc

SEQ ID NO: 31138 - DNA, 412 bp, Glycine max
  Clone ID: LIB3051-043-Q1-K1-F4
ccagagaattggttatggaaattaaaaaagatgcacaggtgttgcctcgtataggtgctctgagagagatgaacttggagtattttaccatagacagtcagggcttcattacaaacaatgagagagctttagtggagctatttggggatgaggagaataatcgtaaagctgttgcatgtttaaatgtgatggctactcggattgctacagtttttgcttcattaagagaatttccttttgtccgctttcgtgctgccaagtccctagatgcaaccacaatgactaccttccatgatcttattcctacaaaacttgctgctggtgtctgggactgtcttatgaaatataaaaaaactgtacctaatttccctcagactgagtcctgcgagttgctcatcattgatagaactat

SEQ ID NO: 31139 - DNA, 372 bp, Glycine max
  Clone ID: LIB3051-043-Q1-K1-F5
cccacgcgtccgggttggggtcagaaaagcaattggaactctggatctaggagtgggaatgagaaccagaattctcactggagttctgggcgtaatgagcctggaaatcaagattccaacttggacaagaaaagcaattggaactctggaaacagtggaaacctggcttccgatccaaaaagtagcaattggaattctggatctggtaattccaatgaaaattccaactggggaaccaatgtcaataacaaatcttcatggggtactggaaatgaaaacaagaattccagctggagttctgggcatagtgatcctggaaatcaagatgccaatcagggcaagaaaagcaattggaactctgggaacagtggt

SEQ ID NO: 31140 - DNA, 386 bp, Glycine max
  Clone ID: LIB3051-043-Q1-K1-F8
ggcattggaggagctagtgtggcttagtcgctaaatttgttacgataaagaaattaattcagcaacaaatacaatgggttctcttatggcaggatgggactctctgatcttggatcctgaatcagctacaatagagaggaatcgatcactcaccaaagaagaaattaatgcttactggagagtaaagaaggagacagagttagaacacctcagagctatgtccaaactatctgagactattcaggcccgaaaatttgaggattcagagaattctcataagtcaagtaccgtgaccttggccagcataaaggagtccttaggcatggacgttgaccagaaaagtttagagcaacttatcaagaaaaatggctggtggaccaaaagca

SEQ ID NO: 31141 - DNA, 386 bp, Glycine max
  Clone ID: LIB3051-043-Q1-K1-F9
gaaagagcataaagcctcaggaaaaggacattggacaattttaactttatgcacaatatattgtcctgtaaatatgttatgcagttcaaaggacatccttatgcgcgtggtggctcaaaatctttccccagagtcggctcttctggaaaaggtgatgactccaaatccagaatgtgcatctctagagacaacaattcttgatgcactgcatatgatgcataatgggaagttcttacatcttcccgtggtggacagagatggaaatgctattgcttgtttggatgttttgcagataactcatgctgcaatttctctggttgaaagtagtcctggagcatctaatgatgcggcaaacacagttatgcaaaaaatttgggactcagctt

SEQ ID NO: 31142 - DNA, 415 bp, Glycine max
  Clone ID: LIB3051-043-Q1-K1-G1
tgcgtgtgtttttttttttttttttcatctccaaacccaaagagaaccgtttactcggggattttaatccccccaaaaattcccattttactccttttagagagagaaaagaaagattgagctttcaggagagaggaagagagagaaaaaaattggatttttttttggggtgttccaatggttgaactggaaatccaaagaagggtgtgagaaaaaaaaattgcatcttcttttggtgggtgtctctgaaactatgatcttgtgaaaacccagaaaggaaaccttcggtgcgcgttggtagatagatagagagagattattgttgttgggatattctgagaaccgttgattgagaaatgaacggtggtgatgaggtcgtggcaactccggcgagtccaccgcaaccgctggagtg

SEQ ID NO: 31143 - DNA, 376 bp, Glycine max
  Clone ID: LIB3051-043-Q1-K1-G2
aacattctttgtttcgctctcgcttttcaggtccaacaacgccgaagaagaagaagattgtgtctccgattattatttgaagatttctgaaacaccagagtgtttctgatcatcgtcgtcgctgatctctggttcctccgttactgtttctgattgcagaggcgaaaaggttttccgcatcaaaatcgaattttgtttgctccatcatcaccatgggtagaatcacgaaactgggttttcttcttctacccagataagtaaaagggttttcttctttctcatttattccgacaagtgcacaaataacaacatcatcatcgtatcaatcatcggacaagtgcacagacaaacaacatttgtgtctgattagcagaaa

SEQ ID NO: 31144 - DNA, 368 bp, Glycine max
  Clone ID: LIB3051-043-Q1-K1-H2
gatcaaggtatgctttctctcaatgtagaggtcgaggatggcagcgttgaagaggtagctgaaaaactaatggttatgcatgaagaattcttagaaggtaattttagttcttttgaagatctcaggaaagccaatcttgagcaagctactcttcctcatgtaacacagattgtaaacgaagacgattcagatgaagatggtgatcatgatgaaaaaatgattgtggatgataattcttcaaacatgaatccggagatttcaacatctgattcaaacatgaattcagtgaacaggccagtaaatgagcctctaccaaaggtttcaggcaaagcagatgatggatgggttgtagtttcaaacaaaagaaa

SEQ ID NO: 31145 - DNA, 423 bp, Glycine max
  unsure (1)..(423): unsure at all n locations
  Clone ID: LIB3051-043-Q1-K1-H5
cccacgcgtccggtcgcatgtttcattttccaaaacccaaccggttcgtggggatgtggtggctacttccagtagatcaaacaagagagaggatttctatgcttcagaagaaaatgtggttgttactggcaacgactcacctttgatctcgatacctccaccgccgccaccaccgccgttcaaaatgccggcatggaagttccgggtgcagggtgactttgttagaatagatggcattagtagctggagtagtgatttggaagatgaaattgtggaatcaccgagcagtgaagatggtggagcacctgaaatcttattgttctatcctagtcctgatgttgataccaaagctgatacttttattgaaagggtcagagctggtttaagggangagaagaagggaattcgtacgtccaatctacg

SEQ ID NO: 31146 - DNA, 397 bp, Glycine max
  Clone ID: LIB3051-043-Q1-K1-H6
aacaaaaccccttgcgtcctcgccgcacagttacactccgcagcacactgcaatcgccaccacggaccaagctagttccgccgtcgacgtcgtcggccaccgtcacgtctcgccgtcagtttctttaaataattgatatctggaactgtacaagcagaggacatggcaaatcagtctaaagaaaaccagcaagcaacaagttccacaccacctatccagaaaagtgaggaagatcaagcagccagcaccactatgggctttaaagattcattggaaaaacaatatcgaaaagtcaaagagcatgcagaaacatacccttatgtttgggcttcctatattgttgtatatggtggctttgcactctggactacttatagatggagaaagcttcgcaaga

SEQ ID NO: 31147 - DNA, 390 bp, Glycine max
  unsure (1)..(390): unsure at all n locations
  Clone ID: LIB3051-043-Q1-K1-H7
cccacgcgtccgtcttttcattctttctctgttctcatttcatcttctacacgcgtttctaatcattattagactcgatctcaacgatgaaggcaacactgctttgtccttgttcttctgctcctctgattctcgacacgcatagcaaccgaacctcggcaacgagacacgcttccaccgttgtttgttgttcgtcgaggaatcaaccctacatcccgaagctcgagccttttagccgaaccaaatttgaaagggccgttaaggaccctnctttgatcgaaaaatccgagagagagatcctagattattggtcaacgcttggaagagaacccatcttatactggctgcaggcttaatttgagcttgaagatcttgaaaaagagtccccaa

SEQ ID NO: 31148 - DNA, 373 bp, Glycine max
  Clone ID: LIB3051-043-Q1-K1-H8
cccacgcgtccggccgcccttcggccacagccatgtaaactacatggtgggggcaccaccgtccgaggaggaggttcaaagcggtgtgaggactcaacaggccgatggggccgcatgttttcagcagaacccaaatgcccgattgttaccgggctcgggcgacccatttgggtttgggttcatcatgggtcagcaagttgagttcgggtttagggactgaaggatctgatagtgttgttctgtaaataattggggattttaatttaaattctatgctcattgttatggaaaattgcaattttggtcattcttttcggctagacacatacaatgaatcggtatgaaactgagcaaggatgacccaatggtgctt

SEQ ID NO: 31149 - DNA, 375 bp, Glycine max
  unsure (1)..(375): unsure at all n locations
  Clone ID: LIB3051-043-Q1-K1-H9
aaaatctgtgcaaatttcaggttaaaagaggctaagtaatgcagtggtaaaagtggcagttgggctaagctcaccatttttgggctaagcgcagcttcagcgtgacagagaagctggcacaataccaatatcaaggccacacgctaagcgcgagatcagtgtgctaagcgcaggggttgtcattagccaggctcaatgcatgactagcgctatgctcaaatccacttactcgcgctaagcgcaatgtcgcggcttcagagcctatttaaagctggtttgtgcagaattatggtaacaatccaaagaatcaccatcacgcatagaagtcagagcacaccacagtgcctatttcgagaaaagaactctgtangcagc

SEQ ID NO: 31150 - DNA, 245 bp, Glycine max
  Clone ID: LIB3051-044-Q1-K1-A12
tgaatttttgcgagaattgagatggcgaacgagaacgaactcgcgaagctgcttgcaccataccttcaacgcgccgatgagttgcaaatgcacgaaccactcgtcgcttattactgtcgattatatgctatggaacgggggctgaagattccgcaaagtgagcgcacgaataccactaatgctcttctggattcgctcatgaagcagcttgaaaaggataaaaagtctaaccagttggggctctg

SEQ ID NO: 31151 - DNA, 375 bp, Glycine max
  Clone ID: LIB3051-044-Q1-K1-A2
tataacacaaggtgtagtgctacatacctgcctgaagtggccgccaatgaaggttggacaaaaaccgaagccgttgattctttgatacgtaaagcagggtacaatggtccaataaccgatgaacttaggatgcaaatacagctaaccagataccaaagcaccttatttaccatgcactatagtgagtacgtctcctatgtgaaggagagaagaggtgaagctcctattcttgcggctaaatcacccaactattgaatatgttgcctacctttcttgaggctgcataatttctttactaaaaaaaagaattctgttttcaaatgaattacataatataaaaagaaaacccacttgcctagggtcgggaatcaattt

SEQ ID NO: 31152 - DNA, 185 bp, Glycine max
  Clone ID: LIB3051-044-Q1-K1-A4
taaaaaaaaaaaaaaaaaaaaaaaaaaataaaaaaaaaaaaaaaaaaataaaataaaaagaaattttaaaaaaataaaaatataaaaatattacttattaattacatactgcttttactttttctaatttctaattttccttactcttatttatttcttctttctttttttttattcacctttaa

SEQ ID NO: 31153 - DNA, 381 bp, Glycine max
  Clone ID: LIB3051-044-Q1-K1-B11
cccacgcatacgaattgataaacaacactaaaaaggcatggaaatggaggtggcagtgcctcctcctacaccttcttcttccatggactttaactttgatagcaactgttcctctacttacatcactgcaccttctagcccccaacgctatggcaactcattcttcagtgctcccactagccccactcgcagacactcctgtgcttccactcccaacaccaccgaagacgagtttgaattcgacttcagtggtcaactccagagaccttccctttacgacgaagaactgttccttggcggaaagattaaacctctcaaacccctttccccttcgttcaattaaacaagagagaaaacggttatcgaaaaatcatcattact

SEQ ID NO: 31154 - DNA, 290 bp, Glycine max
  Clone ID: LIB3051-044-Q1-K1-B12
cttggatgaatgtttctctggcaatgaagaaggatcctgaaactgataaagcttttggatgggtgcttgaaatgtatgcttatgctgttgcatctgctcttcatggtgttcgtaacatattacacaaggacttcatgattcagcctccatgggacaaagaaattggcaagacatacataattcactacacttatggctgtgactatacaatgaagggtgagctgacctatggaaagattggagaatggagatttgataaaagatcttatgaataagttgctcccccaaag

SEQ ID NO: 31155 - DNA, 359 bp, Glycine max
  Clone ID: LIB3051-044-Q1-K1-B2
aaaatgggcatcgtcagattcctgattttgcatactcaccaaatccacactatgggagttttgggtcagagcgcaacaatattgaagcagaacgaaaaccaaaagcaattcctcgcaaagaagctccttcaaaaccatcgccatcagtcactactcctgctcctcctactcaaaacagacagagagaaagcaattttgacccggatagatttgcttcagccagaaaacggcttcaagagaactacaaagatgctgcaaatgccaaaaagcaaagaacgattcaagtgatggatctccatgagttaccaaaacccaagaatgccttccttggaaaaaacaaaagcggcactggtcaggga

SEQ ID NO: 31156 - DNA, 228 bp, Glycine max
  unsure (1)..(228): unsure at all n locations
  Clone ID: LIB3051-044-Q1-K1-B3
tcgccacgcgtttcgccacgcgtncgnccacgcgttcggaagcaatcgcaagtcgtctgttctgtcccgcgggagcagacgacctgtcttcatcggcaaacaacctcaaaaacattcatcaacgttcactattaatccattcatcattaagtaagaaaataaaggtcgatatttttatctttggtttgcttctgatccatcatggaggtgccgagtttctgggatgcc

SEQ ID NO: 31157 - DNA, 357 bp, Glycine max
  Clone ID: LIB3051-044-Q1-K1-B5
gcgttcgccacgcgttcggcacttaaagggttctcggcggactttcttcaaacaccgtacgccacggaaattcaaattaacaccaccgctctgtcagcacaaatcccttgccactctctcccacttcggaaccctaacctcccgccagaaagaccagattcatctatacgttgaaactcttctgcaatggaacaagcagttagagaggtgaatgaagggatggaaagacacgttgaagactccgctcggactgcggcgctttgtgcaataagctgagtctcgtcgatgtcggaactggcgctggccattccggaatagttttggccataacacgccctgagtgggatgtaacgctga

SEQ ID NO: 31158 - DNA, 428 bp, Glycine max
  Clone ID: LIB3051-044-Q1-K1-C12
gaaagaaatgccttgcgaagagaaaaagaaattctgaaacaagctaagcagagtgattatattaggacattgatgaatgatatggaggaaaaacctgaagagataagagattttgagggagctagcagagaagttgatagatatattgccaagatggacgaacgtgctcggcaagaggaggagctgttcacgcgtgttcctcttacgaaacaggagaggaaacgagaaaagtacttgaagaaatcaagaaatgggttgcaaggtctaacagaaagtttctatgatgaaatcaaaacattaccctttggtgataaaactggagagcaagtaatgggctctagtaatggtggtagaacaaacaatagactgaagaagcgaaagaggaaacattaaaggaagaaaaatttgggttttgagctaaaagggcg

SEQ ID NO: 31159 - DNA, 378 bp, Glycine max
  Clone ID: LIB3051-044-Q1-K1-C4
gttttattacacaaataaggaattgattctgagtgcacattttgatttgaagctacttttggataggataaaataaattatactgaattttactactgtttttggttttaaaataaaaaaatgttcaaacataaatcatgttgtttcaaaatcaattttaactcgaaatcgttttcattcaaaattggttttgcaaacattgatccaaaccgagtcttttgtgacgggttgtttattgattagggtattgaaagtaagaagtgggtgattggattttgaggacattatactagctggtcatggatctagttgattataattggatcttgctctggtgcttgtgttttgtttgattaaccttttaatctgtgggtttgt

SEQ ID NO: 31160 - DNA, 355 bp, Glycine max
  unsure (1)..(355): unsure at all n locations
  Clone ID: LIB3051-044-Q1-K1-C6
ctcgaggtctcattttctctctcttttagatctctctctactatacatctgcttggcttcaccattttccatttccatttctccctccctccaaaaatgcattcctcgctctctctctcgttctccgcgacctcctcctccgccgccaccgtttccagatcacgacactcattccactctcccgccgtcgccacgcctctcaatctccgcttctgcggcttgaggcgcgaggcatttgcttcaggtctcgctgcttctcgcaaccgccaccacttccaccttcctcngccgcctcgctccgccggagtctctgccgcgctttctagcaatggcatcccttccaaatcgttcgact

SEQ ID NO: 31161 - DNA, 258 bp, Glycine max
  Clone ID: LIB3051-044-Q1-K1-D1
tcgtacacccagtattgttcacaacttggtgtttcccctggtgacaatcttacttgctaattgatcagtatagatggttccatatgatgacatcatacattcatacggtatatcttaacatatatcagaaaataaaccattcaaggcttacagccttattttgattattaatgtaattactacttttgggaatattgtatctgatttccatcgatattgggcatacaatattggataaaaatacgctatttctgggat

SEQ ID NO: 31162 - DNA, 351 bp, Glycine max
  Clone ID: LIB3051-044-Q1-K1-D10
cccacgcgtccgcccacgcgtccgcccacgcgtccgcgggactgtaactagccgcagcacgaggagcagcctcaggttctcccatcttcactctctctagcaattgctcatgctccttttctcttcttcgtttgcatttcgagattcgtaggaaaaatgatgttgttgacgatgcagtttcatgtctgttttcgttgtcacatttccgaatccgaacgcgatagtagtgacaatattaacaacgatttctttcctcattttgtcgtgttaaaatttatcaccctgctctcggtttcattacttgccgttaattttaatttttggttttggaagaaggaaaagatgtctcac

SEQ ID NO: 31163 - DNA, 392 bp, Glycine max
  Clone ID: LIB3051-044-Q1-K1-D12
ctgatttcagaattttcgctggccggggatactgccttgtccgttgggtgagtgtagattattcaattactaattggggctgataatatttgtaagggattcatgaaggcatctttatatagaatcgcaggatggaagactcgttcctgagtattgatgactccttaggtgacacctccttaacctcgggcggtttgtgcagaaaacccttgtggtttgatattttgtattttttccctcaccaattaatttttagggatattgatgtacaatgagcgcacttaatatatggtttcgtgaactggtgtgctaaaaaaaaaaaagaaagcaaggacaaaaaaagatagaatatttggaataaaagcattaatgggaagaataagaagaagttg

SEQ ID NO: 31164 - DNA, 74 bp, Glycine max
  Clone ID: LIB3051-044-Q1-K1-D4
gaaaagagtatttgggttacacctaatctgattttttctttcttttttaaatggagagtgcaattcacttgtgc

SEQ ID NO: 31165 - DNA, 284 bp, Glycine max
  Clone ID: LIB3051-044-Q1-K1-D5
aaaattcgccagttagtcactgagttcatccattcatccttcgcttattcctcttgtttgggtcatggcaatttgttcctcactttcatcgtcatcgtcatcgtcttcttcttctacatcgtcctttggttcctcgagcaccgcgaaggcgtggatcatccatggcattgtggccggagtggcgattgctgcggcggtgggtgcacgcgcttacatgactcgattcagcaagtttcggagccgggtcgtgggcatcatacccgcccgattcgcttcctcgcgct

SEQ ID NO: 31166 - DNA, 369 bp, Glycine max
  Clone ID: LIB3051-044-Q1-K1-D6
gcttgtgctgcgcgataatcaattgaagaacattcctgatgtcaccgtatgtaagaaacttctggttttcgatgttgcgttcaacgagattagttcgctacatggcttgtccagggtctccgataccctcaaggaactctacgtgtccaacaacgaagttgcgaagattgaggagatcgagcacttccatcagctccagattcttgaactcggctccaataaattacgggtgatggagaatttacagagcctcgagaatttgcaggagctgtggcttgggcagaatcgaattaaagttgtgaatctgtgtggtctcaaatgcattaaaaagattagtttgcaaagcaatcgtctcatttaatgacggga

SEQ ID NO: 31167 - DNA, 422 bp, Glycine max
  Clone ID: LIB3051-044-Q1-K1-D8
cttttgacaggattacaaggagaaaccagattatggtcgctgtgttgctattgtagcatctgcgtcgttaagagagatgataaaacctggtgctttggcaatcatttcacctattgtagttggtgggttaacttttaattttacatgtctgcacatatattatcattaataaaaccaggggacaacggcaacagttttgcaaatttttgatgtattgtaaccatgtcacatacatgtgaccaacataattgcttgataggctagatcatatgccaagcaaattaatgtttggaatcatttgagaaacaaattatagatatcgtggtaactttccacccgcaaccaaaaccctttaaaatatatcttcatgtattcataagacaccagtggctatatttagcacatattgttgcacaacctac

SEQ ID NO: 31168 - DNA, 382 bp, Glycine max
  Clone ID: LIB3051-044-Q1-K1-E12
gctcgccttaacttccccgaattgctgtcccaggacgacgacgtttcgacccaacaacagggcaagatgtccgccgattcaattcgcaaaaaagcgacccaagtcggcgccagagtcgacgcgctccaaaccgcgcttcagcaatcctcgtcgacacactccattagttccagccacgtcagctatgagaaaccagacttgaacgagtatcccaaacctgaagattagtaatttccttcaaccttcaagattaatattgatccaccaatcatgggttctgatgtgacttatatatagggcttcaacttgccctcttcacctatgttaatttgaaaagaaaaaacttttatatttgtcaaaaaaaaaaaaaaaaaaacataaa

SEQ ID NO: 31169 - DNA, 213 bp, Glycine max
  Clone ID: LIB3051-044-Q1-K1-E3
acggctatttctaggtcacactctactaccatatctactaaaaatgccttattcccttggttgacagaaatttgcgttgtctatctactgataatacgtacaatgcaataccaagaaaatacacatgaccctattgttcacaatgcacttcctattcgaaaaaatccaaacccattttaattgtcgtactgatttttaaagcgttgttatttt

SEQ ID NO: 31170 - DNA, 368 bp, Glycine max
  unsure (1)..(368): unsure at all n locations
  Clone ID: LIB3051-044-Q1-K1-E6
cccacgcgtccgcccacgcgtccgcccacgcgtccgctcccaaggaggttttacaaatagacaaattggttcccctccaagcgttgcagctattgcagctgccactgtagctgctgcaactgcatggtgggcagctcatggattgcttcctttgagtgctcctcttcatacttcttttgcctgttctcctgcatcggtgactgcagttccatcaatgaatacgggtgaagcaccggcactgaaggcagagcaagaaaagactactctacaaaatcctcctcttcaagatcagatgctggatccagaatactcggaagctcaacangctcaacattcagcttcaaagtcaccagctggcattgtatcag

SEQ ID NO: 31171 - DNA, 386 bp, Glycine max
  Clone ID: LIB3051-044-Q1-K1-E8
attgttggctattcattcattcgtgttcctcaggagagagagggtgcgtgtgatggggattcgaattcgaattagggttttgcgcatcgtcatcgaatttttctcttatgcaaggaaggttttccttctccgatttgaatttgattgaacgagtagtgttaagattatgatattttttgagaagcttcgtttctctcctcacttgagccgcttcattgccggcatcctcctgttaatcttctgcaattcattccagttagtctctaatttccccattcctatacagccttagattcaacgtcgatcgctacactcttctctccgattcgtacgattccgtattcgatattcgtttgtttgattcactccttctctctctcgctttt

SEQ ID NO: 31172 - DNA, 375 bp, Glycine max
  Clone ID: LIB3051-044-Q1-K1-F1
ctctctcccaaattgctttgtctcatttctctctcccgaattgttatctccccctgctgtgttccttctttccatttttttcattcttcccgtttttttgtattttcttacatctaaagctgtgattttttacaccaaaattgttatttttatcttagattccatgacaacgatatcatatttgcgttcctctccaagtttgtatttctatttgaccgtgactaactattgttcttcctttgcaacacaaaagcttcaatttttttgtgttttctgttttttgtgttataatgacttttcgcaggacaagaggttaaattttttggtgtttctgagccttctccgacgtacccaaaagctggagctttttttgct

SEQ ID NO: 31173 - DNA, 402 bp, Glycine max
  Clone ID: LIB3051-044-Q1-K1-F11
gccgccaccgttgttgcccccaaagtatatatatatttttaatttataattctaattttgtttttatattatataaaaatataaaaattagaggaattgaaagtttgtttttaatgtgctgcatttctaatggtatggaaagggtgagtagtagagtaagggcatgttttgatgaacttattcagaagcccttgtaggagaagaaaatgaaatgagtttcttcgtaagttgaaattagcttatgcatgagtaaaaaatcacctttttgtagaagctcacttgtataacttctctaaattagcttatgagaagttataattttttttcctcatttttttctgcgccaggtgcttcttcatcttgataagtttatccaaacatgccgtaaggttcttaattaag

SEQ ID NO: 31174 - DNA, 300 bp, Glycine max
  Clone ID: LIB3051-044-Q1-K1-F3
tcggccacgccttcgcttgtactgttctattagttcatactaagttctgaaaatgagtgccaaggttttgcttgttctacttatgttcttggccactatacttctgatctcctctgaggttgcacccgatgatgcatacgagaattttgacaaaatagatgggaagcctattgcagatggggtagatgaaagcaagtattggcgtggcggctatggtggcggctatggtgggggttatggaggtgggcctggaggctatggaagtgggccgggaggctttggaaggggacatgggggata

SEQ ID NO: 31175 - DNA, 422 bp, Glycine max
  Clone ID: LIB3051-044-Q1-K1-F6
ttttgtttccagactagatatacaggctgttcatctaataccaactacgcatcaagaccctgtatgtcctgattcaaaatattcccaggctcggtacttctttggtaagaatctgcgtgcacaaaacttctcccgagaaattaaagaatgcacaatccacacgcttcctgaacgtggttttgtacttggttgattgtttattttgccaatctggcattatatatagagcattgtgctagccaaattttgtgagttgcattcaaagccttagaaattaattttaattacgaagatgagcaagttcgtggggttgcttttgctgcttttgatcactgtggccattgctgaatacgatcaccatcctgaacatgagaaacatgggccatgtgggaaagttcagcacacaaagaatgttgacacat

SEQ ID NO: 31176 - DNA, 364 bp, Glycine max
  Clone ID: LIB3051-044-Q1-K1-F8
accgcatccctcattttctctcattcacccaatggctgctacggcttctgggtcctcttctatctgcaacagaatatacaacctttccttcacacacccttccctttcactcaccagcagcaacttccctcaaagacccgtatctcaaaaaccactcagtctcaacctcgagtcccaaagtttcgctctttcctttctcccacttcaccgtcttcccccacctttcgctgcctttgatgggttggaagtagctcaagataccacagagtcccaacaagacgaaccagaaccagaaaccgttgaaaaaacagaacaagaggaagagcaaaaggtttcagactccaatgatgctgggaggctctat

SEQ ID NO: 31177 - DNA, 354 bp, Glycine max
  Clone ID: LIB3051-044-Q1-K1-F9
tctcaaatgcccccatttaaaaggagccatagtcacactgatgccatgtctggtatgttccataagggggtccgctgtgatggctgtggtgtctatccaataactggacctcgtttcaaatccaaagtaaaggaaaattatgatctttgcaacatttgtttcaatgaaatgggtaatgggacagattatatcagaatggaccgccctgcatatgcgttggcccctcgatacttacatggacatacacaaaactctacaacattacccccacatatttttaagaaaagtgcccttttgaaacatgcgcagccccaactcgatagaatgtgtatattggatgtgaaagtgatatat

SEQ ID NO: 31178 - DNA, 300 bp, Glycine max
  Clone ID: LIB3051-044-Q1-K1-G1
tcgcccacgcgtccgtccacgcgtccggttttggttcacagtggaggtgtgcatggtggacattattatgcttttatcaggccaaccctctctgaacagtggtacaaatttgatgatgagagggtgacaaaagaagataataaaagagcattagaggagcagtattggtgtgaggaagagttaccacagacaaatcccggattcaataacaccccatttaagttcaccaaatactcaaatgcttatatgctggtgtatatacgtgaaagtgactaggtcaaaatcatatgcaatgtggat

SEQ ID NO: 31179 - DNA, 403 bp, Glycine max
  Clone ID: LIB3051-044-Q1-K1-G10
agcaacaggggatctttgccatccacggttcatgcgaattgcaaaaggacaaaaccataaaagaaaaattcgcaaaagttggtatcttcattcttccttctttaaacgcaacgaagtttctttccactttcaaaattcccaacccctcctttgttcgctctgtacatctgggtcatttaatccccgaatttcttcgcatcttgcctcatattccatccaattctcgctgtttcaacgatcacggtgttgatccttgatgggtttttctcgtcgatcataaacatacccgggtttgtgaaaaaggtttttcctttccacgcgtcgcttcacttgtcatcgatcctgagctccatagcttgaaacgctgtggaactgtgaactttggtgctccttttcttttggt

SEQ ID NO: 31180 - DNA, 383 bp, Glycine max
  Clone ID: LIB3051-044-Q1-K1-G2
aatcaactcaaatattacctgtcaaaatcgagacaaattcagatccatatgaatggtgttgtcatgtctactttaaatgaccaacacacacacgtatgtcaatcttgcccatgatgcctcgatcaataattatgtgtggccaacaattacattaccattttgtgtgggagcaacagcctggtcgatgtagttggatcattattatttgattaatgacgatggtacatttgaaaatgattattgtatatttggaaaatgttcatttagcgtccactcggataaatagttaattacatacatacatatctaaatataattaattggttctaaaaaaatctaaatataattaattatatatagttcataagtggttaagagttttt

SEQ ID NO: 31181 - DNA, 388 bp, Glycine max
  Clone ID: LIB3051-044-Q1-K1-G4
cttcatacaagattctattgagatgggtgctaggcatgttggtgctgcaccattggcaggttcacatatataccgaccccatagaggcagcacacatgagactactcttagacatcgaaatcttcctcccgtgacttttctccaagttgatcaggtttcattggaaaggtgatcgtggtgacgttgtgttgtggaggctgcaagaaatgccattgcggccaccttgcttgtcgtgcatcttgcgtcacagattgggtatggcagagcagtgaggtttcaaccatcatttgcaaagcagagtcaggatgttactttactggttgaccatcataatgatatgcgcttggacattgaggatatggcttatgagtcttgggagtggaaaaca

SEQ ID NO: 31182 - DNA, 182 bp, Glycine max
  Clone ID: LIB3051-044-Q1-K1-G7
cccacgcgtccgaaaatcttaattttctataaaattgctcaacaaattttgcagcgaagatgaggctgtgcatgacttgtggatacactacaccctattaacagtgtctgtagttcttaaaaattcattcgctatgtaaacgttttgcccgagaggacaagatcctgaaatttgtgagattt

SEQ ID NO: 31183 - DNA, 430 bp, Glycine max
  Clone ID: LIB3051-044-Q1-K1-G9
cggacgcgtgggcagctctagagaattatcatacccttcaagatgaaaccgtacctacgtccaatattcctattattccttatccttctcgaccaatccatttcggcgagtgctgctataaatattaatggtctgagaaacaaaattagagaagttctaaacaagcacccgagcatcaatcttccggcagataaactgaagaaggtgaagagaccactgaaggcactggattatctgcttggcgaatgtaaggacaggccgcctcaagaatttcaagaattttgcccgaaatttaagaacgattatcaacaaaattgcccgaatgccgcgtatgaagcagtttgcccgttactgaagcaagcgattcaaatatgttgccagaaacacgcataactctgcaagccacggtgggcgtttggatgtgctttta

SEQ ID NO: 31184 - DNA, 285 bp, Glycine max
  Clone ID: LIB3051-044-Q1-K1-H11
acacatactacaaaggttttgaaaatttcaaatggtggtgcttatctgggagccagtaaacaagttactgtggcaagtaagaagtctgctaaatccaagccactgaatttgtgtcctagatctgatggatgtgccaggacttctattgatggctgggaatggcataaatggtcccgaagtgccagtcctgcatataaagcacgtgttaggggtcttccatgtgtccagaacaagtgcatagattctgaaaataatttatctcagttgtcaaatggcaagggtctt

SEQ ID NO: 31185 - DNA, 374 bp, Glycine max
  Clone ID: LIB3051-044-Q1-K1-H12
cccacgcgtccgcttctaacacatacactactctctctctctctcttattgtatgggggccaattccagtagccgagggatcaccgccttagggaagcgagtcgccaaccggatctggactttcaacgcacctcctctcacttcaaggaggggagcatacagtagcggctcagtgtacgacaagaaccctgatgatgagatccagtctgggcaggtcccagacgatgtgatccaggcggcaacacaatccggcatatactgggccccacatccacagactgtggtatttgggccccccgtaggaggtgaccaaactgcttctgccattcactctgatgcgctggaagagaaggcctggtttcgtcccaccagtc

SEQ ID NO: 31186 - DNA, 263 bp, Glycine max
  Clone ID: LIB3051-044-Q1-K1-H2
cttgtactgttctattagttcatactaagttctgaaaatgagttccaaggttttgcgttggtctacttatgttcttggccactatacttctgatctcctctgaggttgcacccgatgatgcatacgagaattttgacaaaatagatgggaagcctagtgcagatggggtagatgaaagcaagtattggcgtggcggctatggtggccgctatggtggtggttatggaggtggtcctggaggctatggaagtgagcgtggaggc

SEQ ID NO: 31187 - DNA, 339 bp, Glycine max
  unsure (1)..(339): unsure at all n locations
  Clone ID: LIB3051-044-Q1-K1-H3
agcaaattaaacgtactgaaggagtttccagtacagatatcgtangaagaatactggcttctttaagagatcaaaagaattgtgacgatcataatggcactgaggtaaaacctcaagaagaaaaccagtcacaggctttccacatagcccaattcctaccaacttctcgacgtattgtccagttttcaaatggcaagggtcctggaccaaattcacgtattgtatacattgatggggcatttgatctcttccatgcaggccatgttgagatacttaagagggctagggagcttggagactttcttctagttggtatccactcagatgagacagtgagtg

SEQ ID NO: 31188 - DNA, 339 bp, Glycine max
  Clone ID: LIB3051-044-Q1-K1-H4
gtaggaataatcaatcatggtaaaaaaaaaaagcaccttctctattttaagtagttcaatggcttacactgcaagtcttgtgttcttagcttccactttccttatcataaactttcctcttctggcaaacgctatcggatgcaatggaccatgcagaaccctcaacgactgcgacggccaactcatttgcatcaacggaaggtgcaacgacgaccgcgacgtcggaacccacatctgcggcggcggaatgccgccaaatccgccaccaagcggcggaagctgccagtcctcgggaaccctaaattgcggcggaaaatcgtatcctcagtaccgttgctc

SEQ ID NO: 31189 - DNA, 361 bp, Glycine max
  Clone ID: LIB3051-044-Q1-K1-H8
cccacgcgtccgcaagggacccctagtgcccccgctgaaacagaagagacaaagcaggcatcacctgttggtagtacttcaacaaccataaatttatcagagcgagcacgggaaagggctcaaatgagacaggctgggttggtttcttctacccttagaggtcgtggaagaggcggtgctccccgtggtcgagttggtcgaggtaggggagtagtacgccgaccacctccaccacctggcagtgatcaatgaacaacaaattcaccgtctgtgatttgacttagggttgtaaacttctcccttagtctgacgaagacagtatagaccagttaggtgcaaattggttatcagttttcgtcat

SEQ ID NO: 31190 - DNA, 334 bp, Glycine max
  Clone ID: LIB3051-045-Q1-K1-A10
cccacgcgttcggatgcccaaaccgagaccacttcgaaagagcgaaacgcagtgttagcattgatcctcaacaaaaaagacatgaaaagaagaaaaaagactcagttgtgtatcgatgcagctctactagctagggattcgcaagtgcgatcgaagaagaacgatggcgatggctgctgctctgcgtcgcgaaggaaggcgtttgacccaaccaatcaacgccctgcgttcctctctcatctctcaagaccaatcccctcatggcgcgcgcttcatttccactcacgtggtgagaaaccgaatgaaaagtgtgaggaatatccagaagatcacc

SEQ ID NO: 31191 - DNA, 304 bp, Glycine max
  Clone ID: LIB3051-045-Q1-K1-A11
tccacgcgtacgcccacgcgtccgctcattgtgtgaccacagttattattacattgcgggatgaaccatgttaatgcagatgtgcgcttaccttacctttgcggagcgggttatcatgggcacatcggacttataccaattcgttctcgacacaaaccgtatacgcgtgacctgcgatgatcagtactacatccggccagacctaacgcgcacttgaaggcatcacacattgatcaacctgtacaggtccggacctgtgtacaactgactcgtaaacaccgactcgtcactcagctatactgtg

SEQ ID NO: 31192 - DNA, 228 bp, Glycine max
  Clone ID: LIB3051-045-Q1-K1-A12
cgcacacttgccaacacgatctaagtctacgccattattgttccatactctctagtggcgcgcttactcgccgtactcatcgccagtaccgtcaataagatgctcctactcagctccacctacgacctacatggctaccttatgagcgaaatgagcatttaaattgtggtatacgaggacctagagaggttccgctgagatgccatcaagcttgtatacgctactcat

SEQ ID NO: 31193 - DNA, 262 bp, Glycine max
  Clone ID: LIB3051-045-Q1-K1-A3
gcgaccactgcgtccgtccactcgtccgcacactcgtccgatcaaccgcaactgtgatctacgctcgttgcatgccataataataaacgatcaatatttaaatattgacatcataaatgtctagaataattgattctatatctgattggtaatgagaatcgagtctgtttcagatctgagaactttaggttatcattttcaatgctctataaactaggattgggtataaaatgtaacattctatggaacaatatatctcata

SEQ ID NO: 31194 - DNA, 370 bp, Glycine max
  Clone ID: LIB3051-045-Q1-K1-A4
atggtgtgtgtcaggtctcggctttctgctagggttggtattcattctctttaattaggggcaagggtgctaagacattactggtttaattctgacatttttattatggcatgattgtcaagtgtcatggcactcgcttgtcgtcactaagaaaaagacttctgcactgagaccgaacagatcgacattaactgtcgttcataggatctgcatgcatcattcatttccctgggcattccattagcttgagcaaggaccctaatatgatgctactgtgaaatccgctcctttcagcctatgctaatttatgatgatgatcatgccactttgacactttacgggctaggtcaccactacatcaaattgacat

SEQ ID NO: 31195 - DNA, 348 bp, Glycine max
  Clone ID: LIB3051-045-Q1-K1-A8
cccacgcgttcgaaaaaaacgaaatcaatgggaatctgcaggaggaagtgggaggaatggaatcaatcagaaatcgaatcacagtagtgatgatggcaaaccttccggtggaagtagtgaccgaaatcctgtcccgtctaccggtgaagtcggtgatccggctgcggtctacctgcaagtggtggcggtccatcatctacagcgggcactttgtgctctttcacctcaacaaataccactccagcctcattctccgccaccgctgtcacctctactccttggacctcaaatcttcggaacagaataccgtggaactgagccaccccctgatgtgctacagcaacagca

SEQ ID NO: 31196 - DNA, 304 bp, Glycine max
  Clone ID: LIB3051-045-Q1-K1-B10
cacgatcagatgagaatgattgataacattaatgcacttatttctgagctgtcattggagaaagaagaattgattaaagccttgacatctgtattatctgagtgttacaggatgaaggatataaacaaggagttgtccacaaagctagaggtccaaacacaaagattagagcttacgactgctcaaagcatggactatgaaaatgtttatgctgagcaactagattgtaagtgctatgtatgagaacaccccatatgcagagtaaggtgattaggctctggaaagggtgctaggatggattatg

SEQ ID NO: 31197 - DNA, 167 bp, Glycine max
  Clone ID: LIB3051-045-Q1-K1-B11
ggtcacttctcttactttgagcaacatgcaaaagatgagcatttcacccctttgctggagcagattgggaagttggaggaagctctatacaacattcagtttgaacagcattggttagaggctcagactgaccgccaagcaatagtgaacgatgcaatgagcagaag

SEQ ID NO: 31198 - DNA, 349 bp, Glycine max
  Clone ID: LIB3051-045-Q1-K1-B12
atcagaggtaccaactttatgtttgtcaatttccttcttgcttcattgtttgcagtggggagcgaacaattggttagtgtgtactagttttcaatcacagatgtcatactatgatgcttacacgacatatagtacaatctattactgtggatatgcatctaatataaaggatactggaacctggagagcttgcccctatatgttatgaaacgtatgatatgagagattgacttattatgggatgagcacatacttggtgctgtatttgatgaaccagattaatgactataccgctactgcttgcaacaatgtatgtaattgcaatgaaacttgctatatcacaccattg

SEQ ID NO: 31199 - DNA, 423 bp, Glycine max
  Clone ID: LIB3051-045-Q1-K1-B3
cccacgcgtccgcaaaaatgcatgatatttttcccccaaccaacattctgatgatttataaattgcggttatcatcaggcggatattgcctatgtttcatttcttgaaaggttccaaattgtcttctctgaaatttttaagcacgacatcacagcaggaagacccaaactagccacatggattcaggttcgtagttctgtgcaatccaagaacatagtaatttgaaattaattaagttcgcattcatctataagatgaaatggaatggtctatttgaataaggcccgaccatcctcctaattttgatttcgttagatttttcttttccaaaatatgtacatgattttgtcaattgttaatgcatgaagggaataagatcgatggttataagcagacacaagttgacagggaggaatatctgga

SEQ ID NO: 31200 - DNA, 439 bp, Glycine max
  Clone ID: LIB3051-045-Q1-K1-B5
cgccgcaagcattgcagagtgacagcagcggcagcttggcctgaggttagagatggtgagccaaaggcagcgactcgctcggaagcgatacaaatcggaacaccctgagctctttccgaagcccaagcccacaccccccaaagaccccgacaagaagaaaaagaagaacaaaaacagcgctttcaagcgcaagaggcccgagcccaagcccggctccagaaaaagacaccttctcagagtccccggcatgaagcccggcgagagctgtttcatctgcaaggccatggaccacatcgccaagctctgccccgaaaaggccgaatgggaaaagaacaagatatgtttgcggtgtcgacgacgcggtcatagagctaagaactgccctgaggtactagatggcgccaaggatgccaagtattgctataactgtggggaaaat

SEQ ID NO: 31201 - DNA, 445 bp, Glycine max
  unsure (1)..(445): unsure at all n locations
  Clone ID: LIB3051-045-Q1-K1-B7
gaggctgattgcagattcagctacaatatgtcaaggaatgccaaccaacattgctgtgcatcaagttttgcaaatattggatttaattttgatgttgcgggtgattgtggtgaaatattcaacagactagttgacaggcctgatttcggtgatatacattcttcaaaaaggtcagatattttaaacgaggagcctgactggctgttgtccaagtcatgtattaaaagctgcaagagacctaacaagaacaaaggcaaaagggatcgatttagaaattcaactttggaggagaatcttgaaagatctagaagaaagctttccgctcctncttttcatagaagcaaaaagaggtttttctctttagatcatccttcagagatgatagccaaaagacagattggccgagtgtccaaccctgctttcaatcatcaagaagctagtaatt

SEQ ID NO: 31202 - DNA, 434 bp, Glycine max
  Clone ID: LIB3051-045-Q1-K1-B8
caaagaaaaaaagaaaaactatatcagcgattctcgtgatcttcggcctcgaatcgaggaggtaaaagacccaactccgactctgtttttgtgatcgaaaaccataaaaaagttgtttccgatcactgccttaatcggattcagctgttgttcctcctactcaatttcgaatattgaaaggctttagttgttgattttggtcaagtctctagtcaacctgtgaattttttattcaagtttaaaaatatatagagcaatgagttttgtttttcgaggaacaagagcagatattgaaaatgggtttccaggatttatacctgagaggcgagcattgcgcgttcatgcaacacgtcctagtaattccaattcactcacttttctcgtgacagttcttctgttattcatgatactgaactctcaccagatgtccccaa

SEQ ID NO: 31203 - DNA, 295 bp, Glycine max
  Clone ID: LIB3051-045-Q1-K1-C1
ctgaagtttcctattctataccaagaaggtgtgcaaatgtcctctttagctggcgtctgatacttagctggatgcttaatggatttattagtgccacaatgatattcttcttctgcacaaaagcgattgagccacaggcctttaatgaggagggaagaactgctggaagggatatgctggccgtgacgatgtacacttgtgtggtctgggttgtgaacttgcagatggcgcttgctatacgttacttcaattaatattgaaaaaaagaaagaaaaaaaaaattaactatagtagg

SEQ ID NO: 31204 - DNA, 232 bp, Glycine max
  Clone ID: LIB3051-045-Q1-K1-C11
gtactgctctattagttcatactaagttctgaaaatgaattccaagggtttgctttatggacgtatgttcttggccactatacttacgatctacctctgacgttgcacccgatcatgcatactacaattttgacagcatttatgggaagcctaatgcacattgtgtagatgaaagcaagtcttggcctggcagctatggtatctgctatagttgttgttatggacgtcatcg

SEQ ID NO: 31205 - DNA, 265 bp, Glycine max
  Clone ID: LIB3051-045-Q1-K1-C12
acgactcacatgtctttttccaatttctagtctctcacttactcattatcttacgctctataaacaaacttcatcatcatatacaaatggtatttttatgccatcattacactctatgatcctagatccttactcacttatacttcacaatactctcacactcaccctataataactacactcttactctctagcaaaataccttacatagttacaacatcttacacctatatcctaactatcttatactatcaatacccgacac

SEQ ID NO: 31206 - DNA, 429 bp, Glycine max
  Clone ID: LIB3051-045-Q1-K1-C3
cccacgcgtccgcccacgcgtccggcgggtatgagcttaacctatcctcctctaaccggaatatatcatccatcggttcaaaatatgggaaatccataaagcgaggcattatatcattcctcaacgttgatgacagcagattcacccgcgccgatgaaattgaattcgccccatatttttcaaagcacaagtggggtttgttccgccgaaaaaccaagcttctttgtcgcaagtgttgcaaccatattggatatgcctacaacgatcgcacttcatcattttttcccttcgtatcaaacagaacagaaccatcaccacccaccgaagcatcaaattcaagtccaatgaaatacgatattcgcattcgtgctttacaaccttcatcttctcaagaacatggaatcactgtgttggcttaaaatttcaaat

SEQ ID NO: 31207 - DNA, 431 bp, Glycine max
  Clone ID: LIB3051-045-Q1-K1-C6
gactctaccaagactagtggatacaccgagtttgaaaaatttgcatgctaggaatatgggttgcggtgctcgccacactgctttagtaacagagggcggaaaagtcttctgctggtgatggaacatatatggacagctgcgcctcgatgacatgattgaccgtatcattccttctgaagtcactattgaaggttgtgtccctaaaaatgttgctcgaggtcggtggcatactctgcttatggcctagtcccacacttgatgccatggtgctactgacccaatctagtttgttagcagatctattggaaggcaatgtctatgtgtacatacagatgttgtgctacagatacatacttgtacggattgttgcatggtgtgcgaatgaccatgactagctatagcatgtaacaccacagaagagcgatatttgg

SEQ ID NO: 31208 - DNA, 320 bp, Glycine max
  Clone ID: LIB3051-045-Q1-K1-C9
tactcaacacgatgggcacatcgatcttcagcacaccctctgttgagacagatttcgggtagtctaatcatgggtctgaaatcgacagacaactcaatttctgaaggtaggccatcatttgtactctcaacttgcagcaatgaaatggcagctggatccatatgcggatcatctgatggctggtcaatgcgcaccttttatgagctggttgcatcatcacaaacggaaaggtggtcctttgatagtgagtgttttcgatctggtcgtcacaagataagtggatccaagtgcaggttctcgtattctccctacatggaacc

SEQ ID NO: 31209 - DNA, 422 bp, Glycine max
  Clone ID: LIB3051-045-Q1-K1-D1
caaaatcatctcccatctaaaacaaaagtcacaactcctctgcaatcttctaattcaccctttgtgggacctaccccttcacctcccctggctccatctcctatgccaggagagtctgagaagtctattccttgtgtttcatcaatatcaaatgctgcaaatattggacttcaacaaacagggggtgcagtagcaccagctcaatcccttgccattgggactcctgggatatcagcctctcctttattggcagaattcagttgtcctgatggtgcgcatggtaatgctttagctgccacttctgggaagtcaactgttacagagcagcctcttgaacgcctaattaatgcggtgaaatcaatttcgcgtaaagcattaagtgctgcggtcatggatattggttcagttgtcagcatgaatga

SEQ ID NO: 31210 - DNA, 80 bp, Glycine max
  Clone ID: LIB3051-045-Q1-K1-D11
cttgatctgacagtaatgaacagttcacttatagatgtcaagtcccatagataacttacgggacatcacttcaataatga

SEQ ID NO: 31211 - DNA, 357 bp, Glycine max
  Clone ID: LIB3051-045-Q1-K1-D3
cgcacgcgtgcgtgcaactattcccggatcacgaatctccataccttagatatgtacgtggatgcggatatatactattataacgcatgtcgctcaggattataaataaatatatactgatatagctgcagagcgaggactcttattagattcttcatttgcactgattaacgatggatatatagagagagagaatcagatgctgattcagatgaagtcacttatcttatctatatacagtctctgacatactggtttgtcaaagacatacattcatttgaagctaaagctgcggcttagttatggatatggactgatgatcgatccgtatttcacacacgttggcgtcaacggatg

SEQ ID NO: 31212 - DNA, 405 bp, Glycine max
  Clone ID: LIB3051-045-Q1-K1-D4
cagatcgtaagtgtgatcctgatatacgacatgtcgatattgacccagatgctgagctttcgatactagccagggatagtgtgtagaaggtaatggcaaaccaataggctaacacatatttcactaaagataaaagatccacaaaaggcatctaaacaactatttgtcgagtcattgaacagagatagttaggatgatattccaagcatcgtagttcctttcaagggatgaacaaggcaaaccaacgcaacacaactactccatacattttcttcgtatatataatatcaatatgcactcccatctgattggagatctcgtgaaatccattctctacaacataggtttagctcattactgtgtaaaactgatactcttcagattagactgtgccaatctaatatc

SEQ ID NO: 31213 - DNA, 440 bp, Glycine max
  Clone ID: LIB3051-045-Q1-K1-D5
ggcaatccgctgcttttcgcctcatgaagcaaatggggtgggaagaaggtgaaggtctgggaaaagagaagcaggggattaaaggacacgttcgagtaaaaagcaaacatgacactattggtattggcctggagaagccaaacaactgggccttcgacaccactcaatttgataatatccttaagagattgaaagttcaagctccgcaatcccatgacacagtggaaaccaagcctagtgttcctgttggtaatgagcattctgtctccaaaactacaagaccacaaggaagatacacgagaagagagagggggaagcttgtctcgcaatattcctttgaagatcttgaaagaattcttgttaaaaaggtgacatatctgggagtactgaaaatctaatggtgaactggacatgttaaatacatctgaaattcaaaattt

SEQ ID NO: 31214 - DNA, 444 bp, Glycine max
  Clone ID: LIB3051-045-Q1-K1-D7
tgtcgaagaacaacagcaacagatgactctccagagtcttcgtacaatggtggatgctgagagatcctatcatcagcatgtccttgttattctagagaaactatatactgagataattgaagagagacaaccaaaagaggctacatcatttccactgccaaaagatggatataatcaacctgcagatgagaatgctaattcaaatggcatcgattataaacacaacagtcaaacaggcacatacttttttgcaaaggtcatacatccatttgatgctcaagctgagggggagttaagcctatcagttgatgattttgttgtagttcgtcaggttggccccaatggatggtctgaaggagaatgcaaaggcaatgctggatggtttccctctgcttatgtacagagacaggacatgataccagccagcaagataacagaataact

SEQ ID NO: 31215 - DNA, 345 bp, Glycine max
  Clone ID: LIB3051-045-Q1-K1-E11
gagattctagctgttggtgatgttcggttattatgtgtatacactagctaatcctgagggacattccgctgggaatggatcgaatcacttgaacagcaccacaataatcgacaattctcaattctgctgaaggatattaacgaaatagagagaaagaactgaagttggcagaagttcatggaagggttcgcaagtgctcatcctatcagtagcatcaggtgatggtgatcgaacacggggagtacgcaaatggaagtatgcgggatgagcacagagaataaattgcaacataaagtagtatataacgtgagtggaatgcaagtgccaagctgcatatgttactac

SEQ ID NO: 31216 - DNA, 404 bp, Glycine max
  Clone ID: LIB3051-045-Q1-K1-E4
cccacgcgtccgcccacgcgtccacccaatcattctatggccagtggtgagaaaggaagcattggttcctgtccggaatcttgcattatgccccgccttacttcccgctcgtcaccttacgtgttaccctctctatcggcaactcctttagaccatttccctgaatcttcatcttggaacatagacaaactttccttcttccttcgacagacaactaactcggcgcaatggatgaccgaatcgacgaggacgagaaggacaaggaggaggaggagtccttggccggcttgacctctcttccacctcaccgcaaagcccattcctacagccagcagctgcgaggcacctgcacacacaaacgccaccatcaagtccggaagcacagtctggacgacagccgtata

SEQ ID NO: 31217 - DNA, 426 bp, Glycine max
  Clone ID: LIB3051-045-Q1-K1-E6
cgagcaagtcttttgagaaaaaaataaaatcaaagagcatttctcattttccatgcaatttctatgtgactgcaggatttctttgagggaagaagaagtagatcaagttaaaagattgcagatatgcttatgtggcttgttttgatgtttacttagttatgagggaaaaacactattttcaagggaagagctgaacttgcggaaagagtggaacaaaatttgccgagagattttctttcctttgacttgacttgcaagtacaatacaaccaatttggttgtttgctacataggaaaacgaggggcttgtttggttttttcttccactgcatcattttcagtttttcactatttgtaatgctctcattctcataccttgttctgcctcattagctttgtgtgtgtgtgaaacccttggtagagacat

SEQ ID NO: 31218 - DNA, 352 bp, Glycine max
  Clone ID: LIB3051-045-Q1-K1-E7
tcggccacgcatccgaccacgcgtcacgttgaatccataccacgttatcattgggacctatgaaacaaaccgatgatgtctcaactccttcagcttctgctactctacacagtcaccgcccgcacttttttctaatgcataatatttccctctatatctctacctccatatgttgctctttcatattcaccctcgtggttcctatttcgcatacatatataaatcaatataaccaccatgagcgttcctccaccgcctacggcggcgatgtggacgccgttcaacgcagcgcactggcactagctggatcaccaggccctcatcttcaagtacactcaaggcgggtctctcg

SEQ ID NO: 31219 - DNA, 246 bp, Glycine max
  Clone ID: LIB3051-045-Q1-K1-E9
cccacgcgtccgcttgtccttgacagctgacatgaaaataattttttaattcattgatgccaatgttaaccgtgtgctttattggccatgtttataaacattttaattactatgaacatttcaattattatgaacattttaattattatgaacattgtacaaaaaaacagactatataatctatactctcacgaaaagctaaaagttgctattgatccagagaagtttataggcatgcattctgct

SEQ ID NO: 31220 - DNA, 360 bp, Glycine max
  Clone ID: LIB3051-045-Q1-K1-F3
cccacgcgtccgcccacgcgtccgctgagaaaagaaaaaagtctgaagcttctcaaatggaaattagatgaagagttggggatgaagatcttggaattggaggctgagttacaggctgtactttctgataaacgcaatttgttaaatgcttatgacctgctaaaggctgaaaaggagtgttcagtgataagccttgaatgttgtaaacaagaaaagcaagagcttgaagcttctcttgtaaaatgcaatgaggagaagtccaaaatcgaagtagagcttaccttggcgaaggaattggttgagacttcgggatctcatgtgaattctctgaatgaagagaatgtaccattgccctcattc

SEQ ID NO: 31221 - DNA, 400 bp, Glycine max
  Clone ID: LIB3051-045-Q1-K1-F5
gcgtgctatgatagttactggtggctcattcaagtctgaaataactcgttgcagattgaaagaggttatcaagggttctctttcaagtgttccgggtagcaaaagcgacaaccgtctggagactcgtaagcatattttatctcttctcaccaatccacagaatttccgagacaggtgtgagcctttggctgcattaagattccaatctcatcatgctgctgtagaaaatatattgcgtggacttcaaaaattgccatgtcaggccttgattgcaatgcgtagaaaacttaaaggagtgaaagcatcagtacctcagttacaacctcgcagacatggatggacacgggaccatctaatcaaggtagtgaagaaaatcagtatggaaatgctttcacaactt

SEQ ID NO: 31222 - DNA, 432 bp, Glycine max
  Clone ID: LIB3051-045-Q1-K1-F8
agtggcacatggtctctttgaaagagtgggttgggtctctgatgcatacagatatggttgcaagtggggtgctgcgtgaaaatggtgaatggtcattctcatcagagccttttgaaaagaatgtgcatggaccattatatgaaggtgcacgatggggacctgcaaatttctctgctgatctcattgcagctcaagcagtttcatcactgcagattgctgaggaggcagatgaagataggattctctttcaagttcttgattaagggcatgctgaggtgatagaagaataactgtttgtggtggtgactggatgaagtcttttgctattcttatcgaagatttatatgcgagtatatatattataattataaatatgagtcttgtgcatgtcaaacactttctgctacagttgtgattgaacgtgtgacataa

SEQ ID NO: 31223 - DNA, 410 bp, Glycine max
  Clone ID: LIB3051-045-Q1-K1-G10
acttaatcgctgatgtcatcatatataattctacctcacttatgttgcactaacaatcgaagatgaataccaacagcgacaccgaataaaaccaatcatttccagaagcccacggagcatcatcatcatcatcttctccacccaatgttgggactgagaattggggaactcacataatgggcacccctgctgctccaagcagccacccagataacacaaaagcagctttacaaagtggacaacctcaaccagttcaatactaccatgaccaacatcaacatccctacgtgcaacatagcccagttgacaaaccaagcaacagtcccatggagtcaatccttaacatgttcgattcatggagcaaaaaagctgaagccaccggacacaacgtgtggcacaaccttaaaact

SEQ ID NO: 31224 - DNA, 340 bp, Glycine max
  Clone ID: LIB3051-045-Q1-K1-G12
tacgactctgagcatcagcaatggcaaatgcaagtgttggtaaagaactgtccctgtaggcgtgtagtaggagctgttgctcccaccgaatccaaatcgctctacaacctccaagggcttacatactaatactagcccgatcatatggtcaaggcagaacaatctagccctgagttacttgagctcaatcctgttggttgtatcctcgttctagaggatgaccacgttgttcatatatgactctttcaccattattatgtattgtggaagatacgtatcgctcacaatcctttgctcactcatgatattgacaagagagcaatcaatttccaggctgcta

SEQ ID NO: 31225 - DNA, 204 bp, Glycine max
  Clone ID: LIB3051-045-Q1-K1-G4
cccacgcgtccgaaaaaaaaaaaaaaaaaactaataaaaaaaaaataaaacataaaatgggacatggtgaaattgaaaaatatgattgtgcatactttcgagctcaccctatcgtactccatctatcatggtagtacctttcatttcaatggccctgctttcaatacgatctacgcatttttacactgccgtatactgacaaaa

SEQ ID NO: 31226 - DNA, 441 bp, Glycine max
  Clone ID: LIB3051-045-Q1-K1-G6
tccacgcgtccgcgagatcgcacttctaccccaagactagagcatcttatgaagctcgattcattgattgctctaattctgcatacttccagctgagcagattgtgtttcatctattatggttgaccttaacagtacaaggggaagctcaacgcaggaactatgcattgttttgctgcaatatttgtacgaaagaggtttaggtattatggctagctgtgatgtagtaggtggtactattagcggcttacttacgacacgacacccttctgttgttactcgagccttgtgattctctgatttggcatccacttaaagggagacataattcatcaagggggatctatgcatcccataatatttccttaaatgtactactttatgtaatattatatacgcttctgtacgtgacattatttttaatcgcttgaattttgtccca

SEQ ID NO: 31227 - DNA, 371 bp, Glycine max
  Clone ID: LIB3051-045-Q1-K1-H1
tctattagttcatactaagttctgaaaatgagttccaaggttttgcttgttctacttgtgttcttggccactatacttctgatctcctctgaggttgcacccgatgatgcatacgagaattttgacaaaatagatgggaagcctaatgcagatggggtagatgaaagcaagtattggcgtggcagctatggtggcggctatggtggtgggtatggaggtcggcgtggaggctatggaggtgggcgaggatgctattgaggtggacgtagtggatatagcggcggacgatgtggctatggaggctggcgtggcagctatggcggccttcgtagtggcaggcgtggttgctattgccctaatgaacatatcga

SEQ ID NO: 31228 - DNA, 344 bp, Glycine max
  Clone ID: LIB3051-045-Q1-K1-H12
gttatgtggtccttgcacattgtgaagttgcagttcaattgggggagaattagtaaggagagatagtatgctcctattgagcagtgctacaggcaattctgaacgggtcgttttggattatcctatgcctctaatgtgggcggaaaagaatgtatattttttattatatcaaagaagaggcccagagagccttctttccatgagtaatggcacgagttacaatattatgtttactctggaccactggataaggtgttgagcagaacgttgacattgatgttggcttggttccactggatgcaccgacaatggtgaatttgaatacctgcattagagatcttgtg

SEQ ID NO: 31229 - DNA, 389 bp, Glycine max
  Clone ID: LIB3051-045-Q1-K1-H3
acgcatgcgttcactcacgcatgagagctcatgctgatcatcatcctttcaacactactcgtgtccaggtcatttcatgactactcttccaacccttaaaaactacatatggaccatcttgtcacgatcctttcttaactgcatcaataacagcacccaaaaggggtcacaccatttgatctcatattcttcatctctcatggcgacgagcactgctaattccttcaactttgacaacacttctatgcgcgtgcaccgtcggacacgtgctccagcacgtgaggaacacgagcgtgctatactacgggaattcaacaatgatcaccgacatcggtgttaactactacgctctgagcttacccgagacgctgttagcattcgacagaatc

SEQ ID NO: 31230 - DNA, 443 bp, Glycine max
  unsure (1)..(443): unsure at all n locations
  Clone ID: LIB3051-045-Q1-K1-H6
cccacgcgtccgcttcctctcatcctctataaagaaagtgcttaatttgtggtgttagggggttcagtttccatggattgggggcttgctatatcttctcatcctaaaccttattcagtcacaactggtggaaatctctggcggagtaaacacaccaccaagaatatttactttgcaagttcttggatatcaaaagcttcacgacacaaaagggaaactcaaatagaacataatgttttgaggttccaacaaccaagtttggatcatcattacaaatgcatcagaggagggtctacatatcaagaatgcaatagaaaatttgttgtgaaggcaatctctaaacaacctcttggttttgaagctcatgcttccaatcctaagaacattttggactctgtcaaaaatgtattgtctgctntctactggttttcctatccatacac

SEQ ID NO: 31231 - DNA, 393 bp, Glycine max
  Clone ID: LIB3051-046-Q1-K1-A1
aacacgattacacgaccgaatcaaaccctctctttctctccgaagctgcgtataatatcttactcgccttagattgttcttctctttcattatactgttctcttttcgatttgagggaacagtacaagagtgtgaggatcggttaacccaactgcacaggtagtcactaaaataatggagtctcacgatgagactggatgccaggctcctgaacgccccattctttgcattaataattgtggcttctttggaagagcagctaccatgaacatgtgttgcaagtgttacaaggacatgctgttgaagcaagagcaggacaattttgcagcatcgtcggttgaaaacattgtgaatggcagtttcaatggcaatggggctgtgactactggtgct

SEQ ID NO: 31232 - DNA, 324 bp, Glycine max
  Clone ID: LIB3051-046-Q1-K1-A11
cccacgcgtgcggataggcaaacagacaacatttggagtgatcgaaacgctctgggagcattggtactcaacgcaaacatggcgagtacaagaaaatagactgattatgtgtatacgctgcatcactactagctcaggtttcgtaagagcgaacgacgcatatcgattgggcatactgaggctctggatcacaagcgaggacgtcggatcaaaccaatcaacgcactcatgtactctattatctgtcaagaccaatcccgtgatggcgcgcacttaatgtacactgacgtgatgcgataccgcttgaaaagtgtgcagaatatc

SEQ ID NO: 31233 - DNA, 355 bp, Glycine max
  Clone ID: LIB3051-046-Q1-K1-A12
cgtacgcaaaccctcgaggcccgatcacagaggctccattgcccatcgctctctctatgggtgcacgcgcggtaataggagattcacgcgccaccatggcctatgcatcgagcctccctatatgctgccaatcaagcgcttccagcgacggcacctcgcaatcccagtctacgatcgcgacgccagcgttccagaccttcatctgacgcatcttctagtcgatccgccacgccttcacgcagcgccgcacgttgacagagctcatcgaccggagctccatgtaccgacacgacaccctagtcgaagcatactctcagatccgtaagaacttcgactacttacgcgtcaattacct

SEQ ID NO: 31234 - DNA, 426 bp, Glycine max
  Clone ID: LIB3051-046-Q1-K1-A6
caaattttcagttccttcctcgcttttctgcaaaatcatctaaatccgtgagtttctggtttctctttatacttttgcaattacccgtaactgtccaatcgttcagtggaatatgtactctaccttcttgatctgcatatgaatttcttcctataatatttctgaagaaaaccattgattattctcttcttcttaaatgtatgtaccaaaccaatatgttgtatatatgtgttacatttctgttgattcatagaccaaccaatgttgctctattataggttataattcaatttaataatttcgagatgcttaggttagatgatatggattctgctgaaatacatcacctatgggttcgcaattggctagtcaatgatgaaaacaaaagttctggttttgcatgcaggatcagctgggggattgggt

SEQ ID NO: 31235 - DNA, 304 bp, Glycine max
  Clone ID: LIB3051-046-Q1-K1-A7
cggacgcgtgggcggacgcgtgggcggacgcgtgggttcgcctggtcttggcatctgggcagcaccaccacccaccaccctgcttagaccaggtcctctctctctctagagagaaagagaagcaagaaaaaacagaacaactaacattaagcttttaatagtaagacatggctcaacccagttccaacggggatctgaataataaccagcagcagggtcaggttcagcaacaacagcagcagggtcagtgggcggcggcggcgcagccggatcagtatcagcagcaatggatggctatgcagta

SEQ ID NO: 31236 - DNA, 322 bp, Glycine max
  Clone ID: LIB3051-046-Q1-K1-A8
atgtactagtgttttgttagttcacacactaagttctgaaaaatgagttccaaagttggtcttattctacttatgttcatggccactatacttttgatctcctctgaggttgcacccgatgatgcataccagaattttgacaaaacagatgggaagcgtagtgcaaatggggtagatgaaagcaaatattggcgtggtggctatggcgactatggtggttggcgtggtggtggttggcgtggtggctatggaggctggcgtcgtggctatggtggtggacgtggtggctatggtggctggcgtcgtggctatggtggtgggc

SEQ ID NO: 31237 - DNA, 376 bp, Glycine max
  Clone ID: LIB3051-046-Q1-K1-B1
cccacgcgtccgagtgatcaatcatcaacacagagctgagtgtgttgctctgtgaatccaccttgggcttccattggaggaccatttcctcctggaatagaaatactaccacacttttctgtcttcacttctctaagttgctaacttaattgctccttcattttttcactcttcgttctcgcgtacccgtgtcacggtaactcgaggtgaagtgttcgaaaatgactgtcacacctaagatctcagttaacgatgggaaactagttgtccatggtaagaccattctgactggagtgccagacaacgttgtgctgactgcaggttctggaaggggtcttgggactggtgcttttggtggtgccacagcttcacacag

SEQ ID NO: 31238 - DNA, 258 bp, Glycine max
  Clone ID: LIB3051-046-Q1-K1-B10
cccacgcgtacgcccacgcgtccgcaaacatggaattgtttatcaggctccaagaattggataagaagtgtttacactaaagcacttgatatatatgttatgagtcatgaatataatagtatttaaataaggagttattcttccaattatgttatttgattgaaaataaaaacatgactataagaaatttgatttttcttatttgtaattatgttatgcactgcaaataaatatacaaattgagtgtttcattttcaa

SEQ ID NO: 31239 - DNA, 305 bp, Glycine max
  Clone ID: LIB3051-046-Q1-K1-B11
cccacgcatacgagcgtattcaaacatttcaatgacctcatatgagctttctcatggcgaaacatttaaaattggagctcacagatttaggataccacatgatcttttccaatccattcctggttcaaacaaattctggcatgtagagctttgcaagaacttgctcattcaattcttggactgccccaaatggggattgatagcattaataagtgtgacgtacacattctaagacagttgtttaatacgctactgcatgctggtggtacagcttcaatgcaacaactaaaggaacaccttgataa

SEQ ID NO: 31240 - DNA, 260 bp, Glycine max
  Clone ID: LIB3051-046-Q1-K1-B12
tgctatctcatcttgaacattaagcatcatcatcatgcacgagtagagacggagcttgggtcgtattctctttgtgcatgaatcaactacctactgagatcctgtaagcaagccatcatatgtactgcttaaattagcgctatcaaatagctgatgtgatccatatacagatcatgggctgtctcttcaaatgcaccatgcttatgagctcgttctttcatcacaaaagctctggtatatcttacataattcgagttcac

SEQ ID NO: 31241 - DNA, 395 bp, Glycine max
  Clone ID: LIB3051-046-Q1-K1-B7
atgaaatgcagagtaagcaaaaggatttagagttggaggacaatgcattaatttttgtgggaggaaaagtttccgttgatatattactattgatgaagctgctaagctttgcggtgggtgttcttcctgatcatgttcccaaggtggagcccagatgcaattgtttttaattccaatcaggtttatgaaactcccagctatagggtgcagtttatgtttagagagtcaaatggagcaacatttttaaaatcacaacttcaaacgcctgaccctgattcagttgatgcatcagcaattctttggaaaaatctccaagataaaaaaacttacttaaaaataaaggggatccaatgaagatggcatcaatcaatattgaaaataagctttcttctggc

SEQ ID NO: 31242 - DNA, 367 bp, Glycine max
  unsure (1)..(367): unsure at all n locations
  Clone ID: LIB3051-046-Q1-K1-B8
cgcaaggacacctgccaccacaagctctccgctgcccaccgcccgccgcctgtgccttggcgtgttcagccgccatcgccgtccctgcccactgcttctgctggaaagcagcatctaagctctccaccgcccttagtcttgttctttcttgaaaataattctggtgctatggactttgacgacttacaagaagcgccgataaaggccacgtctcgagtctccaagttcgcgccaaaatcatcaaagctcaaacctaaaccaaaatcagaacctgccccgcgcatacctgaaccccaaccacgcatctgcaaaccagagcctcangaaattcgtgcagcaactgtcagaaagaatgaagatgatggcg

SEQ ID NO: 31243 - DNA, 233 bp, Glycine max
  Clone ID: LIB3051-046-Q1-K1-C10
gtactgctctattagttcatactaagttctaaaaatgagttccaagggtttgctcgatgtagttatgctcttggccactatacttatgatctactctgatgttgcacccgatcatgcatactacaattttgacagcatatatggcaagcctactgcacattgtgtagatgaaagcaagtcttggccttgcagctatggtatctgctatagtggtgattatagacgtaatcgtg

SEQ ID NO: 31244 - DNA, 321 bp, Glycine max
  Clone ID: LIB3051-046-Q1-K1-C11
atcgactcagaaagacattggacaattaatagtggcttacttactaagtatgttacggtctataaacaaacttcagcatcatatacagagggtactcttatgccatgatgacactctatgatcttagatcctgactcagttgcgcttgagaggaatcgatcactcaccatagaataacttcatgcttactggcgagcaaagtacgagacagagttagaacatctcacagctatatgcaaactatgtgagactattcagacgcgacactgcgcggattcatagtattctcataactcacgtgctgtgactatggccagcata

SEQ ID NO: 31245 - DNA, 234 bp, Glycine max
  unsure (1)..(234): unsure at all n locations
  Clone ID: LIB3051-046-Q1-K1-C2
gttggcaacaagttggatcatgaattactgtccaatgctccccatggctgctggcagagggtgnacggcgcctttggcactggcccaaccctacctgccggcactgctctggatgtacctggcgtactggcactcacagcatactctaggaagtcgatgaaagcaaggcttaccaatgcttaccatgtaatgtcaaccaataccttacgaacatgctgtacggaccactctcac

SEQ ID NO: 31246 - DNA, 68 bp, Glycine max
  Clone ID: LIB3051-046-Q1-K1-C4
cacgaacgcgactaaaaaccgcaggcacagaccgaaaaccacgagggagaacacgcaaagaaaggggg

SEQ ID NO: 31247 - DNA, 416 bp, Glycine max
  unsure (1)..(416): unsure at all n locations
  Clone ID: LIB3051-046-Q1-K1-C9
cgggaaacctcacacacatcacaaccttcaaaacaatactatccccacaaacaatgctggcgaaagatctaaagactaaaactaacataattattataaaagtcgtaggtcactgacagtgagtgcagggaaagtgtgattgctccgaaaccgaaaccacgaagcagtcgcaaacatgaccgaaaagaagcggaaggagagggacgaaggtaaccgccgaagactgaagccgaagaagaagtcaaacactcaatggaagaagactggccctcgtttgccctcatctctgcaaaaacatattgaccgtttaaaccctaccacttncttcgacagcgccgattccgatgacgacaatgacgtttacgagtacgaggaagaacgggccgaagaggagtccaagaaaaacaagcgttacg

SEQ ID NO: 31248 - DNA, 178 bp, Glycine max
  Clone ID: LIB3051-046-Q1-K1-D1
gtacatatattttttcactagtactagcgttcgtatctacatgaatactataatataggatgcgaagtattgaaccaattaatggtgagcttcgttggtctctcgtccgtgttgtaatgatggatcgggtactagctagttctgcagttccactgtgttgtaatgtctggttttgttt

SEQ ID NO: 31249 - DNA, 208 bp, Glycine max
  Clone ID: LIB3051-046-Q1-K1-D10
tccgggcctcaacaccaagagtgcctccactttgtttcggagcattaattcgaattgccggaggaacaagctctgtctctcctaccttctaaggcctgcacatctggtcaaggacagggtctaaccaatgctactccatttcacacacacaaatagtttcgtggttggacgaatagaaaagaatccttgattcttcaccaaccaagtg

SEQ ID NO: 31250 - DNA, 197 bp, Glycine max
  Clone ID: LIB3051-046-Q1-K1-D11
attctatcctattgtaatcacctttgagtgagtgtagtaatgactagttctcgagggcgttcgatgaatgcggctaatcacttctaaggcgttcagatcagggctttgagagaccgttatggacactgcatcattgccattctagacttcccgattaaggttgactagtatacttgaactctcgactatgacattgc

SEQ ID NO: 31251 - DNA, 423 bp, Glycine max
  Clone ID: LIB3051-046-Q1-K1-D12
accacgcgtgcgatcctcctgctctgcaacctccatagcttaccttcctcaattgggggtacactctattccattcccgacgccaccgacaccgacaccgacaccgacaccatcaccaccaccgtacaccagtccacccgcaccctcgaccaatgcggctccggcaaggtcttcgtctacgacctgcgccaaaccttcaacaacgaaatcctactgcattgcgacaacctcaacccctggagctcccgctgcgacgccctctgcaacgacgccttcggccgaaacgccgctgcgctcgccggaaatcgaccggaagatctcctagcggcgtggcactggactgaccagttcgtaaccgaaatcatattccacaacagattaataaaccacaagtgtagggttatggaacctgaatccgctacg

SEQ ID NO: 31252 - DNA, 353 bp, Glycine max
  unsure (1)..(353): unsure at all n locations
  Clone ID: LIB3051-046-Q1-K1-D7
ccgngactgatcatcagaggcaatggcgagcaggtactgggcagtgtctcttcccgtgccaactcggcatcatctcagctctggaaccaattgcaggaacgaatctccaagcattccttcgacacacctctctacagattcaacattcccaacctccgcgtcggaaccctagactctctcctctccctcagcgatgacctcgccaagtccaacaatttcgtcgaaggagtcacgcacaagatcaggcgccagattgaggagctcgagagagtttccggcatcgacagcggcgccctcaccgtcgatggtgtccccgtcgattcctacttgaacaggtttggttgggaagaggc

SEQ ID NO: 31253 - DNA, 417 bp, Glycine max
  Clone ID: LIB3051-046-Q1-K1-D8
cccacgcgtccgcccacgcgttcgtgagtagtattgcagtttattctatcatatccttgttcaaataattttcttttcaattacaataccccaatcccagaaacttatgttcatgaccatcctcaaggtcccaataacatttacttgaagacaattttgagttgaccttacagcctagttccacctatacaaacacccttgatccttcattcttttttgagttgaccttacctagctccaatactggcaacaataatactcttgggcatctgaactatctccattctttttttccccctttctttgcagtggatttgcgaggttttaaagaaattaaatgcgtttttatgtgctaaagagctaggtaattatagaattcatttcacacatacttctttttactaccttttatctttt

SEQ ID NO: 31254 - DNA, 317 bp, Glycine max
  Clone ID: LIB3051-046-Q1-K1-E10
ccaaataaaaagtgaatgcttggaaaagtggaggttgtggtacttattagccaagcggggaacatgcaaagtcaacatacagtgaaagaagaaaatcattaatgtccacctccatgatgtcaacctattcccgatcagtcaccattatcgacacatccattcggatgggctcatatggatcgctattcttgtcgtcgcctgctttcatattcacgatgtgccaaacatgtcatatgttcatgctgacaaactgtcaacattgtattataagctgatcaagttttgcaagttaaatttatcaattgtgcagtattgct

SEQ ID NO: 31255 - DNA, 342 bp, Glycine max
  Clone ID: LIB3051-046-Q1-K1-E12
tgctgttctaacttctaaacaataataatagaaaagacaatacttgatattattggatgctttactaatctcctctgaaatatgcagaatgcaagatgtggtgcagagcatacccaaactgttactcgccaggctcctacaattactcatgttcctggcaaggagaagtcaccacaactcgacgatggtggaactggatttccgactcgtgatgatgatgatggtggcggtggaggaggtggatgcggaggcaactgggctggcggatactactgatatggctctctcgctatacttggcttcttagaggataaggaaactgaagacacatacatggatgac

SEQ ID NO: 31256 - DNA, 397 bp, Glycine max
  Clone ID: LIB3051-046-Q1-K1-E6
gccagaggacccttatccccctcactgtattgaaggctctgatgaatcaagtctggtgccagcattaagatggctagagaatgaacctaatgtaacaatcaggcgaaaggattgttttgatggatatttgggctcaatacaagaagatggttcaaatgtttttgtagattgggtgaagaagaataagataacaactctgctggtagtaggtgtgtgcacagatatctggggtccaaaatttggatgctccacaatgtcagctaaaaaccgtggttttctggagcctctagaaaatgtggtggtgtattcccgtgcctgtgctacctttaatgtccctctggaggtagccagaaataccaaaggagctttggcacatactcaagagtttatgcatcat

SEQ ID NO: 31257 - DNA, 345 bp, Glycine max
  Clone ID: LIB3051-046-Q1-K1-E7
gcttgattaccgatcagctgacattttggtcaacatcaactctcaggaacgcagttggggggtttgggttacggatgagaaggaacctattaatgttgaggaattgagtggaattgatgatgagaattacttggtcatcagtgaggaacatgtggttgatggtgttgccaactttatggccagatgcattttgtcaaacccgaaagctctgaaattttctccagaggaactgcagaaagcgctatcaaaagcattgcgtggtacaagcaaactggaaaagattatggatatttgggaagctggaaagttgttttattgtctgtctacctggggacttgctttggc

SEQ ID NO: 31258 - DNA, 367 bp, Glycine max
  unsure (1)..(367): unsure at all n locations
  Clone ID: LIB3051-046-Q1-K1-F1
cacatacgncatctcttacctcaaggcacacgtctccacacattccaagtccaagcaatgcttcagtcagctatatgcatacatccagtcgtgaacaacatcctctacgtaatagtgagtcggctgcaagctactacccattcgcatcgacacactcccttccagaatgctaaatcgatcaattgagcatatcatatgatagagacgtccacgcagctgaactagttatcgccaagacttgaactaaaaggtggccatgcgatgaccggtggtctagttgaatagtcctatgtgatgctcggggcactccctacctctgtcatttgacttccgcctcggcacctggtgtacattggagctactctct

SEQ ID NO: 31259 - DNA, 269 bp, Glycine max
  Clone ID: LIB3051-046-Q1-K1-F2
gtgatttgtagggtgtaccaaaaggagggtcctggtcctaggaatggtgcacaatatggtaaacgatatgaggagaaagagtgggaaacagatgaggaaattgattctgtacaatctgcccctgttgctgctgttcgtgcacctgttcctatacaacctagtgaaagccatatttcagttgctaattacatccatccctctacaagtggatgtgctggattgacctctgtatcatgtgtatcagaattgatgccatcttgctcgacaca

SEQ ID NO: 31260 - DNA, 229 bp, Glycine max
  Clone ID: LIB3051-046-Q1-K1-F5
cccacgcgtccgcccacgcgtgcggtttggttggagggttggaagttggtaagttcatgacgtgggggtacaaattgtatagagagaaaataaagacttatttctttctatgttttcctctaatgtactagtactactctggaaaaccaaaagtgtaaaacgcttatttaaatatgatggtgtacaagttgctcactatcttaatcaagacattgtttgttttggttgg

SEQ ID NO: 31261 - DNA, 412 bp, Glycine max
  Clone ID: LIB3051-046-Q1-K1-F9
cccacgcgtccgcccacgcgtccgcccacgcgtccgggttcaaaataaatagttagcagagttagttttttgtttcttttccctaaagagttaggctctattggaccgtacgattaagatcgttcggtgaaattgatcacgctggtgccgcataccctagcgttcctgttattctattgtggctgaaacaaaacagtgttgaacggcgaggtagaacgacgacccccttctgcgttttgaccttcaatctcgtaagttcttctatttattaatttattttcaattgaacaccgtgtgttcagatacgtgaaaagattttagtgttgattccatgttgaaagttaggcactgcgtgaatggaaataatctaattgatggatgaggttctgtggtttttgagtttggtggatat

SEQ ID NO: 31262 - DNA, 335 bp, Glycine max
  Clone ID: LIB3051-046-Q1-K1-G10
gtggaagtagcttgtcacttgtgttgggaataagcaacatgttttggatcggctgatcggatactatgtggatattgatacattgttttacataacatccatctactcaccatatgacctgtcgcggcactgtgactgtaatgtcactggaatagacggatgtgctgaaccggcatactcaatccaataggttataaggtcatcctcatgatcttgcttaactaggtctataatgccaatctgctgatgctaggacctaatgcaaaaactgtgagcggtcatggatgcggacagaactatggcaactctactaacagaggagtatcataattcag

SEQ ID NO: 31263 - DNA, 392 bp, Glycine max
  Clone ID: LIB3051-046-Q1-K1-G11
cctactactccacgattagtgagagcaaagctttttatgtttttcggatttgcatggagatattaccatataatatcgcggaaaaggaaaaaatggaggcacccattatgttaccccttgaaaggacttcgtcaattgaaagagagcccaggactcttaatatcaaccaaatccaatccgctagggagttagcaatatatatattgaacacaaagaccatagaagaagcgtccagaattttcacggaagggttgcagccagtggttagtgctgcttgctgcatgagatccggcacaacaatggacatggatttgggtgaagaacttgaagtgttgaactccaaagacgcaacaacacaagtagccccagcagcagcattcagagacatagca

SEQ ID NO: 31264 - DNA, 309 bp, Glycine max
  Clone ID: LIB3051-046-Q1-K1-G12
gtcataccaagagttaaatggaagggagcttgcaatgattatgatgcggacacttaagagaccggcctgttatttagatgaccgacatacctagcatagatgtgtatatttataatagagaaccaacctaggaatggaaattcttgcttgctatgtttcagtagacggtcggtcatattggattttagtatgcatttaaatttgaatgtgattagatccataggctgtgctgtatatggatattctgcatgttaccttgtttgtagaggtttgttcatcaaacagtacaacgagaacgataatgcatgc

SEQ ID NO: 31265 - DNA, 359 bp, Glycine max
  Clone ID: LIB3051-046-Q1-K1-G4
accacgcgtccgcccacgcgtccggccacgcgtccgaaatcttatcttagcaatagctggccctagcacaacaatactctattaggcaaaaacaccaaatgggagaggaaaaagagcagcctaagaatgaaaccgagaagaagcccgaggaggccgccgcagcccccaagaaagacgacggacccatccctgtcgtttacaaactcgacttgcattgcgagggatgcgtcaagaagatcaaacgcacatgtcgccacttccaaggtgtggaaaccgttaaagcagatctatcgtcgaacaaagtgactgttaccggcaaattggatgccgagaagctgcgagataagatcgccgagaga

SEQ ID NO: 31266 - DNA, 388 bp, Glycine max
  Clone ID: LIB3051-046-Q1-K1-G8
ggcaactccatcggactttaaggaacaaaaagagacgataatttgacaattgcagcaggtgcaatgctgcattattctttgattgattccttgctcatttttatgggtaccaatccatagccatacacatggagtaaatacatcaacctcataattaattgtaaatgaatatcaatttctcctagcttagtatagtggaacagatcacaggttctttgggcggcaaatttatagttccagctggtagagaggtgtacttattattattatttatgaggcctgcttctgttctgaatagggtttcaccattggtaaattgcccaatttcttcgcctccatcggaatgaatcattctgaaacgtgtatccagccaaaagaaataaataaa

SEQ ID NO: 31267 - DNA, 415 bp, Glycine max
  Clone ID: LIB3051-046-Q1-K1-G9
ggaagagaatgtgatgaaaaaggattggtatattgaacatgtaggcaagtgtctgatcgggaactttatcaacatatatgcctcatttcacaatacagccctcttcaaaccaaaacaacaattgcagcagtgtgcctgtgaagtcaatggagaagatggatggtatgaaaaggccaacaccataccctttctccccggattttcctcatgtccctgctttcaattgtatatcgtccctctttgctgaagtaggaactaatgcaaaaactccgtgcggtaatggaagcggatttaactttggcaattcaacttccagagaagtatcatcatcctgtttagcttccaactctgagccaaagtcaaagaaaagaagagaagataatgagaatttcaatggagattttctcacgttggc

SEQ ID NO: 31268 - DNA, 405 bp, Glycine max
  Clone ID: LIB3051-046-Q1-K1-H4
gcactacgctgtcgtttgcggtgttagaagacctagtcgggcgtgatggcgaagaagcgatcagcgcccgagtggcaggtcgtcgggaaaaccgagccgaatcatcttcccgacggctcaactcagcttccggtcgcagaaaactcgttgcgttcttcatcgtatcggccatcatcgctatcgtcacttatcgttatcgcttcagacaatcttctccttcgcaaggccttgtcacaactcatgctaattgccaacatatactcgccgaaaattcaaaagtatcaggaaattcgtctcagcgccattatacttatcctgtgcttggctacattactccctggaattctcgaggttatgaattggcaaaaaggttcaactctaagttcacacatttatcacccattt

SEQ ID NO: 31269 - DNA, 395 bp, Glycine max
  Clone ID: LIB3051-046-Q1-K1-H6
gtgcttctgaaggaaaatgtattttggatggagcaggagcagatgttgaaggaaggagtggtcatttaaggcacaatacaaagggtccaagtttgcaccgttacaaatttgattttggtgatacttttgatgacgatggtcagatttttggactggaagatgaatactctctaacttctagatctatatcaaaaagtggaagtaaaattcatcgtggtgtagcttggaatgatttggcctggggtgaccatcttgcttcaaaaggatattgggatgttaaagcatattctccaatgcatggtgatcgttatgattttggtgggaaggtgaggtcgattctggttgatgtagatttgaaggttcaagcaagctataggaaagagcatgtacctttc

SEQ ID NO: 31270 - DNA, 418 bp, Glycine max
  Clone ID: LIB3051-046-Q1-K1-H7
cccacgcgtccgcccacgcgtccgcccacgcgtccgcttatctcagctccttcatcatgcgaggccatatctctttgcctctccaccaccagtgcctcaccaatcttcgcaacagtaggccaacagtatgtgtcgtcgccaccgcagcctgccatgtcagccactgcattgctgcagaaggcagctcaaatgggtgctgctgccacaaacgcctcccttcttcgtgggtttggtattgtgtcatcatcatctttggcttcgacctcatcggggcagcaaaatggcctgcaatggggccagcagcagttagaatccgagagcggctccgttcctgcagcagggctaggacttggtcttccatgtgaagatggtggttctggactaaaggaattggtgatgggaacacccttaatggttg

SEQ ID NO: 31271 - DNA, 380 bp, Glycine max
  Clone ID: LIB3051-046-Q1-K1-H8
cccacgcgtgcggccacgcgtacgccactctctcacacactccacacaagacacaaccgtggaggagccaacgttgttgttccccgacaccgacctcgatctcagcttcaccagcaccaccactgaccgcaccaccaccaccaccaccaccagtgcaagaacaagcctcgcccgcactagcagcctcaccctcagcttcaacgaccgtttgtccacattctccgcctcggaaaccaccaccgcctcccttatcagccgccgtccccaccggagcggcgatcccaactggtccgccattcaggccgacgtcaacctctcctgcgacggccgcctgcacctgcgtcaccttaagctcctccgacacctcggctccggcaacc

SEQ ID NO: 31272 - DNA, 418 bp, Glycine max
  Clone ID: LIB3051-047-Q1-K1-A11
aggcctcgtggaacacaacacctttcccttttcccttccgttggtgccattcttgcagcaccggatgctctaatttttccggggataactttcccttttccggcgaattcaccgtttcctcgatatgaatccccagtatgactatctgttcaagctccttctgattggagactctggtgttggtaaatcatgccttcttctaagatttgctgatgattcatacattgagagctacataagcaccatcggagttgattttaaaattcccactgctgagcacgatgggaagacaattaaactacagatttgggatactgctggacaagaacgatttaggacaataactagtagctactatcgtggagcacatggaatcattatctgttatgacgtgactgatgaagatagcttcaattat

SEQ ID NO: 31273 - DNA, 251 bp, Glycine max
  Clone ID: LIB3051-047-Q1-K1-A12
ggcagtttcgtcctttcgatccaattctgtgccctagcaatccaacacgcgcgagtgagtcagtgttattatagcgcaaacaagcaaggaatcgggcccgcgcagtagaaactcgaaaggaatcagtgtttgtgtgtttcgcatattcttctccgttttagatttgagagagaagaagaaagagaaatcatgcctaattctaagataagctgatgattgatacattgataagctacataagcaccatagga

SEQ ID NO: 31274 - DNA, 404 bp, Glycine max
  Clone ID: LIB3051-047-Q1-K1-B1
tgctatttcattccagagagtggttcaacttctgctccagctagtactgcatcagtttctgctggtcaacagccggtcaacatttctgttggcaaggaagtggttgtcaatggcgagaatggatataaggaaggcaatggcaagcagagctctagtcatgacgattgtgatttgcaagaatgtttggagcataatctccctgatagcccttttgcttccccaacaaaaggtgatggagacttcctggttgccttctccaatggacctaatgaggccaatgatgcagatgcctcagctgcatctgccaactccaaatttggtactagcacattacttcctgcagcatctgctcttgacatgggaactttcaaatcctttaattgccaaatacccaggttctcttc

SEQ ID NO: 31275 - DNA, 304 bp, Glycine max
  Clone ID: LIB3051-047-Q1-K1-B2
attggattaatggctatgggagaaacaagtgacactcctgctaatgctgtctcagtcgctgctggtcaacagccggtctacattattgttgccctcgttccggttgtcaatggcgcgtttggttataaagcatgtacctcccatcagagctctggtgatgtcgcttgtgctttacaggaatgatcgtcgcattctcttgatgatagccactctgatttcacagctctttgtgacggtgacttgctggctgccttctaccgtggtcccaatgacgccgatgatgcacatgccttatctgcatatc

SEQ ID NO: 31276 - DNA, 306 bp, Glycine max
  Clone ID: LIB3051-047-Q1-K1-B3
atcggattaatggctatgggagaaacaagtgttcatggattgtgagcaaccctaatggggtcgggcccatcccaaccctattgaattgaattgggggaagaagaacattataacaagaataagaacaatcggcacaattgttgtaattgaacgatgtctgctgcggtgtgctgaagcaagagatctttgctctaagagcttcccccttctccgacagtattcaagaggctccgctgttactccttccctattcgcctctctcttcccttccctaatcgaccaccttcgctctctcttcccttatat

SEQ ID NO: 31277 - DNA, 410 bp, Glycine max
  Clone ID: LIB3051-047-Q1-K1-B7
gttggtttgggtaagttttgtgagcgtgagatcttggttaactagttttcgtggtccccagtgacatttttactaagtttaactccgtaactgatgtcgtgtgggtcaggtaaggtaaggaacgagaatttgttcctctttgaatgggtagggagacctacccttttgattaacaactacaattacatgcatgtctcaccatctgatgaggtggttacatggaatctatatatagacatagattataaaatccgattctcactttgatattaggtgggggccaggcggtgaggttggtgttcttggaatgcaaatttagagagaggagttaacttatagaaacatgaactgtattgattcttatattatcaatatataattatatagtattacctaaattatgtaataac

SEQ ID NO: 31278 - DNA, 330 bp, Glycine max
  Clone ID: LIB3051-047-Q1-K1-C10
ggtcaaacaatgctcccagtagagatgtgccaagcagggatatgggaggaccacctggtgggaacggatattctgcgtgagatcactgccatatttttctagccaatgtagataacgaggaattgtgcccaagacaacatagagtttatgccatgtttctcaaggaattagaatttattagtcttacatgttacaactatttctaatgaacctgcatgttgtgtatccgaagtccacaatatttaaggctagatacgatcgttttgtattgtttgtgaaaaaaaaaaaagaagaagaaaaaaaaaaagaacaaacatgcttactatgaat

SEQ ID NO: 31279 - DNA, 285 bp, Glycine max
  Clone ID: LIB3051-047-Q1-K1-C11
acccatcaatcaatcttccatactacatcttccaagcaatcatattatataaccaccttcgggcaactgataaactctctgataataaaagccattcttaacacctaccattcctacaaaatctcatcaaaccaatactacattaaccttattcaaactatttattcaccattacactttattatttcccacttatttagaccttttaatattccacatggttccaaccttttttaaaaaaactccaactttttcaatatacattcctcatttaaaaccatcctt

SEQ ID NO: 31280 - DNA, 383 bp, Glycine max
  unsure (1)..(383): unsure at all n locations
  Clone ID: LIB3051-047-Q1-K1-C3
cggacgcgtggtttgaatattctaattcaactatttgtcactatcttatctgaggaacagtttgcatgttattgtgtgctgctgttttgatatcctgtaattgttgtctcttaaatggaacttatgaagcattttgtctaactgccagtgcctttttcatcattgaagtatttatctaatgcaggaattgagatgaaaatgaattcttttgcagataccaggaacagcatagcagtataagctgcaattttggttttggatgctaataacttattaacacccatcattaagaatatcaaaataatttagttntatatntgttatttttctgtaagaaagcttcagaatttgagttttttgttttttgcagatcctttgtatat

SEQ ID NO: 31281 - DNA, 433 bp, Glycine max
  Clone ID: LIB3051-047-Q1-K1-C9
acgctcaattctcaacattcttagtcacctgcaagcaaaacgcctgtcgcttattatagcaatccacgccacttctcacatgtcgtttgcgcacccgatctcctttaatcgacacctaatactctccaaacacgcttggtgaaaagccttcaccctgaaaaaaaattccgaaagaaagagacacccctaaagatctggtctcagcttctcaccttttcctcaaaaatctcatgtatttcactccaatcgctgttctcttaactctttcctctgtagctctttctcaaaaaatacacctattcaaattcaaactcacattctgacgctgattcacattctgggtgctttgaattcataaaggcaggttccagataaagttttagctcaattcatattctgggtgtgtgaaataggggagaaaagaattcaaatt

SEQ ID NO: 31282 - DNA, 340 bp, Glycine max
  Clone ID: LIB3051-047-Q1-K1-D3
cttaaaggtacgttttctctgaaattgtttttgaattaagaaaaattaattagatgcccttgcttacataaagtagttattatttactactagcaaaattaattaaaattttatgagatggttgttttatattctgaactctccaagagatcttacaagtaggtggttttttgggctttctcgaacagatatccctagatctgcaactcgcaaggctggaaggagcatgcctactttggtttacgtctactgtgtgagcagaacaacattcagaggacatatgcttggagttgcagcatcatggcttgtccaagtaggcattgatttatatcgattcttt

SEQ ID NO: 31283 - DNA, 257 bp, Glycine max
  Clone ID: LIB3051-047-Q1-K1-D6
aatacgacttgccaggcacctggtgtcaatgggtcatcaagctggtgtggcactatagctatggaactacccagagaggctgatagaactaggtccacaggatatatatagcgcaggtaggcctggtcatgtggatctagctgctatagacagtatagtaaactgtaatgtatcataatcttaaccactgtgaattagactatgtgcacaagggaccaagaagtcaggactaacagaatcatgtgatgtgggcggtt

SEQ ID NO: 31284 - DNA, 138 bp, Glycine max
  Clone ID: LIB3051-047-Q1-K1-D8
gccacgcgtacgatcacgaagtgcacctagcaattccgctgctcacatacaactttggtctattccgttcgtattgactggaccatcgcatcaacacatcacgtgataaatcaaggaaactcataactaactaacaca

SEQ ID NO: 31285 - DNA, 441 bp, Glycine max
  Clone ID: LIB3051-047-Q1-K1-E12
gccttccacacattcaattatctggatgatgattgtgatgatgatgaacctcatcatgatttccgctcgttctcttctagttcatcgttccaagaatcaatgtcagatttagtcggcaaagctgaggaaatatcaagtggatattattggctccatgatgatttgcatgatgataccagttcacgatgctcttcacaagggacatattccaacttgaattactattctgtggatgatcatcatcaagagtacaacgtgccatctttgagaaaagataaacttcccatcacaaagagtcacaacaagggcaaaaaggtttcctcaggcgaagacttgagcaatttcaaccaatataaactcatggtaggatcacaggttcctctcactagtaaaagcaagatgatgatgaacaatcatcatagattaacaaggaacaggtca

SEQ ID NO: 31286 - DNA, 276 bp, Glycine max
  Clone ID: LIB3051-047-Q1-K1-E2
agaaaatgaaatgtctagaaatggctcttgtctcagtcaccaccgcaaattcttcgaagttcattctcttacgcactctctctcgttctcacgctttctccttcgctctccaccgtcaattccaactactctcgtcttcctccgctgtgctccgccgtcttccccggttcctcgccgcctcccccggttctccgctcccaccttccgaaaacgattccagcaggcaccttgaaaggacttttggggctaataaagtttctgaagagataagatgat

SEQ ID NO: 31287 - DNA, 402 bp, Glycine max
  unsure (1)..(402): unsure at all n locations
  Clone ID: LIB3051-047-Q1-K1-E5
cggacgcgtaagaaggggtagaaagaatcaggagaaggaaataatcatcaaccatggcagggagattgacgaacgcagcatcgaggatcttaggcggaaacggcgtcgtttaccgatccgtagcttcctctcttcgcctccgctccggcatgggcctccccgtcggcaaacactatgttcccgacaaaccccttcccatgaatgaggaactcctgtgggacaacggcactgcatttcccgaaccgtgtatagatcgtattgctgacactgtcggaaagtatgaagcattggcctggctgtgtgggggattgagttttttcgcgtcgctgggattgttggctgtgtggaatgacaaagcctncaagacaccgtttgcacccaaagtatatccatatgacaatc

SEQ ID NO: 31288 - DNA, 385 bp, Glycine max
  Clone ID: LIB3051-047-Q1-K1-E6
cggacgcgtaacaaggggtcgaaagaatcagtggtggggaatgttattcggctgtgtctgagtctggtgttaacttcactggcaggatcgagcaccatcgccgaagaagggcacagagttgtcgtggttgaatacgaccaaggtggccatcagaacaccaaaatctcaatatcaccagaacaacctacgcatgctaatcttatagatcccatttgcgacgcctatggaaaatgcaagcacaaaatcgtggatgcaatggagaagtctcaagaggtcatgcatgagaagaaggactagattgccgccaacaaggaggcagcacgccaagttgctggtaaaaccaaagagagagtgtatgataaagcccgtcatgtccacgaatacg

SEQ ID NO: 31289 - DNA, 447 bp, Glycine max
  Clone ID: LIB3051-047-Q1-K1-E9
atcacccaattccgagctctactactccgcggcaccaccaaccagcgctcccctctccgccgccccggcgtcgccgattcttcatttgcatcaaaaccctcattctctaatgccgccgcgttccgcgcctcttcgcctgtgttccacccgcaacaacgcctcggcaatagcaccttccgattcttctcatccaatttcgacaaaggctttgcgcagaaggtatttgataaaccggccgccgcggtgacctcggccttctcgcgttaccgcgaggcaattgggctgcaaatcgaggcgttcttcaagaggaatactctctttctgtggggcgccggtggcgttgtcctctgcgcttttctgtggaggatccttttcgggatcgctaacctcttcgttggactctccgaaggcatggccaagtatggcttccttgccctttcatctgct

SEQ ID NO: 31290 - DNA, 368 bp, Glycine max
  Clone ID: LIB3051-047-Q1-K1-F1
catctttgtcatctcttaactcaaggtacatgtctccacacattccaagtccaagcaatgcttcagtaagctatatgggttcatccagtcatcaacaacatcctctccgttatagtgagtcggctgcaagcttctccccatttgcatcgacacactcccttccagaatgttaaattgttcaattgattatatcatatgattgagacgtccacgcagttgaactagtaattgccaagtcttgaactaaaaggtggccatgtgatgaccggtggtctagttgaatagtcctatgtgatgcttggggcattccctacctctgtcatttgacttccgtcttggcacctggtgtacattgtagcttctctctg

SEQ ID NO: 31291 - DNA, 433 bp, Glycine max
  Clone ID: LIB3051-047-Q1-K1-F10
ctgttcgttatttttctttttttttttgtttcgtttcgttcggaacgctgaggctgtgtcgttgttttagtgggtggatgggaacgacgtcgtgtgagaagaagagcgtcgtgtacgtgagctgggacgaggtgttcgtgtcgaacgacaaggggaggagggaggttcattacttgcttaaacgaagaggcggtggctcggatctggccgttttgggaaaagagaagagcctcctcagacacatgtcgtatcgctacgccattcgaaacgccgcgttgtttaagccttacttgaagctcaggtcgcgcagagaggttgttgattggctggattcaattgtttcagggcgagatttccgctggctggatctgaaattgaatgattcgtcttcaggggatgcggttatggtgggaaaacatggttatgaacctga

SEQ ID NO: 31292 - DNA, 267 bp, Glycine max
  Clone ID: LIB3051-047-Q1-K1-F2
aaaaaacgtacggtctaacattgtcttttgtgcaaagaacccaacacataatctttaaggcgcaatacatacactgactaactaatacactcagcaacatacaacaacgctctaaaagggcagactcccattgaggatccaggttctcatacgcgcacattcgtcgtgaacgctttcttatggggacaccgagcttcaatgatcgggctttcgttaaacaacatcagcacggataatgcctggactataccagctttaataccttat

SEQ ID NO: 31293 - DNA, 409 bp, Glycine max
  Clone ID: LIB3051-047-Q1-K1-F5
catctttgtcatctcttaactcaaggtacatgtctccacacattccaagtccaagcaaggcttcagtaagctatatgggttcatccagtcatcaacaacatcctctccgttatagtgagtcggctgcaagcttctccccatttgcatcgacacactcccttccagaatgttaaattgttcaattgattatatcatatgattgagacgtccacgcagttgaactagtaattgccaagtcttgaactaaaaggtggccatgtgatgaccggtggtctagttgaatagtcctatgtgatgcttgtggcattccctacctctgtcatttgacttccgtctttgcacctggtgtacattgtagcttctctctggtgttagtttcgtttacatgtgcttggtgaagttcttacat

SEQ ID NO: 31294 - DNA, 429 bp, Glycine max
  unsure (1)..(429): unsure at all n locations
  Clone ID: LIB3051-047-Q1-K1-F6
cccacgcgtccgcccacgcgtccgaagatctcctccagcaaaaactccaacagaaactgtctgaattcaagtaggcgatgatccaaaatggcccatataaagagggtatgacacttgcgttgaccagcattttgcacaatggtatcctaatttccattggtatggtatggttatcactaacctttttccttttggtaataaaggctggctaatttgtttgtacatccattttgagtgctctgtagcaatagttgtcaaaatgttatagtagcaatttgttgaagaaaatgttgtcaaagattttccatggatggaaatattttgcaatttcttctgtgttgatttattgttctgctattttagccaggtgtcaaaagtattgcatagactntactncaaattcatcgcanataattacttggttttatt

SEQ ID NO: 31295 - DNA, 318 bp, Glycine max
  Clone ID: LIB3051-047-Q1-K1-F7
cccacgcgaccgcccacgcgaccgaagatctcctccagcaaaaactccaacaggaactctctgaattcaagtaggcgatgatccaaaatggcccatataaagagggtatgacacttgcgttgaccatcattatgcacaatggtatcctaatttccattgttatggtatggttatcactaacctttttccttttggtaataaaggctggctaatttgtatgtacatccattttgagtgctctgtatcaatagttgtcaaaatgttatattagcaattatgatgaataaaatgatgtcaaagattttccatggatggaaa

SEQ ID NO: 31296 - DNA, 410 bp, Glycine max
  unsure (1)..(410): unsure at all n locations
  Clone ID: LIB3051-047-Q1-K1-F8
ctcacgcgtccggtcgttgaccgctcgtgtctgaggactcagcttgaatggggacagtagaatggagaagaacgagaacagaagcggaataacgttgtcacctgcctcgccttcacagggttacattggttcttacggaatttcagaagctgagtctcaacaaggtcaaggaacaacacctatggatgttagaagccctactagtgctaacttgttgccagacagctaactgaaatcaccagcatgtgttgctgagaacaacacatgcaagaatgctgctgctgctgctgcagtaacaatgagaagtcaatctaacaaatattcaccaccacaaagcagaaccaaagacattgtgaggaacttgttggaagacatgccctgtgtctncaccaaaggagatggccctaatg

SEQ ID NO: 31297 - DNA, 411 bp, Glycine max
  Clone ID: LIB3051-047-Q1-K1-G12
cccacgcgtccgcaattttcttcgcctctactttaggatcgaaaaaagctgatttttttttttctttagtccctttgtctctatgtccacctttttgtattttcgctatcgttttgcccaatttttttgtatacaaatttgataagttgtttattgtactgggttaattagtttttgcagtctacaaattttgtttggggctctgggattggagagcttttgggtgtagggttttatgttgctgtatagaaaacagaatatggatttgtattcttattgtattgataagagggtaggggtctaggggataagggttttttttatcatttatttttaagtttgttgattttgatattgtctttggtttgtggaactgaaattggaaattggaacaggctacaccattggtgc

SEQ ID NO: 31298 - DNA, 376 bp, Glycine max
  Clone ID: LIB3051-047-Q1-K1-G5
ctttttctttctctctcctattctcccctccttttcagatctgagatattttcccattcttctcctcatctcctcatccaaaccaattccatcacaaggtttttcatcaccgaagcttttgaatatgagtagccgccatcaaaatcggcatcactccattttagatttgtgttgcgagatgaagttgtggtggcttgagactgaacacggtggatgactatgaccccaccccaaacaacgacgacgtgtagggatcaactcagtggtgttgatttgtggttgttagtgacaagtttgttggagcataagatgaagagcgtcatggcatattcttttgatctcttttcttgcagtcgtggatgaagaagagggcatg

SEQ ID NO: 31299 - DNA, 426 bp, Glycine max
  Clone ID: LIB3051-047-Q1-K1-G9
cggacgcgtgggcggacgcgtgggcggacgcgtgggcgcccacgaaagcctctctctcgttcgttgcttcaaacttcaaacttcaaactcctccgcggcttcccttctcgttcttcttcacagaaatggaggtagcagtggccaaagcgttgaaaccgagtttaaggagtgagttcatcgttcagaaaatgcactgcgaggatattttcagcctgaacgcgaacaccgtcgccgtcggcgaagatttctccgtggacgacctatttgacttctctaacggctctctgcacaacgaacaccaacaagagtgcgacgaagagaaacaaagtttatctgcttcgtcgcagtcacaggaccgtggagaagacgatagcaactccaattccaccggcgtttcctatgattcacttttctccaccgaattag

SEQ ID NO: 31300 - DNA, 271 bp, Glycine max
  Clone ID: LIB3051-047-Q1-K1-H1
gcttccgatctcgaagcaaaagccaatttgccttcgtcgaagaccacttcgaactcggcgtggaccttctctctcaggccattcatctcgaacccaacaaagccgaattctacgccgaccgcgcccaagccaacatcaaactcaacaacttcactgaggctgtggctgatgctaacaaagcaattgaattgaatccttctctaccaaaagcatatttgcggaaaggtactgcttgcatgaagctttgggaatatgaaactgcaaaggctgc

SEQ ID NO: 31301 - DNA, 411 bp, Glycine max
  unsure (1)..(411): unsure at all n locations
  Clone ID: LIB3051-047-Q1-K1-H11
nccacgcgtncgaaaaaaagactaccacgtattcttctctctccgtctctctctctctcgctctctcttcacagtgccaatggcggatccaatcgcgaaggttctgatcgcgtttgcgctcttagcttccctcttgctgtgttcgcacgcttcctccgacgttcccttcatcgttgctcacaagaaggcctncctcaacagactcaagtccggcgccgaaagggtctccgtcaccatcgacatcttcaaccaaggaacctcgacggcctatgatgtaagcttatcagacgatagctggccaagtgatgcttttgatgtaatcagcggtagcacttcaaagtcatgggaaaggcttgatgctggtggcatcctttctcacacatttgagctggaggcaaaatcaaagggagt

SEQ ID NO: 31302 - DNA, 375 bp, Glycine max
  Clone ID: LIB3051-047-Q1-K1-H12
accacgcgtccgaccacgcgttcgcccacgcgtccgtccacgcgtccgggaaattaatactagatcggtaagcagtctgcagcacatatctaacttgagtgtggcctgcacttcacaatgagagcccctgtcgttcgacgcatttcagaatgcttcgataagccccagctccccaaccaagtttcagaccagatctgcagtctaacacattgggatattgctatgttgcctaccaactatatccagaagggtctactcttcaagaagcctgcagcaactctagttgatcaacaccatttcatggagaatctgtaggagaagctcaaacactctctatctctcaccctcttgcattgctatcctttggctgctcgc

SEQ ID NO: 31303 - DNA, 284 bp, Glycine max
  Clone ID: LIB3051-047-Q1-K1-H4
cgtcgcttaagatacgactataacaacagcctatcgcattggactatatatatcatcggataggctctacgattcagaaacatacatatatattcacacaaatatccatttatatatacatatatatagtgctatatggcaatgaccacggtggtgcatgtcttgagcatgtatgcagtgatgaatgcaagtgcctctgatgccactcgcttattgctgcacaaaattgctacaggtaacgtgtacagagagaagattgatagatactcacttgagaatggact

SEQ ID NO: 31304 - DNA, 399 bp, Glycine max
  Clone ID: LIB3051-047-Q1-K1-H6
accacgcgttcgctcacacccgctttgtccttttcccgcgcattcttctgtcaaaaccctagatatcaaatctggggtttagtattcttagttgttcagacacggatctgggaactgccagcttgcaagtctgagctttatggctggaatccaagcttctgatgctcccacattgtttttaagccacatcatttcccagcgagctttctcatgggtacctgaatggtgacagtcttgagttcctttctactgggtaggggtaggggtatttgatccttatatcctagatgtgatctagcagattcatgtagttcatcaaggccctcgcgtaatcctgtttgcgagtcacactctgccaatgctgtaagcttgtgactgatatatatagagcttctgtgc

SEQ ID NO: 31305 - DNA, 443 bp, Glycine max
  Clone ID: LIB3051-047-Q1-K1-H9
attctcctgtctaatttgctggcattattgccttcttgttgtttttgctgccaattcccttcccttgcgatgacaagtttcaatatttccaatttcaagattccaaaaccccttattattatttgtttatttttatctcttttgtactttgttctctgtagagtaccagatctttgcattccctggttataattccgaggctggtttcttgttaggaccgttaacttcttctcatggctcatcgctacgatagtaaccccttcgacgaagaagaagtcaatcccttctctgaaccagctgtaaggggaaaaacatcaagccaatcaagttatagcgggggtgcattttacactacaaatcctggaagtgttgcccctgccacaaattcaaggctatctcctcttaatcctgaacccgctgattataactacggctttggtgcg

SEQ ID NO: 31306 - DNA, 423 bp, Glycine max
  Clone ID: LIB3051-048-Q1-K1-A11
gttctataagttcacggtcagttctgaaaaatgggttccaaggttttgcttgttgtaggtatgttcatagcggctatacttctgatctctgctgaggttgcacccaatgaatacgaaaattttaacaaaaaagatgggaagcatgctccaaatgggttatatgatagcaaatggggttacggtggttggggtggtccttggtatggcggctggggtggcccttattatggtggcggctggggtggcccttattatggcggtggttggggcggtccctggcgtggtggtggcggtggtggctggggaggttggcgtcgacctaatggcaaccctcacaactaagaagaaaacttgctaaagcttctttacgggtttaggttttcgcaatatataaaacttcatgagaagtgtacttggaataaa

SEQ ID NO: 31307 - DNA, 333 bp, Glycine max
  Clone ID: LIB3051-048-Q1-K1-A12
ggaagccacaatcaagagcttgggcacagaataaacatgattgtgaaaagaggaaaagggatgctgataatgatgatactgatgatcgctaactagcacatgctattgctgatacaatgtgatgacagcaaagatagggtcatttgcttcagggagagcatagacttctaagcgaatcactgcttgtgatgtcttcttctgctgggtaaggatcaaacacatgagataattctgttaatgtgtggttaatactcatggtgatatttgtaagcaacctttgcttgttattgctataaatgggttaggatccatcaactacaagatgtgttaagg

SEQ ID NO: 31308 - DNA, 350 bp, Glycine max
  Clone ID: LIB3051-048-Q1-K1-A5
cagagatgttaaggatgctagatctgcagcaaaggtgcttactgaagaagcaaagaacaggaaaagctcagatgatatctcttgcgttgttgtgaaatttcagtgatcagtaaactcacatagtatatttttatctacgaacttgaaagtgtaacatatactttagtgtaatgttgataccttttaggtgttattatgtcatgccattcagtgtgtgatatttaatcttctttaatttcatacaaatgaaactgctgagaacgtgttgtttgatgtaccaatgttcaaaaggatttagttttggattgtgtagaccaaaataattcgtatgaatgcaaggaagtttggtc

SEQ ID NO: 31309 - DNA, 346 bp, Glycine max
  Clone ID: LIB3051-048-Q1-K1-A6
gaaggaccttgtccctttaatttcagcagttatattgaatgatagctcggtattgaatgggacccataaaaatatgcttatagacttctacaaactcatgcaaccttgtagaattgaatatgtattttgactttgtggtattaattggtgttgaagtcctctagtcaacatagaatcagaactgaggaattccttatttaaagaactcaattatgaacttattgtgaaacctccaggggttgcttgtcattcttttattgctgcttttaggtttctgaagagctcttggaaggcaaggagttggagttttacaaatgggaaggagatgtacctgacttgttgaaag

SEQ ID NO: 31310 - DNA, 432 bp, Glycine max
  unsure (1)..(432): unsure at all n locations
  Clone ID: LIB3051-048-Q1-K1-B10
cccacgcgtccgatggatttctctaaatttggtgggatgggtgatgcaatggatgacattgatgagagtgacgatgaagagcaagaagtgtcaaagcctgttgaacaagatgcaggcgaggggtcgaccgagaaaaaagaggctgctccaagcacataatgttgttgcaatcaagacgctaccctagaatatgtgcatgaaaattctcgagtgaaattttctctatccttaccattaattggtagttttttaagtagagacgttcatgtgtctctcccgtgttggctagacttttagcacttattattttaccaccaaaaaaaatctcctttagaatattgtataattgagatattttcatgcttgaatggcggtatccggatttctacattnttatgtgttatgtatgttttgaacttgtttggatggatt

SEQ ID NO: 31311 - DNA, 422 bp, Glycine max
  Clone ID: LIB3051-048-Q1-K1-B11
gcagcctcatccattttcctaaatggctcaaagacatcaattaaaaaaccccccatgtggggatcaaccaaagtcggtccaactcatttctttggatatgtgtgtgtgatagaccatcctgatcgaccacatattaatctcgtactcaaagtcctaatgccaaacaacacccgactaatgacttcatgtcgcctcgctggcataactcatgttgtctttaagctctttcatcttcatgaacgtcgtccacacaacatcctcgtgaatgtcatgggcaattactacctcggatgctgcgatgctgccttctcctataagaggatagaccacgaatgtatgtagatggaagacacatcctattcaccatactcacccaaaacaagcactgtatctctttttagatactctacccaccattgaaa

SEQ ID NO: 31312 - DNA, 410 bp, Glycine max
  unsure (1)..(410): unsure at all n locations
  Clone ID: LIB3051-048-Q1-K1-B3
caactcatctttatataacctaattgcaaagatgaataccaagcccgttttcttcttgtgcttcctctgtgcactgcttctcatctctgttgtggcaactgagccatccaaagatgagacacaagcagaagaaccaaagacacagccagatgcctggggaagaggtggaagtggggggcatgatggaaggaggacacggtggaggacatggcggaggatgcagatgctgcggtcgaaagggctgcaaatgttgctgaagtaaaaatcacaaatatatgaactgaacacactcatatacttgagtgtactccatgtaataactagtatatatatttctaaaaaaaaaaaannaaaaaaaaaaattaaaaaaaaaaaaaaaaaaaaaaaaaaaaaaagggccgcccgtttaa

SEQ ID NO: 31313 - DNA, 388 bp, Glycine max
  Clone ID: LIB3051-048-Q1-K1-B4
cccacgcgtccgaccacgcgtacgtaccctcgccctccacaaggccctcatgttcttgagtggccagacgatcgctgaagttaccgaattggtggacgaatacggcatagtcgttggcgacgaatgcaacgtttccatttattcgactaattacccattttagaaaatttcctcggtggataagtttgtggaatgactagtgaattgtctaatcttgctattatgattcttgaagtaagttaagtatacagtttcatgaatataaatgacggttatgtgaactgaacacactcatatacttgagtgtactccatgtaataactagtatatatatatctaaaagaaaatatatatttagttattttaatatattaaatgattaatacat

SEQ ID NO: 31314 - DNA, 417 bp, Glycine max
  Clone ID: LIB3051-048-Q1-K1-B8
atgagttggtcgagtatagcaacatgggattttgcatatgagaggtaacaggttcgaagtcccactcatatgcttggggagaaaggtcaaatcacatgtttaaatttctattcattgtccttactttcttggatccctgtttgtgaagaagcatcagggtcttcctttctttatttctttcgctgatcgaataaaatttccccatttgaaaccccacaagagtgcaattgacaaatagccacacagaaagatagggttttgagatattgcgaacgatgttgagactgttggatgcacactgtcaccttcaggacccgagaatcttaagcaaggcaccccatctcatcaaaaccgcgcaagacaccggcgtcgcgtacttcgccgttaacggagtttccgaacaagactggcactccg

SEQ ID NO: 31315 - DNA, 427 bp, Glycine max
  unsure (1)..(427): unsure at all n locations
  Clone ID: LIB3051-048-Q1-K1-C12
cccacgcgtccgcaagtttactgttatttgatactcatttttattgatttgttttccaatggaaaataaagtcatgtttttattgtggtatcaactatcaaggcaagttactagtgtgtactctgtactctttaatactttcgattgtgccatgtttttagaagtcatatagttgttacttgctacttgtcaattacctgtttggatataattttttccataacatatagggcttcattattctaattcgtacaacctattaaatgttatgtgccacattttcttattttaagttcttaaattttaacctattatgtgtgcatatacaatcttgtgctttgcagtcaatttccattcgagattntgatcatcatgccacccgcattgttggaaagtatgaggttggattaacctaaaatttttaata

SEQ ID NO: 31316 - DNA, 312 bp, Glycine max
  Clone ID: LIB3051-048-Q1-K1-C2
ctcgaatccacagagtgagactcatcgtgtgaacaacgataacggcatgtttgagcgtgcttgagaaatttgagcggccatggacgaaaccgccgtaacgacgaagcctgattggctcaacaaccgcgcgagggtcgccggagagagaaccgaagaatttttctgtggcggcgacgacgaagaggaatgcgacgacgaggcttgggacatgttgactcggagcttctggcaggcgcagactgtgctggacgagaaccgtgcgctgatcgacgaagtgaacagcaaccacgagtcgaagattcctgacaacat

SEQ ID NO: 31317 - DNA, 416 bp, Glycine max
  Clone ID: LIB3051-048-Q1-K1-C6
cccacgcgtccgcccacgcgtccgcccacgcgtccgggagaaagagaaagaatctaaggggaagaacaagatcttcaaaatactgccaaaagcagcggctgcagcagtgagcatgacattccaaaaccctcccttcagcccaggcagggatcacaagttcaaacaccatggcggcaaagggttcttctctggccctatgattcccgttgaagccagaagaaaatcaaaggatggttgtgttgaaactcaagaacccacttcccccaaaatctcctgcatgggacagatcaagcacaagaggaagaaaaaccaaatcaaaaaagcggcaaagaccatgtccatgcctacagaagaaaggaaacaagcttccaagtttcaaaggatgatgtcgttccactcggggaaaccaaaacgac

SEQ ID NO: 31318 - DNA, 419 bp, Glycine max
  Clone ID: LIB3051-048-Q1-K1-C8
gttgtggttgtcaaagggttgtgtgacggtgaattgggtagaagaagatgagaggggtgaagagagcagtatttgtaggcagagccctaagaagcaattccaacaccgccgtgtacggtgttggtgccacccttcatcgagatcgaatggctccccatggctgcttaaccccatcaaatccaaatccttctgtttctgttactgggtttagatacctttctgcttctgctgctgccacgtctcttgcccaagacgctcagaccaaggccttcaaacccaaggaacttgtcctctttcagtaccaggcctgtccattctgcaacaaggttgcagcgtttctggactattatgatattccattcaaagtggttgaggtgaatcccataaacaagaaggagatcaaatggtccgactacaag

SEQ ID NO: 31319 - DNA, 265 bp, Glycine max
  Clone ID: LIB3051-048-Q1-K1-D1
cccacgcgttcgcccacgcgtccgaaaaaaaaaaaaaaaaaaaaaaaaaaaaaaaaaaagaaaaaagaaaaaaaaaaaaaataaaaaaaaaaaaaaaaaaaaaaaaaaaaaaaaaaaaaaaaaaaaaataaaaaaaaaaaaaaaaaaataaaaaaaaataaaaaaaaataaactttataaaaaaaaaataaaaaaataaaaataataaaaaaaaaaaaaaaaaaaaaaaaatgtgaattttttaaaaattaaaaaatttttaaaa

SEQ ID NO: 31320 - DNA, 422 bp, Glycine max
  Clone ID: LIB3051-048-Q1-K1-D3
ggtaattgaccttacaggatcaaaaaattggattggaaaactaacagtacttgggcgaagtccattggcacattggtatcaatcgctggagccttaataattactctgtacaaaggccaagcagtcataaagaatcatccatcaaataaattgttccccaaaaaacatgtttcatctgaacaatttgactgggtattaggggcagtgttgcttgcgggtcatagctttgttctctcattgttgttcatagttcagacatggataatcagaaattaccctacagagcttgtgataatgctcactcgcagtacattagttgctatgctatctatcccaccttcactgatttcggtaacagatccaaaagctttgagattaggatttgatgtgaatttgatagctattgcattccaagccatttt

SEQ ID NO: 31321 - DNA, 410 bp, Glycine max
  Clone ID: LIB3051-048-Q1-K1-D8
cggacgcgtgggttcgaaggcagcaccgcacttgttctgctccgccgcgattgcaatggtttccactcccgccgctgatgggtttctcaaaggaacagcttcttgcgcggttaaaggagcttcaggttccattttcccagtatgagcatcctgttgttttgaccgtcgacgctcaggctcaatatgttggacatttggggggtggcctcagcaagaattcgtttctcaaggacaagaaaagcaggttgtatattgcttctgctttagctggtaccaaagtagatctcaaagtgttatctcagcggcttggtttgggaaaaggtggtctcagaatggcacctgaggaggctttaggtgaagtacttcaggtacccttgggttgtgtcactccatttgcacttgtgaatgaa

SEQ ID NO: 31322 - DNA, 357 bp, Glycine max
  Clone ID: LIB3051-048-Q1-K1-D9
ccggaaccttccctctactgtactacatcatgtcgcgccttccttccctcactcccaggcccgccgtcccggcacccttcgattccgaccaagtccacatcgaacagccaccggagattgtgggccaaatgccgcacctggcggacccggagctggtggcctctatgggccgtgccgcggcacatgtgacgcatgcccgctcggtcctcaccctcatcggggagcgacccacgcacgaggaggtcgacaatgcccgggcaaagttggccgacgtcgaggcccagctctcccgagaactggaagagatcgtgctgcaagcccggcccgcggagatcgagatccaggggtggcgggccc

SEQ ID NO: 31323 - DNA, 394 bp, Glycine max
  Clone ID: LIB3051-048-Q1-K1-E1
gtggcgctgaaaccgacttcaactatgactcagagaccgggttgacaaccttctccattgcagttgctccagaggagatgtacagatggtcaatagagatccaagtttgagtcctttttaagacttggtgtttgatgcattgttgtatcaggagaagggttttgttgtaattaagcattgagggaattgttggagtcaggcagagagagaggggggaggtttgttgtaagacacctagtattagtatcatgtagtggagaaaaagggttgttgatcctaatagctagacaaggcatgttgtagtagtcatggggtgtgggagtccttttgttgtaacatgtaatttggtttagacttgtagtatggcatcaattagattgattaagagagaata

SEQ ID NO: 31324 - DNA, 433 bp, Glycine max
  Clone ID: LIB3051-048-Q1-K1-E12
aacggtgatgagtccttggccttcattttggagttgtctcacatatctccatcccaagaacaaatcttggccactgctccatttgtcggagcagaacaggacaccgccgcctccgcctcccatgacattgacatgctgtcgttgccggactccgtccccgaagacgtattccacacgccaccggaggagtcctcgcttccctcctcctcctccgacaaccattgcgtcgttaattacgccgtcgtcgacgtggatgatgtgaatgctgggaccgatttggtgaaggattctgagttagggttttcggatgttcacatggaagaggttaacggagaggacatgggaaatttggaaacccttgttggggatgtgagcattaaggtgtctgaatctgctgaagtaagcaagtcaagtgatgtggctgcggaatccc

SEQ ID NO: 31325 - DNA, 417 bp, Glycine max
  Clone ID: LIB3051-048-Q1-K1-E2
cccacgcgtccgcatctttctcttcaaaatcttcttctcttttccttttattctttttggttcttgcttcatgcaggcgattccggctccatgcccgcaagttgctgaggacgagtttttaccgcagcacattgacctcaggtatttccttcttttttcctttctttttcttgatatctattttctttaagcttccttttctctgcaagtattttccgctatggccaaagaatttgtgaatggctttgttcatcaaaacggcatcgctgtcatatcccgcaatccccccaaaggcgattccggctccatgcccgcagttgttgaagacgagtttttaccgcagcacatggacctcaggtatttcctttctttttcccttgtttttcttgatatctaaatttttcaaagcttcctttc

SEQ ID NO: 31326 - DNA, 345 bp, Glycine max
  unsure (1)..(345): unsure at all n locations
  Clone ID: LIB3051-048-Q1-K1-E3
ccacgcgtncggccaaattacccacacgcaaacgacaacaaccgcgcgcgtttcacacctncatagctcggagtagcatacgcagcgtcgttgactcgcaactcgtaacttggcctcgcgcgccgatggcgtcggtccccagcaccgtcgctccccgcaccttcctgccgtcgattcccaagccgagagctcctcttcacgccgcgaaatccgtcgccagcgccgcgcgcaactttccgagactttcgcacaacctcattctctccggaaacaaacgcgcggtggcggtgaactcggcgtcggaggagttcgacgtgatatcggtgcagagcgaggacattaccg

SEQ ID NO: 31327 - DNA, 373 bp, Glycine max
  Clone ID: LIB3051-048-Q1-K1-E5
atttattatctaggttcttaaattcattttatttgaaaactagagttgatgaaaatatataatactacatagcctatgaaaatataatattacatagcctgtgaaaattttaaaaatcaacttgtttttgttacatagcctgtgaaaatatgatattacatagcttgtgaaacttcttattgactatgtcccaacttgtcatttcaattgttgatttgtaactgctatttattatgttctttttctccagtttgctttgatgcaagtgtgaatgtgaagacatttataagactaatacttgataagttgtaaatcttggggtttgttggcatttcattagtgaatcagtgagtctatgcatgactatgaattt

SEQ ID NO: 31328 - DNA, 327 bp, Glycine max
  unsure (1)..(327): unsure at all n locations
  Clone ID: LIB3051-048-Q1-K1-E7
ctaaaaatcaaaacccttttcattgcaacaataacaaatcatcaaacccctctctctctctctctcgttttaaaccattttcctctgcccatggcggctgtcccagcatcgcggaccgatccaccaccggcaatggtgcagccgccgctgctcgtctctgaccccttcgccaaggacgccattctcgcctggttccacggcgagttcgccgccgccaacgccatcatcgacgccctctgcggccacctcgcgcatctcgccgccgcatcctcagactacgacgccgctttcgccgncatccaccgncgccgnctcaactggatcccc

SEQ ID NO: 31329 - DNA, 378 bp, Glycine max
  unsure (1)..(378): unsure at all n locations
  Clone ID: LIB3051-048-Q1-K1-F3
aagcctgctagtgaaagcacttcaaaagccaaaagttgcttcaaaaatcagattccactagtcactcatctggtaaccgtcatcaggcagctgttgagatgcaacggcagaagcttaaaaagatgatggacgagcttaatgaggagggagatggtcgtgcacccattgtcaagcttggggatgcctcaatggcatctccattcactgctaagcatgcatctgttgctcccaccactgatataattcgtcaaggtaggagtaccctagtgacaaccctncagatgtttaaaattctgggtctcaattgtcttgctactgcaatatgtgtgagtgttatgtatctaaaaggtgtcaagctaggtgacatacaagccacaa

SEQ ID NO: 31330 - DNA, 385 bp, Glycine max
  Clone ID: LIB3051-048-Q1-K1-F4
ccaacgcgtccgcaactctacaccagctgacgcgtaaactaagattcaacgtctgcgctcttcaggcaccataccatagatccttcattctctgcaacgatcaaacccaaaaaacactgcacctcttcttctgggtacgccactttctcttctttttaatttttttttgttcttctttttcttcaacccctctattcgcaaaggaagcaacggaatcgattctgttcagttttcctcgttttgagtttaaattcacagtattttgaggaaacaaattaaagggtaatcgctcgcttaatccaccgagctcaattcccacatccccacataaaataatcaacaaaatcagatttggtgaagaagagagtgtgatttgatgattatg

SEQ ID NO: 31331 - DNA, 429 bp, Glycine max
  Clone ID: LIB3051-048-Q1-K1-F8
cccacgcgtccgtaaactaattgcaaagatgaataccaagccctttttctccttgtgcgtactctgcgcactgcttctcatctgtgttgtggcaactgagccatccaaagatgcgacacaagaagaaccaaagacacggccagatgcctggagaagtggtggaagtggaggacatggtggaagtgggggacatggtggaagcgggggacacggtggaggctggggacatggtggaggctggggacatggcggtggacatggcggaagatgcaaatgctgcggtcgaaagggctgcaaatggtgcctgagtaaaaaaaccccaaccttgaactgagaccccccttacgtgtgtactccatgtaataagtatagtatgtagaattaagaattaaaagcatggaatctatatccgtgctagggctgtcatag

SEQ ID NO: 31332 - DNA, 338 bp, Glycine max
  Clone ID: LIB3051-048-Q1-K1-G3
tcggaccaagccttccgttcgatttcgttccttaccctcgggttgatctgtgagaggggattgatagccctctctgtctctggtgctgcaattcagatcgctggcaactatttgttatacagaccatctgtcttaacatggaagcattgcttgcttgacggacacctttgtctcaaaggagttggaattttcgggtctgtctgcggattggagatttacagagcgcccttgcactacctgtttgatctcatcaccatgagacatactgatactatagatcgagctacacaacctaagatcaggttcttaacctgaacgatacaaataggttctgcaca

SEQ ID NO: 31333 - DNA, 435 bp, Glycine max
  unsure (1)..(435): unsure at all n locations
  Clone ID: LIB3051-048-Q1-K1-G4
gttaactttgggttgccaaaccttccaacaggttttaaagccatgggcatagtagttactaccggtcctaaggaacctgaagttgaaaaagttagatgcgtgcaaaatgatctaacagaaactttgtgagacttttgatctgttactgactgtaaagtcaaaatttgcaaaagattcatttcaggtttggaacacacaaccctgtgatagaggtatgttagctagaggtgtagatgtngggacattcttctgtggcagtacctattttgattctgaacaagtggtggatatcatgtgcctggagaatcttgaatctttcctggattccaatgccaattagaacccgattcatgcacttattcaggatttatggtcccactggatactttcattctgatgagaagtacttgccatcatcagtgcaatggtttttta

SEQ ID NO: 31334 - DNA, 425 bp, Glycine max
  Clone ID: LIB3051-048-Q1-K1-G7
cttgctggtcttagggtgaacttttgatgccataaaaaaccatcccatattagttctatttctctctctgcctctccctttgtttcaagttccctctgcttattctgcacaggaacgatgtctgagaaaaccacagctgagaaccttattgaaaaccttgtggacacatttgttgataagaaaaaatctgtatcattctttgaggatgataagtcagactcagtgagttctcagatcaatagactgtttggacgccagaaacctgtgcaccatgttttaaggggtggaaaatctgcggatgtcttgctatggaggaacaagaagatttctgctagtgttttaacatgtgcaacgattgcatgggtgcttttcgaatggcttaattaccactttcttactatcttatgccttgggttgggtcttgt

SEQ ID NO: 31335 - DNA, 401 bp, Glycine max
  Clone ID: LIB3051-048-Q1-K1-G9
gaaactcaactttgagtagataatactgctggatgtctcgtctctaattattgtatttggaaaatagttttgagttgaggatctaatcattaccagatttaatatacttggcaaatggggtctgaaggtcctacgacaccgacaacaacaattcatgtgacaggatttaagaaattccatggagtttcagagaatccaacagaaacaattgccaataatttgacggagtacatgaataagaagggtttgccaaagggtttagttattgggagctgcagcattcttgagactgctggtcaaggagcacttgttccactgtaccagagattacaatccgccgttattgccaaggacactgaatcttcaaattccaatagaattatttggctgcattttggggt

SEQ ID NO: 31336 - DNA, 391 bp, Glycine max
  Clone ID: LIB3051-048-Q1-K1-H1
caaagtttagcacatctttacgcagtttatcacaacctatgtcacttggggagatagcaaggacttgggatgtttgtgctcgccgtgttatttctgagcatgcacaacagagtgggggaggaagcttcagctctaagtatggaacttgggagaattgcttgaccaccaactaatgttccttattgttccatgcagacctttttgtttcggcccaaacatactgtttcggttaatataagtaatttattggatgtagataaaagcctagttatgaagtagcagaccatggagtttgtcaatttctatatattgtttttgcattttgcaagggaataatcattattaagccgtaagggtgaaattatataaagcataaccacatattaagtgg

SEQ ID NO: 31337 - DNA, 431 bp, Glycine max
  Clone ID: LIB3051-048-Q1-K1-H12
tcggccacgcgtacgcttttctatcattaccttctctctctatatatactgccctttctttgtgcgtctttggtaatcgtccgttcctctctctttctctgccttgtcttctcctcttttgttccgcttaagggccttctttgatcgatttttttcgctttgattcttatattgctttggatagaaaaaaggtgtgaccttttggctattgtattccttgtcttgtctaatttttcgtggtgatttttgggacaagctaacggcggtgctgaaagtcacagcgctttgcccatgcaagggccttctttgctcgggtttttccctctttggttattatattgctttgtacgggaaaaaggtgtaacctttgtctgattccgacgaggttccacgcataaaaggctaacgacgatgctgaaggtcacaacgct

SEQ ID NO: 31338 - DNA, 434 bp, Glycine max
  Clone ID: LIB3051-048-Q1-K1-H2
gccacgcgtccggaccagcttgcgaagctggtttgcaattgtatggggggttcagctgctgtatcgtaagatgatctttttgctatctggagggagcgcattaatgatctacgagattgcttaggatctgttgttgtaccaattggcagtctatctactggactttgcaggcatcgtgctgtattattcaaagtactagctgacaccattgatttgccttgtcgaattgctaagggctgtaaatattgttcaagagatgatgcctcctcatgtcttgttcgatttggacttgacagggaatacatggttgatcttattgggaagccgagttgcttatgcaagcctgattacatggcccaacggttgattaacttaagaaatgcctaatggctactcaaaggtcatatgggttgagcatgtacaagcggatgaca

SEQ ID NO: 31339 - DNA, 407 bp, Glycine max
  unsure (1)..(407): unsure at all n locations
  Clone ID: LIB3051-048-Q1-K1-H4
gatcaaaagaagatagattatcggttaaatagatggtttgaaaaaccttattctacgcgacccttgtggattagcataacagagacatccatcctcagtcattcgcaatggcccgacgactccttccactcacctccctccgccacctctccatcgccgcctcgcgtcgcctcctctcctctgcactccccgtcgctccccgcccctatccgcccctcaccgcccgcttcgccgtcgtccggtgcctctgcaaccgccccggagactcggcgtactcgcccctgaacacgggaaagcccacctncatcttgtcgtcgatcacggagcgccctncgacggacatggcgcccctgttcccgggctgcgactaccatcactggctcgtcgtcattcacaagcccggcggc

SEQ ID NO: 31340 - DNA, 433 bp, Glycine max
  Clone ID: LIB3051-048-Q1-K1-H6
gaaagaaggaaggcgaagcccacaaagaaagaaaacaatagtttcagaagcagaaagaggttttccgttccgaaacgatgtcctccatggccatcaccaccagagacagagatcgagagcttctcatccccgtcgccgacacccccgccggcgatgccgccgtctccccttcccccaagccatcgtcgtcggcgtcgtccccgcatcattccggacgcgagactttttacaaagttgttagaagctgggcatcaaaaaagtttatgactggatggtacgctattctttcttctgtccaattatcttgttgtcaagtatggatatataatacctattgtgtattcatacacatgatcttgtttgtttcctgaatgaatttgccctttgtatgccttatattctttgaagtgttggtttattttcttaatttttt

SEQ ID NO: 31341 - DNA, 334 bp, Glycine max
  Clone ID: LIB3051-049-Q1-K1-A1
tcgttgaaatttcctggcttgcggtagcaactccttttgcaactcaacagtttatttatcggatgaattttttgaattttatagaatttagttagatgacaattcgcaaaagggatcttaaaatagcctaccaaggctatatgatgtagaagttggtcatgaagcaagttttctgcttcagtaactcattgattacatttttttttcctgatctattttctttcttatatgttatattgagttgtaagtaggaactttccattgactgaattacaccattgtagtggggatatagtattcaatataatgagactggagatgtaataattttatt

SEQ ID NO: 31342 - DNA, 244 bp, Glycine max
  unsure (1)..(244): unsure at all n locations
  Clone ID: LIB3051-049-Q1-K1-A10
gagatctcgacggtggctttccatccgcctccttccaatctcctcctcctcctcctccgggtcagacgacggcgtttcgagatctgacatctctctctcgtaacagaatactggacagatatggaagtcaacaattggcataaggagcttaaatatgatgagtgggtaccaatcactgtatctggtgcacgtncagctgctcgctacaagcatgctgcagcagtaagtgatgaaaaattataca

SEQ ID NO: 31343 - DNA, 337 bp, Glycine max
  Clone ID: LIB3051-049-Q1-K1-A7
tcgaaaatatgttggaaattatgacttcccggggtcacttgaggattatgttcatcgcatggggcggacagggagggctggtgcaaaaggaactgcgtacacatacttcacaggtgctaatgccagattcgctaaggaacttatagccatactcgaagaagctggacagatagtgagtactgaattaacagccatggggcgtggtgcaccacctccaccttcaggtccgcgaggcttacaagaccgctggaggggttatggcagttctcgtacatggagctgatgggacggtgcagacacaccaacttgattgacggaggaaactcccaagaattat

SEQ ID NO: 31344 - DNA, 400 bp, Glycine max
  Clone ID: LIB3051-049-Q1-K1-A9
gaaaaccgaaaccctaatcacgactccgagaaccctaaattcgcccaatccaaagtcccgaacctctaaaatcaaaccatgaaaagcgtagaggtggcgaagacggtgctcgaggtcgccgacgtggcttggaccgccgttgaacacacccaccatctccgccaccgcagtcatcccgtccccgctgcccccgcagccgatgtctgcccatccgaccaagatttggagtctctgcgatccgaaaatcgacgtctcaggaacttactcgaccagaatctgaaattgctgcaaaacctctctgaggcgacttgcttcgataattgccctcccgatttgaatgaccggttagttgctaccatgaggtctgatgagtacttgactcggctcaagtaccttcaac

SEQ ID NO: 31345 - DNA, 322 bp, Glycine max
  Clone ID: LIB3051-049-Q1-K1-B5
cccacgcgttcgcctaggaggtggtgttgccggtgccaaccttgcaaaaactatacagggttaagccaacgtcacccttattgatccgaaggaatattttgagattacatgggcaagtttgatgggattggttgagccaacttttgctgaaaggatagtgatcaaccatagagagtacttcaaaaagggtaaccttgttgaatccagtgctgtcaacataactgaaactgcaatggtgactgaagatggccagcagattgcctatgactatcttgttattgccactggacacacagaacccattcccaaaaccaggaatgaa

SEQ ID NO: 31346 - DNA, 274 bp, Glycine max
  Clone ID: LIB3051-049-Q1-K1-B7
acggtgacaaaacccataaatcctctcaccaaataaacctcaatttattgcattgcataatgccatgtcaatgaagttgtatgcttccctcacccttacggtgtggcttttcatggccacattttcgcgagcccaatacgttattgacacaaatggcgaacccgttgacaatgatgatgagtattacatcaggccagccataaccgacaacggagggcgtttcaccttgatcaaccgaaacgggtcgtgccctctctacgtgggtcttgaaaac

SEQ ID NO: 31347 - DNA, 364 bp, Glycine max
  Clone ID: LIB3051-049-Q1-K1-B8
tcgcccactcgtccgatgactcgtgtgaacaaataaacctaaatttattgcattgcataatgccatgtcaatgaagatgtatgcttacctcaccctatacagagtggcttttcatggccacattatacaagagcccaataccttattgacacacatggttaacccgttgacaatgaagatgagtattacatcatgccagccataacctacaacggatggcccttcactttaatcaaccgaaacgggtaaaaccctgtctacccgatcttaaaaacaccgatacacaactcggttatccaatgagatttacccattaaggggtcaacgctcaagatgatgacataaaggtgaacagccactttgg

SEQ ID NO: 31348 - DNA, 417 bp, Glycine max
  Clone ID: LIB3051-049-Q1-K1-C10
gtttaatattttcacagttcagtatgaaaaatcccctttttatttaatgttctatcttcagttgcctgatgctgctctatctttttctctcacctcctcctaactttctgccttccctcattctcggtctcacaaacttaaagtaatatccagaaaggaatgaagaaaacctgggctcttcttcttatgtgttttttcttgtttgaagatggtgtgctttaaactagaactaatgagatatatcctgtaaatgttgatcacactctattggtttaaactaattataataaccttctagaaattgctaatttgtttctatggttcttatctgtggaataagctcctcttctcaccctttttattcaacattgttgcagggaactctctcacattgttctcgtccattatcgacaagtg

SEQ ID NO: 31349 - DNA, 416 bp, Glycine max
  Clone ID: LIB3051-049-Q1-K1-C12
caaagttgtgattttgtgaactgggtatgctcaaagttgagattttgtgaactgcggatgctcaaagttgtgattttgtgaactgggtatgcggctgtgttgaacttgacttgatcctgttttagggtgtttcaccgtgttattttgatcaaattattgtttttgaaattgtgttgttgttgatttttggttgacttgtttgatactgtaattggatgtggctgaggaaaccggttttggggattgtttgtgtctatctgttttaatttagttatagattttgttctctctgtttcttcatgtagcatttggtgtttttttttttttttaatttggtttatgatgttttggccttaagaagttgcctttagaattaagctcaatatttctggacgaatctcttgcatgttcttgag

SEQ ID NO: 31350 - DNA, 355 bp, Glycine max
  Clone ID: LIB3051-049-Q1-K1-C3
tcgcgactttgaagccctatctgccgcaacgcgacgcgacttccttcgacgacgcgagccgagtgctcataaaaggaatagtagtaagcacattcatctcccctagatatgaactcagttgcaaggcgtttatcaagattattcagacattcaggtttcacgcctgaacccttcaataatggccatcatcaaatgcagaagcttcagcaatgcagaggcataagagtgaaggtcataggtgggaacttggaagcagcattgggattgatgcagcgtaagatgcaatcaagtgggattgagaggatgataaagcaagagcaaagattccatatcaaaaactctgagaagcgtgttt

SEQ ID NO: 31351 - DNA, 342 bp, Glycine max
  Clone ID: LIB3051-049-Q1-K1-C5
gtaatcctcacttgatgatactactagtcctgagatgataacatcaaacttggcaatggcaacgaagcttccttataatatatctttctctctctctttctttcttccttccctctcttatattctcttcttgtctttacatcacaccctctttccccctttgccaaagctctgatcttttccctctccaatccccgtttctccacttttcttgatcagggtgcctcgttttctcagtttctgaatcattttttgttctgggcctctctccacttcggaaaaagatctgatttttcgccccctttttttcgattcgaatccctcgagaaccctattttctcg

SEQ ID NO: 31352 - DNA, 405 bp, Glycine max
  Clone ID: LIB3051-049-Q1-K1-C6
ggaaaagcttcagtctctgaccatggcggatggaagcagcggggaaattctaatgctggaagccccagcgtcttacggtaggtctagcgattccgacgcggaaataatcgacgcattgccttatatcgacgacgactacgcagaccccatagtcaaactggaggttgaccgtctcgtggaggatgagatgcgtcgcagcaccaagaagcccaccgatttcctcaatgatttccctcctcttcccaactccattttccagaactacccaatgattgccagagagtacgaacgtgtgagagctggaaggccttccgttgctcttgatagatcgcgctacgatttggaaatgccgtcgcccaataaaaggaacgacgaaactgcttggaagcaagctctttatagagc

SEQ ID NO: 31353 - DNA, 334 bp, Glycine max
  Clone ID: LIB3051-049-Q1-K1-C7
cccacgcgtccggttccgagttccctctccgctatctgtgatcctacactgcaccctgggcgctcctgttcgaaccttgccgccgtcatcgacgagaaggaagaaatttgaatttgaagaaagatgggagagaggaaggtgttgaacaagtattacccaccggactttgatccgtcgaagcttcccagagcaagaaggccaaagaaccagcagatcaaggtccgcatgatgcttccaatgagcattcgatgcaacacttgtggtaattacatctacaaaggaaccaagttcaattccagaaaggaagatgttattggcgagacatatctgggaa

SEQ ID NO: 31354 - DNA, 343 bp, Glycine max
  Clone ID: LIB3051-049-Q1-K1-C8
tggtactttatctaatgcggatgagatgctagttattaccttcatactgtcgatgctgtgtacttctggtcagtcgtattcgcaactaatttagagtactgatatatggatattattagaaacatggtattaatgacactgttggacactgaccatccatctatactttatgccgaaatggttttaagcctatagtgccgctgaacgtgtataccggaggactggttaagctgactgtgagcattattaggctcattgatgtaactagacttacacttgatcgattgtcagttgatcattggatgaacttattgcacatacatatatgggtaaccaaatccta

SEQ ID NO: 31355 - DNA, 270 bp, Glycine max
  Clone ID: LIB3051-049-Q1-K1-D10
aaaagacgtggtggatatggcggcggacgaggtggctatggtggcgggcgtggtggctagggcggcgggcgtggtggcgggcgtggtggctatggtcctaatgaacataacgaggctggggttgatgctaaccctcacaactaagaaggcaactttctaaagcttatatatgggtttaagttatcgcaataaataaaacttcatgagaaggttagttgtaatagaagtggaaaactttgtaaaggaataatacctttcatgaatttcctt

SEQ ID NO: 31356 - DNA, 440 bp, Glycine max
  unsure (1)..(440): unsure at all n locations
  Clone ID: LIB3051-049-Q1-K1-D11
cccacgcgtccgaattcaactccctcctccgccgcaaaaccctaatattcccgcgctggggcagtttcctactccggcgccggtggccgtgcaccacacgccggtgacgctcgatttcacgaagccgcacaacgcgcttctgagctccaacgccaaatccgtcgagctcgagttctcgaaggaaaccttcagcgtttcctctaactcctctttcatgtcctccgcgatcaccggcgacggcagcgtctccaatgggaagattttcctcgcgccaccggcgacctccgccggaaaacgtccggcgttcaagaagcggtgccacgaacaccgcgaacacttcgacgatgtctccggcaacaagcagtgccactgcgttaagcgaaggaanaatagggtgaagagcactgtgagagtgccggcgattagttcaaaagtcggcg

SEQ ID NO: 31357 - DNA, 341 bp, Glycine max
  Clone ID: LIB3051-049-Q1-K1-D2
accgtacgcgtacgcgaaatggaagataggatggacatgggcgcacattctggaaaaggtggaccggccagcctggaccctcgacacgctacgtgaccacatctgcaggcgatcgaacacttactgcgacttcatcaacctgatctgcacccgcataattctcatagacgacaccgttccgacgcaaacccttgcccaactcggcgtcaaaagcaacgccaagaccctcgccactggcgcctccactgctcagcacggacactccttcctagtccaggaagaacgctgctacagactcgcgcgtatcagggcggctgccaatgcaatggcagaaaggcatg

SEQ ID NO: 31358 - DNA, 386 bp, Glycine max
  Clone ID: LIB3051-049-Q1-K1-D6
ccagactccacctgctcacctggatacgtgttttgctttcttttcaacaacaacacatgttttgctttttttccaaaacagcaacatgtcttctttttcttaaagcaccaaaacagctggtgccggagcaagccaaaagccatccctctaaattaggttttccctttcttcttcttcttcttcttattaccctaaccctaaccttagctattcgaattccactcctcttcgcgaaatcatggcgacgactttggtgagctccgcgggtgggatgcttgcgatgctggacacgctctctccaacctcaacaacttagttttttattatggtctattgtcgattctaaaatcctagctgatgaaactgatgacaacaattgatgtata

SEQ ID NO: 31359 - DNA, 448 bp, Glycine max
  Clone ID: LIB3051-049-Q1-K1-E10
cccacgcgtccgaacacttagaaaaaaagttttcaaattacttgaagatgaataagtcgtctaatttcttgaagaagatgaataagtttttaataaaatagtattattatctgtttattttcgtattacttattttcttctaaattcgctcttgcagtcttgtgtcgcgagtcgcaatcccattcgatcttgaagtctgcaaccgccggacaccgtcgatctacaaccgccggacgtcgacgtcgttgcggctctgtgttcgagcattcaatttcattggaagttcaaaaggacatgatttccatcaatacagcctccatattgggttgaaaattgagcaaattctgtttgagtgtacaaaaccagccttgttgggtttcagcattaaatacagcatctacattccttttatttcttctatcactcccaaattctggcatgggaaaag

SEQ ID NO: 31360 - DNA, 451 bp, Glycine max
  unsure (1)..(451): unsure at all n locations
  Clone ID: LIB3051-049-Q1-K1-E12
cgaagccccaaaagaggagagaaagaagaagaaacactcgagaaatttctcacataggggtgggatttttcgagcaatcttctctctccgccacttcacctcacgcgatctggttccgatcgcacacgttttaatgatcgtcgtcttccgcagcctctgattcggctctgatctctctcgccgcacctctccgccggaaccatgatctccgcgcagggcgaccaccaccgncaccaccaccactaccaccaccagccgcagcttcccggctccgccgacacctctcggcagcagttcaccgcggatcgcgtggagcccttctccgtcaagcaggaacccgcgtcgctcactcttctgccgttacgcggtcatgattctagtgaagttgatgaagatgtgtacttgtctcttgcacatcaaatgtacaagactggcgattataagcaagccc

SEQ ID NO: 31361 - DNA, 423 bp, Glycine max
  Clone ID: LIB3051-049-Q1-K1-E4
tcgggaagatttcattgctctcatggaagctgggggagaggagcagaagttgaatgacttgagatgtggcttttgagatgtatgacactgaaaggtgtgggtttataacccctaagagcttgaaaaagatgcttaagaagatgggtgagtccaaatccattgatgagtgcaaatctatgatcaaacagtttgatttgaatggggatggtgtcctaagctttgaagaattcagaattatgatgcagtgaggcatgtatatataaatgttgattctgtatagtgtgtatttgaaatttgattgatttgtttgcacatcctatgtataacactataactactgatagtactattttagcagcttctcgatagtgatcaaaataactatcggattttgccccaactgtgctatttcaataattattc

SEQ ID NO: 31362 - DNA, 374 bp, Glycine max
  Clone ID: LIB3051-049-Q1-K1-E7
cggacgcgtgggtatatttacaagttgaataccattttatcacataaggctgcgggagtctttcaattgcagtcacagttggctcaatttcagagacgtttaaacgagtataatgttgtcgtaacttctggtaattgatggtggtaatgagcatgactgatgtgtcgtggatggtaggtattgcatgactgatgcgttgatgctatcaagattattcgtgggttctggagtgcagaagacatagcaatcatatccatctttgctctacactcaattcagcagattgcttatacaagccactgttgtgacttgaactgaattgaatcacatattcatatgcatgttcactcgctcatttgacatactattatcac

SEQ ID NO: 31363 - DNA, 198 bp, Glycine max
  Clone ID: LIB3051-049-Q1-K1-E8
ttgactcgttcgtacacttacacgttgaacaccattttatcactaacggcttcgggaaggtttacttagccagtacagttcgctcaatttcactgacctttaaatgagtctaatgtagtctcaactcgtgctcattgatggaggcaatgaacatgaccgatgtgttctgactcgtggtactgcatgactgatgcattg

SEQ ID NO: 31364 - DNA, 452 bp, Glycine max
  Clone ID: LIB3051-049-Q1-K1-E9
gggaatcgagcagaagcatgcactatgatcaaccctctgggcttaatgatgttcaaaatgatgacttgtacaggccagtacacagtagatccatgggcaatatgtcaaccgagttcccagcctgcacatctgggcgtcagaaccaagggtatttggtggatgagttcccacacattgatatcataaatgacctgcttgatgatgaacaaggtattgggaagacggccaaggcaagttcagcattccagtctctgaataatggaccacagttgctgaatcgacagtcacttttcctggggatctgggtgcagatgatgatttgggatcttcaaccagttcttgcaggtttgagcgatcacaaagttaccatcatgaccatagattccaaggaaggtatgacttgtctggtgggcattatgattcactgagggattatattcaaccgatgagta

SEQ ID NO: 31365 - DNA, 371 bp, Glycine max
  Clone ID: LIB3051-049-Q1-K1-F1
tcgaccacgcgtacggggtgctgtcagagttcaacattttctgagttcactcactttttcgcgcttggaaccttgcttttctctgcgagcattttccgctatggccgaagaatttgtgaagggctctgttcatcaaaacggcgtcactgtcataaccctcgatcgccccaaagctctcaacgccatgaacctagatatggatgtaaagtataaaagctatcttgatgaatgggaatctgacccaagggtcaaatgcgtactggttgatagcagctcggctcgagccttttgcgctggtatggatattcaaggggttgctgctgaaatacaataggacaaaaacacttctttagtgcagaaggtctcatatt

SEQ ID NO: 31366 - DNA, 299 bp, Glycine max
  Clone ID: LIB3051-049-Q1-K1-F10
aaaaaacatacaaaaacaaaaaaaaaaaaaaaaaaaaaaaaacaaaaaataaaaaaaaaaagaaaacttaaaaaacctcaatcccatcttaatacatctaatatactttcacctaaattcaattacttaacatttttataacaacacctaatctatattaaacccttaatttaccacactttattaacttataaaacattctctttatctcacttaatttattttcaccatcataccactttcaccattcttcccaataactaacaaacctcaatccctcaatctaccctaactttacc

SEQ ID NO: 31367 - DNA, 436 bp, Glycine max
  Clone ID: LIB3051-049-Q1-K1-F11
atttgaagcccaaggatgattctgatggcttgaaacatatttcattttcaagtcctgaggagattgttggtaattctgatgtcactggcatcaagcatgcgcatgatgaaaaagatgagaaaattgctgttgataaagaacatatttcttctatcttaaagattggttcagtcactattgcccccaaacaagttgaggctaagcaatccgtcagcaatggtaataaagaaccagttgatgttcttacagtaggctcaatgcaggtcaaagttaatgggtttccttcgtcttctggtttcttgaaaggtggcagtaccccatttgatgcaagagcattgcaaccgggaaaaggagatgctggcggtaaaaagggatcacaacgttaaattttgctttgctttgcatttgaggcacatttgattttagtcttcttttg

SEQ ID NO: 31368 - DNA, 345 bp, Glycine max
  Clone ID: LIB3051-049-Q1-K1-F4
ggcacacgtgcgttctcattcaaggaatgatagcttgatagtcagcatgaacttggatgacgtgatgtgaagaggcaggtgatgcagctgatccagctgctgacataccaggcgagcctatagacatgacgactgacatgaagactgtgctgaaaatagctctgacttatggtgttgctgcacgaggccttgaccaagggccacacgtgattgcaaaacatactgaacagctttctgctctagcataagactgagaccagcactactatgagaaactcgataatgcactttgtacagagctcaatgctaacctgattacaagtccgagtgcaaagaccattgcaa

SEQ ID NO: 31369 - DNA, 330 bp, Glycine max
  Clone ID: LIB3051-049-Q1-K1-F7
ctcgtctcccgcacgtgccttacttccgcggcgccactgccgcacgtgccgcgccatgggaccctcctcatgacgcccccggaggcctcgaattccgccgcgtctcgaccgccaaacgccgccgcgtcagcctttccgtctgccacgcgagtcgcgtcaccgccgcctcgaatcccggtggttccgacggcgacggcgatactcgagctcggagcagccggcgcggcgtgctgatggcgccgttcttagtcgccggcgcatcaatcctgctctcggcggcgacggcgagggcggaggagaaggcagcggaatctcctctggcttcggcgc

SEQ ID NO: 31370 - DNA, 390 bp, Glycine max
  Clone ID: LIB3051-049-Q1-K1-F8
ttctaacctaaccctaacataagtaacggattcagtgtctcgaacaagcagaggaaggggccttttctaaagactctacaaggtgcttatgctccggaactgcgtctacctcaaatcgatgatgggcgacgctttccttgtagagcgcgctgcgcattaccgacttctcaagatctggtagcacaatcacctacggaaacgctataactacattcatgcactacggcatactcattgagccgagcttacatgacgagtcatataatgtgctcagctctagcaacttgataactgctgtaagtgcgtaaaagcttgatctgaatgactattcggaaatctacagaatcgaattagtatacagttgatgattgaatgatatcatggaacatt

SEQ ID NO: 31371 - DNA, 400 bp, Glycine max
  Clone ID: LIB3051-049-Q1-K1-G1
gctaaaaccttttgtgtttgcgccgctctaaagccaagcctgagactcgcgactcaccggcagtgctcgccggcctctaattttgaaagcttctgcgccttccacgccatttttgatactctctttgtgttcgcatagtgagatatggggaagaaggcgaagaaagctatgaagaagaatttgaaaagggcttcctttaataagaatccatctgaggatgctgatttcttgcccttggaaggtggccctgctcgtaagctcgccggccagcagaagccgtcgccgtcgccggagaacaccgccacggttttgtacgtcggtcggatcccacatgggttctatgagaaggagatggaaagtgcatgtttttggattttgttacatgatttttgtggggtgt

SEQ ID NO: 31372 - DNA, 434 bp, Glycine max
  Clone ID: LIB3051-049-Q1-K1-G10
accacgcgtccgctcctctcttgtttggcagctattctttccggtggttccatagttcggggtgacgcctttccttagttcctctcattcgaagttgtagggacagctgtgcaaggtggatatggaatgcgtggttcagggaattatagagacacagcatgttgaggcctaggagattcttcttcaaggactatgtggcgttcagagagaacgattgaggatccatgaaatatgcctcacgagtggtcatcatctaagtactgtgccctgagaggttcgactgttgagtgacctatagcaagctgaaccttcgtggactgttaaacatgtatgtcgtgcaatgaggggagcatgcgcaaagcaaatctctgatctggataggtcaatggtggaaagcagatctagcaggaatgcactgcgcatgctttatacac

SEQ ID NO: 31373 - DNA, 381 bp, Glycine max
  Clone ID: LIB3051-049-Q1-K1-G12
cccacgcgtccgcccacgcgtccgctgaatttgaagaaagttgggctgttggaaaggtgagagggatgggaaaatgacaatcaggaaaatggacatgtacttgctgagcatgctaccattgatcttgattattatagtacagttgaagagctgatggaagtcggtcctgaaaggttaaaggaggcactggctgccttggggctgaagactggtggtactgttcagcaacgtgcagagaggctcttcctcacatagcacacacctcttgaaaagttggacaagtcaaagcttttgcttttggaggatgcttctagtgaaaagaggaaacgcgaggcaattagaaaacacaatgaaatgttaaaggcttctgaaactggtgct

SEQ ID NO: 31374 - DNA, 341 bp, Glycine max
  Clone ID: LIB3051-049-Q1-K1-G5
cagaaatggccttagggaacgactcagaagcagaagttgattttgagacttggtatcggtgattgttaagagaatagtgagattttgttaatctatagtggtgcttagactgaagtatgagtctattttgttgggcaaggccctgagtttctactcttggattgtattcgttagtttctttatgtcaaagcttgtgtttaatttatttgcagaatacttgtagtttcattgcaggtaatgatcttgttaaggttgctgctactagtatgttaaatagagttccagatctttgcagaatacttgtagtttcattgcagactgaagtatatgcttttcttctc

SEQ ID NO: 31375 - DNA, 329 bp, Glycine max
  Clone ID: LIB3051-049-Q1-K1-G6
tccacgcgtccggtgcggcagacgagtgtctcggttatggaggatcaaagcggggaaggatgggtaagggtcccttttccttccgtcgctccgtctctcgccgccgacccaagaagaccgccgtcccgccttctcctccgtctccgccgcagcctccctacgcggccggaatcgccacctcacccgacgacaacaacaaccgtctcattgctgccggcgccggcagcagcgccttgacgaaggcgaagaagaagaccggcggcgcccgcttgtggatgaggtttgaccggtcgggccagtcaaaactggtggagtttggagaggaacgc

SEQ ID NO: 31376 - DNA, 299 bp, Glycine max
  Clone ID: LIB3051-049-Q1-K1-G7
gtgacacgtacgagaactatgggtagggtatatttcttaaaacggcaagatctacaagggtgtatgtgttgccgtgaataatccttcacttgtggagtcttcaactgagcccaaatagtgttgtgatggatagttgtccgttctatcacggataggtgaatacggtttctggaatgtccattaatggatcgactacgacaataatgtcatggctgcctattctttcaaaactgacttggcaagggcactgaggatgaccggcatgaattgttaggagttgatgcttgaccatacacgga

SEQ ID NO: 31377 - DNA, 352 bp, Glycine max
  Clone ID: LIB3051-049-Q1-K1-G8
tgtgaagcgtgcgatgacccagagcattgtctactttctaactggtaaggttcgggcagggttggcatcaacagaccggtacgcttctgatagctctgtcaacgcctacgcaaatgtgaaggatatggagatgaatattcgtaatcatgcagaataatctactcgtgcttatagcacgttctttctgagacatcaaggacattgaaatgtatagttgtgccttcaacacttactgatcgagatcattaatcatactctgctgaccaggattctattgcacctcaatctttaatagatgtaataagaactccagcaggttcttatgctgtggcatcaggtatcaatgggtccc

SEQ ID NO: 31378 - DNA, 443 bp, Glycine max
  Clone ID: LIB3051-049-Q1-K1-H10
agttaaacttcaggcccccacttcagtattctacttttcctttcatcctgagacctccgggacactttcatttcgtcgcataacccttaaggcgccgcacacaccggcacggcctccctccctcgcgagtctcaccgccatcgttaatcacggttgtcgtcggagctctcgtagttgctcctcacagtcccagattgtcaaaaattgtggcacatcatggaaaatactgcgggccataacgatgatagcaagcaaaaagaagcgcctaagcttgcggcgttgttgaaagaaatgaaggaaggacttgatactgtaaggcgtaaaattcaatctttaactgccacggtgaacgaaggccaatatcctacagcagatggatttagctatcttgaagctaacaatctgctgcttttgaattattgtcaatcccttggttattattt

SEQ ID NO: 31379 - DNA, 357 bp, Glycine max
  Clone ID: LIB3051-049-Q1-K1-H2
acgaaactgcctctatctggcactgatttggctcttcaggcaacctttatgcttgttgtgctaagggaatcttcctcaaagttttcaacattggcagatgctaatggtcaatcagtgatgttagaaccatttgattttcctggaatgaatgtggttaaccaaggagcagactaacctgttctcatcatagattcatcccatggcgggacatcttctgattttcttgtagtttcgggactggatggactaaatgaaaccatatctttagaatcccagagctacaatggctgctatgtgtatagtggtatgagctctattgcaggagtgaagctcagttgcaaatctggttctgatgct

SEQ ID NO: 31380 - DNA, 355 bp, Glycine max
  Clone ID: LIB3051-049-Q1-K1-H8
attatacgttggcggaagccatttttcgatctgttggtgtgctttctggaaaggtgggggatggcaaaaaacaacaagtacgcctctattaacttaaccacatctacgaaaaaaccaacaccaccaacccacacaacaagaatccttctctctcttcttcttccgcttactattccgccgtctccgcccccaacaaaccccatggccgcatcctcgtcctaacccgacccactcccaaacccatcacgccctccaccccgcaaccgcaacagcaacaaccaccaccgtcgaccccgatccagcacaaccacccccggtccgaaccaggatcggacgcgatctcgctccgacccct

SEQ ID NO: 31381 - DNA, 389 bp, Glycine max
  Clone ID: LIB3051-050-Q1-K1-A11
acggtcacgcgtgcggcggatcaaaatatcccttctgataaattgcaccagaaagtgagtcttgatggtgatactacattgtcacaaggtcatgatactaaaaatgatctgtccaaaccagaggaagcaagtattctttctattgtagttaaaaatgaagaagggaaggattctgatgctattgcttgtgccttggaatcagatcaagaaggaagcacatgctctttaccacttgagaaacctttgcagaaccctgatactctttcgcatgagttgcctcgattgcagtccagtcaggaatttccctctataatacgcgaaaaggtatcaaaagatggctataactggcgaaaatatggtcagaaacatgttaaagggaatgaatttat

SEQ ID NO: 31382 - DNA, 428 bp, Glycine max
  unsure (1)..(428): unsure at all n locations
  Clone ID: LIB3051-050-Q1-K1-A4
cgtaaatgcgctttcttttcttataacaatcatagctaactagtagttttcctgtttctaaaaattagacgttttggttatatatcgttttactattctgtatttaattttattagctgagttggggctagtgcatgtttgaatttatcgaatgtaatatattatgtgcctagtcgtaacagaattctgttaacatattaacttaaggaattatacaagagttgttacattcttcaaggttgagtttagtggaataaggttttccgtttgaattttgtttgtactgtgtttttaatagatacatcgtttaacatgcagaaaccagcgtcgaaggatgcccaaccgatgaatatcgacagcaaggcataaacatcatggaaattcagctaatttcgagggtctgntatttattattatttgtggacatt

SEQ ID NO: 31383 - DNA, 168 bp, Glycine max
  Clone ID: LIB3051-050-Q1-K1-A6
cccacgcgtccgaaaaaaaaaataatttaaaaaaaaaaaaaaaaaaaaaaaagaaggggtaataaaaagggaaaaaaataaataggaaaaatgggtgtgaggctatatgggttcaaggatttggttcctgatgttgggatgtaatttttttttgttggagttggttta

SEQ ID NO: 31384 - DNA, 396 bp, Glycine max
  Clone ID: LIB3051-050-Q1-K1-A8
tcgggatgggtttctgtgctgccacacgtggactccattttggtcacttttggtgacattgctcaggtgtggagcaatggcaagttaaagaaagtgagaggtagaccaatggctacagtgggagatgaaaatggttcgcgctgcataacaatgtcattgctgataactcttcctacagatagcagagtggctccactccttcccaaggtaacatgcaacaaggaccaaaaggaagaagaaattgaaggagaagaagaagaaaacaatgatggtggtgatgaagaactagagaagagggtgttcaactcttttgactttgaggactatgcttggagagtttaccatgaacgcatccttttcaaagatccattggataggtaccgtgttgtttgatct

SEQ ID NO: 31385 - DNA, 203 bp, Glycine max
  unsure (1)..(203): unsure at all n locations
  Clone ID: LIB3051-050-Q1-K1-B1
cccacgcgtncgggctgcagcagccacacttaatcaaaacagacaagtgactgatgcgtgaagatctcaagtttccatgcatccagtggagttaagtgccataccctgtggctgctggngcatccatggcgatagtgtgtatgtttaaataaatcaagtcactctgagtttgactaataaaagtacaatagtcttagtgtgtc

SEQ ID NO: 31386 - DNA, 234 bp, Glycine max
  Clone ID: LIB3051-050-Q1-K1-B11
cccacgcgtccgcccacgcgtccgagatcgcaccgcaccgcaccgatggaaacacagtgatccaaccctaacccaagcgcctcttacctccaagttttgtgattgaagctgcgatggaggaagagacctccgatgcaatgaaccttgatttgaatctgggcccaggcccagaacccgaaactgggcccataagcaatgaagctgtgaacttggacgattggataggggagcctc

SEQ ID NO: 31387 - DNA, 405 bp, Glycine max
  Clone ID: LIB3051-050-Q1-K1-B2
gtcgttccgctggaatgatttattgagagcagattctttaactttggaaaaggaagttagtcaacaggttaatgttgttacgtcaataaccccaccagttcaagcaccatacttgttgaaatgtgtgcctgatcgagtcactgatgattctggggctatgatatctgatgtgattctgaagatgaatagttatcgtccacaagaaggccgatggttgtctcgcacagttcttgatcatgcagggagagtgtgttttgttattagaattagggtaggaggaggattttggagaaagaggggtgaagctccttcagctgtaaaatgggaagataggattatagagatacgcgaaggatcttggtcttatgttgccggttacattggtagagcccctgaaaaggtggt

SEQ ID NO: 31388 - DNA, 407 bp, Glycine max
  Clone ID: LIB3051-050-Q1-K1-C2
cggacgcgtgggttagaagctcttcagaagatggtccaaggtaaattcaggcacctccctgttgtggaaaatggtgaagtcattgccatactggatattaccagatgtctttatgatgccataactaggatggagaaggctgctgagcagggcagtgccattgctgctgcagttgaaggggtggaacgccaccgtggtagcaatgtatctgctagtgctttgatagaagcattgagggaacgcatgttcaagccttccctgtcaactctaatgggtgaaaatacaaaggttgctattgcatcacctgcggatcctgtctatgtagcagcaaggaagatgcgggacttgcgtgttaattcagctgttattgtgtccttgtcgggaaccaagattcagggtatactcac

SEQ ID NO: 31389 - DNA, 379 bp, Glycine max
  Clone ID: LIB3051-050-Q1-K1-C3
attcatttttaaattttttatctcctaaaacggggtccgttctattgaaatttgttgcttgcttacaccctagatccctaatctccttcagcggtgtttatagtttaacccaaaaaatcaccgaattctgatcggatcaccgcagtgccccactctccaccaccgcgccatcgcaaaccctagatggacctactgaagcaagagcttctcaagaagcgccaatccctggcgcaagacaccggcggcaagaaattcttcaagcgctccgagatccagcagaaggaaatccagaaactccgggagcaagagaagcgcgaattggaagccaagtcacagaagcgcctcgcaacgtcctccgacaacgctgccaccgctccgt

SEQ ID NO: 31390 - DNA, 316 bp, Glycine max
  Clone ID: LIB3051-050-Q1-K1-C5
gggtaaactaggagtaggagggaagaagggttgaaggaagaaaaaaagaaaaacacagaaatggagggtgggaacaacagcagcagtaacaacaaccctgatgagttggcggtggggtgcttgctttcgatcaggacaacgttgggcgacgaattcgaaggccaggtcgtcaccttcgatcgcccctccaacattctcgtactccaggagccttgcaaacctagccctcgtcgaaatcttaggttgctcaaagccaattacatcaaagacttcacctttctcggccatgcccaagaccctcttgatcccaacacct

SEQ ID NO: 31391 - DNA, 362 bp, Glycine max
  Clone ID: LIB3051-050-Q1-K1-C9
ctcaatcacaacatccgatgctgcaaatacaaaccgggtcttggctctctgaaagacgggaggtcgtacggacaagcgtcatgctgaatctgacataggaattttttgacaccttgctcatggggtagcatgtgcaacacatggtggacatgggtacccacctgtggctgacccaccatcatctggggcatacccttcacaacaaggatatcctacagctgggtatgctgcacaacaagggtatgctgcagctgggtaccctgcacatgcaggctatccttctgatggctaccctgcaattggttatcctggatgatcacatgcaccaggatctcatgggcacggcagtattggagcaatgc

SEQ ID NO: 31392 - DNA, 272 bp, Glycine max
  Clone ID: LIB3051-050-Q1-K1-D1
attatagacgcctaggagcggcactgattagaaggccgatataaaccgatccaacgtggatgatacacgagactatagactgagcgtttgattactactacagctcatatgcaagaataacgctagtgaatacttatacgctgggccagactacaacgagggaatcctgtagttcggaggttaggaccaaggggagcccggacgtgctaattcgatgcataatacagcactctatggacctgggcttcctccagattaatttggtccaatgg

SEQ ID NO: 31393 - DNA, 424 bp, Glycine max
  unsure (1)..(424): unsure at all n locations
  Clone ID: LIB3051-050-Q1-K1-D12
agaagatcaaggcatagtgataaaaggcactccagatcaagatctancagaaactaggggatcaaactgatgtcagagaggatgaacgtaaaaatcaaaaagtcaaaacatcgggatactaaaagagcaggtcaaatctgtggaaggaacatcgtttaaaagataaatcaggtgaaaatagagataagaaatcaaaacccgtgatagaaagcgttcaaagtcaatatcattagaagataagcatgacaaaggagacacttcacctcatataaattttgatgagagaaactttgaaccgacaaagtcccctgaaggcaagaatcactccagtgataaatatggaagtagaggtgaaaaatcagagcatcaaaagaaaaccccatctaaatcaaaatcagaacaatttgatgggagtgggccctta

SEQ ID NO: 31394 - DNA, 398 bp, Glycine max
  Clone ID: LIB3051-050-Q1-K1-D5
aatctaagatctgtgtggtgtagttggaaaatttttatatggcagctacgatgaatttctacaacggaacatcacaagaacaagttgagtcagatccattcagaggtgagctcatggaagttctagaaccttttatgaaaactagtccttcctcaacaactccctctattattctctcttcagattcaccttcatcttcatcttttaatttcccttcctcttctttactttctccacaccccaatttctacacacacactccccccccttcctacttactccaaagccaacaatccttaataggctttgagcaaccaccgagttcccttctcgggctcaaccacctaagcccgtctcagatttctcagatccaggcccagatcgaggcccaacagagc

SEQ ID NO: 31395 - DNA, 428 bp, Glycine max
  unsure (1)..(428): unsure at all n locations
  Clone ID: LIB3051-050-Q1-K1-E1
gatatctgctaaaggcttcgtcagtgaggtgagaatttcagccctatctctccttcggggttcaacctccttaagcggtcagcgggcataattgaaaaaagaaaggcactctatgttctcgttctcggtgctccggtcaaggtaaattctctacttgtcttcaccttcggacatcaagaaagccgaactgactcgctggctttgctttgtaagggcttgacctctgatgtatggaagtacgtggttgaagtgaattcctcggaaatgcagccggagggcaatctctcttttgacccggtctggtatgtcttttgcgccagctttctttcctattggttacggttctcttgtctcggtcatctcattntatggtttcagcatatggctatggttcagatacagactaaagactntctttcgtgctttga

SEQ ID NO: 31396 - DNA, 276 bp, Glycine max
  Clone ID: LIB3051-050-Q1-K1-E4
tcgcattcaccaaacttcttcactggggccattctctggttgatgagaactgaaggtcattcggaatgccactttttagggggaaaccctttttcttgggcgaaccttcctaggattttaaacccgattaacccggttacccaaatcgatttaccaaagaaatctttcaagaatttcaaggatattttaaaccattggaactataccccccgaagggtttgatgtgttaaagcacctggaaaaactggtttgcatattaaaaaggctttggggttt

SEQ ID NO: 31397 - DNA, 367 bp, Glycine max
  Clone ID: LIB3051-050-Q1-K1-F12
gacgataccccctttgtgcagggaatagaaaaagaaggccctctaatcgaaaaaggaggagagaaccacctgaatcttcgtctaaggtccaccttactactatgcatgaaccctccaggttggatcaaacaccgtcatctacttcttacgtcaaatcacctgggacgatgtcattaacatggctgaacaagtctcaaattaagaatatgggatggagatagctcggcaacaaatggtggcaaaaccaaaactgattggagctatgcaccattcacagcaagtttacaaggctcagatgtgactggtagccaagctacaacctcaagtattaaccaaaattgcaattctgataagtactggtggaata

SEQ ID NO: 31398 - DNA, 429 bp, Glycine max
  unsure (1)..(429): unsure at all n locations
  Clone ID: LIB3051-050-Q1-K1-F3
caacttgttggtattcatcaaagcttttgggaaacaagttaaagcagggcatgcagaggggcanaccaaatatttcagactccttaaactttntattatcactgttgcatttatttcagatatttagtatttgggtacaagtttgttctttagtttaaacaccgacgtctctccgtggcggctatacccaatttgaactttaattttcttccctttgtgtgaaaaggttttgtgttggagttggctttttgaagggcgtgcatggtgaagttatttgtgtatatgaatgatgaagaacgatagagaaaagggtaacgaggttgaccagagttacatacagcagcaccactcgttgtcaatgccaatgatgttttcgggttttaacagagagaaggagatgtcagccatgatcactgctttgacacgtgt

SEQ ID NO: 31399 - DNA, 55 bp, Glycine max
  Clone ID: LIB3051-050-Q1-K1-G10
gcagtttattctatcatatccttggtcaaataattttctttttaattaccatacc

SEQ ID NO: 31400 - DNA, 412 bp, Glycine max
  Clone ID: LIB3051-050-Q1-K1-G12
agccttccatttcttacattttaattacatttgaccaaaaattcctcaatggttgaatgcctgggggttaataccattggtggggggaaatggcctgaaggaaccaaacagatccattggccttactgtggcaaggggtccatccaaaatggggtcccaatggtagtgccagtcaaacttttggttcattaataactgctgtgtatctgttggtccttttctatctacatgcgtatttgagctaattctaaaattggcaaattcaatatcttatttatcaagtcttctagacaaggaagacccgcctgtgcgtattgctgctggcgaaacactggctgtaatttttgagattggaattatagagaaattttctgctgattctaaaggtgcaagtgatatgagtcaagaaaag

SEQ ID NO: 31401 - DNA, 408 bp, Glycine max
  Clone ID: LIB3051-050-Q1-K1-G3
ctcgaacctgaccgaaagttgaactggcccagaaccttggcttggcacccagacaggttgggtttgggttccaaacccgtctgcccaaatggaaaacaaaccattgggaaggaaattccggggtcttcaaggccattatgaatcacttaaacttaacctccaaacccttcaacaaggacccgaaaccttacttaaagaggtaaaggaattggaaatcaagcttgtgcaagaaggagacaacaacaacactgaaagcgatgtttcggtgaaagaagagatgctgaccaccacgctctgtgaaaccgccattcctggatcggacacgaaggagttgagttacgagtgttttaacaagagtgatgaagttggaagggggttcttctgtgttccatgtggatttcaaagatg

SEQ ID NO: 31402 - DNA, 353 bp, Glycine max
  Clone ID: LIB3051-050-Q1-K1-G4
cttacattattttttcttttttttaaaccattcttttcttttcttttcactgatccttgaatctggtaagactcaacttcaaccatacctggttcaacttggaccttcctccttatcccatccccaaaagggaatttttttttaatttttaaaaagaaccccccttaaaaaaaaaaaaaaggaacagggggcctaatttctttggctggaccacaaaatggtggggtggcttccaaatcattgggttcttacctttggcttgccaaagttagggtctttagaattagcgtttgcacagtccaacttttggagatttatgattagggtttttggaggggagagggattttgggg

SEQ ID NO: 31403 - DNA, 429 bp, Glycine max
  unsure (1)..(429): unsure at all n locations
  Clone ID: LIB3051-050-Q1-K1-G5
cccacgcgtccggccaccctttcacattctaaggtcatattcaatcagaaaagcaggtgcaaatttagttgaagtatgacaggttttgtgatagttgaggggtgggagggtaactttttgtcctacctagatagggatttcgatggaggagatgtcctttgcggttgcagtgccattaagagtaggttcagatgattgtcatgatagtggcaatttggaggatgaagttggtattgcggaagtcataccaccaattcaagatagggaaggagagagtcctatgttggatatgatatcacaaaatagaagcactttggttgctggtgatgaagagttaaccattgaaattgaggaagaattcgtngtcgtttgaaggtgaccagtttgttgatagctcgtgttctctttcggtagtcagtgagaacagta

SEQ ID NO: 31404 - DNA, 395 bp, Glycine max
  Clone ID: LIB3051-050-Q1-K1-G7
tcgccaaattggtcatagaaatccaagaaacattagtccaaatagatgtattggagatgggtcaaacttggttggagtgaggcattatgattaatttattagaggcttgccttaagattatatggatgctatggtcacccggtcccaaacattttaaggaattgattgtccgtttaccagagggagtaggaatttttcttccatgcaaagaaagggtccttctcgaattcgttccaagtcacccatcagatctaggaatcggtcaaccggtccatggtcattttcaagaaagatgtcgcctaagagaagatcccctgatggttttggtggacattcagaactatcccatagaagatcaccattttacagggttgacagaatgaggtcccctgatc

SEQ ID NO: 31405 - DNA, 414 bp, Glycine max
  Clone ID: LIB3051-050-Q1-K1-G9
gctgagtcattcatctaggtcatctagtgggagtgcacgcctctcctctggactaagtgctgtatctcagcccttcaagttgcggctttgtcgagcccagggtgaaaagtcacttaaggattattcatccaacgttggactggttgatccattagcaagtttagcagcgattgaggaatttgtttggcctcgtatccaacgtagtgaatctggtcagaagtccactgtagccactgggaattctgaatctgggacaactcctgcaggagctggtgtatcctctcctactacccgtcgccattctaactagatccagatcatctgctaatataggtggatccatctagaaaggaaataactcaagataaaagtacaagttctttcaagggtaagggaaaagttgcattaaagcct

SEQ ID NO: 31406 - DNA, 398 bp, Glycine max
  Clone ID: LIB3051-050-Q1-K1-H12
aataaggatgtatggaatggcataatccatatatatttcaacttttctctgggccttaattatatctaacacttaaatatccaatgataaagttctaatagtttgcttttgccaaattcatactgaactacacaaagacgcagagctgaattaatcggcattcatcacatcacagcgacacagccctgattaatctttttctgcctttggtaaattactcaaagttaattcgtcagtgtttgagatgatgcatgattgcatgaatatattgtggacatgttcttaagcatttatctgttgttttgttgagtttacctgtttatttatctttattaatgttctattgtgtcactggtaaggcatttcagggtttcaaggcatataattcttcctctact

SEQ ID NO: 31407 - DNA, 296 bp, Glycine max
  Clone ID: LIB3051-050-Q1-K1-H5
gttttgttagttcacacactaagttctgaaaaatgagttccaaagtttttcttattctacttatgttcatggccactatacttttgatctcctctgaggttgcacccgatgatgcataccagaattttgacaaaacagatgggaagcgtagtgcaaatggggtagatgaaagcaaatattggcgtggtggctatggcgactatggtggttggcgtggtggtggttggcgtggtggctatggaggctggcgtggtggctatggtggtgggcgtggtggctatggtggctggcgtggt

SEQ ID NO: 31408 - DNA, 378 bp, Glycine max
  Clone ID: LIB3051-051-Q1-K1-A3
tcgatctattctacatcgaatcccaaacgttttgaaaccaccgtcacgatgatgctcagaattcgtagccgcgacggcctggagcgagtgagcgtcgaaaacccccacagcacaacagtgtcatacctaaaacggatcatcgaaacccaattgggaatccctgttcacaaccaaaccctgttcacaaaccagaacctcctcttggcaaaatccctagaagatctccaccgattcaccgacatgtccaaccccgacgcgcctctctcgtctctcaacctcggccacggctccatgggcttcctggcctacgagggtgagcgccgcgtggccggccccgccttcaaccccggcgggtccttaggccgtaagatgaccatg

SEQ ID NO: 31409 - DNA, 174 bp, Glycine max
  Clone ID: LIB3051-051-Q1-K1-A4
aaaaaaaaaaaaaaaaataaaatctgtttcgttttacaacaaacacgacaacacatcggaagggtcagccgccttaaaggactcaagctaacgaacgcgtgcatccaaagcatcacctcagtaatatagctcctacgtagcattccaacgcccgaactagaacaagccggaact

SEQ ID NO: 31410 - DNA, 437 bp, Glycine max
  Clone ID: LIB3051-051-Q1-K1-A7
agaaagtcatgatctgtcaaaccctgttgacctcaaggaccattgggcaaaacatggaacgaaccgatacatcacaataaagtagagggcgagacattgtttctggggcagcattacacgaatagaaactgcttttagtgatcaattatggattctcaagtcgaatgagaaaaataatgttaagtgtaaaggccatccgggaaagctaatgatttagagtatgcccttgcttatatttaggatgcataagcctggtggaggctggctaaatttaggggttgaagaagtgactatatagtcatcctcggcatttgtcgcacttaattttcttagataggctgatggcacccgatggcatgtataaaaagtctgcatgatggatggataaatagctgttagatagtcttggttaatgcatttagtacttaaaccctaat

SEQ ID NO: 31411 - DNA, 441 bp, Glycine max
  Clone ID: LIB3051-051-Q1-K1-A8
atttagttcattgcaagaagcatacaaaggtcaaattgttggaattatatactgtcatgtggccactactcaagagtcgggcaagaagtttgatgtgatctttactcctcaccatccgtatgctcgatggttggcagaaacaaatgcagtgaatgcaacattgccagaagtggtgctggttaggagaacccttgcttgggtaacaggaataatattgctcatttcaacctttatggggatatgctacctcatgaatatgccgcttacaagggacacgcttctatattctaatgtcaagcttgattaggcatggatcatggtgcgtacgaagacgaatcttttcaaccaacgaatggaccggtgtagccaattactatattcattataataaggttttggaaactagtccaatcaggatttgggtcttagaggataggggat

SEQ ID NO: 31412 - DNA, 388 bp, Glycine max
  Clone ID: LIB3051-051-Q1-K1-B11
cggacgcgtgggtggtgttggtgttcttgtgtcttagtcttagtaatggtgatgatcaagagaagaagaaaccctgtttgtgggagtggaagagactgagtagcgcttactctgcctatcgggcactttttccttcaagtattggtcttgacatgcttaagaaccttgtcactcacacatatgcccgtttctttcctccaaatatagagtaagttatttcttcctcaaatcaatatactatttactaaacactaatcacatgttatgaatcaattaattatttagcttgaaaaagttttagaagagaggaggaagggcaagtcaaagagaatggagctggggaaaaggttagagaagcttttgcgaaaagcctaggaaatagcaaagc

SEQ ID NO: 31413 - DNA, 280 bp, Glycine max
  Clone ID: LIB3051-051-Q1-K1-B12
aggacacatgcgttgatatcatttgcttttctcataatcttaataaatctgggtgtggttaaattaaaaggacctaagtatttcactataatacactcaatcacgcttactctatctatcaatcacttcatacttcaaataattcattatacatgcttaaaaaccttgtacctaacacatatgcccattactttccttaaaatatagaatctcatattacatacttatattattttactatttactaaacactaatctcatctaatgaatcaattaatta

SEQ ID NO: 31414 - DNA, 403 bp, Glycine max
  Clone ID: LIB3051-051-Q1-K1-B3
caaagaatttatccaacttttcatcaaatttactcagaatatggctctcttcggggcattggtggttttcattgggatgaaaaactctattcctagaaagcaacccaagaagaaagctggcaaaacaaaaacatattaattgaaaggacttctcggattggtcctgggtgctcattatacccattttccatttctccaggatttggctttggtctctgtctggttcaaaacgaatgtaccttctgtccgatggattatgtataatttataattattaatatatgtatgctaaatttccgtttgcttgacattagaaactgtctttcgattactaaacttgtatacgaagagggggaaaaatgatcatagcctgttcattcagaactgggtgtcaatttcggtc

SEQ ID NO: 31415 - DNA, 419 bp, Glycine max
  Clone ID: LIB3051-051-Q1-K1-B9
cccacgcgtccgctgttatttattgctaaactaaatatcaatatcaattatcttctggctctttaagtcaaaccataactattccatttctttccaccccacagtttctgaattctgggtgttgagtttcattttctccatttttttttatctcccttggatgtgttattttcaatccaaaagaccatgcaaaaaactatatttgagaatctgaaagagtgactaggtggtctatctgatcttgtgaagtttgtgtttgtgtgaaaggtgtgaggcttattattcagaagagtttgtgtttgttcacataattgaatggggtgtggtgtgtgtcggtggcaatggaagcaagtttggtggaaaagggtagagagagagctggacatgttaaccaaggttggttatgttagaagggtcat

SEQ ID NO: 31416 - DNA, 395 bp, Glycine max
  Clone ID: LIB3051-051-Q1-K1-C4
cccacgcgtccgcttttttctaattatggagagcctcccgcttgagacggcggagaagatcatcctgcggtgggactcgacggcgtcggaggaggcccgcgacaagatgatattctccggcggcggtgaccgcgacgaggccgatctctacctccaagctgtcgacgaaatccagcgctctctctcctccgtctccgtctccgtctcctccgacaaagttaactccgccatccagatcgccatggcccgcttagaagacgagttccgcaacatcctcatctgccacaccaaccccttcgacccctcctccgaagaccaaaccctccaaaccctagactctctttgcaccacctcttccccaaaacaccctctcaccaacgaagaaacaacagaag

SEQ ID NO: 31417 - DNA, 377 bp, Glycine max
  Clone ID: LIB3051-051-Q1-K1-C5
cccacgcgtccggttgtccatagggggtagtttcgggaaacacacggtggagaagcgcgcaccggattccgaagcgcgtgtttcaaattcggatagtcgcgatggaatgcgcgtggtggtggagccgagcgacaagcacgacattcaggcgttaaggagaatggaggcgaaaaagaagacagagcagaagagggagcgcgtgagggaaccgtccgagcccgaattgaaacgggatttcaagagggagaaaacagaatacgggaacggcgttagtggcgcgtggaatgcgacgactacgcctgtttgacctgcaccaattcccgacggtgcagtacttgccgttgaataacgggtctccgttaccgtgctgggtcgga

SEQ ID NO: 31418 - DNA, 235 bp, Glycine max
  Clone ID: LIB3051-051-Q1-K1-C6
atatataaatatatagataaactgtgatcgatgaaggcaagactctgctaacaggcggcgtccagattgcggggggcgtgtttcaaattccgatagtctagatggaatgcgcgttgtggtggagccgagcgacaggcacgacattcaggcgttaaggagaatggaggcgaagaagatgacagagttaaacagggagcgcgtgagggaaccgtccgagcccgatttgatacggaat

SEQ ID NO: 31419 - DNA, 434 bp, Glycine max
  Clone ID: LIB3051-051-Q1-K1-C7
ctatctcacttcttagttctttgtggctctttccatgatggcctctcctacatctccgagagttctcttcttgagtctctttgtaactctttccatgattttacatttgagttcagccaggaagttgtctgagtcagacccccaattgcagttccaataccacagaggccctctcctcacaggcaaaatctccgtaaacctaatttggtacggtaagttcaaaccttctcagaaagccattgttgctgatttcatcacctctctctcctcttccaaacccctcaccgcccaaccatccggtgccacgtggtggaaagccaccgacaaatactacaaaaactcgttccccaaacttgcactctccctagggtcccaaatcgttgatgaaaactactctctaggaaaatcactcaccaccaaccaaatcttaaaac

SEQ ID NO: 31420 - DNA, 341 bp, Glycine max
  Clone ID: LIB3051-051-Q1-K1-C9
cccacgcgtccgcccacgcgtccggcagaaagcacggtgtgggaaagtgaacaatgggcaaggcatcttgttttaaaaagaataattgatcatgtacttagtcggcatctttctctatccaaggaaaatattgtagttgttgtggatcaacttgatttctctttgcttcacggagctggagatcctatatcatactctggaagtttgcttggggcatttgatgttttatcaaagcgtttgcgtcttattgaagacctccctttgaaggtgtctagtgtacagcctttagactctgctttcaagtttacatcagtcttccctcctgaacctcatcttctagc

SEQ ID NO: 31421 - DNA, 288 bp, Glycine max
  Clone ID: LIB3051-051-Q1-K1-D1
gcggaaaaatgagtgccctcatattgtgagttcgagcaccagggaaaaatactagcatggacgtatggataaggaccttggtttaaagaatgttagacatttcatattggatgaatgcgacaagatgctggaatcactggatatgaggaaagatgttcaagacattttcaagatgactccccatgataagcaagttatgatgttctcagcaacactcagcaaggaaattcgcccagtctgcaagaaatttatgcaagatgctatggaaatttatgttaatgataaggc

SEQ ID NO: 31422 - DNA, 336 bp, Glycine max
  Clone ID: LIB3051-051-Q1-K1-D3
tctttctctctcactcactttctttctctgtacaacttggaagctttctctctctaaaggcggcaaggtcctccaccaccagcacctccaatctccctctttcacacagagagagatactgtgtgtgagaccagttttcggtttatggattccttttctcttctacaattccaagtatctattcttgggtcgaacaagttttgggcttttggtggtaatgtggtgggttgagtgattccctcttgttgcatagctatggctacagattcgtcttttgagggccttgcacttgaaccttctaagtgcagtaaattgagtatggaagaaaaaagagaa

SEQ ID NO: 31423 - DNA, 379 bp, Glycine max
  Clone ID: LIB3051-051-Q1-K1-D5
gaaaaatgagtgccctcatattgttgttggaacaccgggaagaatactagcattgactagggataaggacctttctttaaagaatgttagacatttcatattggatgaatgcgacaagatgctggaatcactggatatgaggaaagatgttcaagacattttcaagatgactccccatgataagcaagttatgatgttctcagcaacactcagcaaggaaattcgcccagtctgcaagaaatttatgcaagatcctatggaaatttatgttgatgatgaggccaagttgacccttcacgggcttgtgcagcactacatcaaattgaaagaggaagaaaaaaaccggaagttgaatgatcttcttgatgcactggacttt

SEQ ID NO: 31424 - DNA, 439 bp, Glycine max
  unsure (1)..(439): unsure at all n locations
  Clone ID: LIB3051-051-Q1-K1-D6
ctagtagtagtgtgtaatacacttctcatttcccttcaatttaacccctttttttctaaggcccgtgcttcttcttttagctaaaagctactcattttcagtttcaaaggagatgctttcacagaggaaaagtagaaagcatccatcgaaagaaaataatatcaaaatatatattctcaaaaattaaaacaccgttttcaggagaataaacataatctatgcgacatcactagttacttgctcttcttccttttgcaaaagaaaaaagggtgcccagctcctcaacgttgattcttgcagaatctaattttcaagattntatacanaactgttatttatgtatctaatcttaatcaactacaactaaacaaccaattgttttgtttttcattagggtttgcagacattcaggtcatattttccacaacattgtttggaa

SEQ ID NO: 31425 - DNA, 107 bp, Glycine max
  Clone ID: LIB3051-051-Q1-K1-D7
tcggatatgaattgaccatgcgtgtacttacatatattgcgtttattcatgtatattgttcatattgaatttgttgccttatgttttcaataatatcagattctttt

SEQ ID NO: 31426 - DNA, 402 bp, Glycine max
  Clone ID: LIB3051-051-Q1-K1-D9
cccacgcgtccgattctcagagttttgtgttttgttaatttgaaagggagttggtcaatatgcacatatcctatcagttgtatgcattcttatcctgcattagaatatccatatcctaaattcttctaaaatttgcgtatggctctgtttgtttaaagctttgtttagcaatggagcataagcttcaagtctttatttatgcttttaaccaacttttgtgttctatttctttgcctttaagaaaaatttgggtgtcatttccttataatccttacgtggggaatacaaccaattgactgtcattaattggaagtaaaaaaaaactgtggattactgaatttgctttggttgttttcatattttaacaagtagctcatgtcaatgcttgcaaatttttctttc

SEQ ID NO: 31427 - DNA, 327 bp, Glycine max
  unsure (1)..(327): unsure at all n locations
  Clone ID: LIB3051-051-Q1-K1-E1
gccagcgtccgccacgcgtncgccagccttccggcgtctgtaattgtaattgctgatcctgaagctgacctcaaaccctaactgccgcttggctgaaccgcatccgttagtatctcggtatgaataagtgagaatcccaaggaatccgatcgaatcatctcgacgaggaagcaaacaccggctatagttatgtacaaagagcgaggaggcgtcagatccaaatcggaggtaactttcgttgatcgggaagcgaatcaatggccgtcctcgataaacagctcgaacgatccctggcgtccacattcagagccgccggcgccattaacg

SEQ ID NO: 31428 - DNA, 408 bp, Glycine max
  unsure (1)..(408): unsure at all n locations
  Clone ID: LIB3051-051-Q1-K1-E3
tctcttctccgttgcaacggagtcttcctcttccccttacctgcccaacccagacgcggccgcatccttcccaaattctgtctcccccaatccccaaatcctaaaccggcacgcctcctgacggtgcgcgccgaggtgaaagagacctncttccgcggcggcaccaacaccaccaccacttcctccgacgacaagatccgcgaaatccttcgcaaccgcgactacgacaagaaattcgggttcagcgtggacatcgagtctttgacaatcccaaaagggctctcgaaagaaaccatncgtctgatctcgtacctgaaagaggaaccccaatgggatgctcggattccggctcaaggccttcgaaaaatcctgtccatgaaggaacccagctggtctgattacacttac

SEQ ID NO: 31429 - DNA, 418 bp, Glycine max
  unsure (1)..(418): unsure at all n locations
  Clone ID: LIB3051-051-Q1-K1-E6
gtttagtcatatggggaacaacctctcctgtttttttgaaaatgttgggtgaattggcaaatatgattaataagctggatgaattatgtcagggagtttggcaaatctcggggttggcagctttaggttatgattgctgaacatttctgatccaatatggctatcttatataacaatttgacatgatataatttaccagttacctgaattatggaatgaaatttagttatctgtatatattatgactttcttatttgttggtcgtcctgttgaagctgagggagtacgttgatgacacagaggattacatcaacatcatgctggatgacaaacagaaccatctnctccaaatgggagtcatgttgaccacagcaactctggtagtgagtgccttttgtggtgtggcccgtatttttgg

SEQ ID NO: 31430 - DNA, 425 bp, Glycine max
  Clone ID: LIB3051-051-Q1-K1-E7
cctactactccacgattagtgagagcaaagctttttatgtttttcggatttgcattgagatattaccatataatatcgcggaaaaggaaaaaatggaggcacccattatgttaccccttgaaaggacttcgtcaattgaaagagagcccaggactcttaatatcaaccaaatccaatccgctagggagttagcaatatatatattgaacacaaagaccatagaagaagcgtccagaattttcacggaggggttgcagccagtggttagtgctgcttgctgcatgagatccggcacagcagtggacatggatttgggtgaagaacttgaagtgttgaactccaaagacgcaacaacacaagtagccccagcagcagcattcagagacatagcatctgcacctttctagaacaatttgaacaactca

SEQ ID NO: 31431 - DNA, 404 bp, Glycine max
  Clone ID: LIB3051-051-Q1-K1-E8
cccacgcgtccgggcaattccaaagcttagtgtacatgggatgacttctgcagtcaaagatctgctaaatctggctccattagataaggtgacagtttaagcaatccaaataagtgttcactgagaaatgagaatatcatttttcagataaatgtaccaaggtctaagaagaaaaaaatattcatgtggtatatgtaaataatattagaagttcactactgtatttcccctgctacaggtatactgattgctgagattgaaatttaaatataaattagttatgtatcggatttgaactctctaatctccatataccagttgatatggcatgtctcaatgactaaattttaaagtcaaaatgtaaaaaaataaaaaaattaccattttcttaaaattcccttact

SEQ ID NO: 31432 - DNA, 369 bp, Glycine max
  unsure (1)..(369): unsure at all n locations
  Clone ID: LIB3051-051-Q1-K1-E9
gttatgctaaaatagtttttatccatagaaaattctagaagaatacggaaattggttatattccaaatatacccaacaagggagactatacaaggaatcctttgaaaaacgatggccctccttgagccatgaaagtagtcagataaattttgagaccgaccaattgctaaagaaagtggatcaagctggcagccaggtgattgacaatttcagcagcaatgcagtttctaagtcatttgagcaagaagtacgggaaatggtgtggctgggttatctgcttcgctactgacatctgtgctggaaaccaccttggacgatcttcttgctcttggcatttgntctgctggcgggtatctagctatatcaact

SEQ ID NO: 31433 - DNA, 272 bp, Glycine max
  Clone ID: LIB3051-051-Q1-K1-F1
cgaccattaccaacgtaccaatcttaatgcttgtttttctcatttgtcccaaacaaagttagtgtatgtggaacacttgttcgacacccccgaattcccacctgcagattctccccatcaattgtcagcatagtgattgtggaagctcaacagagggattggtactgtagatagggctaggagtccctgaaatgtatatgcctgtggctacctttgccacgctgcgcggcggattgcctactgacagtggggactctggtgaggcattagac

SEQ ID NO: 31434 - DNA, 412 bp, Glycine max
  unsure (1)..(412): unsure at all n locations
  Clone ID: LIB3051-051-Q1-K1-F10
cccacgcgtccgtaacagtcaaccacttaatccaacctgtttcaatttactaagcgagaatcaacttagggttgtcaatacgtgattaggcaccacatacaccagttagcccttcgtccattaagcatgaacgcaagttaggctcagaggcaattaatcgaacacgaagcgtgcactgattaatattcacgaaattgggataactggtgaagggaaaactgccaggaacccacattacaagcgaaacctcaaagagagttgggcttcgtcatcaaaaggaaacaacaccagaaaatctagccttccatggattcaaacagaaaacgcanatgaaacatganacagaaacatagatgaacaggaacctaaatgaacagaaacgtaaatgaaagtagaagaagaagcacaaatg

SEQ ID NO: 31435 - DNA, 331 bp, Glycine max
  Clone ID: LIB3051-051-Q1-K1-F2
ggcacgcgtacgggtataatataaatttcacccttctctgtgactcactctgtgacgtgcagcgcacactgagagacacacagtgtgcagcagcagcagcaggagcagcagctggagatgaagatggctctgacactgtgggagacattgaaggaggacatagttgtctacacggggatcttcttgaccatcttgttcatgattctagccctgttcctagccctatactacgtcgttcctgggctctaccactgttacgaccacggctacagcaacttgtagcgcgacttggagcctctgatagagcctgtgcaaatcggcgatgagatcg

SEQ ID NO: 31436 - DNA, 421 bp, Glycine max
  Clone ID: LIB3051-051-Q1-K1-F7
ggtttagagagaagaaaacgttggtcgtagaacattaccggaaagagaatctttgtggattccagaaatgtctagcatcgcttcctcacaccaaagcttcctcaccaacgcccttattccactaacgcacaacccaaagttcatgaccactgttactttcccttcttcactcaaaactgtctcttgcagttccccacaacatgaacagcaacaatctccaaggaagaagaatgagaacaagttagcaaagttggcaatagttgcacttgctgctggtgtgttaacacttggggcaagtcatgatgcattagccgccaagactggtggtagaatcgggggccaggccttcaagtcagcagctccgcgctgctcaccaagaatcaacaattgcagagccaatatctatattaatcctcgagtg

SEQ ID NO: 31437 - DNA, 274 bp, Glycine max
  Clone ID: LIB3051-051-Q1-K1-F8
aaacaacaaaacaacagaaattttttctgcctgcttaacttctttggtacatctgaattcatactttgagttacaatggtgtttagttttttctgcattgactaaagagaaaaggttaattggccatgaacagaggaagaaaacagggaatttgtataaaaaaaaaaaaaaaaaaaaaaaaaaaaaaaaaaaaaaaaaaaaaaaaaaaaaaaaaaaaaaaaaaaaaaagaaataaaaacataaaaacaaaaaaagggaatccttacaattgctt

SEQ ID NO: 31438 - DNA, 367 bp, Glycine max
  Clone ID: LIB3051-051-Q1-K1-F9
tgtaaccctatatcctctcttttctgttacgaataaacaacacttcttaaccgtgtgatctaagccatcccatatccttttgttttgttctcttcagtctgtttgcgagtgcgagtgaaaaaaaatgggtgggggaggagctatgaggtcggcggcgaagatagccggaattggcgtgtccaaggcggcgctccggccttcggcgctccctacggagcagacggtccgcaacgcgtcgcgaccaacggcggtctccggagtgtcgtcgcagtcggcgaaatccgcggaggtggcgccgctgcacacggcagctgcctgggacgattgggacttcgccgaggatggcgaattggtcgtgccgaggatg

SEQ ID NO: 31439 - DNA, 375 bp, Glycine max
  Clone ID: LIB3051-051-Q1-K1-G11
ctagtgttctataagttcacggtcagttctgaaaaatgggttccaaggttttgcttggtgtagttatgttcatagcggctatacttctgatctctgctgaagttgcacccaatgaatacgaaaattttaacaaaaaagatgggaagcatgctccaaatgggttatatgatagcaaatggggttaccgtggttgggtggtccttggtatggcggctggggtggcccttaatatggtggcagctggggtggcccttaatatggcggtggatggggcggtccctggcgtggtggtggcggaagtggcttgtgaggttggcgttgacctaatggcaacccttacaacttagaagaaaacttggtaaagcttctttaccg

SEQ ID NO: 31440 - DNA, 349 bp, Glycine max
  Clone ID: LIB3051-051-Q1-K1-G12
agagaactcgatcttcttactccattaacattttcaatctttttcacctaacgcaccgtgtactttccattcctgtggtccttcgtcccattctcgaattggcgtgtgcctcttgcaatcccccaaaggttttttgaagcagaagaatggacttctttactagagacataaatgaggattctatgcttagatgcccattcttgaggaacatcaatgagcctactaacttctcattctcttcacctttggctttaccaatgcctgttcgtggagctaaaggtccaatttttgaagatggtgccaattttgatttggcatttaggctttttcacgggagtgatggtgtagt

SEQ ID NO: 31441 - DNA, 408 bp, Glycine max
  Clone ID: LIB3051-051-Q1-K1-G6
gaattttataaaaaggcctacatcttctactccatttgaaaacaattgttttgggaggattctcgttttaatactcttaagctaaacaatttgtttccttgttttctaccatgtaccaaacacgaaagtgaaagaattgatggatgggtacaacatttttggcttctcaaaggtaaacttaattaatcaagtagttgtggaattttgtggaaaaaaaaactaggtaagaatttataattaattttacatgtgtaattctcttttttgaagtttattgttttatctatgtatgtattaaaaggggttgaactgtttttacatagttgcttaaatattgaaattttgataaataattatttaatagatcatagatttgacaaaaacaaatatttattaatcaattttttt

SEQ ID NO: 31442 - DNA, 329 bp, Glycine max
  Clone ID: LIB3051-051-Q1-K1-G7
caaactctttgggaacatggggttatatagaagcagtacgggaaattgagcagcagattcagaaggggacaggcaatgtcaagtttgatgatattgttgttgcttgtggcagtggtggcacaattgctggtctgtcactaggatcgtcattgagtgcattgaaagcaagggtacatgcattctctgtttgtgatgacccagattacttccacaactttgctcaaggcttgcttgatggactcaaggctggcgttagctcaagagatattgtccacattcaaaacgccaagggtcttggctatgcaatgaatacatcggaggagcttaat

SEQ ID NO: 31443 - DNA, 392 bp, Glycine max
  Clone ID: LIB3051-051-Q1-K1-G9
gaaatactcttgtgaccaaccaaggtctcttatttctagacataggaggaggagagaagaattgtttctatttcaaagattcagcaaattaaggagcagaaaaaagtcacatattttgttgttgaattcatcaatatggctaagggaatcagaaacctaagttcgtggatggaggttgccccggcaccaataattttcccaacaaagccttctaattcgcctgctttggagaccatcacagaagaagttgctgaggatgatgaagcttccatgaatacccttctcaagtagtagcaaatgttgcaagatcaattatgaagcctcttttgaagaggcttcagcttatgaagattgaagaggatcaatcaagttgtggaaataatcactagttg

SEQ ID NO: 31444 - DNA, 445 bp, Glycine max
  Clone ID: LIB3051-051-Q1-K1-H1
cagtaatgatcaatacatggaaactattaatgctattacaaattcaccatccttcactgtgcctaacactggggaggtgatggagaagtctgattcattgtcagtagttgattccaaaaggattgaagagcaagcttatcgtttgaagaatgacgttgactttcctccactttcccattgagtgccagtgaaggatggtgaatttgtaatagcattaacagtaatgatcaatacatggaaactattaagactttgcctacctttcagcaggtgctaccaaaagatggcgattttgtaagaatgtctttggtggagtccatggccattcaaattgccgtgatgatgcccccgagaaacatgcgtagtagttttcatcatgttgtgtagctcataatgataatattttcagtagacataggctttgttgaacctaatcctgtcaaaa

SEQ ID NO: 31445 - DNA, 352 bp, Glycine max
  Clone ID: LIB3051-051-Q1-K1-H11
gccacacatacggagagagacctggtagggtcactggaagagacgaaggatatgaggagctcttctggaagcgcgagggtccaacagagggtgcgacgctaatccgcatcagatgctacttctgacgctcctgctaggaaacaagatgtgaagaaagatgtggttcaggatgttgctgataatgttggagatcataaggagttggctgcaaggcgggctgctctacaggagactcgtgtagagtatgatagagggaacgattttgtgagctatttgaagcaccatgccgagctcaaagacgatctggaatcagatacgaatgtggatgccgacgagatagtcaacattctac

SEQ ID NO: 31446 - DNA, 424 bp, Glycine max
  Clone ID: LIB3051-051-Q1-K1-H8
ctaatttgtgtggctaacagtgggtttataacttcttgggctgtttgactagcttcgttcctatcatccctcttcccgtctgcaaacaccttgccctcttcttgggctgttggatgatgggctagtcaggctgcccaataagctgaacatgctgaggctaatgttgacaatcaagtcctggatcagatcaaatgcctcagaatggagtcaaatgaaataggttcaaaccttaatggatgaaggattatgaatatgaagtactttagcctgttttagtggtgaatttggaataaaagatatggtctgcgaggagttgttggagtgagtcctgaaaggagtttgttagggtggttattttgtattgttgtattgtgttgtttgcttgcctgtaagttgtatttatcattagaggggttattcttat

SEQ ID NO: 31447 - DNA, 389 bp, Glycine max
  Clone ID: LIB3051-051-Q1-K1-H9
gtcggaacataaggcggggaagagttagtttcttctctcttcgatggaaggcggggaagaggttctcccttcggccactgccacctccgccgccaccggcaatcccaccgcttcgcctcctccgctcgctgatcttgtcggtgctcccgatctcgctgctgcctcggacgacgtcgttacccaacctgaaattcacgcgctgatttcagacgaagagcacgatcacgagcatgaacatgacgatgacctcgagcacgagcaccaaccagcatgagcattaaccaccaccacgaggaccgcgatgatcacgccgctgtggccgctgtctccttggaagatctcaaactcaagatcattaagcaagcggagtattatttcagcgatgaaaa

SEQ ID NO: 31448 - DNA, 270 bp, Glycine max
  Clone ID: LIB3051-052-Q1-K1-A12
gctgctcataccacaaccatgctttatgttattcacacccacctcacacggtcacatcatgtttggagcactcaaaacaacgcttgtgctcctctctcccttctctaccaccacaacagaaacacaaggtgcaccaccttcttcttcgcttcaactcggaccctcaacctatggtttcgcatgtctggtactcgcgttcagaagaacctcacgagtacctcgtactctcgagagcccctaggcattcaattcggctaacttctgacggct

SEQ ID NO: 31449 - DNA, 429 bp, Glycine max
  Clone ID: LIB3051-052-Q1-K1-B10
ggatattccattttcccctttctgcttacgcttcacttcccagatctcgtaagtcggatcggtgaatctaccacaccatgcaccgaaccactgcataaccgcaccagatccatcccaacctcgacatggtctttggcaagaacaacaaccaccaccttcgaatctcctcctccctccaagatctctcctactatcgccatgacctcgaacatggccatggccccactcccgacaacaacatcaacaacaccaacttcacctcctccagtttctccaaaaccaaaccggttcaactgcccaatccggttcgccgcaaacacctcttcctcttcctcttcctgatcctcatcctctaccttttcctgctacttctctgtttgctctacactctatactgctaaccactgcctcccccaaatcctacgtcgg

SEQ ID NO: 31450 - DNA, 94 bp, Glycine max
  Clone ID: LIB3051-052-Q1-K1-C10
tcgggaacattgataatattttataataatttgtgagacagatagatcttatgggttagtacatatgaggtaatgaggatcattcactctatta

SEQ ID NO: 31451 - DNA, 124 bp, Glycine max
  Clone ID: LIB3051-052-Q1-K1-C12
cgcacgcgtccggttatttgataaggtgccatatgttccggctatactgtaggcggagagttaaattgaaaggatgccaaccatatcttggccatggatcccacaagtgcacattccagagaaa

SEQ ID NO: 31452 - DNA, 130 bp, Glycine max
  Clone ID: LIB3051-052-Q1-K1-D11
ggcactcttccgctcacgcttccgcataacctcactcatcctctactttcgtcttgttccatttcaagatcgccggacaaatcttgcggtagaacacatattccatgcaccgctcttctgcgccaacaat

SEQ ID NO: 31453 - DNA, 208 bp, Glycine max
  unsure (1)..(208): unsure at all n locations
  Clone ID: LIB3051-052-Q1-K1-D12
cgcacgcgtccgcttactgttacngtttggatgagtatccgaaggtgtacgaggagtgtaggttgaagtgccagaattgtccgatggggtttcatgcgatggttgtacgttctccgccaaaagatggttcttttggctcgttttgcagatggggttattttacctgtgggtttttcttgggattttaaggacattaactagtcttttt

SEQ ID NO: 31454 - DNA, 179 bp, Glycine max
  unsure (1)..(179): unsure at all n locations
  Clone ID: LIB3051-052-Q1-K1-E11
aacactcactcgcactgtcttgnacttcatcaacacgagtgagtaaagggggaccgtccaaaacgaaacaaaccaaaccagcacaataaaaccaacaaaaatacatacaagacactcataacaacccataaaacaaacatacaaatagaaacaaccccaacaaaaaaaatagatgacac

SEQ ID NO: 31455 - DNA, 217 bp, Glycine max
  Clone ID: LIB3051-052-Q1-K1-F10
gttggtgacaccattaagtaagggatagcactgcgttctccagtcctggttgatggaggtgctataagtgtggttatcctgaccttagaagctgtatattgttgtctacatcataatgtgtgctctttgttctgtagctaccaaagataaaaccattcaaaaagcatcttccattgaaatccatcatatgaatattcaacattcttctacatgtaac

SEQ ID NO: 31456 - DNA, 142 bp, Glycine max
  Clone ID: LIB3051-052-Q1-K1-G11
gagacacgcacggctcagctcgcgcatgaactaccaacccaacaagcgatcaacaggaccggacaacacgcatctaggcggaccaaacaccctcagccagccaccagaaaaaaagctcccagtaaggctcaaaccacccaca

SEQ ID NO: 31457 - DNA, 180 bp, Glycine max
  Clone ID: LIB3051-052-Q1-K1-G12
gggcgatgcaagctcacacggacaggtcggctcccggccccccagaaagcaccaggactggggcaaagcgcacccagcgcggccgatcggagcgcacacgcccgctcgggaagacagacagcaacagcgcgaggccgctgacctggaacccaaggacagcgagagggcccgcgccccaac

SEQ ID NO: 31458 - DNA, 169 bp, Glycine max
  Clone ID: LIB3051-052-Q1-K1-H11
gtgctctctactcttttcttcctaacatgcgattctctcttctcacgcatagaggcgctctcgtaaacagaccgaacaacccgcaacagaggctccgacccaaatcggacgagtcgactccaactccgaacacttacaggtgcttgtgcgccaatcgcatttcactacc

SEQ ID NO: 31459 - DNA, 382 bp, Glycine max
  Clone ID: LIB3051-052-Q1-K1-H12
caggaagaaagaagtgcaatggacattggaatctatggctatcctacaccagcagggaaagggatagagtcttactatgatgtgccagagggagtggatattcggggaagatatgatgcagagtttgcaaaaatcctcacaaaagatgctttgaaattcgttgctgacttgcaacgtgagttcaggaaccatatcaagtatgcattaaagtgcagaagagaagcaaagaagaagtacaatgaaggggctcttccagagtgtgatcctgccacaaggtacatcagagagcaagagtgggtgtgtgcacctgttccaccagcagttgctgatagaaaagttgaaatcactggccctgtggatagaaagatggtcatcaatgctc

SEQ ID NO: 31460 - DNA, 341 bp, Glycine max
  unsure (1)..(341): unsure at all n locations
  Clone ID: LIB3051-053-Q1-K2-A4
aaggtgacatatacgacggtgttcgagctcagttccctctctcattcgggaagcaatcgaagcctcaaacccctcttgaagccatccacaatgcgacacgtcgttccaattccaatcccaaaacagccaacgaccttccttctgtctcctcctcttccagggattggctcaattccctccgccctcccaaaacccctactcctcctcctccgctgccgccgccagatcacgacgacggcccaatggtgggaccgccgccgnctccgcccacagctgccgacgaagaagaagacgacgacgacgccgagatgattgngcccgccccgccttcgncgatcgcg

SEQ ID NO: 31461 - DNA, 287 bp, Glycine max
  Clone ID: LIB3051-053-Q1-K2-A6
gaaagaatcaagcttagtcaaagtgtctgtgactgtcacacacagtctttaagatctggaagcgcttctcacttgcccacaacaacaattcctctcaatttcaaaattttcagcttcaaaataataaaaccctaatagaggggttgcaagcaaactgcgaagcgcaaatatgtggacggtctcgatgtgtctgatggtgagcttattcgctcgcattgaatcgctgtctgagacggcgtacgacgtcgaatgcgtctacgagtacgtgctttacaagggcgacaccg

SEQ ID NO: 31462 - DNA, 413 bp, Glycine max
  Clone ID: LIB3051-053-Q1-K2-B3
cccacgcgtgcgaatacgcatagaaagtgtccaagatagacttcccgctatagatcctgtcaagggcctttataagggtctctatgaatgcctatatagttcataatatatttgatgacgtagtatgagacttaatattgcgaagaataatggcttcgatgaaggcctctatgattgcctcactgcttctgtatatatagatgaatgatagactcagaatatgtggggaaaattgactacggtgtggactacttattgagctagatatcgagctatatcggctgtgattacgaattgagcttaataagatgcatataaggttgtatccatgaaaattcccatttgaaacctaacttggcctttgccattgactaattctaatggcttcctatctatcctccaatctatttctc

SEQ ID NO: 31463 - DNA, 394 bp, Glycine max
  Clone ID: LIB3051-053-Q1-K2-B6
caattccaaattttcagtttcttcctcgcttttctgcaaaatcatctaaatccggttctgatcctgaatcatcagtttttcccttgaaagatgggaggtggcaaggacaaacacaatgaagaagagaaaggagttttctcacatctggctcatggagtagctcaagctgctcatggttaccctacaggggcataccctccacctcctggggcataccctccttaccaagggtacccacctgctcatggctacccttcacaaggtggctattctccggctggttatccacctgctggctattcttctgctgctggtggttacccacctgctggttacccttcacatggttatcccggatcatttgctccacatggatctcatgcgcctgggcacg

SEQ ID NO: 31464 - DNA, 415 bp, Glycine max
  Clone ID: LIB3051-053-Q1-K2-B9
ttggatggaactggtcttcagttcaagtctgtgatgacagggaagtatctttgtgctgagtccggaggaggaacaatcctagttgcaaattgcacagatgcttcgggttgggaaacatttagattgtggaggataaacgaggatactttcagattgagggtgtttaacaaacagtttgttgggttagatgggattaacgttgttgctgtttccaatatttgcacttattctgagacatttcatatagttaaggaaagtgacaattcaagtcgaattcgaatcaaagcttctaatggatacttcttgcaagctaagacccaggagctggtgactgcagatgtttcagaggtgagagaatgggaagatgatgacccaaccatttttgtgatgacaatagctgcaaggttgcaagggg

SEQ ID NO: 31465 - DNA, 406 bp, Glycine max
  Clone ID: LIB3051-053-Q1-K2-C12
gccacacttaaaaggaaccgctcactcaccaaggatgaaattgatgcttactggaaatgaaagaagaagatagaggaagaacaccttagagctatttccaacttgtcagagactattcaggctagcaaaagcacagaacctgagaagaagttgcagaagtcaatgaccatgcctgtgacccgtgcacgggactacttaaatatgggcatagacacaagtttggagcatcttattaagaaaaatggctggtggaccaagagtagctgggcatttctgaatgagcctccagtgactgaagctgtgtccaataagtacaaatcgcagtttcacgttacaagcatgggatcatcgatcaaaatttaacccccgagatggaaatagtgcttgatatatatatgaatctaac

SEQ ID NO: 31466 - DNA, 443 bp, Glycine max
  Clone ID: LIB3051-053-Q1-K2-C4
cccacgcgtccgctcggctcagcacagctaccatcgaaaactagccaaggctctgtctgtttccctttttccttttgcttcaacaacatcgtcgtcacaaatctagagacagagagagagagagaaaaaaaaaactgttgaattgaagatgaagatcactgtcatgactgctgatgaacaaatcatcacgttggatgtggatccccacgaatctgtggaaaacgtcaaagcattgctcgaggttgagacaagtgtggctcttcaacaacagcagcttctgtttaatgggaaagaagttaggaattctgagaagttgagcgctcttggtgttaaagatgatgatttgctgatgatggtatctggtgctggcgctggtgctgctgcttctagtggatctaccaatgatttgagcttaaatactgatggatctgctgtcacccctg

SEQ ID NO: 31467 - DNA, 212 bp, Glycine max
  Clone ID: LIB3051-053-Q1-K2-C6
cttacgcttgcgtcatggctgctaccatatcgaacctttccgatctgaattaggttagggttagactctagggtttacaacatcagcataatccatcgtcacttcaatctactataattgagaagatagctgaacactttacagccatggttactgctcgtctataccgatgacaatatcattccatttgatgccacatctcactaatggaa

SEQ ID NO: 31468 - DNA, 208 bp, Glycine max
  Clone ID: LIB3051-053-Q1-K2-C7
gtcacacgttcgctgagaagtccgaggacacgctgctctatgccatccattggagtggggagacagtctgtgcatgagattagtggatgcaggcgtgagatttgctgaatcgacagggtgctggtactctgggacctttaatttacaacaactggatgctgttgtacaagtatacggcgtaaagccaatgatttgaggtatttaaacg

SEQ ID NO: 31469 - DNA, 317 bp, Glycine max
  Clone ID: LIB3051-053-Q1-K2-D12
accaagtcaagttctcactttgaagagaaaataacatcgtaaagatgtctgcatcaggaggcagaaggaagccaagaggaagagaataaccttcttgacaaagggccccttttaatcttaaagtcaagggccaaaatttaactcaaatggtttcctggttgattgaaagagacttccagctgaacagacccctgatgagcttgagatggacgaaggggattagatatgatgcgcatgctggaccaaaacggaggtggacacaagtttctttaaatgtatgatgatcatattcattaaaatgcttgataaaacgcatg

SEQ ID NO: 31470 - DNA, 452 bp, Glycine max
  unsure (1)..(452): unsure at all n locations
  Clone ID: LIB3051-053-Q1-K2-D2
gtgttaccagagcagaagaaacaaaaagaagttgatagctggaaaaatgtagatagagaagctagagagaggagaaaagaaagggatgctgatttagaaggggataggtctgataaacgtaccaagggccttgacaaggaatcaaacgatgggtgtgctgatgtaaaaggggtgatggagaaagagagggaagtctataattatagcagtcagcaccgtaagaggatacaacgatctaggggaagccctcaggcgccgaaccgggagtctnttttcagatcccatccncaagacaaagacgggtctcaaggtaaagtagaagtttcttctggtggttataaagttggcgaaagcatgcaagaactgataaagttgtggaaggacatgaatcatctcaatctgaaatggaggaaaaatgtgaaagctctaataatggtcccactctggaaatt

SEQ ID NO: 31471 - DNA, 421 bp, Glycine max
  Clone ID: LIB3051-053-Q1-K2-D4
tctctcactgcaattgcaaagcaacaacattccttttctccacttcgaagcaacgcaacgagtctgtctttgcgaggttgaagtcgtcgtctttcgatatccggtggtgcatccctctcttcttcaattcgttttgtgtttgtgtctccatttgtttccttcttgaattactagaattcaccttcatatagttctaattttagtttattggttgtttttttttgttaatttattaatttcatgcggaaaagcctacttcatttctcaatcgcggatccgtactcagactggttaatcaatgctagggtttagcttgtgaatctttgacttctctctggatgagtccgatagttattattattatggtgaaacagtgaacctgaatactttctggtacttctaaacatcagcaattttactc

SEQ ID NO: 31472 - DNA, 338 bp, Glycine max
  Clone ID: LIB3051-053-Q1-K2-D6
gagaaaatagcgacgcggaagcacgctcgtcttcacgatccggcgcggcgtgtcctgcggttccgctctccgacgagtctgcgcagggtaaagaatcgcgcgattcgtctggaaatcgagattctagcacgattcatcccagatatagagattcaaccacgattctggaacaaaaacgaaacaacctccgattcgtatcggtagcagctggaatcgtatcgaatcgtgcgatacgtatcgtgaatcgtacgatactaactaccgtgctaccgggtgctttgctcttcaattctgcagaaattcagattggtcaattaaattaaaggctttcttttcac

SEQ ID NO: 31473 - DNA, 222 bp, Glycine max
  Clone ID: LIB3051-053-Q1-K2-D7
accacgcttccggtaattatgcatccatttcgctgcatgactgggtctagagcgaggaggataaaatgtcgggcttgcttcgaagcgcttgcaacactgatcaggtcacagctacaacatcctactttctaaaccttgcgcctgcacactataactgctgctacagactatgatgaactattcctaggactagatatccttaactatatcttttcgaatatg

SEQ ID NO: 31474 - DNA, 286 bp, Glycine max
  Clone ID: LIB3051-053-Q1-K2-D8
cccacgcgttcgcccacgcgtccgcacacgcgtgcggtgaactgaatggtcggtgttgggattgattatgagcatgaatactttcctagcatgcatgcgtgcttctgattctacattataccaatactctgccaccttgacactaacacaactctattatcttttagatctaatgcaattacaaagcgtctgacatagcattggtagcatattgctccatctagccatgcagcagatgaatgacaccaaaccatacttgtcaactaaaccgctcattctcatgtca

SEQ ID NO: 31475 - DNA, 444 bp, Glycine max
  Clone ID: LIB3051-053-Q1-K2-E1
tccacgattagtgagagcaaagctttttatgtttttcggatttgcattgagatattacgatataatatcgcggaaaaggaaaaaatggaggcacccattatgttaccccttgaaaggacttcgtcaattgaaagagagcccaggactcttaatatcaaccaaatccaatccgctaggggtttaatgtttggtggatttaattaatttacaggagttagcaatatatatattgaacacaaagaccatagaagaagcgtccagaattttcacggaggggttgcagccagtggttagtgctgcttgctgcatgagatccggcacaacaatggacatggatttgggtgaagaacttgaagtgttgaactccaaagacgcaacatcacaagtagccccagcaacatcattcaaagacatagcatctgcacctttctagaacaatttgac

SEQ ID NO: 31476 - DNA, 419 bp, Glycine max
  unsure (1)..(419): unsure at all n locations
  Clone ID: LIB3051-053-Q1-K2-E12
cccacgcgtacgcccacgcgtccggcctatctgaacaggaattcacatattgaaatagcgaaagaaaaaaaaagggggggtttcggattaaggtgcaaaggaagcagcgatggaatttgccaagcccgcaacgattgggcgcaacaatgagacaccggcgattcatacggcggtgagaatggcatgcgatggccgtgaatggcgatgtcatttttgtggcctcgacagaggagaagaattgtacggtggtgaagacggaataacagaaaggttagtgtggatgggttatgtctgatggatagcggattcgcgatttgattttcgcggtggtagttcagagagagtttgtctatggcgacgtggtgcgccggtggctcactaactacangactaggtcctctttttctctcaattctcta

SEQ ID NO: 31477 - DNA, 434 bp, Glycine max
  Clone ID: LIB3051-053-Q1-K2-E3
ggatcatctaattaaaccagctttcatcagggtgtgggtgatttattgtaagctttttggtattatcttcgattgtgtttacacgtgtgtgttaaaggtggcgaatcctaaagagaagggaaatgaggttgatgacaataaggaattgatattattccatgaagggataatgaacaaccctacattgtcaaggctatttccgggtttgaatagggagagggagatgtctgctatggtctcagctttgacccacgtggtctccggagaggtgccaataaccggtgattcttcttcttcttcttctttggttcttcatcatcaacctcatgatgatactgttattgttacaccaaccatgccttcttcttcttcttcatctacttatgttgttggcacctcttctctcaagagaagtagggaaaatgatacatata

SEQ ID NO: 31478 - DNA, 55 bp, Glycine max
  Clone ID: LIB3051-053-Q1-K2-E6
gacactcgtccatggtgtatgcatcaatatcgttaatcagatctactaattctga

SEQ ID NO: 31479 - DNA, 162 bp, Glycine max
  Clone ID: LIB3051-053-Q1-K2-E7
tatactcgtaccagctctcatcatcacattcgtgatttactgcaccctttccgggtattggattcttattgaggctacacgatgtgtagttaaatgcgtcaaatacctatagagaaacgaaatgccgttagtcacagtcatgaattgatattaatcccatga

SEQ ID NO: 31480 - DNA, 209 bp, Glycine max
  Clone ID: LIB3051-053-Q1-K2-E9
atcggtgaatatttcaaagtttgaaacatctgagataaagcttttgaagactgactatcaggagtatctccagctaaaagctgtcaaggaatctcaaacatcatctgctataagtggtcataactacactgcccgcatttcttaatccggaatggggtaccgggttgaccattggcctaagaattggattttaagggctttaataactt

SEQ ID NO: 31481 - DNA, 382 bp, Glycine max
  Clone ID: LIB3051-053-Q1-K2-F10
gaagaaatggcgagtagcagcagcaacactccgaaggaaagcgttgttgtcgactgcggaaggcgtcgaacctcttgcggctattgcagatcctctcgtcacaatagcatctctcatggcatgtgggcacatagccttactgtggatgactaccaagatcttcttgatcgtggctggagaaggtctggatgttttctttataaaccagagatggaaaggacatgctgcccttcttatacaattcgcttgaaagcaagtgactttgttccttctaaggagcaacttcgtgtatctagacgaatgcaaaggtaaaaaggcaaaagcttgagatccgtttaaacagatccagttttgatccagaagaatttgctttgtacagaag

SEQ ID NO: 31482 - DNA, 240 bp, Glycine max
  Clone ID: LIB3051-053-Q1-K2-F11
tacttctcgttttactttgacggtttctagagagaggaaggttgttatagagagagaaagcgcgctgctgcttcttctgctgctgcttcgacagtgagaagagagagagaagcgctcttctccgtaccgtttctagagagagaaactgatggccggagttaatccgaacggcgtcgccgattttccggcgactccaacgcacggcggacagttcattcagtaccaccatattcggaaacc

SEQ ID NO: 31483 - DNA, 365 bp, Glycine max
  Clone ID: LIB3051-053-Q1-K2-F2
ctctgcaataacaacaccatcaacaaccccttcaagccggcctaaaccccattacccaaaacttggtcttttttctttccttcaacactctctattggatcatcacatattcaatttcattctcttcaaaaattccccttcaaaaaaatttaaaattaaaaaaaagtgctctttttgtgaattttgagccatttgccaccgacagatttcgatcttcttcgtgccaaagttgtaatcttttcgaattttggccaggtgggtcgatctgatttcgctcgaataattgccggttcgattttgatctgaaaaagggaaagagaaaaaaagattgggttatttctgattcaagatattggccctttttg

SEQ ID NO: 31484 - DNA, 241 bp, Glycine max
  Clone ID: LIB3051-053-Q1-K2-F6
ctctgcaatagcttcaccatcaacaacccctgcattctttgctaaaccccattacccaagcctaggtcctctgctcaacttaagcactctctattggatcatcacacattcaatgtcattatattcaaaaatgacacttcagaagcttttatagttgccaaaaaacactcttacagagacttttgaaccatttgtcaccaacagatttcaaacgctttcgtgccaaatttgtaagctgctc

SEQ ID NO: 31485 - DNA, 443 bp, Glycine max
  Clone ID: LIB3051-053-Q1-K2-G1
atcagaatccaagctttgggcttcattttagggattttacatatatttccttgtttaatgtgtgataatcatgaaaaaatatgcaataaccctgatcagaatccaagctttgggcttcattttagggattttacacaattttttccaaaaacatgccaggccctttaaactcaatcacatgatcttagattggattagggaattgtatactcctttgcttgtggtggagggaggaaagataaaaagaatacgtatgagtttaatgaatgatttgttttatcttgactaatttactcaaaattctttccccatgttgtgttgcttgtcatgagcttttagttcatacatcacgaatgatgtgcatgttgtaattgattaatctttattggtagaagagcgatacagttattagatgaatccaaggaaaagtgtagttaacaacc

SEQ ID NO: 31486 - DNA, 320 bp, Glycine max
  Clone ID: LIB3051-053-Q1-K2-G11
accggtcacggcgtccgcgtacacgtccgacgacgcatacggtcacagttgttgatgcagatgctgatgctgacatggatggctaacagatgcaactacatgtgctccaactggctcaggctgcagaagacgctaaggctcttgactaacccgatgaggcatcgggaaaaggatgaggacagatgatgaactatgatagctcttagttcgatggctttcaatgtatcctagaggatcccgatctatttgtacccgacgagaaaggccataagccatatgtacgcaattgatcaggaccatacgcagtctatcaggggcaa

SEQ ID NO: 31487 - DNA, 445 bp, Glycine max
  Clone ID: LIB3051-053-Q1-K2-G12
ggcgattgaagcacagttgtatcccaacaatgctcctccgtttccttttcacgtgtcaagggtagacaaatctccagcagcatatagtcatagtcacaggcaacaacaaccaggtggctggcagatgaatcagaacattcctcttgttcctcccaacttttcttgtttttccaattccaattccaattccaattccaatgtcctccaaaacgccttcaataagaatgttgttcagccttcagcctcatatcctcaatgcttggctattgagtttgatcaacagagggagattgatcaccatatcagatcacataacgaaaaattgaagattttgttgcaagagcaaaggaaacagcatgtggcagagttattgaagaaggtggaatcgaatgctcttcatttgttgagacagaaagatgaagaaatagcgcaggcaacaaagaaa

SEQ ID NO: 31488 - DNA, 337 bp, Glycine max
  Clone ID: LIB3051-053-Q1-K2-G6
cttcactcttacgtctatcgctttcacctctctctctctctctctctctctggctctcgctctcttcgattttgattttgggtttattttttcccccttttcaattctgttcatggtgttgagcgtgtcacggtaattggcggcaagtaaccgtcaattccgataaccctttggtgaaaagcttgaaacttgaggagtttgaagaacagggggtttatcgtttcgtcgtggatgatggcgaacccatctggcaaccatcaagagcacacgcacgtggtgtcatcttctgctccagagacttcaggtgcggctctcgcgatgaagcacaatcctagca

SEQ ID NO: 31489 - DNA, 371 bp, Glycine max
  unsure (1)..(371): unsure at all n locations
  Clone ID: LIB3051-053-Q1-K2-G9
gttgagttgatttctgatcccaaattgagtttgagtttcagccatggtatctgtttctctgctcttattcctatctttctttgccttctttgcaccctctgaatctcacgacaaagtctcgttggaattgtactacgaaagcttatgcccctacagcgccaacttcatcgtgaatcacctcccaaaaatcttcaccccagatcttgccccaatcgttcacctcaaactcgttccttggggcaatgccaaactccgtgccaacgccacctttgactgccagcatgggccatatgagtgcttgctgaacacagttgaagcctgtgcaattcacatctggcctcaactcagcanacattttcctttcatctact

SEQ ID NO: 31490 - DNA, 427 bp, Glycine max
  Clone ID: LIB3051-053-Q1-K2-H10
tctagttcatcatcatcatcatcatcatcatcgaattcccttcagattccaccctgtgagcgagctcgatcggcaatggttgatgttgtgatgttcattgctgttgtttgtgcctgtggctttttgttcttcccttatgtagagtttttggtgacaaagtgttacgaggttattaagggtgttgtgtttttgattaaggaggaggtttctgtggcaccttggatctatatttccatagggttgagtgttgcgtttgctgcattggccacgtgggctgtggtggctttcaccactaggaagtgtgggaatcccagttgcaagggtctgaagaaggctgctgagtttgacattcagttggagactgaggattgtgtgaagaatttggcttctgcgtcgtcgaatgtaacgaaagatggtggttgtggaa

SEQ ID NO: 31491 - DNA, 132 bp, Glycine max
  Clone ID: LIB3051-053-Q1-K2-H11
ctagtatgtagtatattattcacttaaataaagcgcattactatgtgcaatgagtgtgtgtaaatattaacaaaaaaaaaagaacaaaagcagatcatagcaaaaaacataaaacagggcctccgttctaaa

SEQ ID NO: 31492 - DNA, 337 bp, Glycine max
  Clone ID: LIB3051-053-Q1-K2-H2
cccacgcgtccgcaacatcttcaccctcttcaaatgacatgccatgcaagaagaaccttgacaaaggcttaaaccatgcttcaaaatcaaacaacaacaacaacaacaactgttgtttgttttgccattgtggtgcttcctcttcagtttctccaacctccacactcttcggcatgtcgcatttctcgccaccagtatcaccatcctcgtcctcttcaccacctgcttctccattgaaaccccgaagcgtggtttctcctatttctccaatttcctcgttacagtgctgtgaatattaacccttatcacggtgtttgtaagttacaaagacattttc

SEQ ID NO: 31493 - DNA, 100 bp, Glycine max
  Clone ID: LIB3051-053-Q1-K2-H3
cccacgcgtcctaaataaaaaaaaaaaaataaaatttaaaacaattttcaaacttaaaaagaaaaggctataaattaaatttttccaaagaaaaaccaaa

SEQ ID NO: 31494 - DNA, 437 bp, Glycine max
  Clone ID: LIB3051-053-Q1-K2-H6
atctgggcatgttagtcgattagatatgtcttctctaaaaaacttggatacagttgcaggatgctccatggttggtttccttctaaagcatgaaggtctggcccttccaacactacgaatgtgtttggaagcttttacatggacagacggtgaagctgtgactaaaatttcttcatattgctctgcattggtagttcttgcgatagtaacaaatcacgcagaactcattgaatatgtttctagagatctttttacatccattattaaaggtttagcccttgaatcaaatgcaataatcagtgctgatctagttggcatttgtcgtgaaatatttggttacctttgtgatagacacccaactcccaagcaggttttgatgtctcttcccaatattaccactcatgatttagttgcctttgaggaatctttaacgaaaa

SEQ ID NO: 31495 - DNA, 436 bp, Glycine max
  Clone ID: LIB3051-053-Q1-K2-H7
caacaacgaccgcgccggcggtcaccggagaacaacacattcccggtcagtttcctggagcgaccggtctccggttacccggaaaccgccgcgtccgcttcagcctctcgccatccacaaacgcagcgttttggagtggcccagcgccggctgcgacgatctcggtgattggtctcttccaccgacccctagagggtccaccaaaacaccagattcgggttcgggtcaagttttccagttcaagaaagactattacgcgttctacgacaaggaatgttcgagaatcgcggagcacgtgtacctggggagtgacacggtggcgaagagcgtcgagcttctgcggcggcacgggatcacgcacgtgctcaattgcgtcgggttcgtgtgccccgagtttttcaaaaccgacttcgtctacaagaccctctggctgcgt

SEQ ID NO: 31496 - DNA, 437 bp, Glycine max
  Clone ID: LIB3051-053-Q1-K2-H8
gttctctaatcttgtaattttctgtgtcgcttcgtggttcattcttctcgttcttgtgatctgttctattttggagtacttacaacactcctttgcaagtttaattaattaaagaggctaatcaattttcaattggactgcagcagatggctgaggagggttgcagggttactctaaatgtttatgacttgagccaaggactagcacggcagctttcaatgtcctttttggggaaagctattgaaggcatatggcacacaggagttgtggtttatggtaatgagtattactttggtggtggcatacaacattctcctgctggattaacaccatatggaactccacttagagtggtagacttaggtgtgacacatgttcccaaagatgttttcgaaatgtatttacaggaaatcagtccgcgatacctgcctgaaaca

SEQ ID NO: 31497 - DNA, 416 bp, Glycine max
  Clone ID: LIB3051-054-Q1-K2-A11
gaataatgctattgtggtaagatccagaaactcttctccaactacagtctcgaattatgggtatactgatggagagcttgtcaaactagaaaaggatgaaaaggttagcattgtaagggaagatgatataggtgcatcactggaggatgaagaggcagctgctgtgcaagagcaggtaatgcaaataaaggctcaagaggaggaatttgaaaccttcaatctaaagattgtgcacaggaaaaacagaactggctttgaggaggacaagaatttccatgttgttttaaattctgtactagctgggcgctatcatgtcaccgagtatctgggatcagctgcatttagcaaagctatacaagctcacgacctgcacacaggcatggatgtttgtgttaaaattataaagaacaacaaag

SEQ ID NO: 31498 - DNA, 423 bp, Glycine max
  Clone ID: LIB3051-054-Q1-K2-A12
cctccttcaacaaccctgccgaatgcagagccgtatcctctgcttctcaacgcgtggtggaccactccatcagcgtcgttttctcagccacttcattcccgaccaccaatacgacccgccgttctccccttccccaaaaccctactacaaatcaaagaagaaccacgcggagaagaagaaaaagaacaattccgaaaacggtgatccgaacaaaaacggagccccgaaactccctttcaagtcgaaccttccgttcgacttcagatactcttattcggagtccgacccttccgttgggcccatcagcttccgcgaatcgcccaagttctccccctttgggccgggccggatcgaccggaaatggaccggtgtttccgctccggttcagggtgaaccggacccggagagggtcgaggaggagcg

SEQ ID NO: 31499 - DNA, 381 bp, Glycine max
  Clone ID: LIB3051-054-Q1-K2-A4
cagagagaaataaagaaaccgagaaaagacagcgatgcaaccaacgctccctctcctccttgtacgctttcacacacatccctaccttcttcatcctcgttcgacaatcttttgaacaaacccttctttcttctcatcatcgccttttcttttccaccgccacttttttttttttttcaattcgcttcatttctggcaaactgtctctgtcacacacccaataattgaactcaccgaaccaaacccctctctctcaatcaccgaacagcaatttcttcactctactcctttcaagtttaaggcttttcccacgtgctgccccaagaacactgatttccagggtttgttctttccccacccaacccttttcggttttctcta

SEQ ID NO: 31500 - DNA, 328 bp, Glycine max
  Clone ID: LIB3051-054-Q1-K2-A5
gggatgttgaccatgacgaagtgttgccagagctcattaagttatcattgtgctggacggttccagatcctgaacatcgaccaaatatgaatgatgtgttatcttcccttgtgaagcttcagacaacactgtcttgataattgctaaacacaaccgatcactccttggagctgctttttctaaagaagaaatatcaaatgcttaccaattgcctcattactattgtctttaacaacagcaaagcctcattgtatccaatatccatgctagtgttccaattaatgtacggaattatcaactttccttcacagccatttaatataaaatt

SEQ ID NO: 31501 - DNA, 450 bp, Glycine max
  Clone ID: LIB3051-054-Q1-K2-B12
gagaacttgaaaccagtggtccaacagaagatcaatgagcttaacagcaaacttgcatgccaacaaaatggacagggaaaatttagttcaaataattcactggatttttctcccgtgaaaaagcaaacttcggctagttatggcctaataaaggctgtcaggcctactgctggggagtttgtttaccaaggatcaaggagccaacctttctcttatgtcaggcctgtggaagagcatgcacgaagactatctctaactcttccacctccaaaggaagaaactctctctagacattctatccttggtcccaacgggctaaaaaggcagtggagaccacctatcattgattaaagggatcaagtatccaagcaacatagatctggctcctgttgaattaccaagcctacaacattccttggaagatgaatctctgaaaaagaaggataacag

SEQ ID NO: 31502 - DNA, 421 bp, Glycine max
  Clone ID: LIB3051-054-Q1-K2-B4
tgatgctgccagggatgaaaatcaaaagaagtctgtaaaagagcgaccaaaatcctcttgtgaattcgaattcaaaaggattgcagtcaagcaggagtatgcaaaattctgtcccaaagcaagtgaattcagatgccagagattctgttcatgtttcatcttctaaacctttgatacatcagactgcaagtatattaggctctagtgagtctaatgcatcattgcaccatcagaaggttttacaagtgcagaataagatttcatcttcagcgccacagaaagttgaaaaacttaaccaaacaaacatccacactttctccaagttgaatcaaagtcatgtatcatcagtgaatccttctccaatatcgaattcttcaatgctgagtgatgaagagcttgctcttctattggatcaagaact

SEQ ID NO: 31503 - DNA, 220 bp, Glycine max
  Clone ID: LIB3051-054-Q1-K2-B5
gttagttcacacactaagttctgaaaaatgagttccaaagtttttcttattctacttatgttcatggccactatacttttgatctcctctgaggttgcacccgatgatgcataccagaattttgacaaaacagatgggaagcgtaatgcaaatggggtagatgaaagcaaatattgccgtggtggctatggcgactatggtggttggcttgttggtggtt

SEQ ID NO: 31504 - DNA, 415 bp, Glycine max
  Clone ID: LIB3051-054-Q1-K2-B6
tccacgcgtccgtgagctgcttccagaaaaatgttaccatggccatgtgtttagaaagcgagcatgccccattgattccttaagtttgagattaagtttgttggagaaagttttgaggagttttcttgaccataagatacttaaagatcagctttttggccttcttaaagcaaatattaaagcatcagctgttgtaaagttccccttagaattagaaagggacataagtaataatgccactcttaatcgtacgattcctgattggagaacaaggcccggttttgaaaggttctggtttgagatattggccagagttgaggaaaacaagctcaagcctcttttaatcaaggaagtaagaccttttatcgaatcagttttaatttcctgggcgaaattgatgtccaatatgtcatac

SEQ ID NO: 31505 - DNA, 372 bp, Glycine max
  Clone ID: LIB3051-054-Q1-K2-B8
acgatatgtactagtgttttgttagttcacacactaagttctgaaaaatgagttccagagagggtcttattctacttatgttcatggccactatacttttgatctcctctgaggttgcacccgatgatgcataccagaattttgacaaaacagatgggaagcgtagtgcaaatggggtagatgaaagcatatattggcgtggtggctacggaggttggggtggtggctttggccctaacgaacataatgaggctgggattgatgctagccctcacaactaagaaggaaacttgctaaagcttatataggatttaagttatcggaataaataaaacttcattggaagggtagctataatagatgtggagatct

SEQ ID NO: 31506 - DNA, 425 bp, Glycine max
  unsure (1)..(425): unsure at all n locations
  Clone ID: LIB3051-054-Q1-K2-B9
gaagctcttgtgttgtactcttgctgcatcttgagtctttaaagaagtaaaccagcggcgcaccacatccccattcaaacaattctctttctctcttccccactcaacactccttataatcgattacaactaaagaaaaaaaaggggtttttcaatttgaatcctttccattcccacaccaaccaaccaagaaaccataaggcacattgttattatgaagaaattgaagaactactacatgcacctgcggcaccaccaccaccaccaccacgccgcggcggagcgcaagtgggtgttcccactcgccattggctccctcctctccctcttcctcctcttcctcgccaccctcacctccccggagggaacccccatcctncccttctaccgctccatcaccgncgnctnctactccgtcttcgtcg

SEQ ID NO: 31507 - DNA, 306 bp, Glycine max
  Clone ID: LIB3051-054-Q1-K2-C11
attccatttctttccaacacacactttctctctctatctctctctctctctctctgtgggtgtctttcattttgttcattggtgttgatgatgtcacgcgccgccgtgttattacacgcgcaggaggaggaggaggaggagtgtagtacttcgacgtcgtcgtcgatcgggaggaacagcgacgtgtcgtcggagagatcaatggaggaaggagaaaacgaggtggaaagtgcctaccatggacctttgcatgccatggaaactttggaagaaggtctttccatcaagaaaagcattttgaacttt

SEQ ID NO: 31508 - DNA, 441 bp, Glycine max
  Clone ID: LIB3051-054-Q1-K2-C12
cgaaacctaaaatttctgagattaaaaaaaaaaaagggaattgtattttcttcttcttagatgtattctatttttatatattttttaatttagcttaattttgcagcttggaaagggaacgaacgacaaacttaacaacaaaagagcgccggttgggaacagggtgctggaaaagcacaagacttttcaataatccatttgtgttagggtttggtctctctcatctcatctaaaccaccgcgatcagaagaaacacacacctgaatagcaattgcgacacgccgaagcatcattcatagtcaattccccacctccggcgacccatttcgatggagacattgtttggaaactagggttagagggagcttttgctttggatcatatagggggtctgctggagcaaatgagattatgattttgtagttttgctcagtgattgtg

SEQ ID NO: 31509 - DNA, 280 bp, Glycine max
  Clone ID: LIB3051-054-Q1-K2-C3
tgaatttttagaattggattgtttatttcatttgtatcatgttattgttgggtttggttattagtgtatagggttagtaagggatttggttcttggtgatggattcaattggcactgtttgaatgatgtttttggtgtttgttttgatcctgcagtgatagtagtcttgcgaatgcaatctcgcgttcgaaacctgctgtttatcaagaacaagttcaaattcaatccgggactacaaggggtcccagtaaccctgtggatccaaaacttaatgtgtctg

SEQ ID NO: 31510 - DNA, 285 bp, Glycine max
  Clone ID: LIB3051-054-Q1-K2-C4
cccacgcgtccgatcatcaacacagagctgagtgtgttgctctgtgaatccaccttcttcttccattggaggaccatttcctcctggaatagaaatactaccacacttttcttttttcacttctctaagttgctaagttaattgctccttcattttttcactcttcgttctcgcgtacccgtgtcacggtaactcgtggtgaagtgttcgaaaatgactgtcacacctaagatctcagttaacgatgggaaacttgttgtccatggtaagaccattctgactgga

SEQ ID NO: 31511 - DNA, 453 bp, Glycine max
  Clone ID: LIB3051-054-Q1-K2-C9
ctttgtttggtgcaatgtgccaatgtttggtaggtcgaaattatgtcatttttaagcctgaattgctaatttctgctgggtgagttttattttattgtatttagcctacaatcttgatttaggctagtattcttattataaagtagtgatcttggaagatcttaacatatttggttcatgcctctcatggagaagaacctctttttggtttctcaagatgatatagtcttgaagggatctagcacaccctcttttatcaaaacccctttggcttcttttgcactttcacttacacaaacacaattatatcacattcaaatgccacactcttggtgattatgcttgaatcaacctggtggtggaaaccattttaaaatttattttcaagaagcaaatatcttaaaatgaatatgattgaaaatataaaatgccattgtttaatttaatgggact

SEQ ID NO: 31512 - DNA, 230 bp, Glycine max
  Clone ID: LIB3051-054-Q1-K2-D1
tcgcccacgcgtccgtccacgcgtccgactggctgttctttttggcgttaagaatgaaattgggaggtctaacgccactaaccctatgctgacgcgacttcttgagaactgtaagagtctcaaatatatggttgatgagtgtccttttgcatttgtgaactagtgtgtaatattttattcacttaaataaagcgcattactatgtgcaatgagtgtgtttaaatataaaa

SEQ ID NO: 31513 - DNA, 354 bp, Glycine max
  Clone ID: LIB3051-054-Q1-K2-D10
cagacattccttcggttcactcttgctccttttcctcgtgttgttgcagaagcgattccaaatgggcttgctagaagaaaaccctaatcattccaagaccatcctgatccgcgaggtctgggcatccaacctcgaatccgaattccagctgattcgtcaagtcatcgatgattaccctttcatttccatggacaccgaattccccggcgtcgttttccgtccccacactgtagaccccacaaaaccctaccttccaccttccgtccactaccgctttctcaagtccaacgttgatgcacttaaacctgatccagatcggtctcactctctctgattccaacggaaatctccccc

SEQ ID NO: 31514 - DNA, 345 bp, Glycine max
  unsure (1)..(345): unsure at all n locations
  Clone ID: LIB3051-054-Q1-K2-D7
ctaaacccaaaccgaaacanaaactgacagacccaaaacccacacccaaacaagaccaggacccaacactcccaaaccaagcggcgaccatggccgacgaatcacaacctcaactaatcgaggagagaagagaggagcaagaacttaagtacctggaatttgtgcaattcgcgaccatccaggccctgatgcgctgcgccatcctctactcctacgccaaggagcgcgcgggtcctctgaagcccggcgtcaacaccgtcgaggaggccgtgaagaccgtcgtggcttcggtctacgacaggttccaccttatccccggcgaggtcctcaaatacgccgatcgca

SEQ ID NO: 31515 - DNA, 343 bp, Glycine max
  Clone ID: LIB3051-054-Q1-K2-D8
cccacgcgtccgtgaaccagcaccatgccctcgtcgtcctctctccgtcgccgtgttcaccagctatcgccgtcgatcaccccaccgcaacggagcatggctgttggagaccacaccacgccgcttctggattccttcaaaaggggggtttgggagtgacgaaccagaaggagaaagagttgttgttgggggataggggtggtggggacgaggagggtatgggtctgaactagatcccttccaaatgaaccctctaatcaacaacccaatgacattccaaaaccgttgtagtgcccacaggctagcgaaaccctatcccatactggcgcataagaagagaccc

SEQ ID NO: 31516 - DNA, 375 bp, Glycine max
  Clone ID: LIB3051-054-Q1-K2-E1
aaagaatcaagcttcgtcaaagtgtctgtcacacacagtctttaagatctggaagcgcttgtcacttgcccacaataagaattcctctcaaatttcaatttttcatttgaaaataataaaaccctaaaagaggggttgcaagcaaaatgagaagctcgaagatgtggatggttttcatgtgtctgacggtgagcttcttcgctcgcattgaatcgctatccgtgacggtgaacgacgtcgagtgcgtctacgagtacgtactttacgagggcgacaccgtttcggggaactgtgttgtcggtgaccatgacattttctggagctctgatcaccccggcattgatttcacagtgacaactgctgcaagtaattctg

SEQ ID NO: 31517 - DNA, 234 bp, Glycine max
  Clone ID: LIB3051-054-Q1-K2-E11
aaaaaaaaaaacgtttgacagaagctcccatataatgggctgaagctgtacagatttcggggctcgttacccgtgccatcgtgaggcacacatctgatgatagagatctataagatgcatagacatggacgccgtccaacaccattatgacaggtaataccatgactatgcggaacttaacaagatgaccatacaaactgccttaattatgtagagtgcttgcacaagtacttc

SEQ ID NO: 31518 - DNA, 467 bp, Glycine max
  unsure (1)..(467): unsure at all n locations
  Clone ID: LIB3051-054-Q1-K2-E12
cttggggaaggggtggttttaggagtcacacacggcatggcagtggcaatggtagcaagagcaaaagttcccgcagtagtcgcttggctaagttagttgattatctccatagcttgaatgaaaacactgatgagttagatgtccatctcattcttttgtctttagacaaacaaattacaccaagcttgcagcagccacacctttgctgtcggccaacattgtctgtgaagcatctttgtgaatatgttgctcatcagacacctttgctggttgaagaagttgagatattggcagttaaaggatgctgcagtacagtttgtgacaagtcatttgatgagacttcatcctctgatgagctaactacgctggttatagatcctagcaaagatgaactgganactctgcaagggcatgaatctctggcagggattaaatctanatgcatatctaaaagggagcatttgatt

SEQ ID NO: 31519 - DNA, 349 bp, Glycine max
  Clone ID: LIB3051-054-Q1-K2-E2
tcgggatggatcaagaggactggctgacattgaggatgggacagatagtaaaagctgtgctgctcagatggaaaatgtatctgaagtcccaaaaccctcggtatcagctgtgaagggggaagaaatcttggaagcccatgatggatcaagaggactatctgacattgaggaagggacatgtagtaaaagctgtgctgctgagatgggaaatttatctgaagtcccaaaaccctcagtatcagctgagaaggtggaaggaatcttggaatcccaggatggatcaagaggactagctgacattgaagatgggacagatagtaaaagctgtgctgctgagatgggaaatgta

SEQ ID NO: 31520 - DNA, 395 bp, Glycine max
  Clone ID: LIB3051-054-Q1-K2-E4
atcctggttgcgtttgggatgcaaaatttatggaaaatggtgatattgtgacagcatgttcagatggagtagtacgcatttggaccatagatcaggataatgttgctgaccagctagagcttgagtgatacacttcgctactttctgaatacaaatctagtagaaagagggttggaggattgaaactggaagagttaccaggcttggaggcactgaagatcccaggaactactgatggccagacaaaagtagtcagagagggggataatggggtggcatatggatggaacatggaagaacaaatgtgggataaaattggtgaagtaattgatggaccagaggaatcaaatcgtcaattttttgacggtattcaggatgattatgtagttgatgtg

SEQ ID NO: 31521 - DNA, 445 bp, Glycine max
  Clone ID: LIB3051-054-Q1-K2-E5
ctcggggtgagttgactcagcgatggcggaagaggtgactcgggtgatggtggcagtgaacgagtcgagcatgaagggataccctcatccttcgatcagcagcaaaggggctttcgaatggaccatcaacaagatcgttcgcaacaacgtctctgccttcaaccttctttttcttcacgttcaagtccccgatgaagatggttttaatgacatggatagtatctacgcatcgcctgacgattttaagaacatgaatcagagagatagaattagaggggttcatctgatggaatacttcgtcaataggtgtcatgaaattgcagtggtttgtcaagcatggataatgaagggtgatcccaaagaagttatatggcatgaagtgaaacgactaaggcctgatcttctggttgtgggtagcccgaggcttggaccttttaaaaaggtt

SEQ ID NO: 31522 - DNA, 403 bp, Glycine max
  Clone ID: LIB3051-054-Q1-K2-E9
cccacgcgtccgttcggattttgatagcaacgttggaaggaaaggtgagagcagagtcgttggaagaatctggtattgtgtcgtggttgttgttttcgcgatcaaaacgatgtcgtcgccggacattgtctcgatattggataactcgaaggagctcgatcgggttaggaaagaacaggaggatattctgtcggagatcaacaagcttcacaagaagcttcaagcaactcctgaagtggttgagaagcctggggataactcattggcaaggctgaaatttttgtatactcaagcaaaagaactttcagaaagtgaagcaagtatttccaacttactgataaaccaaattgatgccctactgcctacgggtccacaagggcaaacacgaagaagaataggaaaa

SEQ ID NO: 31523 - DNA, 163 bp, Glycine max
  Clone ID: LIB3051-054-Q1-K2-F1
tcggataaggagccaaccttaagttatgagtttgttatgggaaaacttcttgtagtaaactaggcatagcttacttggaatataaattcttgtagtcaactagtctgtaggtttcaattactgaggttaaatcccaaatgaataatagcaacttggtttatat

SEQ ID NO: 31524 - DNA, 411 bp, Glycine max
  Clone ID: LIB3051-054-Q1-K2-F12
gagacactaactcctctgtgaaatctaaagcgtaatattattaaaacaatggccagacgccaagcttcccttctctccaaaccttccctcccattcccgttcctgtctccgaaccactccccattctccctctccttcccccccacgcgccgcgtcccttccacgctcctatgttgcaccttccgccccgaacccaacccctctgaactggaacccgaacccggttcagccaacaccgaagaagaaccgggtataaattcacccgaagaagaaaaagaaggtgcagcttcggtttcagatttgggtttggaagaagaaggcgccgaggctctcgatagtggcgctgattcggagaagattgcgaatggaaggcggctctcgatagtggcgttctttgtggggctgtgggtg

SEQ ID NO: 31525 - DNA, 367 bp, Glycine max
  Clone ID: LIB3051-054-Q1-K2-F3
tcggtcaaaaggagtgattgggcctcattggtacaagtgtttttaacaaacagcaacagtacagagcattttgatgcatgtaagtggacaaaatcggaaccacattcctgggaattgatcttcccaatataggtatgtggtcctaataatggttttgaaatgtggagttctgagtgggcaaatcaaacttcatggcatttgagtttccttattgacaatcccaaacagtctacagtttttgacattctcttgggaatttctcaagattttgaaattgctggtaatactcttatgccagctttttctgttccacaggctactgccagatcttctgaaaatgcggaatcctctgcatgatctggaattt

SEQ ID NO: 31526 - DNA, 371 bp, Glycine max
  Clone ID: LIB3051-054-Q1-K2-F4
cccacgcgtccgtccacgcgtccgcccacgcgtccgtctgactctacttcacttgcctataaatagggaacactcagtcacttccttcaaatcgacatatatacacttgtactgttctattagttcatactaagttctgaaaatgagttccaaggttttgcttgttctacttatgttcttggccactatacttctgatctcctctgaggttgcacccgatgatgcatacgagaattttgacaaaatagatgggaagcctagtgcagatggggtagatgaatacaagtattggcagggcggctatggtggcggctatggtggtggttatggaagtgggcgttgaagctattgaagtgggcgtggaggctatt

SEQ ID NO: 31527 - DNA, 346 bp, Glycine max
  Clone ID: LIB3051-054-Q1-K2-G2
gtcttatgaatttcttcgacgtaaatcgattcttcaacaattattatcatagaaggcgagtcatgttctgatcctgcgcattctcttatggctaatcacgacaataagctgcactgataacagacgatatagtagcctgatcaaacgccggatataggctagattgctcagagcctttatgacgttcaatcttggtgacatgtctcattatgacgtcgactcccagactaccatcatccttgatcgaatctacaacaacgtcttaagcacacgctagtatgagtactattaactacaactagatgatgtgaaatcgcatggtgaagtactcttggtggaatcatgt

SEQ ID NO: 31528 - DNA, 405 bp, Glycine max
  Clone ID: LIB3051-054-Q1-K2-H1
ttcttctctatttctccaactctttctgcttcttccaccaaagtggcatcagaaaaccaaaaatggggtgtggcaatttattcttcacaattctgataactttctcagtggcactcataacatacaatatcataatctcagccaatgcccctctcaagcaggacttcccggggccctcacgcccttccatcaaggtggatcctctcatcaagatgccactgcacagaaaatcatcatcctcggaggaatcgaagaagaggttgttgttccacactgctgtcactgcctctgactctgtctacaacacgtggcagtgcagggtgatgtactattggttcaagaaggtaagggatgaaagaagagatgaatctgggatgggggggttcactaggaacctgcacttcg

SEQ ID NO: 31529 - DNA, 278 bp, Glycine max
  unsure (1)..(278): unsure at all n locations
  Clone ID: LIB3051-054-Q1-K2-H3
cggggcntctaagcggcagaaactgccaattcatgcggaggaagtacatagattacgcaggggaagaaaggctgataagcgcttactggatctgcacagaaggcctaaagaacgtagtgaagaagtgatagagacacagatgtactgatgaaagaatttatgatacctgaacgagcagatgcgggagttgaaatacagaaggaggcttattcaattgtgagatgcgaagccatgatatgccctcactgtttcatggctttaagaatacaaatgggagg

SEQ ID NO: 31530 - DNA, 394 bp, Glycine max
  Clone ID: LIB3051-055-Q1-K1-E2
ctgacatctccatatgggttaaagaatgatagacagaaagaaagaaaacggtcaagggcactttcaacaagtgtgaacaccaaactgcggcattcacagcaaacagagtctcgaaacactagtaccctattccttccatgtcctccgaagacatcactctgatacccgaccagaggatcgagaacagtctcaattccactctcgtcttccaagacgaccctctccgcttcaattgccccaccccgcaccagcgtcaggtcggggactcgccaccgaagaccctcgacacgccccacgcccactatgggagcgccacagacgatgacgaacagtctgaccacgacgactaagatgacgacgacgaagaagcggatgacaccgaattaatgagact

SEQ ID NO: 31531 - DNA, 187 bp, Glycine max
  Clone ID: LIB3051-055-Q1-K1-G3
aggaacatgcgctttaaaaagcccttctctatcgccaacactccaagacaattcgggacagccaaacttatagcaattagtgtagaagatgaatacattggatgcaactagggctgaacttggactacttgtactatatttgggcaaggctgaagcaagggacacaatattcaaggcaatacaaaaa

SEQ ID NO: 31532 - DNA, 51 bp, Glycine max
  Clone ID: LIB3051-056-Q1-K1-A10
cgtgggggaattgtttaatcaacgtacaaaaccacgcaactaattgacatg

SEQ ID NO: 31533 - DNA, 195 bp, Glycine max
  Clone ID: LIB3051-056-Q1-K1-A12
agatttccttttgcttcttaccaataacaaacctccctggaagcttctctctgtgggcttccataggaaagatctccgccctgtatatgatggaacttgctcctctttccttttctgattaatataattatttatatttaactggagagagagagacatataaagagagtcatccttcttcatacatttaatacc

SEQ ID NO: 31534 - DNA, 211 bp, Glycine max
  Clone ID: LIB3051-056-Q1-K1-A8
ctgtaacataaaattacaaaactggatttctatatcattattattattattatggagggtattattgctattattatcacatgaactagaaatgacttctcttcaattccaccgaggcaacccaacaaccgatacatccaccgccatcgcaaacggtataaactgttcgaagccaccgtcaacgctccgtttattggcgaaagtaggcctt

SEQ ID NO: 31535 - DNA, 52 bp, Glycine max
  Clone ID: LIB3051-056-Q1-K1-B12
tgtcaatcgcccatttcaccatcagctgaactatcattacaattattattat

SEQ ID NO: 31536 - DNA, 133 bp, Glycine max
  unsure (1)..(133): unsure at all n locations
  Clone ID: LIB3051-056-Q1-K1-C12
gatcgcgtcctcatttcccaccgcccgtcngatcccagcggtcaagggattgntcctgcacttcaacatccaagatcacgaccctaattagggggtctattcattgatggcccactacaacagaacaactggt

SEQ ID NO: 31537 - DNA, 248 bp, Glycine max
  unsure (1)..(248): unsure at all n locations
  Clone ID: LIB3051-056-Q1-K1-E11
gcgcgaaagcaaccacatcaagcacagtaaatacatcctatcacaccctattacanagtcacttttcacaaacacttaaaatggctctataagctcgttcaatcacccaaaactgccactccatcgtttaatccctttgaagaaaccaacctcagttacttgaatacaccgtggaccaaatgaaatcgttctaagcatagcctattaagatcaatataactattacacaatatatgcaccgataaata

SEQ ID NO: 31538 - DNA, 229 bp, Glycine max
  unsure (1)..(229): unsure at all n locations
  Clone ID: LIB3051-056-Q1-K1-F11
gccaatggccggtgtatgatgcaagtganagccactctgaggagcgagctagaatgcttttttaaggaaggcaaaggacccataatgagaacaggcttaggaataagatgatacaggacaagccaactacttcagatgattccaaggaggatccacggtgggtagaaatgccagtaataacaaaagcagatgttcaaggaactgtacaagctgtcacagaggcatcaaa

SEQ ID NO: 31539 - DNA, 237 bp, Glycine max
  unsure (1)..(237): unsure at all n locations
  Clone ID: LIB3051-056-Q1-K1-F12
cgcacgcgtccgattcttcaacccttttattgccaacacgcaatcgcagcangcgggtagcttttataaaacttgagcctgccacaaccgtgggccctattacagcagtaacccttggtgcatatgtaggcacaaaacatcaatgcacaacaactacaacaacaagtgctaggaaacctagctgcctactctcagcagacagcggtatatgcaatacaaccaacatgctgcatagaa

SEQ ID NO: 31540 - DNA, 212 bp, Glycine max
  Clone ID: LIB3051-056-Q1-K1-G11
cgcacgcgtcctcctacgcgtccgtcaatctcatcctctagctagcattgagaagcaatatcttcgaattgaggagagcgcttttaatggcggtggagtaccattgttgtgaaactcattttttcatacgcttattgataattttgctgcttgtgttgttttctggatttatgtcttgtctcactttatgactcatatactttattcttttt

SEQ ID NO: 31541 - DNA, 278 bp, Glycine max
  unsure (1)..(278): unsure at all n locations
  Clone ID: LIB3051-057-Q1-K1-B12
gtcaaatgatagttctatggtccaattgcacnaactggtcaactattgcgggcaagttagaatactaaggtgcgctggccagtgctgatactggaatcagaataaggactcgtccaggaagaaatgaacagccaaacatggacacgatggtacaatcacaaggtattgcaccaaggagaatacgattgggagttgttaggcgtccgcttggttcccaggatgggagttgtgcttgtgccccagaagaccataatccaaataccatcattactgcagag

SEQ ID NO: 31542 - DNA, 53 bp, Glycine max
  Clone ID: LIB3051-057-Q1-K1-B9
tgcaaatctggattctgactaatattacgtaacccctgaaaagtatgagggga

SEQ ID NO: 31543 - DNA, 136 bp, Glycine max
  Clone ID: LIB3051-057-Q1-K1-D10
cgctatctctctctttctcctaagcttaatatccgaatttagggaatagagaaacgctaataaaaacatatcccaaacccatcaaaacactgagaacctgataaaccatatcatgaaatagaaattcactacctaa

SEQ ID NO: 31544 - DNA, 312 bp, Glycine max
  Clone ID: LIB3051-057-Q1-K1-D9
agagaacacaattctcttattgatgttatgcttacagtttcagattgatgactctgaggaggtgtcatgaaagatgatcccattggtattttctcaggataaatccatctatgaagcagtggagagcgctttccatacaatatatatcaggaaaagtccaattgaaactgccaataatcttttgagtcttgccactgattccaatataggagatctagcatctcttgagttatagtaggtgccctggactctaagggtgaaatatattgcagcatgatatctcattatgggattccttattgctttaatgta

SEQ ID NO: 31545 - DNA, 157 bp, Glycine max
  Clone ID: LIB3051-057-Q1-K1-E9
cgctcgaaaactcaattgcaatagaatccaacccgaaacttctgtagtgcggtgaaactaattataactccaagagggactgagccatcaaagatgagacacaagcataataccaaagatcaaccagagcctggggaagaggtggaatggggggcat

SEQ ID NO: 31546 - DNA, 112 bp, Glycine max
  Clone ID: LIB3051-058-Q1-K1-A1
cagaacccataaattctctcaccaagattaccttaccttattgcattgcataataccaggtcaattaaaatgtatgctgacctcacccttactgtgtggcaatacatggcca

SEQ ID NO: 31547 - DNA, 281 bp, Glycine max
  Clone ID: LIB3051-058-Q1-K1-A2
gagaaaacccccaactctcaaccataactagaacctctactcactgacttttcaagcaggactattattaagctttttaaagccaacgataaacagagagaactggcagaaaatgcgagtggcggaccacccgttaagaagcaaagtgccggcgagttgcgtcttcacaaagatataagcgagctgaatctaccaaaatcatgtaccatgcaattccccaatggcaaagatgacctgttgaactttgaagtttcaattcgacctgatgatagatattactt

SEQ ID NO: 31548 - DNA, 205 bp, Glycine max
  Clone ID: LIB3051-058-Q1-K1-A4
ccgacgcgtccgaattttttatgttactaaaaaaattatattctcatttttaacgttagtttacagactttcacttaaacaaagcatgaccaggattgatgaacgagggagagaagtaactgaagtagtctgggatggggaggagacagaatataagaaacctgataaggctacaatcaataagtctgactgtagcgcatattcg

SEQ ID NO: 31549 - DNA, 164 bp, Glycine max
  Clone ID: LIB3051-058-Q1-K1-A8
agagatttgagaggtctcctcctccaatagatactccccatctaagtgaccgtgaagggcgggctttatattatgattctctgtctctctctaaacgttcttatgctgctattgatgaagttcctccactatatgcttatactgttgcttttcttatctagatc

SEQ ID NO: 31550 - DNA, 288 bp, Glycine max
  Clone ID: LIB3051-058-Q1-K1-B2
ctcgtattgatttttatgctctttctctaatcttgcatttgaggcattacattggatggctttatttagtgcctgcacctggatttgaagcttacggggaccccactagttaccctggaagttctaataacaaaggcagcaatagtgaactaattgatgaggaacctttgaagttacaaaggctaggctatcaaggacctgaaattgacctgtataatcagagttggagagttttaaatggaccatatatttctgtctggcttcacaatgtggcttggggtgctgtaa

SEQ ID NO: 31551 - DNA, 188 bp, Glycine max
  Clone ID: LIB3051-058-Q1-K1-B4
cccacgcgtcctaaataaaggaaattaataaaaaaacaaaaaaaaaaaaaaaaaagaaagaattgactacaaccctaaagaatccatccttacgtacgcttccatgcaacttcttatctcttctataattttacctaaatttaataaattgaccataattttaaaactattagactgtaaaaaccaat

SEQ ID NO: 31552 - DNA, 163 bp, Glycine max
  Clone ID: LIB3051-058-Q1-K1-B5
gtttgtacatcttttggtttggtcgattgtacagccttttcagatttgcatgggttgcttcatagaacaacgtgatttgcggattgctgtaaagggcattattaggccataatctaatggacaagggggtgccttctaacctctactacaatgatggttcatt

SEQ ID NO: 31553 - DNA, 242 bp, Glycine max
  Clone ID: LIB3051-058-Q1-K1-B7
cacacacacagctagcagatattttcattacgtgaatcactaattaagccatggagaggatatcattaactgggttgtgctccctcttccttgttctctttgttgctcaagaagttgtggtgcaaactgaggcaaagacttgcgagaacctgactgatacatacaggggtccatgcttcaccactggcagctgcgattatcactgcatgaacaaagatcacttgcttagaggcagatgcttg

SEQ ID NO: 31554 - DNA, 184 bp, Glycine max
  Clone ID: LIB3051-058-Q1-K1-B8
cggacgcgtccggttctctctctctgatgattatcaaatccatactatcactttcgcgtcgggacttaaagaatcattggcgcgcagacacaaatcagtaccatacgaagcccgacactacgtgaattaagcatgtcgggcagaaaggaaacagtattggaccttgcaaagattggagacaaag

SEQ ID NO: 31555 - DNA, 360 bp, Glycine max
  Clone ID: LIB3051-058-Q1-K1-C2
aaagaacgctgttttactcatttagatggctttgcagtaatcacgggacgaatgcggttctgtatggaccatgggcttcttcaagatgttgttccttcacacatgttgaaagaagagtagagctgatataactccagtaattattagtcatcatgcttctatgtgatttattttttgctgactttttcctatgagacttaggtgagaactctagtactggtacatgtaatatatcttcctgactggaggttatattagtgatcatgatcatatattacttgtaaaatccattattatcattttcctcattattctcattaatgattaattgctgtatatcaatgattgattatgtattaa

SEQ ID NO: 31556 - DNA, 125 bp, Glycine max
  Clone ID: LIB3051-058-Q1-K1-C7
cctacgcgtccgcctacgcgtcttgaataattcttcgttatactaactctatgtgatggactcttaataataattgcccttgttattttacatgtcatttgtttgtaatattaaccagtagccta

SEQ ID NO: 31557 - DNA, 145 bp, Glycine max
  Clone ID: LIB3051-058-Q1-K1-D2
ccgacgcgtccggtttttgtgtgtaacatggattggctgttagaatggagggtcggaggaatgatataaaaaatgtgatggcagggatttagggcaaacgaagggagaatgtggtggaaaagtctgcatcatcaatagaaggaac

SEQ ID NO: 31558 - DNA, 151 bp, Glycine max
  Clone ID: LIB3051-058-Q1-K1-D4
gagattttcttcatccttctctgatcactgataactcgattacttgaacattcccgatggcttattaggtggttcttctggacctctttccaagtccatttgtgatgagggtcacgattgcacttgctgaaaagggttttgtatattgatt

SEQ ID NO: 31559 - DNA, 134 bp, Glycine max
  Clone ID: LIB3051-058-Q1-K1-D5
cccacgcgtccgccctacgcgtcctagattatttgacacctggatcagagacctggtcggttacattgaaaggaatgcggacctaccacttgcccgaaatcaacaaagcttttgcaaagcgagttgcagatatt

SEQ ID NO: 31560 - DNA, 55 bp, Glycine max
  unsure (1)..(55): unsure at all n locations
  Clone ID: LIB3051-058-Q1-K1-D6
ccgacgcgtccgccataaacaaacagaactaccaacacaggtattgnggctcttc

SEQ ID NO: 31561 - DNA, 154 bp, Glycine max
  Clone ID: LIB3051-058-Q1-K1-D8
tggaaccttacaatgtactcaaatctgattgctatcgaaagggatgagtaaagatgtagcacgctttaaaagaaaaatgcaccgtcccgttaaagggtggatatgagaccaaggctgctcctgtatagctgcaaccattgtctattccagatct

SEQ ID NO: 31562 - DNA, 348 bp, Glycine max
  unsure (1)..(348): unsure at all n locations
  Clone ID: LIB3051-058-Q1-K1-E2
ccgacgcgtccgattaaaactcttaaatantattcctgatagaaaaatagaaaggatcgatttttagcaaggttcacaaaactggttggaattagtaaaactgttttgatcaaaagtgtagccgcaggaattaaccttctataagtatgattctttcatagaaagaaaaaatggtatgttgctgccatttttgaaaagattgaagaaacccgaagtaatgccaaaacctaatgatacagagaaaagctaaaagaatatggaacaagtaatatccatatacaaaatgtattatcaattctattatatataaatataaaaatatatattatatattatacatttcacttg

SEQ ID NO: 31563 - DNA, 258 bp, Glycine max
  Clone ID: LIB3051-058-Q1-K1-E4
ctgcaaaccctaaataccaaagctccgtattccacgcagcgcgccacaaaccgggtggtgaatctaaattcgaagagctaaacgaatggggaaaagaaaagagcgtcgtcgcctcgccgctatcagcaacgccggtcgcagagtcaaactcgatcttttcacggaaccctctggagagttgggtggctccactctactaggtgatgcttgatgagatacttgatgcacagtcattatgatctgttacactattcaccc

SEQ ID NO: 31564 - DNA, 52 bp, Glycine max
  Clone ID: LIB3051-058-Q1-K1-E6
cgacgaccgcgacgtcggaacccacattacttgcccggaatgccgccaaatc

SEQ ID NO: 31565 - DNA, 305 bp, Glycine max
  Clone ID: LIB3051-058-Q1-K1-F2
gtctttgtctgatacccaaaccgtaactactctttcccaagatgggagttcaacggcgtgatgctttatctgaagacaacgagcctgctgaaaatgcttgtgctaatagttcctcgtaccaacgtgctcttgccagtatagtctgccaacatcgatccatgtgtaaatactgaaagtcggaaatttaatgaacctggttacaaatcttatggcaacatttctacaccgcatatctattgacaagatgtcttgaaaaataatatcattggcatgattggtatagtaacaaatgttgctggtgaatt

SEQ ID NO: 31566 - DNA, 210 bp, Glycine max
  Clone ID: LIB3051-058-Q1-K1-F7
cagcaataggagatctcctaatttggctactccaactagtcaagacagagcagggccggcataattacaatcatttccagaccctctgaaatctaaactgaatgctgtatcaacaagatacaaggagtcaattaccaagagcacaagatggtggaaggatagattgatctctcataacaacaccatgtcagaccttggattctcaattaa

SEQ ID NO: 31567 - DNA, 299 bp, Glycine max
  Clone ID: LIB3051-058-Q1-K1-F8
ccgacgcgtccgaataggtaactggaatctcctcgaacaacctattcaccgtggcttgcaacgtttgtacaaagaatatggaatcatcgtttccctttggttcggttcacgtctcgccgttgtcatttcctcaccaacagcataccaagaatgcttcaccaaacacgacgttgccttggccaaccggctaccttctctctcgggaaaatacatattctacaacaacaccaccgtaaggtcctgctctcaccgggagcactggcggaaccttcgtcacatcatcgtcctggactgtctct

SEQ ID NO: 31568 - DNA, 376 bp, Glycine max
  Clone ID: LIB3051-058-Q1-K1-G3
accgctctctaccattgccatggatctttattgcaccggccatccagcgccttcaattctgccttctttactacaaattctggtgctcctatttggaacaacaactcctctttaaccgttggagctagaggtccaattctgctggaggattatcatcttgtggagaagcttgcaaattttgatagggaacgtatcccagaacgtgttgtccatgccaggggcgctagtgcaaagggtttctttgaggtcacccatgacatttctcacctgacatgtgcagatttccttcgagcccctggagttcagacgcctgtaattgttcgtttctcaactgtcattcatgagcgtggtaaccctgaaaccttgagggaccctc

SEQ ID NO: 31569 - DNA, 52 bp, Glycine max
  Clone ID: LIB3051-058-Q1-K1-G6
cggacgcgtccgcccacgcgtctcgaatgaccaacagaaggccaagacaacc

SEQ ID NO: 31570 - DNA, 232 bp, Glycine max
  Clone ID: LIB3051-058-Q1-K1-G8
gattccattacatatcatcctttaaaataatttcattggcttttatgataatgggttgaagtctttcacagatattttaaattacaccgaagaaaatagagaaatctgacatgtatctttaatctctagcattattaaattattacgacgatccaataaggtaaactcaagtggctgagagtagagtctgtaggatggattgatgagtatcagaatctgagcgaatattggg

SEQ ID NO: 31571 - DNA, 175 bp, Glycine max
  unsure (1)..(175): unsure at all n locations
  Clone ID: LIB3051-058-Q1-K1-H1
attcgaccactggttgttttgattcaataatatccaaggatggacagactcggggacgtgttctattaaaatncacccaagctttcaaacagatgataagctgctgaaacaaaatggatgctactacacccaagaataccaaggccaggaatgatgaaaaagagaatgaagacac

SEQ ID NO: 31572 - DNA, 206 bp, Glycine max
  Clone ID: LIB3051-058-Q1-K1-H3
ctcgctctgtctctctctctccatagattcatggatccttacaagctccagccggccgtttcctttaaaactcccttctggactacaaattctggtgctcctgtttggaacaacaactcctctttaaccgttggagctagaggtccaattctgctagaggattatcatcttgatgtagaatcatgcaaacttattcttggaacgta

SEQ ID NO: 31573 - DNA, 216 bp, Glycine max
  Clone ID: LIB3051-058-Q1-K1-H6
aagaacagcggctgttacggctttggctgctctaacgcaatcagcaaaagcagctacgtttactttacaagcacacggaccacaccatacccatgtacaaactgtgaccgacagtgccataccatccgcgatgaaagcattgcacaaggaacccgccacagatatctggactcgcatattcaagtacttaaaagaacgctaacttacctatgatat

SEQ ID NO: 31574 - DNA, 245 bp, Glycine max
  Clone ID: LIB3051-058-Q1-K1-H8
ccgatttgtacatataggggcttaaactcctttgaacctgttaaccacgcaaggtccgatatcttcacaagaactcgccggagaaaaaaaaaagaatgatcgacagagggaaaacgtcggtcgccgtcgtgtactccgacggaaaccgcgagatcaatgtcggcacggtcgtggtggaccccacgctcaactttaagagccttcgcacgctcctcagccagcagatcgggatctcgccgcaccag

SEQ ID NO: 31575 - DNA, 384 bp, Glycine max
  Clone ID: LIB3051-058-Q1-K2-A1
caaaaacccataaatcctctcaccaaataaacctcaatttattgcattgcataataccatgtcaatgaagttgtatgcttccctcacccttacggtgtggcttttcatggccacattttcgcgagcccaatacgttattgacacaaatggcgaacccgttgacaatgatgatgagtattacatcaggccagccataaccgacaacggagggcgtttcaccttgatcaaccgaaacgggtcgtgccctctctacgtgggtcttgaaaacaccgatacgccactgggttatccagtgaaatttacccattttgcccttaacgttcaagatgaggatataagggtgaacagcgacttgggaatcgaattcctggaagttttcacaac

SEQ ID NO: 31576 - DNA, 410 bp, Glycine max
  Clone ID: LIB3051-058-Q1-K2-A12
cccacgcgtccgcccggtcagccttggtctgtccccgtaaggaaatggccggggagtttcaggaaacccaggcgccgttgcctcagcggagcccgggctgacgaggcagggcagcgggttaaaccggagcagttccgcgcggggtggggaggccatggcgtccggcagtaactggctgtctggcgtgaatgtcgtgctggtgatggcctacgggagcctggacttaaaagaggagatagatatccgactgtccaaggttcaggatatcaagtatgaacctcagcttctcgcagatgatgatgcaagactgctacagctggaaacccagggaaatcaaaattgctacaactacctatacaggatgaaagctctggatgctatccgtgcctctgagatcccatttcatgctg

SEQ ID NO: 31577 - DNA, 408 bp, Glycine max
  unsure (1)..(408): unsure at all n locations
  Clone ID: LIB3051-058-Q1-K2-B4
ccacccttccggtctctcttttgggtatattcaaatccattactatcactttcgcatcggtacttctcttttcattgtcgcgcagacacaaatcagtaccatacgaagcccgacactacgtgaattaagcatgtcgggcagaaaggaaacggttttggaccttgcaaagtttgtagacaaaggcgttcaagttaagcttactggtggcagacaagtgacagggactctgaaagggtatgatcagttgcttaaccttgtcctagatgaagctgtagagtttttaagagatcctgatgatcccctcaaaactaccgatcagaccagaaatcttggcttaattgtttgtagaggaactgctgtcatgcttgtgtccncaactgatggtacagatgagatcggcaacccctt

SEQ ID NO: 31578 - DNA, 392 bp, Glycine max
  Clone ID: LIB3051-058-Q1-K2-B5
gtttgtacatcttttggtttggggcgaaagttcagccttttcagatttgcatcaatttcaacagagaacaacgtgatttgtggattgctgtaaagtgcattatttggccattagctaatggacaagggggtgcctcctagcctcttcgtcaatgatggttctttcatggagaggttcaagcaacttcaacaagagcaggataaagggaagaatgtcaaattggaggattctaaaccaattaaggttatttcagggtctttgtctcccaatccttcctttaccaaaacgcctgtggacttgaaggttaatgacacaaggaaaatatcccaaggtggttccagtggaaagctagctttcagtttaaaacaaaagtcaaagctggtgccaccccc

SEQ ID NO: 31579 - DNA, 377 bp, Glycine max
  unsure (1)..(377): unsure at all n locations
  Clone ID: LIB3051-058-Q1-K2-B8
aaagaacgctgtttttactcaagagagacggctttgcagtaatcacgggacgaatgcgtttctgagggaccatgggcttcttcaagatgttgttccttcacacatgttgaaagaagagtagagctgatataactccagtaattattagtcatcatgcttctatgtgatttattttttgctgactttttcctatgagacttaggtgagaactctagtactggtacatgtaatttttcttcctgaccggaggtaatattagtgatcatgatcatatatacttgtaaaacccactttatctttttccacatagccccatcatgattatggctgtatagcatgatggattatgatttaatgcanggactacttctagttct

SEQ ID NO: 31580 - DNA, 175 bp, Glycine max
  Clone ID: LIB3051-058-Q1-K2-C3
gcggccacgcgtacgcccacgcgttcggtttttttctttgttatactaactctatgtcgtgaaccctcaattgtaattgcccttgtgattctacatgtcatctgtttgcaatattaaccagtagcctacgtcgtctattctaacgttctgatacatagctacataccgctgacat

SEQ ID NO: 31581 - DNA, 378 bp, Glycine max
  Clone ID: LIB3051-058-Q1-K2-C6
gaacaattcaggtctaagcatatatcccgggatgattttgtgaagatgctgaggttaatagttggagatggtctgttgagaactacaataacaaatcttcagtataagataccttccggtggtgaattgaaagactcaatcaagaaagaagactgaggctgtatttctgtgaggaggtggagatctttatccttggagtcaattaatgtcaactgtttgctggataaatcaaaactatcttttttcatttccttttgtcatctatatttggacttgagacatacatgcaactagaactacattatagagtttagtttgaactgtttgtgattaggtgacctgtcaatcaaccctcttgattatgttgggtttttatga

SEQ ID NO: 31582 - DNA, 411 bp, Glycine max
  Clone ID: LIB3051-058-Q1-K2-D10
gtggaggcttgtcttggctgtttcttcgtctccatggtgttcggaggtgggcggctttgacggagaagcaactgcagctcaggcgtggacgggatgtttcgtcttaactcactttctgcgttggcagagctggcagtgggctctcgatggtaccatggaggatcacagcccacccagatcaggcgacggctaatgatggtggcttttcttggagcatctgcagtaactgcaagtactggtctgttgtggaaaagggcccttgcagaatctccaccatctgcaaacaacatcaagagtgaacttggagataaagggaagagtaaagaggaaggggaagattgtaatgctgaaaaaaaggctgcaggtgtttgacttgagccgtatccagaagagaaaaagaagaaacgttct

SEQ ID NO: 31583 - DNA, 388 bp, Glycine max
  Clone ID: LIB3051-058-Q1-K2-D2
cccacgcgtccgccaaaaacaaacagaacaaccaagacaggttttgttgctcttcgagagggttgaagaggatgttctgaaaggaccgctttatctgaaaaaagatttgggtttgcagaaagtcatctactgaggagagaggagagagaaagaggtgtgatagagaaagagtgttgtcttttgtttgtttgtaactttgcattgaattccattcattttttttctctttctctctctctctctcttgtgttactcgctacaagctattcgactataacaccgactccctcttttaccgtggaagaaggaaaatgaatatctcaagtggaagaaggcacagaaggcggtttcgccattgatgagagctagctactttaagagaggacca

SEQ ID NO: 31584 - DNA, 398 bp, Glycine max
  Clone ID: LIB3051-058-Q1-K2-D5
cccacgcgtccgcccacgcgtccgattggatttgaaacctggatcagagaccttgtgcttgacatggtttggaaggtgttttgacctcttgcccttaatcaacaaggcttttgcaaagcttgttgcggatattgactacccaatgagtaaatgggagattttttccattgaagggtactacttgagctacaccttgagtttgctagagcttctgaattccatttcttcttgtttttctcatcttggccaagctagcctttctctggttcatggtttgaccctagtggagaattcaccttctttggctacaaagccatatctgaaagcaattcaacttcaacaagggtgtttcagcaccaactttggtcaagatcatgatgaccaaaaaagggtttttt

SEQ ID NO: 31585 - DNA, 361 bp, Glycine max
  Clone ID: LIB3051-058-Q1-K2-E2
cgacgaccgcgacgtcggaacccacatctgcggcggcggaatgccgccaaatccgggaccaagcggcggaagctgccagtcctcgggaaccctaaattgcggcggaaaatcgtatcctcagtaccgttgctctccgccggtaacttcctcgacgccggcgatcctgacgctgaacgacttcagcgaaggcggcgacggaggggacccgtcgcagtgcgacgagaagttccataacaacacggagcgtgtggtggcactctccacggggtggttcaacggcagttcgctgtgtttgaaaatgataaggatcacggcggggaacgggaggaacgtgacggcgaaagtggtggaccagtgcgac

SEQ ID NO: 31586 - DNA, 377 bp, Glycine max
  Clone ID: LIB3051-058-Q1-K2-E4
gttttgctccgttctaagcatggggaaggaaggagatctatgggacgattcagtgctcagtgaatgccttcgaccaagctatttctacttacaacaaaatgcatagcagcggcaaacacaaagacgccgcctcggttcaagaggaggcgaagacactgatcggagaaaatggctccaattttgacactacaaggggtgctgatacgaatattccagctactgatgcgcttgattcaggtgagactggtaatttgtcgaagttggaagaaaatcatgacacagagtcacaggtggatcatctggattcaacaagtggtcaagacatccagaatgcacagaacggttatgcatatgctcaagctgtagatggttataat

SEQ ID NO: 31587 - DNA, 380 bp, Glycine max
  Clone ID: LIB3051-058-Q1-K2-E6
ctgcaaaccctaaaaaccaaagctccgttttccacgcagcgcgccacaaaccgtttgttgaatcgaaattcgaagagctaaacgaatggggaaaagaaaagagcgtcgtcgcctcgccgctatcagcaacgccggtcgcagagtcaaactcgatcttttcgcggaaccctctggagagttgggtggctccactctacaaggtgatgctggaggagatactgattctcaacatcgtgatgggttacccaattcaccctcttcttcaggtcaacaaccacagaatcccctgctgttacttgggcaatatagtgatgatgaaggggatgatggatcaagcaaagggcttaatgatgcaaatgtgcaaagccccatgcttaatg

SEQ ID NO: 31588 - DNA, 368 bp, Glycine max
  Clone ID: LIB3051-058-Q1-K2-E8
gtctttgtctgatacccaaacctcttcttctttttcccaagatgggagttcaacggcatgaagcgttttctgaagacaacgagcctgctgaaaatgcttgtgctagtagttccttgaaccaaggtgctcttgccagtgagtctgccaacagcgatccaagtgtaaatactgaaagtcgtgaagttaatgaaccgggtgacaattcttataagaaaagtagtacaccgcatatctatagacaagatgtcgtgaaaaataatatcagtggcatgattgggattgtgacagaagttgctggtgattctgattcggattcagatagcagcatcactgatgacgaaaatgatagtgaggatgaggatggtgat

SEQ ID NO: 31589 - DNA, 394 bp, Glycine max
  Clone ID: LIB3051-058-Q1-K2-F10
ctggagggctggtgcgacgtggagcacggtggggacggctggagggtggaggagcggccgggagactgtggggtggaattcatccatgatgagagcgtcaagaagtacttcgcctcctccttcgagtggtgtcgcaaagcgcagataattgatctgcaggctgagggctactgggaggagctactggacaccactcagccggcgatcgtggtgaaggactggtactctggtcgcagagacgccggctgcctgtacgagctcaccgtgaagctgctgtcggagcacgaggacgtgctggccgagttcaacagcgggcaggtggcagtgccggcggacagcgacgacggtggctggactgagatctcccacaccttcaccgactatgggcccggcg

SEQ ID NO: 31590 - DNA, 308 bp, Glycine max
  Clone ID: LIB3051-058-Q1-K2-F11
ctgcaggctggtgcgacgtgcagcacggtggggacggctggagggtgcaggggcgctctctagactgtggggtggaattcatccatgatgagagcgtcaagaagtacttcgcctcctccttcgagtggtgtctcaaagcgcagataattgatctgcaagctgagggctactgggaggagctactggacaccactcagccggctatcgtggtgaaggactggtactctggtcgcagagactccgactgcctgtacgagctcaccgtgaagctgctgtctgagcacgaggacatgctggccgagttcaac

SEQ ID NO: 31591 - DNA, 233 bp, Glycine max
  unsure (1)..(233): unsure at all n locations
  Clone ID: LIB3051-058-Q1-K2-F2
ggccaacccgtcggccaacccttccgggggattccatgcctatcctgcccaggttgaggcagcatttccaacatatggattaacaatgtagtccttaacttgtcctctttctatctttgaacatgagagcaagattntgtgggatgtccatgttacctttaggaattggaattctcttggtacggacatgtatttattttggattaagagtaagaggctacatatcaagtgct

SEQ ID NO: 31592 - DNA, 392 bp, Glycine max
  Clone ID: LIB3051-058-Q1-K2-F4
aacagcctctctctctctctctctctgccaccttatattgccttgccacatttctgacttctgagtcttttgtgggaattgagttcattcaaatgattcctctgtcccataactcagtctctgttcacctgggtggagtaccctgtgaccctcttcacccaattgcgttcgatcccactctgaacaagccttgttcttccacctctctgttttggaactgcaagaggagaaggaagaggaaaaactccattatcatggcctctaatctcaggaccaacaatttcctgcgccatgtggaatcaatgaagcttcttccatcaggtgctggccacatttcgcacctgaacgctgtgatacttggtgaatctctcgccactgaagaggatgatttc

SEQ ID NO: 31593 - DNA, 383 bp, Glycine max
  Clone ID: LIB3051-058-Q1-K2-F9
ctggagggctggtgcgacgtggagcacggtggggacggctggagggtggaggagctgccgggagactgtggggtggaattcatccatgatgagagcgtcaagaagtacttcgcctcctccttcgagtggtgtcgcaaagcgcagataattgatctgcaggctgagggctactgggaggagctactggacaccactcagccggcgatcgtggtgaaggactggtactctggtcgcagagacgccggctgcctgtacgagctcaccgtgaagctgctgtcggagcacgaggacgtgctggccgagttcaacagcgggcaggtggcagtgccggcggacagcgacgacggtggctggactgagatctcccacaccttcaccgacta

SEQ ID NO: 31594 - DNA, 376 bp, Glycine max
  Clone ID: LIB3051-058-Q1-K2-G11
gcttatcgcatgccgcaggaaaaacgttcctggcctgatgggcctgcggtcgagcgagtttttgctgggaacgcgtctgctgggacgatggcctcttctcacccaacctggatcgcgacatcctctggtgctcagttgcccaggaagaagactaactacaaggaaatacttctgaaaaataaatgtgaacaacaagcttgagtgaatattcttctgagctggcttattgcagaatggcagtgcttttgcagaatagacctttactagcgactgatggtagagggacagagttgtgcctgtccaatagtcatactgacacagcacattctctcttcaaattataagtggttgctaccaggaaatagctacttgaacc

SEQ ID NO: 31595 - DNA, 369 bp, Glycine max
  Clone ID: LIB3051-058-Q1-K2-G8
gattccattacatatcatcctttaaaataatttcattggcttttatgataattttttgaagtctttcacaaatatttttaattacaccgaagaaaatagagaaatctgacatgtatctttaatctctagcattattaaattattacgacgatccaataaggtaaactcaagtggcggtgtgttgtggctgttggttggtttgttgagtatcagaatcggagcgaaaatggggcggggttggtggtggaaagtggcggtgttggcggtggtagtggcggtggtgtggagagggtggcaggtgggtggattggagaaggagtcagcgttcaattttgtcagagaatggtcggagaagctagggatttgggc

SEQ ID NO: 31596 - DNA, 373 bp, Glycine max
  Clone ID: LIB3051-058-Q1-K2-H1
gaaaaaagaaaaaagaaaaaagacacgcagcgcacaagttaaaaccttctcaaactctctttcgtcaaaacgcgtccattggatccatcaacgcacgccaaacatctcgtcttttcgcgtttccgttggtggtttttcgttttcctcagtgttccttcagtgattttcttctgggtctgtgaaaagctcggtgctttgtttcggaagcaccgacattggggaactgtgtgatggtgaaagcggagattgagaaaaagggttgcagcacaagacgatggctttggcttgtgatggctctcgtcgccgtgtttgttgccatggtcatgtcttccagaacctctccaaaagctctgtttggagccattgatagagc

SEQ ID NO: 31597 - DNA, 385 bp, Glycine max
  unsure (1)..(385): unsure at all n locations
  Clone ID: LIB3051-058-Q1-K2-H12
actttttataatacctcattttaaaaaaaatccagtgaatccggtatttcctgtggcaaatacgtctncctcatttcacgcctttcctgctccccaccacactagtgccctctccacccgccccgcccctgccctctngttcttcatcagtatttgaaagtgaatgatttgtaaccaagactctntntcttaggatcacatttacaatttacagattcgttttcttgggaacaaatattttttgtatgacctgtctaaaacccctcgcctgagttttgtggtaaaagtattgtttgtggttgtgatcttattaaattgataacaaactaagctatttgacagcagtgggaaagcagattgtcttgggcaaggagaaaaatccccc

SEQ ID NO: 31598 - DNA, 350 bp, Glycine max
  Clone ID: LIB3051-058-Q1-K2-H4
cagattaactagccgaactttatacagaagcgacgagatgaccaaacatttatatatatatatatatataaaaaaaaggcaaccatgaccttaacacacccatcacaagtccaaaacacttgaacttgctcaagggcaagaaatgaccactttattctaagggtgtttgtttagacacaaaacaccagagtgcaacataatacatactacataattttgaagttttgaaactacatatagtttttatcattatttctaagggccatttctgcttgaagctttagctctccaacacctcacttgcaagtgcaggggttgcaggtgcagttagctccacatttgcagccatc

SEQ ID NO: 31599 - DNA, 364 bp, Glycine max
  Clone ID: LIB3051-058-Q1-K2-H6
aagaacagcgtctgattcggcaaaagctgctggaatgcattcagctttggcagatgctgatactgaagttgttgacggactacatgatgtccatctacaaactgtggccgatagtgctatagtgtacgcggtggatgcattggagtgggaagccgatacatagatctgggctcgcatgttcatgtaattaaacgaacgctaattgacctattatgtgctgatggactgaatgcctgaccacatacatcatcctatagcgattatacaggtgatcaggattatattaagtatggaacgtgagatcacggatcataatcacactaccaatgatgcctgtctagaggagatcgtattattggacgaa

SEQ ID NO: 31600 - DNA, 428 bp, Glycine max
  Clone ID: LIB3051-058-Q1-K2-H8
cccatttgtacataaaggggcgtaaacccctttgaacctgttaaccacgcaaagtccaaaatctgcacaagaactcgccggagaaaaaaaaaagaatgatcgacagagggaaaacgtcggtcgccgtcgtgtactccgacggaaaccgcgagatcaatgtcggcacggtcgtggtggaccccacgctcaactttaagagcctcgtcacgctcctcagccagcagatcgggatctcgccgcaccagttatccgtctacctcgcctccgtcggcaccgaccgcaagattccggtcacgtccaagctcaacctcgccgccgtgcgccgcgacggcgccgcgcactacttcttcgtgaagcgctccaagcgcaacaaggaaggcaaccggaagccgaaaacggaaaggacgccttgaagaagaattaccctc

SEQ ID NO: 31601 - DNA, 625 bp, Glycine max
  Clone ID: LIB3051-059-A10T7A
cccacgcgtccgaaattttttagacttatttctattctgtccctctcctttcaaatttattactttggaggtcaaccaaaacaaacagtgtaagactacagcgaatgcttcaagagttgaatctggattaaaagcattgaccagaccacccactagcggcgaattgtgtagcaaggaaagaagcagaggctgaggaaacaatgaagatattggtgaccggcgcatccggtttcctcggtggaaaactctgcgacgccctcgtccggcaaggttactctgtcagggttctcgtaagatccaccagcgatatctccgccctttctccgcacatcgaaatcttctacggcgacatcaccgactacgcctctctcctcgccgcctgcttctcctgcactctcgtcttccaccttgccgccctcgtcgaaccctggcttcctgatccttccaaattcttctccgtcaacgttggaggattgaaaaacgtgttggcggcggtgaaggagactcgcacagtggaaaaactcctgtatacgtcgtcgtttttcgctctcggaccaactgatggaatcgtcgccgacgagaatcaagtccatcacgagaaatatttctgtacggaatatgagaa

SEQ ID NO: 31602 - DNA, 291 bp, Glycine max
  Clone ID: LIB3051-059-Q1-K2-A1
tcgaaacacgccgcgaacaagaaaaagaaacaaccttagccggttcaacctgaacttatgggtgttcaattccatgcaaccgttcacacccaaatcttcttcgacaattcccaacggcactttcttgaacggtgatcaccattactaccgttcattaacaggcggcatgtcattaaccccggaccttggacatggaccgaagtcccgtgccccaccaaacccaatttccaagcctggaacccgaacccgaacttgccgacctagccaccgcttttgcttccaaacgtttct

SEQ ID NO: 31603 - DNA, 401 bp, Glycine max
  Clone ID: LIB3051-059-Q1-K2-A10
cccacgcgtccgaaattttttagacttatttctattctgtccctctgctttcaaatttattactttggaggtcaaccaaaacaaacagtgtaagactacagcgaatgcttcaagagttgaatctggattaaaagcattgaccagaccacccactagcggcgaattgtgtagcaaggaaagaagcagaggctgaggaaacaatgaagatattggtgaccggcgcatccggtttcctcggtggaaaactctgcgacgccctcgtccggcaaggttactctgtcagggttctcgtaagatccaccagcgatatctccgccctttctccgcacatcgaaatcttctacggcgacatcaccgactacgcctctctcctcgccgcctgcttctcctgcactctcgtc

SEQ ID NO: 31604 - DNA, 354 bp, Glycine max
  Clone ID: LIB3051-059-Q1-K2-A11
actgccatccttcaagtattagcaaatcagtacgcgtagagtacagcgcagaaagaggcctgattattcttgatgacacggagtgtacagtgcatacattcccaacgaggagattgacatggacgcagacgcatagcaactggatgagcaacttgttccctatcacacatacttggaactggaggacttgaataagatgctgtaggtgatctatgatgaagcttgctcccttaatgaaatgcacgccatggtcaagacagagatgttcatctgctaagatttgaacagctgtcatacatcttacgttgatacccttgaagttaatgatcaggcccaacagatcgaccatgaagt

SEQ ID NO: 31605 - DNA, 224 bp, Glycine max
  Clone ID: LIB3051-059-Q1-K2-A2
aacagcgtgcggaacataaaaggtagctgccaatttgacgtactcagtctccgaatggaaacctcattacgcaatccgtaagtttctagtgacccttgtcattatcatcctcctcgtcgtcgaccgctgtttgccctaataggctctcatgttgcggctgcatgatgattgatcgattgattgggatatataacgctgccgtcgaccatgatcaaccattcata

SEQ ID NO: 31606 - DNA, 322 bp, Glycine max
  Clone ID: LIB3051-059-Q1-K2-A3
acggccccaaaatgtgagtgctcaaaactgcggttgtgctgaacggttatgttgcagccaagatgggtattgtggtaacggtgaggagtactgcggcccatggtgcaagcatggtccttgttattcgagcacaccaagtactaacaatgttaatgtggcgacatcgcacaccacacttcttcagtggcataattgatcaggctgactctggctgtgctcgcaagtactcttactcacgagatgcttttcttaatgctctcaattcctataatgactttggtagacttggttccaggatgactccgagcgcgagattgcagct

SEQ ID NO: 31607 - DNA, 388 bp, Glycine max
  Clone ID: LIB3051-059-Q1-K2-A6
cggacgcgtgggcggacgcgtgggtgtaacgtgacgaaacagagggattataaaaagagaagttactcgatagttcaaatcagaagatggttcctgtcacaccaactcaataacagatcaaaccaaacccaaactgttaggtttcctttgtttggtgtgaagccatggctgattcttcttccaacctgaaatccgacgcgataatggagcagatgaagcaacacctcgccaccgacgctggcaaacaagtcaccaataaaattggactcgtttatcagtttcacattgctcctaagaaacttggattcgacgaggtcgtctacaccgttgatctcaagaaaggagaggtcaccaaagggtcatatgaaggaagaaagcctgatgcatc

SEQ ID NO: 31608 - DNA, 361 bp, Glycine max
  Clone ID: LIB3051-059-Q1-K2-A7
ctcctgtctttccaagaataagcaccgctcaaacacataccatttttgaaaccgcttcgtctcagctttctcttctgcttccattctgcatccacctctttccctcttcctctgtattcctctgtctctcttaaaggccctcaccaaatctaaagaaggattttctcaccttcctcgctattaatccttcttttagtatttaggtgcgggcacgagttgtttgggtttggaataaacactcccaaccagaataccatgtcaatataagagtgtggagaagaggggaaaatagaagagaaggaaaacccagaaatggcaaccacggataatcacgtggaagaagttacgatcgacgaccagt

SEQ ID NO: 31609 - DNA, 422 bp, Glycine max
  Clone ID: LIB3051-059-Q1-K2-A8
ctcctgtctttccaagaataagcaccgctcaaacacataccatttttgaaacccgttcgtctcagctttctcttctgcttccattctgcatccacctctttccctcttcctctgtattcctctgtctctcttaaaggccctcaccaaatctaaagaaggattttctcaccttcctcgctattaatccttcttttagtatttaggtgcgggcacgagttgtttgggtttggaataaacactcccaaccagaataccatgtcaatataagagtgtggagaagaggggaaaatagaagagaaggaaaacccagaaatggcaaccacggataatcacgtgaaagagtttacgatcgacgacgagtcatcgccgagggcgattctggaaacccctgtttcgggaacagagtccgacaacagtggaag

SEQ ID NO: 31610 - DNA, 400 bp, Glycine max
  Clone ID: LIB3051-059-Q1-K2-A9
ataagttcacggtcagttctgaaaaatgggttccaaggttttgcttgttgtagttatgttcatagcggctatacttctgatctctgctgaggttgcacccaatgaatacgaaaattttaacaaaaaagatgggaagcatgctccaaatgggttatatgatagcaaatggggttacggtggttggggtggtccttggtatggcggctggggtggcccttattatggtggcggctggggtggcccttattatggcggtggttggggcggtccctggcgtggtggtggcggtggtggctggggaggttggcgtcgacctaatggcaaccctcacaactaagaagaaaacttgctaaagcttctttacgggtttaagttttcgcaataaataaaacttcatgag

SEQ ID NO: 31611 - DNA, 433 bp, Glycine max
  Clone ID: LIB3051-059-Q1-K2-B11
gtgctcgcacattgggggaaataagtacgctggaaatgtcattatatttggatcaagtgtcaagtatcaacagagaagtcactgggcacttgtatggatatgttactccagatgatgtacctttattgtttcaccagcatatcattaaaggggagatttttgactcactatggaggtaatttttatctatgatattttcattagtattgaattttaaagggttttttcttttttactttttagttccatccttcaaaagacactagcaaggattgctctcgtgctggtcttttggagcagaagctgggtctgtggggttagaagttaattttatacaatgttttgtcagagtagaccaacaaaggttgtgcctgaggtggaaattttagctatgttcataaagtttgatgacatttccaatatttcatattgc

SEQ ID NO: 31612 - DNA, 183 bp, Glycine max
  Clone ID: LIB3051-059-Q1-K2-B6
aaagatccatctaaacccagatcagcttaactaaagtgtctgaattgttctgagttaggttctactacagcagatactgacactcttcacgaatgtgatatagtgtatatgatcaattctcgactattcttttaatcctattcactatcgacagcataacttgattgtctcaacttggttaaa

SEQ ID NO: 31613 - DNA, 340 bp, Glycine max
  Clone ID: LIB3051-059-Q1-K2-B7
gctctctcttggttcagagctccttctttgttctttctccttcgctggttgatatcagtgtttgaagaaattccccattgacgaagctcatgggcaagaaaggaggggccaaaaaattggagtctgcgtctcacactccaatatcattgagagaagaagccaccggaaaaatacaaaccaaggcagcctctaacaccaagtccaaattgagatttgaacacttgaaaaacctagcagtgtgggccaccaccataccatctttgggtgccttctatggtcaccaattcgctacctttggagaggccaccggaataccacctgatccttctttaataacttg

SEQ ID NO: 31614 - DNA, 419 bp, Glycine max
  Clone ID: LIB3051-059-Q1-K2-B8
aagaacttcatgccaactatgtttgtatcttggctccttgtattttaatcaatggtttgatttgctttaagtaaattttgagttttcaattgtggtgctcgactttagccgtgcaatttagactatgtgtcgggatgttgacgttttcttttcgttctctttcttgtaggctcattgtgaatgccttgtcttgcagctgaagtgtgaaggtatcctactagcatttcaaaattatatattgaagctgggaacaagtatgatgattcctttaataattgttaatggcatgggaagaagtgatcgatgtgtgctgaatttctgctcgtgtaaaacaattaattcttgcttttgaaacacatttttttttcctgatatttactttgttactggtttggtttggttgctcgatcatatataac

SEQ ID NO: 31615 - DNA, 392 bp, Glycine max
  Clone ID: LIB3051-059-Q1-K2-C10
accgcccacgcgtgcgggaaactccggctgccaccggcgcatagaatatgctcctcggggaggacatgttcagactgatttcagactcatgcgaccctgtaccaaacgtgactactcgaatactcatgcaataatctgaacaaattgcatgcatgatgcctggatgcctaacgagttattcacgccaatgagtcagatgcaatgatagaacatcatggcttttattgtaaagctgtgtatacaggacgtaatcaagcagaatgtcccgatgcatgagactatttaaacaactaatgatcacgagacagcacttgtacttgcgatgccttgcacttgacaatcgacgatttttatgcgtgcatggatacttattatacttctgttcacaaaga

SEQ ID NO: 31616 - DNA, 409 bp, Glycine max
  Clone ID: LIB3051-059-Q1-K2-C11
cgcactacctcctcttctcctccttcgttttcctctccttcctctaccgtttcctggagctccatttcctccaagacctcttctccctcttctccggctcctccgtcaccttaacctaccatcccgcttcccaattctacgacgccgtggtttccaaatgcaggattctccacggcacctacctcgccacgccctggctctccagccctcatctccagaccgtgtttctcaacttcttcggcagacctcccttcttcaaatacagaagacaactgtttactactcctgatggcggaaccgttgctttggactggctgttgagttctgacgtttctgctggtgctatccatatggaagatgttgtttctacagatgaatccactcccattgttgtagtaattcctggtct

SEQ ID NO: 31617 - DNA, 240 bp, Glycine max
  Clone ID: LIB3051-059-Q1-K2-C4
ctcttggaatagtatgagattaaaaagttgaccaatagtatatgaaagcttcccactgaattgattgttggaaaggtccaaatagtataatgaggcaaatttagtgaccttgaacataggaattggtccactcaaatggtttaaacttagatccaaaacatcaagatggggcaaatggtcaaatgataatggcccaacaatgttggtattttgaagtctcaatgtctttaagtatgaaag

SEQ ID NO: 31618 - DNA, 435 bp, Glycine max
  Clone ID: LIB3051-059-Q1-K2-C8
caagaatgctgatgtgttgccaaggataatgatggacaaactcccttgcattatgctggtacatgtgagagagaagccatagccgagtatttattgaagcataatgcagacatatattcaaaagataatgatgggagttcaccacgtgacatctgtgagtcaaactggccctgtatgcagcatgtggggggagaagtaaattgattgattgattgtttgcttgttgctgcttctggccaatacaaccttttacccaaatccctataggatgttcgtgtctatataacttgattttttttgtccttactcatggtgtatacacccttttcagtctagtgtacgctgtacgcctatgcaccgcttaggaggttagttaattaggttgtattctgttctattatggattcctctgcttaactctttaattctggctct

SEQ ID NO: 31619 - DNA, 344 bp, Glycine max
  Clone ID: LIB3051-059-Q1-K2-D1
cttcgaaaatttcccgtggcttaactaatttaaaggttttccattatttttccttcaatgaaatgccaggttccttaaccttaaggggtgcaccggaagctggttatggtaaatcaggatggatttaagaacgaaaaaccaatgaggactactaaaccaaattttcgtcagccaggaaaggacagcccaacttttatgaccaaagggaggtctgtacgtggggtttcagaaccagctgaaaagttgggcaatttgcctgtttccagtcgaagacattcaatggggcaacctggtcctcctcaaccaatgaaggctggaggcaattggatttctgaatttggaaa

SEQ ID NO: 31620 - DNA, 419 bp, Glycine max
  Clone ID: LIB3051-059-Q1-K2-D10
ctcttctatgacccgtctatccgagagactggtccgagtgcgtggatcgtacccgaaaccgacccgtcttctcgatcttgactctctctactatctactgcatctctgcaagttcctcgatcgcttactactctcccaaatactacccgccatggacaacctcttctctgattacttctcctactactccgattcctcccactacagtccccaccgccgcttcctccaagaccaagaccaccaccgctaccgcgatttctccagcctcgagcgcactctacctccttccctacacctgatggctggaagcggagaacgaaggtgatcgatgaaacgcactgctttatacggcttcatgcaattccgattccgactcctagattttgcttcatctcatgaaggaagaggaaccacacaac

SEQ ID NO: 31621 - DNA, 421 bp, Glycine max
  Clone ID: LIB3051-059-Q1-K2-D12
cccacgcgtccgtagaagcctagttgtggtgctataaacattagatgctacgatttttgtactctgccaactgctgctgtggtgcaacacttttctttaagcttttgtggttttaaaatagtctcaataatttgattatataggtgtatgatagatagaagttgttgaaggggaaaaatgtagaaatagtatctgtattttaggttatagctgttcattgtatttcagaaatcagcttttatttgtggttggttgcatatatggctccatggtgtatttatgtatggatgtatatatacgttctctcttggtatattagaaagacattaccaactagtaaaaaaaaaaaaagaaatgacatacaaaaatgaaacaataaaaacataatataactaaaaaaaataaaaggggcgcccgtttt

SEQ ID NO: 31622 - DNA, 418 bp, Glycine max
  Clone ID: LIB3051-059-Q1-K2-D4
cttatgtgtacataagtcggtcacggtggcatgatgcaaaggtacaatgtacgaagcaaagggcctttacaaagaggctataaaagcttttcgcgatgctttgagcattgatcccggacatgttcctagcttgatctctactgctgtggttcttagacggtgcagtaatcaatcaaatcctgctatcagaagctttctgatggatgcactacggcatgacagatttaatgcttctgcttggtataatcttggcatttttaacaaggatgagggtacaattctagaagctgcagactgttttgagacagcaaactttcttgaagaatcggcaccagttgaacctttcagatgactgactctgcaagcatttttgtcatttaatctgatgatgatgatgatgatatatatatatataaca

SEQ ID NO: 31623 - DNA, 379 bp, Glycine max
  Clone ID: LIB3051-059-Q1-K2-E1
ggaggctatggagggggacgtggtggatatggcggcggacgaggtggctatggtggcgggcgtggtggctatggcggcgggcgtggtggcgggcgtggtggctatggtcctaatgaacataacgaggctggggttgatgctaaccctcacaactaagaaggcaactttctaaagcttatatatgggtttaagttatcgcaataaataaaacttcatgagaaggttagttgtaatagaagtggaaaactttgtaaaggaataatacctttcatgaatttccttatctttgtgttgtctctggttctgttttgctaaactcaaataaataaaattgtataatattgtctaacatacatatttttactaccttttatctatt

SEQ ID NO: 31624 - DNA, 433 bp, Glycine max
  Clone ID: LIB3051-059-Q1-K2-E11
cccacgcgtccgcccacgcgtccgcccacgcgtccgatttatccatttagaaagacattgtggttacccatagtctcatagtgtcatactgcaacacaaaacaatgggttcccttatggcaggatgggactctacccacatagatcctcaatcagccacacttaaaaggaaccgctcactcaccaaggatgaaattgatgcttactggaaatcaaagaagaagatagaggaagaacaccttagagctatttccaacttgtcagagactattcaggctagcaaaagcacagaacctgagaagaagttgcagaagtcaatgaccatgcctgtgacccgtgcacgggactacttaaatatgggcatagacacaagtttggagcatcttattaagaaaaatggctggtggaccaagagtagctgtgcatttctgaat

SEQ ID NO: 31625 - DNA, 424 bp, Glycine max
  Clone ID: LIB3051-059-Q1-K2-E12
ctaagcaaccaaattgagaaacactcccaaagattggtgaccttagtctacccttacatccaaatcacattccatgagttcactggtgagagactcatgagaagtgaggcctattctgccatagagaactacctcagctccaaggcatcaacacaagcgaagaggctcaaagctgacatagggaagaacaaccagtctcttgttctcagcatggatgaccatgaagaagtagctgatgagttcaatggtgtaaagctttggtgggcctatgggaagcacatttccaagtcacaatccacaatttccttccaccaccctatgtcagatgagaaaaggcaaaggaagctttataccaatagtggtgcttattggagccatgtagtgtttgagcaccctgcaacatttcaaacactagctatggatc

SEQ ID NO: 31626 - DNA, 402 bp, Glycine max
  Clone ID: LIB3051-059-Q1-K2-E2
gtttccaacctatccacctaaggccaaacctttctcacaaatggaaaaaccgcaacgaaagaaagaagaaactaataaaagcaaaaaaaaaaaaaagagagaaaacatctaaataccaaaatccccctctcaattcattttctttaacttttgttcagcaaccacaacaacttcttcccttcttctctttctctctctaaaaccctttttctctctagattatttccttcatcattagcttaattgatcaagctttagtcctttcgtttgcttcaccccatggatctaacattcgcaccttaaaagagatccttcaaagttcagttcaatttcggatcaaagtggtggcgttccgacactgataaattaaaattgagaggagagagagaaaaaaaaatgaaa

SEQ ID NO: 31627 - DNA, 425 bp, Glycine max
  Clone ID: LIB3051-059-Q1-K2-E3
cggacgcgtgggggatgaatgggttgtctcaagggtttttcacaagaacacagatgtcgaaaagtcctcaactcctggccttttgaggataaactctattggggatgatcttcttgattattcttcactaccacctctcatggatcctccttatggcaacaccaacaccaccaacaacactaacccactttcttcatcaactaaatcacaatcagagggctattatcttcccagtttctccatcaacaaccaccagcagcagcttctcatcaagccagaagatcaccaccaccacagaagctataatgagattcccacaattaactacacctcaaaccaagccaatctcagcaacaacgttaacgcaatgggcaacaacactctctcacagcccttaaacatgttctcagctgattactatgtgc

SEQ ID NO: 31628 - DNA, 354 bp, Glycine max
  unsure (1)..(354): unsure at all n locations
  Clone ID: LIB3051-059-Q1-K2-E7
cactgatctacaaagacatttaatttcaatggatcttgtttcgcatcttgatcagaagcaactggaagaattagctgtgtcacttcgtctatttactggctgattgttgaaaacaggattttaatggaattggtgattgataatcaaagatatgaaagcttagttactggaagtactgaagtacgacatgagtggccaacccttgggatacaatgtttgtactcttcatgcatctctacattttaacgactactgagtatgtcatttgttcaattttcctttttttccttcactttttctgtttttgaggggtttgggtcgatactgaatatgagatntgtgttttcttttttc

SEQ ID NO: 31629 - DNA, 106 bp, Glycine max
  Clone ID: LIB3051-059-Q1-K2-F6
attaatataataaaccaactagagttggccttgtaaaatgttttagattcaaaatctggtgttgtcattgcataaaaaaaagttaatataatcatcttttatatgc

SEQ ID NO: 31630 - DNA, 432 bp, Glycine max
  Clone ID: LIB3051-059-Q1-K2-F8
gcgctataaaggtttcaaggaggggcatacaaggattcttgttgcaacagattgggttggaagagggattgatattgaacgtgtcaacattgttataaactatgacatgcctgattctgctgacacatacttacacagggttggtcgagctggaagatttggcaccaaaggccttgcaatcacatttgtttcctgttctactgatgttgatgttctcaacaatgttcagtcaaggtttgaggtggatataaagcaacttcctgagcagatcgatacctctacctatatgccatcgtagaattttttgggaacaatgttaagtgcttggtggcatgagtaatcgtgacgcataacggtgcaactgatgattaaccgtgctgatagataccagagtcttgttacagactaggccattttaccattggatattta

SEQ ID NO: 31631 - DNA, 414 bp, Glycine max
  Clone ID: LIB3051-059-Q1-K2-G1
gttaacttctttcaactaatttgttttctctatacacacaagagtcaagattggaagtgtacttgcttcatgaagcacatgactttccatggtcaatgatgcttcatgcagtgatctaactttctgaaactgaaccaacaacggatcgttctcagtcaccaccccagacgaatgtttcctttattacgatcgacataatcaaacatcaatatcctcacacgtgtcttactcacgtgcacaaaacttaagcttatagttattgtcgtcatagtcatcatgggagaaggtacaaagtaaattaaaacaaccgaaagcataagcttggattattttattttgtctcacaataatgttattacttattccaaccaaagcatttatttagtcttacactttgttctcactaggagaaaa

SEQ ID NO: 31632 - DNA, 427 bp, Glycine max
  unsure (1)..(427): unsure at all n locations
  Clone ID: LIB3051-059-Q1-K2-G11
gaatttatttcccaagcgcattcatttttcttttatccagatcgccgcacgattccattttctcaatcagcatcggtgattgatcctaatctcccaacagttgaagaaagatctagggttcctcctgctgaatccacagctgtctcaagcgcatttcttccattccgatatagaatctaattcacgcacgcggtttcgattcaaattcagctcgctccagcaggtttcgttacgtgaatgagaagagatacggttacggcttaaaatgagcatggaggtcattagcgatacggcgtcgttggaggtcgatttgttgcagctccctgaggtgtcctctctcgcactcaaatctaacctaactntcgtcgagacgctcttcgagcagtggctttcgcttcccgaaagcaaccgattggtgacatcattg

SEQ ID NO: 31633 - DNA, 431 bp, Glycine max
  Clone ID: LIB3051-059-Q1-K2-G2
atttcccaatgcgtatcgcaatctacaggttctaatttcactgaagcctaaaaagtgtgctgattgttatgctgctaatttagcaccttctgatgtgaactcaagaggcgaaggttgggcaactttgattgctgagagaatggggaatgttggttactctttcaatcgaactgtttggaagaaaatacacaataaggcgagagagttttgtttctttgatgactataattgggatatcacaatgtgggcaactgtttatccttcatttggcagtcccgtttacacgttacgaggtcctaggaccagcgccgttcattttgggagatgtggtttgcatcaaggtcaagaggagaataaggcttgcattgataatggcatggtgaacattaatgttgaagagcctgatacagtttctaacattgaattaaatt

SEQ ID NO: 31634 - DNA, 281 bp, Glycine max
  Clone ID: LIB3051-059-Q1-K2-G3
gagcgtatttaagttgtggagtagttctctacaggcccctatggtgggtcgtgtattctgtaagtaacactatgagtaactcaagagcaggtttgcattacatcctgtagaattcgatgtggaactctataatcaactgttgaaaagtcacctcaggctcggagattgtattctgatgatatattatatatcaagtggccaactattatctaatttaacagtccggtacacgcactaggtctataccagcgggacatttggagattagatagcatcaagtc

SEQ ID NO: 31635 - DNA, 362 bp, Glycine max
  Clone ID: LIB3051-059-Q1-K2-G8
cccacgcgtccgcaacttatcacacaactcggtttcatattgcatagtgagagagttacgtacgaggatgtctgacattgctatgctggtggctgacgagtacgagaggagggtcaagagtttaagaaagtccggtggtggaactggagccgacgaatttgacatggtttcttgagttacggagatagtgtcgaggctcaaggaaaagatacaacttgtgcaatgggttcaggagcccaagactcaagtcgatatggctgcttccaacagcttcttctatgcttaaacaattcattcattcatcaactgctctggactctgttgtggtaggtgtcattcattgttgcaacgaattgctatct

SEQ ID NO: 31636 - DNA, 327 bp, Glycine max
  Clone ID: LIB3051-059-Q1-K2-H1
agttcacacactaagttctgaaaaatgagttccaaagtttttcttattctacttatgtgcatggccactatacttttgatctcctctgaggttgcacccgatgatgcataccagaattttgacaaaacagatgggaagcgtagtgcaaatggggtagatgaaagcaaatattggcgtggtggctatggcgactatggtggttggcgtggtggtggttggcgtggtggctatggaggctggcgtggtggctatggtggtgggcgtggtggctatggtggctggcgtggtggctatggtggtgggcgtggtggctacggaggttggggt

SEQ ID NO: 31637 - DNA, 423 bp, Glycine max
  Clone ID: LIB3051-059-Q1-K2-H11
caaaagaagaaactgttgtggggtggcaaaaagagtacacctactgaagagtctggccatcgatgggataccgggatgttttctgatcgtgagaggcaagagaaattcaacaaactcatgggtatgagaggcgaagcaaaggtggagcagaattccaacaaccaaagcagtaacgaaattctccgtgctgagaagcagaaggaacttcagatggatctagagaaacaatacactgcaggccttcgacgaagagatggccgtacagttggcttagggctttaaccattctccggaaaatttacatcctttgacatttatgtgttaattatcaccccatgtttagggaggagctttttgcttgtttgctgtggacatgcttgggagtttatgaatcttatgttagggacatcaccacttggcatc

SEQ ID NO: 31638 - DNA, 438 bp, Glycine max
  unsure (1)..(438): unsure at all n locations
  Clone ID: LIB3051-059-Q1-K2-H7
ttcagatttaaacatgaacaaacatgcagactcagctcttttggacctgctcaaggtgagtgaattgtgacatgcagtctgtcaactttccatgttgagtaactgtgatttaagatttcttaaggaattacattttttatttttcactgtgatactgttccattgtcatgaacagatctctttcgccagatccaacacttctgtggcgtttccctatgtttctacatcagaggatgtgcttttggaaaactcattgatttcaggatttgctgaagcctgtggagatatgggaattggcaatgttgctttccatggatcttgctccatggatggggcaaatcatgaagaaatcacaactttgcactcagttcaagactatntgatcaagangatggaagagagtcacagaaggaaaacagaattgggtgtgttctgcaa

SEQ ID NO: 31639 - DNA, 310 bp, Glycine max
  Clone ID: LIB3051-060-Q1-K1-A1
ctcactcgatcgggataaccctaatacttctatcatcatctattgatactggcccttacgatccttgcggctcttcaagcggtccacgatgtgctgagaagctcgcgcatccatgctcatataggcctgatcaacctactagcgactatccctttaatacagggaactagccatccaaggtcggtagcgcgaatatcatcatccatcagactacaatgcgccgatcgcagacgcatccactattgcccctgatgttgcattgcaaccgatggcgccagctcacagtcattactctatacgagcccatagg

SEQ ID NO: 31640 - DNA, 376 bp, Glycine max
  unsure (1)..(376): unsure at all n locations
  Clone ID: LIB3051-060-Q1-K1-A11
tttctcttttcctcataaccccctctctccctaccaaatttcaatttcctctttcctcccttgaggttatggatccattggggaaacgccctgccgccgaggacgattccctaatttccgattgcgagagcggggtttccgctggagacacgccgncgtcgttcgtcgaaaacgccgacctcgtccggacagattcgttcgtggcctcgtcgcgcacttgttcaaacccgaggttctggcagttcgcagaaacgtgtgttccttcgtcatggccctggcgcgtcaacattcctttcacgtcttcgcgccgtccctgggccgaattgcccggcggcaatgccaacgtgaagttcgcctggtacggtgcgtccagtaa

SEQ ID NO: 31641 - DNA, 318 bp, Glycine max
  Clone ID: LIB3051-060-Q1-K1-A12
ggcgaaggagatagtgaaagagcttcttcctctaattcgagtgtacaaggatggcagcgtggagcgtgttctaagctctgaaaacgtggcagcctcccctgaagatccccaaactggagtctcatccaaagacatagtcatcgcagacaacccctacgtctccgctcgcattttccttcccaaatcccaccacactaacaacaaactccccatcttcctctacttccacatacgttggaaacaataaaggggacgtgaaaacagaagatacaggtgtgctgtaccatgaaatggtgcacgtttggcagtggaatggga

SEQ ID NO: 31642 - DNA, 450 bp, Glycine max
  Clone ID: LIB3051-060-Q1-K1-A4
caagcgagcacaacctcgatatgggtcgagggagctgagacagggatactgtcgtgcgtggtcttcgagcattctggagcaaccctgagagagctgtggaatatttgtatacaggtatccctgatcaagctgaaactacaattgtaaccagcacgcctgtaagtgctcaacctacaaatcctactgatgatgctgcacagacagcacaacctgctgaacttacctcagatggacctaacgctaatccttgagacctttgtgcccagggtcatcctaatgtgggttctggtgctgctgctgctggttcatcggactgttcacgcaacagtcaacaattgcaagcctcgcgagctatggcgcatgctaatccacacatattgcactcaatgctacaagagctcggcaagcaaaatccccatctgatgagattgattccagaccatcaagctg

SEQ ID NO: 31643 - DNA, 431 bp, Glycine max
  Clone ID: LIB3051-060-Q1-K1-A7
gtcagagggaccctatgccttggggaggtcacggtattctgtcaggcagcctcgagtacgtcctcctccttcactaggttctgttcacagaacttacaaaaatgaaaatgaacaccctggcccttctgctttcctagaaaatgagatgcattataatcaggcaaccagaagtgactctacccttccaactggttatgacaatgggaaccgtggacaacctgaagtagtggatgcccggcaagagactactgagaatgaggaccataaagtggaatccacaccgaagtgtgattctcagtcttcactctctgtttcaagccccccaagttctccaacacatctttctcatgatgacttggatgactctggagattcccctacgatattgacttctgaaggaagcaaaaatgaccccctcacagctccagata

SEQ ID NO: 31644 - DNA, 266 bp, Glycine max
  Clone ID: LIB3051-060-Q1-K1-A9
cggaaaacggagcaggccggaaacccccttgtccaagtggaagatccacgacggcggaagagagaggaacatcattggcggcggcggcggcggcgatccgctcgaggaccacgtccggaagaaggaggctccgccgcatgccgccgtgtcggcgaggaagctcgcagccgggatatggcggatgcagctgccggaagcagcggcgggttgatggcggaaggcgaaggtgttcgaggaaaatcggtgaagatcgtttgggagttcat

SEQ ID NO: 31645 - DNA, 418 bp, Glycine max
  Clone ID: LIB3051-060-Q1-K1-B11
cccacgcgtccgaacaaacttcccaatctgggaaaaagcaaaaaccgtcttctgatgatgagggggatgataaagctgaactttcagatgcaaaagatgtttctcaggaagatgaagatgttgcagtaccgaacaatgaaagtgatgatgaaagaagtaaatcagaggaacagaaagagaaatcaaagtctcacaagcgtacttccaaaaaatctgttaaagagaattcagttagcaaagctgatagaacctcatctgccaagaagacccctgttaaagatgccaagagcattgaaaaaattaaaaaaaagacaacttcaaaaaagagtgttgctgagcatgacagtgcttctgcctccgttaagtcaaagcaacctgcatccaagaaacagaaaactgttagtgaaaagcaggacac

SEQ ID NO: 31646 - DNA, 61 bp, Glycine max
  unsure (1)..(61): unsure at all n locations
  Clone ID: LIB3051-060-Q1-K1-B12
ntacgccacgcctccgctatcgtagcaaaaaaagaaagaaagaaaaccctaacttaacttt

SEQ ID NO: 31647 - DNA, 154 bp, Glycine max
  unsure (1)..(154): unsure at all n locations
  Clone ID: LIB3051-060-Q1-K1-B3
taaaaaggtgaccctacattattacttagtggatcctctatagctntcatgctcctaaagcttgtctttctttcagtgccattttaatgtacgtgttactttataatttttagaatgtattatgaaaaccggttttggtaaaaaataatgcaat

SEQ ID NO: 31648 - DNA, 412 bp, Glycine max
  Clone ID: LIB3051-060-Q1-K1-B4
aacacgcgtccgcacagacatagaggaagactctatcgccacgaagcggttggagcttacgaaacgacccaaagagggagcttaactcatccagagcagctcacttttatcgagtcctgcagcgtgattgtctgatatgtgccaagaatgatctgaagctgggctgaagacaagcatcacgaagagacccacacggtcaaaagctatggcaagcatgacaaagcgatccacatgatcatgactatgatcatgcatccgaagaaaaatcatttgaacagatccgtaagacggcgtagaaaaagcatttttaacaagaaacttgtaggactgtcttacagatagatacgctgcagatgatgattgaagcaccatgacatggtaaaagagtgacatgtatgtcgcagcataacat

SEQ ID NO: 31649 - DNA, 397 bp, Glycine max
  Clone ID: LIB3051-060-Q1-K1-B5
aacacacgtccgcacggacaatgaggaagactctctccccacggaactatgtaagcttggttaacgacccatcgagagagccaaactcatccaaagaatctcacttttggtgagtcctgcagcgtgattgtctgatatgtgccaataatgatctcaaactaagctgaagacaagcaacacgaagatacccacacggtcaaaagttatggcaagcatgaaaagctattctatatgatcataactatgatcatgatggaaagaataaacatttgaacagatccttaatacggcgaagaaaaagcacttttaacaagaagcttgtaggactgttttggagatggatacgctgcagatgatgattcaagtatcttgacattgtattatgagtgacatgtat

SEQ ID NO: 31650 - DNA, 435 bp, Glycine max
  Clone ID: LIB3051-060-Q1-K1-B7
cccacgcgtccggttggatatggctaaaacatcagaacctcttagtgccaccaaggaagacataggatttggcttgacttcagatcaaaacaaaggggatcctggtaattcagaaactggaaaggattcaacaaatgtgggaggccaagttgaggagagttcccagagtaggcctgttgctactgagccagaaagccatcaagagggggagagtgctgcatctaagaggcaagtctctcccgaaaagctctaccgtgcagctttattaaggagccgttttgctgacaccatacttaaagctcaagagaaagcacttgaaaaggatgaaaagcgagatcctgaaaaacttaggattgagcgagaagatcttgaaaggcggcagaaagaagagaaagcttcgttgcaggcggaggcaaaggctgcagaagaggctca

SEQ ID NO: 31651 - DNA, 228 bp, Glycine max
  Clone ID: LIB3051-060-Q1-K1-B9
gctaagtttctcttcttcaatatttgtaagatgagattcagggcctcatgaaaacacaggggtgtaggggtggaagtttttacctgctatattctttctggattttgtggatggtgtgttacctatagttatttgtaaatatttttgttgaaccaaagacagtttcttcagtttttcatgtttcatgtttcatgtttagtagcaactttttgccagatttatgtgctg

SEQ ID NO: 31652 - DNA, 437 bp, Glycine max
  unsure (1)..(437): unsure at all n locations
  Clone ID: LIB3051-060-Q1-K1-C11
ctttgtttcgctctcgcttttcagggccaacaacgcccgagaagaaagaagattgtgtctcccggtattatttggagaattctggaacacccaaatgtttctggtcatcgtcgtcgctgatctctgttccctcgttactggttctgattgcagaggcgaaaaggttttccgcatcaaaatcgaattttgtttgctccatcatcaccatgggtagaatcacgaaactgggttntcttcttctacccagataagtaaaagggttttcttctttctcatttattccgacaggtgcacanataacaacatcatcatcgtatcaatcatcggacaagtgcacagacaaacaacatttgtgtctgattagcagaaaaaggggtaaagggttgttccgtgtttgtttgatgaattatgttcaaacagatattcagtaaactccc

SEQ ID NO: 31653 - DNA, 364 bp, Glycine max
  Clone ID: LIB3051-060-Q1-K1-C12
agaaatctttcccgtaaaacaaatataaattatatacatgtatacatacaacattgtcacaaggcctgaggtgtgatatttgtttctggtgaaaaagttcactttagagagattgttcaaagttcaaacgtgtacgagtggaagaatgacttccaaaacaccatggtcgtatactctttagaaaagtacaatgttaatgtaaacatcttgcttgattctgtgaagtaactatgaaatgccttgcatggcttgtgatatgtcttagtatgatttattagctgtttctgaaataaaataaagtataattaagtgggatattaattttttacccgtgacatattgaaatatattggggatttttttt

SEQ ID NO: 31654 - DNA, 447 bp, Glycine max
  Clone ID: LIB3051-060-Q1-K1-C2
gacacgcgtgcggatgcctcaggcaccatgggttgagcatgcggatatgggaacttgtagagccagtgctatggtgcgaacactgctgctttgagcacagctgtgttcaacaatggtgtaagctgtggggcatgttgtgagataaagcgtgttaacgaccaaaggtggtgccttacacgctcagttattgacactggaaccaatttctgtgcactaaacaatgcactacctaataatgcaagtggatggtgtaaccattcccttcaccacttagaccttttccaacctattgttcaacacattgctcaatacaaagctggaatagtacccgtggcttaccgaagggtgccttgccgaatgagagagggcatcagattcaccatctacggtcactcatacttcaacctagacctaatttgcaacgttggaggtgcaggtgatgttcac

SEQ ID NO: 31655 - DNA, 249 bp, Glycine max
  Clone ID: LIB3051-060-Q1-K1-C5
accacacgtccgactatacaatctatgcttatttctatagacggacttatttcctacggggtatgcactataagttgctccccaatatgtcactctcttatctatacgcatgatgctcatcaatgtccaacgatccctcaagcctttcaacatcttcaactagaatccttattacctaaacaacatttgtccaacacgaatgagcctcttctaacattcaatcctcttctcggaataattacatctcct

SEQ ID NO: 31656 - DNA, 438 bp, Glycine max
  Clone ID: LIB3051-060-Q1-K1-C6
cttgttgttgtaactaaggaacaagagattgcttcttcttcccttttgttttcaaatttgaatttttcatcgggttctctgaaatggagagagatttcatgggtctcaactcaaaagaacctcttgctgtggtgaaggaggagatgcacgtttatggcttcgaagactctggcttcacaaagggtcggattgcacagtggccattctcgaacaaagtatctgcccttccacatttgatgtctttcaaggcttctcaagatgataagactaagaagatagtgtctgatcccttaacatctgcagggtttatgtctatcttaagtcaagaagcatttgactctagtcagaaacgctgtgctggtgaaccccagaagtctttcaatcacgatgggcaaggtcgccttcatttttcgctgactccatatcctgtacaacatg

SEQ ID NO: 31657 - DNA, 281 bp, Glycine max
  Clone ID: LIB3051-060-Q1-K1-C7
atgaataggctgttaatatgatgctgaagaaaagctaaggaaggcaaagttcaatctcgctgtaaacaaagcagaatctataggtgcaaaataacttgtatatattttcaaatgaaaccccttttttaatctgtcgttgatatcttttatttcttttatttatcttctctcaagagtttacggtgttatgtagtggctatgtccaatgtcacatgaacatcttagaccatttactgttacgattgcgtcaatatgatgggttgcatgttatatttgaagat

SEQ ID NO: 31658 - DNA, 299 bp, Glycine max
  Clone ID: LIB3051-060-Q1-K1-D12
cgtatctattctttgcttttggttttggttgattgaaggccttcacggcattcgttgcggcagtttaatcgatttatccaagcagatcttggcatgttataaagggtagactgcaaaatggaggcattgaaagcatcttatggggatggatcttctgattcagattctgaatctgcccattcaattccaacttctgctccctcagcagtattcacacccttgccaccacctcctatctcactccttgatcctccaagcattcttgatctgcagataggtcagacaactagacttaggag

SEQ ID NO: 31659 - DNA, 420 bp, Glycine max
  Clone ID: LIB3051-060-Q1-K1-D2
cacatgactgtctcttcaataccttccatgtcttaatcatagaactaattgaacgatgagggcaataactaagtgtgcactcactgtcttaccttaccagtaaagcagagcctagcttctaaggctgacacacgatcactctatgcctttacaactgcacagactgctaatacgcttcttctactcacatgattacaaaatgctttacctactttatcagctataccgataccacatacagatcccaagatacaggctttgcttgttcatctaccaaatcctgcttatgcgatcgacctctatatagcactgtaccctgagaggccttttcggcaattgatcctgagagttcagactagacctgcttttaaggcgccaaacgctttaataaccaatgcttctattaaactatgaaggtct

SEQ ID NO: 31660 - DNA, 432 bp, Glycine max
  Clone ID: LIB3051-060-Q1-K1-D7
tttttgtctcattgcccccaaatatcaccgtttctctcaagcggtctcaatcttttctcgatttgagtggctgcaaaaccccacgtgttacctccttcacttttttggctgcccccactttttttgttcacctctttcttcaaccaataatccctttggaggtttagggttttggtcctcgcggctctctcctaattaaaggatatttctttctttttttcaataacccgccatgtctaagaggtgaggttgatcatcttgtgttttgtattggattattaacattttcttgatgtaggttttctgtcttgtgttctgcagtttctccaatttctgttgattattgacttttttatttatatgtttctgttatttattggtcttataatccggctttctttgaaccgagaaaagattggttttggtttccat

SEQ ID NO: 31661 - DNA, 448 bp, Glycine max
  Clone ID: LIB3051-060-Q1-K1-E2
cccacgcgtgcgcggacgcgtgggtagctagctaggcagccacgaaccttggcgcatttgcttttttctgtgggcgagtataataataattgcagtaaaatggcatttctgaggtcaatagcaacaacagcaattgctactatacctgcagccttagcattctcatcatcttcatcatcttctttccctcgctcttcccaatcccccaatccccaaaatagattaagtcttgtcaaaacacttgctactcctccctctgctctccacatggaccacaaactctcttctcagcctgacgctgtcttgcccgagttactgacggagttcatggtggacatgaaatgcgaaggttgtgttaatgctgtcaaaaataagttgaacgagataaatggagttaagaacgtagaggtggacttgagcaatcaggttgtgaggattctcggttcaa

SEQ ID NO: 31662 - DNA, 425 bp, Glycine max
  Clone ID: LIB3051-060-Q1-K1-E8
cttcaaccatcacaaacccaccaccgccccaaagttgaatccgttctgtccccacaacatcaagtgcagcttcttcggatgccccgaattctgttccgttatggatgtgcgaggagatgggattttcccggatgaggtggttattcagattctagcaaggttgcctgtgaagtcccttttcagagtcaaggttcgagcatcttgtaatggcttgctgtgctgctctagtattcctgataagggtgtcttctatgtctgcaatccggttactcgcgagtacaggttgcttcccaagagtagggaaaggcatgtgactcgattttacccggatggcgaggctaccttggttggtttggcctgtgattcagcatatcggaagttcaatgttgttctagcgggataccatcgcatgtttggtcataggc

SEQ ID NO: 31663 - DNA, 410 bp, Glycine max
  Clone ID: LIB3051-060-Q1-K1-E9
cgttgttccaacttgcaactccttctcttgtcactgtcacttctttcttcccaacacaacacggcagacgcagtacataacaacttttgtttccttggcgccgccacaccaacatgtcagccttcactatttccaacaacgccgccgccgccaccgccacgtggccactcccccaattcaacacttgccactttccgcactctccatccattgttcttcatcattccctcctcaacatccgcgctttcaggatccactgtgtccctcaagaacctctccccccattacaacaacaacccaaacacgatcaactttctcccggaggcgacggaagccacggtgacgccggcggtggcggatgcggaggcggagatggaggtgaaggaagaggagacgaaaaagtcggaccc

SEQ ID NO: 31664 - DNA, 354 bp, Glycine max
  Clone ID: LIB3051-060-Q1-K1-F1
gcaacgtggtcacacccactagcagtattattacaaccatccataactttattcatacggggtatatgaacattcggggatgaaaccacctcatgaggtattgctgctaccatgaacctaactctatttacagaagcctgcctcttattgccgacagctgtcgaaaccttgatgcatgactggaacctagaggcgaacatattgcatctaaccatcagaaacatcactttcaggattgactgatatagcttctcagggatgcacacaatataatccgctgatcaggcactactttctatacaatgaatagcttaaacaatgcaggagaggttgccagactcagacgaagaagat

SEQ ID NO: 31665 - DNA, 337 bp, Glycine max
  Clone ID: LIB3051-060-Q1-K1-F11
caatcatcaacacagagctgagtgtgttgctctttgaatccaccttcttcttccattggaggagcattttctcctggggtagaagtactaccacacttttcttttttcacttctctaagttgctaagttaattgctccttcattttttcactcttcgttctcgcgtacccgtgtcacggtaactcgtggtgaagtgttcgaaaatgactgtcacacctaagatctcagttaacgatgggaaacttgttgtccatggtaagaccattctgactggagtgccagacaacgttgtgctgactccaggttctgaaggggtcttgtgactggtgcttttggt

SEQ ID NO: 31666 - DNA, 377 bp, Glycine max
  Clone ID: LIB3051-060-Q1-K1-F3
gttaataccatgcgcatgcacagaatggtttgatgctataccatatgatcttgatccaggggtcttaactgttcgaggggcacactacatatggatgattatggccatggttggatcgctactagctacattgacctactactggatgattaacatgcccgaaaccgcttatgataccgctctagggaccaataacacgaggcttgcagctgtagactatgtctcatagtttgcctgtttgaaatcaagctgaaccacaagactcggagcatatggctaactcatatggctagacctccaaggactttctcagtcgtcatgtactgcatctactctgtacatctcagcacatggtacttgctcgatattgcgttcta

SEQ ID NO: 31667 - DNA, 116 bp, Glycine max
  Clone ID: LIB3051-060-Q1-K1-F4
gtaaataccatgcttaagatcataaccttttatgactataccctaagctttttggacccggctactttttaaccctgtcgtacataacttaaatatctatttggcccattttgcat

SEQ ID NO: 31668 - DNA, 435 bp, Glycine max
  Clone ID: LIB3051-060-Q1-K1-F5
gtaaataccatgcttaagatcttaccttcttatgactatacgggatgctttttgaccggagctacatcttaagctcaccgcacagcacgtatatatctatgtgtctcattgtgcattgctactgtaaacatgaacctcacccaatattactgactcaaatgcaatctcataaattctcactttaaggacagaaatagagagcgctaacagctctcggttacgttcatacatacgctttgttacctaatagatatgtgaaagactcacaaatatatcgtgacgctattggctcatccctcgtagaatctcatatgcttcttctaccagatgatacttgaatgtctcatacctgtaaataaaaactgcattagttttaacaaaactattgtagaccataatagttgaaccacacatccgactaatgtaaataccact

SEQ ID NO: 31669 - DNA, 412 bp, Glycine max
  unsure (1)..(412): unsure at all n locations
  Clone ID: LIB3051-060-Q1-K1-F7
gaaaaagctggcagattccttgccctcaattggtgcaatagaggaccgctagaagagctggctcacatgagcttcaacctccaccgttcactcttcgaagaactagacggttcatgatcgtacagttacagaaccctcaccactctcagcctcatcgttacggaatttgaaggctccttttctgccacctcaatgttgtcgtcttgagttgacagacctactcgtggttggaaccatcgaaatgacagtgcaggtgcacctatggctcttcattcccgcgctgattgatagatcagtggagaagcatggagtgaagatagagattacaaaataggaacggttggaagtggaagaaggatgagtnggatcgatggtgcttgaagaatgacgagttttggaagcggattctatg

SEQ ID NO: 31670 - DNA, 311 bp, Glycine max
  Clone ID: LIB3051-060-Q1-K1-F9
acgctactacctttaccctcgcaacgctgtcactaccgtcgtcttctcgtgtttccattggcagaggtccgattcgacaccaccgttctccgaacccaatcttattgatgcctcctctcaaatgctcctctttggatccggaaaccgacccgccttctcccttccactggactcacaagttgatcgccggaaacacctgcgttggattcctctaaacctcttacctcacttaccttaaactcaccggcgcagacaccttttgacccctcggccgcatcaccctttctaaaatactctacagctattacgcc

SEQ ID NO: 31671 - DNA, 450 bp, Glycine max
  Clone ID: LIB3051-060-Q1-K1-G1
gcatggtgcatctcattcgtctcctttctccttcttcttctcttcacaacaaccttaatggtctcaatctcaaccagctcgactgctccgaaatcaccggcttcactgtctccaagttcaaacaagtcatcaaccttctcaaccgcaccggccacgcccgcttccgccgctctccaccccaagcccaagcccaagcccaaactaatcctcaaccacaacctcagatccaacaacaagggttcagtttagatttcgtgaagcccaccattctaaactcaaagcccatcaacaaagacgaaactttgactctttcaacaacctcttcttccttcatgtcctccgtcaccaacgacgccagcgtctccgacggcaagatcggacctttcctccctccctccgccgccaaaccccctctctcctccgcccaccggaaaaagtgccgcgacgccg

SEQ ID NO: 31672 - DNA, 455 bp, Glycine max
  unsure (1)..(455): unsure at all n locations
  Clone ID: LIB3051-060-Q1-K1-G2
cccacgcgtgcggatagagatcatggaaaaagttggggtaaggctggtggtattgctgtgtgtcattgtgacggcggcgatggcccaaaactgcgggcgacaagctggtgggcagacatgtggcaacaacctatgctgcagccaatacggttggtgtgggaacagcgaagatcattgttctccctctaagaactgccaaagcacatgctggggcagtggcggtggcggaggaggcggtgaaagtgcgtctaatgttcgcgccacgtatcataactatttaccagagcaacacgggtgggacttgaacgccgtgagtgcttattgctcaacttgggacgctgccaaaccttactcttggcgcagcaaatatggctggactgctttctgtggccccgttggacctagcggccgtgatgcttgtggaaaatgcctncgggtgacgaatacagggacgg

SEQ ID NO: 31673 - DNA, 448 bp, Glycine max
  Clone ID: LIB3051-060-Q1-K1-G3
gtcacgcgtacgtccacgcgttcgcccacgcgtaccaatttgatctagttgtatctcagaggcatatcgatatacagactcgcatattctaactacgctctcataaactggtatatgacgattgttagcactttgacaaagctcgttcttgacatcaatgtatatacactactgagttgtgttgcaacacaaaaatttgactattttcgtacatattatctgcctacatttttgcacttaactaagttatggaaaaataatttgctgatgagatatacttggacagatggatgaaattacaccaactttttataaaaaggagaagagtgcattttaatataatgtgctgaaccctgcagaaaagctggtcagaaaaatcactgacttaaatgcacttctatagatttgggatatttcatcagacaaaaatgttgagcttgtggacatt

SEQ ID NO: 31674 - DNA, 290 bp, Glycine max
  Clone ID: LIB3051-060-Q1-K1-G5
gtaaaacgcatgttaaagcgttgtacaataccaagcaatcggagttgattgcatgcctggcccgtacggtactactagctatgatcacaatacgacgatcacaactcaccatatatgccaattgcgaacgcatatactatgatcactaatgtcactgtaggccatacattaccgacacctgatggctgataaccctgagcctacataactgcatacgctacaattacatgggtcttgtgaacaaagatacgacaacactatatccagtgcaaattacccatttcgacgtc

SEQ ID NO: 31675 - DNA, 436 bp, Glycine max
  Clone ID: LIB3051-060-Q1-K1-G6
tgggaggcatcagagacagagacagagacgatcaaagagaagttcccttctctctgctgtgaggaaaatgctgaaattagagagggtgatattgatgggaacccagttcctatggttcttggacagactacaagtgagaaagctcttaaggtctacaccaagaggcccaaggccaaagtgcctaaaagctagcacaacctaacatgaaccactattgggggaagggaggagttagttatatagaaagagaaaaggacgtagaatctgatatatagggggaaagagaataagtgggggatatcttttgagattattgtcgattgtagcctagagacgtgtctctggcttgggggcatgttcttattttcttgtaattccttcatcatctatacacagtaatacaattccaattcagataggaatagttcatatctta

SEQ ID NO: 31676 - DNA, 436 bp, Glycine max
  Clone ID: LIB3051-060-Q1-K1-G7
cccacgcgtccgttacaactcctaacccctcaccatcctcttgttctctctcattcatacgcctccttttttatttgtattctcagctttgttagattccgtttctggtttttcccaattccatagtactctgttatcgtcgtcatcccttttataggacagacaaagctgattcacttaggagcctcgagagctatgtctacatcttctcgtgttcttcccactccattggaaaacaagtatatgaaacccccagattcttttcagctttcgccagtcagagatctgactgcaaattcagcctcatcaaattcaatcagaagtgctgggaagatgttttcttcaccttctaaatgtcccgatgacttccctttttcctctgtttcacagcatgataggcaatatcaagatcccccctttgtttctcagacaattg

SEQ ID NO: 31677 - DNA, 150 bp, Glycine max
  Clone ID: LIB3051-060-Q1-K1-G8
gccagacgtgcgagcgcaccagggagcactgacactcaaacgggggcaatgtatacctggggcgggatctgctcgacgcatgccgctaatttgaccacacagattcggacgctccaaattcaccatacatcggtgccaatctatgaaact

SEQ ID NO: 31678 - DNA, 454 bp, Glycine max
  Clone ID: LIB3051-060-Q1-K1-H1
cccacgcgtccgcccacgcgtccgcccttgtgtggtggcttccaccgcagaagccgccagagagttccttaaaaccgacgaaatcaacttctccaaccgccccggccaaaacgtcgccgttaagggcttagcctacgattcccaagacttccttttcgcgtttgcacccttcggaccctactggaagttcatgaagaaactctgcatgtccgagcttctcagcggccgaatgatggaccagttccttcccgtgaggcagcaagagaccaagagattcatcagccgcgtgttccgaaaaggagtcgccggcgaggccgtggatttcggagacgagctcatgacactctccaacaacatcgtatccagaatgacgctgagtcagaagacttctgagaacgacaaccaggctgaggagatgaagaagctcgtgtcgaatatcgcggagctcatgggg

SEQ ID NO: 31679 - DNA, 277 bp, Glycine max
  Clone ID: LIB3051-060-Q1-K1-H11
gtgttactgcgcatccttacggttctaccaccgactctgagcaaggaaagaatgaatgaacgggtgaacatcaatatcaggccaacacccattctttgtctgctgatgcaaggatgaattcgttcttcatcactcataaaaagacgccgatccacaagcatagactagaggaggaagcttataagaagagagcagaagatgagactgctcacctgtatgctgagtttgtacagacatttcaaggagatactactcctgggtcaaatacttttgttct

SEQ ID NO: 31680 - DNA, 125 bp, Glycine max
  Clone ID: LIB3051-060-Q1-K1-H12
gcgagctgctgcagctactgctgctggtgaatttaaagatgaaattgtcccatttaccacgggaattgttaccccaaaacccgttaaggaaaattttgtccccttttttgtgaataatggatttc

SEQ ID NO: 31681 - DNA, 437 bp, Glycine max
  Clone ID: LIB3051-060-Q1-K1-H5
agccattatggctctttgcatcgcacactaacggtatctatcggattcgctctgtctcgggggccgcataagagttgagtgcattataggtgatgatataactcgcctgcgtggtatgacacgcgcaggaggaggaggaggaggagtgtagcacttctacgtcgtataaaatcggtaggagctgccacgtgtgatgtgaaacatcactgtaggagggctaaagcgaggtggaaagtgcctaccatggaccttggcatgccctgggaactatggacgacgttctaaccataaggagaggcatcttgaactctgatcatgggttgactaaggcagtcacaatgcctgactgatgcattgtctcatgcatcagtgagggacctagcaaagcctgagaatgcatacaccaacaagcgcatgaacttgacggcattgaacca

SEQ ID NO: 31682 - DNA, 371 bp, Glycine max
  unsure (1)..(371): unsure at all n locations
  Clone ID: LIB3051-061-Q1-K1-A10
ccacgcgtacggatgtattnatgattcaaagagcacacttccaagcttattgcgggccatcatgccaactcttttgacttcattcttgggagttcaaacggagagaagagacgaagcataagcagatgtggtttgctaggaaacaatttcacagtatcattaatggtgcaactccgtgatcctatgagaaactatgagccggttgggacaccaatgcttgctcttatacaagttgagagagagttcatgcttccaaagcaaagaattttcaacagtgtgtctgagataaggaaaaattattatgaggatgacgagagcgatatagtaggaaaattgaagacaaaggacacccataaagaggagaaaagttc

SEQ ID NO: 31683 - DNA, 390 bp, Glycine max
  unsure (1)..(390): unsure at all n locations
  Clone ID: LIB3051-061-Q1-K1-A11
cccacgcgtncggtgatatagataatatcagtgagcacacttccaagacttttgcggcccatcatgccaactcttttgacttcattcgtgggagttcaaagggagagaagagacgaggcaaaagcagatgtggtttgctaggaaacaatttcacagtagcattaatggtgcaactccgtgatcctatgagaaactatgagccggttggaacaccaatgcttgctcttatacaagttgagagagagttcatgcttccaaagcaaagaattttcaacagtgtgtctgagataaggaaaaattattatgaggatgacgagagcaatatagtagcaaaattgaagacgaaggacaccgagaaagaggagaaaagttctgaagaggaagggggca

SEQ ID NO: 31684 - DNA, 336 bp, Glycine max
  unsure (1)..(336): unsure at all n locations
  Clone ID: LIB3051-061-Q1-K1-A12
cgtnnccgattcttggcttggaggggagctagatgcttctctcccaaacaaagggtgattgacaacagtaagggcaaggagaagttctgagcctgngtcgtagattacttanttatccgacnncggtcccaaacaaccctccatgttgatgggcnngtgggccgtgttgttggtttggaagtggcttatgttcttcatagcaaaggtcattccannaccacacttgcccttcttaagtgttnngcggtggtgggaagggggtttccgtggcccttagctagtcacaattcannaactagttaaacctcttaaaaaaaggggtcaaattaagggttt

SEQ ID NO: 31685 - DNA, 177 bp, Glycine max
  Clone ID: LIB3051-061-Q1-K1-B10
ctcacacatcccaatctatatacctgtttatcatgcctccctatatgtattactttggcttgtctacgagcgggaggacacatctgcaacttcatctatttccaaggatgagttatttgctggactaactcatccatactgtctattatgactcctgatatcgcttgtgagtcatgg

SEQ ID NO: 31686 - DNA, 400 bp, Glycine max
  Clone ID: LIB3051-061-Q1-K1-B12
tccgctccttccgtctctccccacaccagaaatcccaaatgaacccaaaacagctccggctcctcttcttttctctctttctcacaatcactttctcgttgaacgaaagatttgaagcctgcgatgccaagacatgtgggaacgggcagaacataagctacccattctacatccaaggcaagcaaaaacccttttgcgggcagccaggcttcgagctaacgtgcagccacaacggtttcccaattctgactctcatgtacaccccatacacaatccaccaaattttctacgacaaccaatctctccgagtgtccaatcccgtcttttcacaaccaaacctttcttcttgtattgccccgactcagaacctcacggtcggaaggtacagattccgagtcgc

SEQ ID NO: 31687 - DNA, 392 bp, Glycine max
  Clone ID: LIB3051-061-Q1-K1-B7
ctgtttgttattgttaggaaccgtttgtcttatgagcaatttggtgcattcttggcgaatgttaaagaattgaattcccataaacaaacaaaagaggaaacgctacggaaagctgatgaaatttttgggcctgaaaacaaggatctgtacactatatttgagggattgattaatcgcaatctccattgacattgtgcttaagagattctttccaaatttgtaataacggatactatcgtgcatgtctccttatttatagcaacttttttttctcccctctgtataatacaatacttttttttgaacatgaaaaccgaatgacagtcttggcaggactacaaggttgcagttggtttccttgcagtatggatgggaggtactctagttttaat

SEQ ID NO: 31688 - DNA, 367 bp, Glycine max
  Clone ID: LIB3051-061-Q1-K1-B8
ggagtttcttattccttctagacgctttcattgatcggcgatttctgatacatggcggagcatcacgaacacgaggaagtgaagggtgagtccttgttggagaagatttctgggaagatccacgaccacgattcctcgtcttcgtcggattccgacaacgacaaaaccagcgccactgattccttcaagtctaatgttttcaggcttttcggcagagaaaagcccattcatcatgttcttggcggtggaaaaccggctgatgtttttctatggagaaacaagaagatatccgcatcgacactcggagttgcgaccgctatatgggttctgtttgaattgcttgagtaccacctcctgactttggttt

SEQ ID NO: 31689 - DNA, 299 bp, Glycine max
  unsure (1)..(299): unsure at all n locations
  Clone ID: LIB3051-061-Q1-K1-C10
gccacgcgtactgttcaagctaaaagaagaaaaagaaaaggaaaaagctgcngctatgggagagtagaaagtcaacacaaaatcttaaggcccagtggcttgggaaagcagccactgcgaaggaaaggaagcatctttagctccaaatccaatggcggatacctcaagccgatcaaaaaacctcgacaagctccttctcctgcctggcaatctcgtcggtcctaagtttcaacctggccctgaggtgcgagatgaccttcaggccttacccaaagtgttggtggttagggctggtggct

SEQ ID NO: 31690 - DNA, 350 bp, Glycine max
  Clone ID: LIB3051-061-Q1-K1-C12
gagaagtttgagccgtgagaagaaaagggaaggagaaagagaagatgggattgcggagtaggaaaaaatggcgtgcaggggtatgcttcgttccaccattctcatagaacccagcctactccgttctttaaatttcaattctaacaaacatcacatagcttcactcaaccaatggtcttgccggtttcattctccaaaacccccttattcttcctctcagaacgaaacgccgttgtctcaggaccctgtcttgaaggccatttcagagatttccaaaggcgaatggagggttggccaaacaacaaacgtaattattggaagcactgctgccgatgattctaacaatgaat

SEQ ID NO: 31691 - DNA, 389 bp, Glycine max
  Clone ID: LIB3051-061-Q1-K1-C8
aagcaaatagaggaactaccactactactaccgtgttgggttgctgtgggtatcaagggcgaaccttttaggacgatcatcatcaaattggggcttcctccaactcctctcagtgcgactttcaggcaaagtagcacgtcctccaccaccgttggaagagccaaaacccctgtttccaaacccatcaccaccacttgcctacttaatcttgacgctctcaagctgctcatcaatcttcttccaatcctgccctttctccgccaaaacctgctccctcggcctcgcctctccgaacggattaacacctttaggcttccccgcattattgccatcaaccccttcatcgctcacggacactgtccgaggttgcaacacaagcttcgggcttc

SEQ ID NO: 31692 - DNA, 360 bp, Glycine max
  unsure (1)..(360): unsure at all n locations
  Clone ID: LIB3051-061-Q1-K1-C9
aacaaatanacggaactaccactagtactacacagttggcatgctggtgctatcacgtgcgaagcttatcggacgaccatcatcaaatcagggctacctccaactactctcaaagcaactatgaagcaaagtaacacgttctccaccaccgttggaagagccaaaacccatgtttccaaacccataagaaccacttgactacttaaacatgacgctctgaagctgctcatcaatctgattacaatcatgccctttctgcgacaaaacctgctgcctcggcctctcctctccgaactgattaacacctttaggcttccccgcattattgccatcaaccccttcatcgctcacggacactga

SEQ ID NO: 31693 - DNA, 364 bp, Glycine max
  unsure (1)..(364): unsure at all n locations
  Clone ID: LIB3051-061-Q1-K1-D11
gtcttcccatgattttcaccctntgtctctctctcactntctgtggacttttctgtggtttccttttcagtgaaataaaaaaaaaccactctggcttattactgtctatatagattcttctgaatccagttctttctaaaccaaaccaaaaaaacattccctctccaaccaagttttgttttttttttttttcatgtgaaaattgaaatcgcaaccgcaatttaaaaccttggtgtatgttcttatattgaaattgaaattcttggctagggaagcaaaagggtagtaattggttttagagtaagtgagaatggaaaacgtttcggttcttttgtgtaataaggaaaaggatcagatggatttg

SEQ ID NO: 31694 - DNA, 331 bp, Glycine max
  Clone ID: LIB3051-061-Q1-K1-D4
tagtgttttataagttcacggtcaggtctcaaaaatgggttccaaggttttgcttcggggtaatatgtgcatagcggctatacttctgatctctgctgacggtgcacccaatgaatacgaaaattttaacaaaaaagatgggaagcatgctccaaatgggttatatgatagccaatggggttacggcggctggggtggtccttggtatcgcagctggggtggcccttattatgtgggcggctggggtcgcccttattatggcggcggttggggcggtccctggcgtagcggcggcagctgtggctggggacgttagcctatacctaatggc

SEQ ID NO: 31695 - DNA, 352 bp, Glycine max
  Clone ID: LIB3051-061-Q1-K1-D7
gtaggtcccttctggtgatgcaagggttatcaactgatttcgccaagcacgctcttgcgtctattcacaaacaacgcataatcataaccttcacaaagtcccaaccaaaatgttccctgccaaatgattctcagcgacttgctccaccggcagcgtcccattgggcaccaccacagagcagatctcccaatcacgtgcgtcatcaattaggccccaagcattatcccacggttccagcaactgtagtactgccagctccatccatacatgcacctccaaacagtatgcagccattgtttgtgccagcaccagttgcacctcccatgtcatttcctacacccgtaccaatccc

SEQ ID NO: 31696 - DNA, 380 bp, Glycine max
  Clone ID: LIB3051-061-Q1-K1-D8
gaagaaaacaaagataggagggatgacataagatccaggaaaaaacatcactctcatggcgcttcacaccacaatcgggacaagcataagcacaagagaagacattcctcctccaaagacaaatattcttacagggggaccaagcacgatagctcctctgatgatgaacatcatcgctcaaggcatcatcgtcataaatatgatagctcctcctctgatgatgagcaccactcttccaaacaacgacatagggatgataacttgtcagaccatgagcatagacattctcgccattctaatgaagattatagttcatctgatgatgagcataagcatcgaagcaaaaacagaagtgtaaggcataagagcaaatctcatgc

SEQ ID NO: 31697 - DNA, 353 bp, Glycine max
  Clone ID: LIB3051-061-Q1-K1-E4
gcgggcacacatacggaaacaatatcgaacataatcctgcctatggagatgccatatttacagaacgttgtggggccgtgaaaaaattctttaacaatcatttaaatgtcatgcccaaagaagagaaccataacttcctaacttttgggattcctcatgacagaaaggcgctcatgacgaatttcttttcagagctccaagatagagaagaaaaatttggcatatctgatatccagcttggtctaacaacgctcgaagaagttttcttgaatattgctagacaagcagagctagaaagtgctgcaacttaaaggagactagtgaccctgaccttaacatctggggaatctgtg

SEQ ID NO: 31698 - DNA, 326 bp, Glycine max
  Clone ID: LIB3051-061-Q1-K1-E7
ctcacaactaagaagaaaacttgctaaagcttctttacgggtttagggtttcgcactgaataaaacttcatgagaagtgtaattgtaataaaagtggaagtctctcttctcttgtgatataaaggaataatagttttatataaaagaacacacacatgctaaaacatactcaaagatacacgctataccctaccgcaaaaggttacagaagcaacctacttaaccggatatcacacttaaccgtacagcgggtgtaaacagttatgttatatattagaaaacttgtgctttatgaatacgatccctttgaatgatcaaacgctgct

SEQ ID NO: 31699 - DNA, 376 bp, Glycine max
  unsure (1)..(376): unsure at all n locations
  Clone ID: LIB3051-061-Q1-K1-E8
gngaatcaaacaagcctntaatgtttgttcttagtctgagtgatatggggaaaattggtcttctacagattgttatgggaaggccaatcaaggtggatcggcgtctgcgatttgttcaacaacctggggacgggagtgcaaagtctgaagatacaccttctgatttgagtgtgaatggngcagaagctcaacaacctgcagagggcagtgcanagtctgaagatactccttctgagttgagcgtgaatggggaagaagctgacaaagttgattgatatcagtttttccctgatgcatatcaatattatttatgctggggttttcacctttatttaccagaagctcgtgagatacaaggagttgataggtgtaagcc

SEQ ID NO: 31700 - DNA, 281 bp, Glycine max
  unsure (1)..(281): unsure at all n locations
  Clone ID: LIB3051-061-Q1-K1-E9
cccacgcgtccgnccacgcgatcgggaaaagcttttgaagaggaaagaaagctgcggtgataaataaaaagtaaagaaaagaccgcatgaaatggtgtgggtatatctgttggtgcatctgcctgacacccaatcagcgaagaaactgagtactattactgccagctcaaatttctcatttataacaagccagcctcaggaggaaaatcacatcaaggagtactcatggaggagggaattctgatacagttttggggctcaaggagaaaaagaacactctc

SEQ ID NO: 31701 - DNA, 260 bp, Glycine max
  Clone ID: LIB3051-061-Q1-K1-F12
aaaaaaaaaaaagctttcaaacatggttctactacaaaataaatctggaaacttatgcgggctttataaaatatccaatcttacacaccccttaattcaacctcacacctcttaaatcaaaacacttaaatcaaattccacaaccaccgatttacaaccctttaactgcgaaaacccacaccttcctctcataaatcacaaactactacattacccattcatcgacttcttcaaaaaacatgaggccttatctctatctc

SEQ ID NO: 31702 - DNA, 119 bp, Glycine max
  unsure (1)..(119): unsure at all n locations
  Clone ID: LIB3051-061-Q1-K1-F8
gttttgtttttntgctctaattcacaattcccttcatgcttaatggcgtaattatgggtactagaatgacttgcgagattcactttattaataaacatgcttaacatagtatgtttata

SEQ ID NO: 31703 - DNA, 293 bp, Glycine max
  unsure (1)..(293): unsure at all n locations
  Clone ID: LIB3051-061-Q1-K1-G10
cccactcntccggtttgtaatatggcttaacgaaatcgactaagtgtgttctttctgttagttttcacccttttgtctgcttctcttcatcatttcgggtacctcttgctgattttttcgatctgctcccctaatcaacttgtggcattgggtttcgtttggggattgttatgcttcttcccatcttaatccgattcccattgggtttctgccgattgatatgcttttaccagaatgaagatctttaagaaattgatagtctagctacttcttttacatcaattatttgaatt

SEQ ID NO: 31704 - DNA, 208 bp, Glycine max
  Clone ID: LIB3051-061-Q1-K1-G9
ctcaaataatcaatcactcctcatcggtctcccaaataacaaagccataaccctgcgggtcctttacaacatcacatatcctccatccactgtaaaatattcttctactttaaaccaaaccaacacatcattcttgtgcaactagctacgtcccagcaataaacccaagacgggcttatatatcttcataccacttcctcaaaacttc

SEQ ID NO: 31705 - DNA, 283 bp, Glycine max
  Clone ID: LIB3051-061-Q1-K1-H11
cggacgcgtgggcggacgcgtggagttttgttagttcacacactaagttctgaaaagtgagttccaaagtttttcttattctacttatgttcatggccactatacttttgatctcctctgaggttgcacccgatgatgcataccagaattttgacaaaacagatgggaagcgtagtgcaaatggggtagatgaaagcaaatattggcgtggtggctatggcgactatggtggttggcgtggtggtggttggcgttgtggctattgaggctggcgtcgtggcta

SEQ ID NO: 31706 - DNA, 389 bp, Glycine max
  Clone ID: LIB3051-061-Q1-K1-H5
gcgctgagttctgagtgttccattccaattccaagttacaacttggctgtgtctatggatcgcgctcaactggtgttgctgggtgtacccctctttctcttctgctctgacctcttctcccttttcactcaccaccaccattctcacccggcggaccaccaccaccacccaccggaccaccattaccacccaccccaccaccaccatcattacccgccccaccaccattaccagccggtgacaatagatttccctcccgagaaacccaccaacaatattgcaactccgggtctcggcaacactgtccacatcaatttctgctcttcctgctcttacaagggaacagcagtgacgatgaaaaatatgttggagattgcatttcctggaac

SEQ ID NO: 31707 - DNA, 392 bp, Glycine max
  Clone ID: LIB3051-062-Q1-K1-A1
gccgcccggcgttcccggcgccaccgtggcagttccgccgccgcagatgcaggctatgatgtcgtaccaggttcagcccggtaacccggccatgcggcccttcgctccgatccctaacggctacgccgcagctccgaacgtaactcccgcgggtgggtcattcattcaatcgttcgttgttcctttgtgaatttgcattgaatttgatttaatttagtttaattcaacgctccttcgttggttgcttcaatttttatttatgactttggaattatagctattatcaatgtggtttcttactgcgctgtgaaatgtgtgaagactgtttattgtggtgactgtagaagacagtcatagcgctgattgatagcttaacaggtatggttttatta

SEQ ID NO: 31708 - DNA, 388 bp, Glycine max
  Clone ID: LIB3051-062-Q1-K1-A10
ttggtcttgactgatgaagtaaagcacgctgttccttactcttgggatccaacatccttggctagttttattgagaattatggtacccatattgttacatctgcaactgttggtggaagagacgtagtgtacatcaggcagcaccaatcatcttctttgtctgcttcagacattgagacctatgtaaaggacattggagatgataggtttcacaacgttaaacacttttcgggtcctggtcctttaaagtataaggagaaggatgttactgtcatatttaggaggagaggaggggatgatcttgagcaaagtcatactaaatgggtggaaactgtaaaattggcacctgatgtcattaacatgaactttacacccattggttctcttc

SEQ ID NO: 31709 - DNA, 345 bp, Glycine max
  Clone ID: LIB3051-062-Q1-K1-A11
cggtggacatggcggaggatgcaaatgctgcggtcgaaagggctgcaaatgttgctgaagtaaagaaacacaaacatgaactgaagacacacatacgtgtgtactccatgtaataagtatagtatgtagaattaagaaataaaagcatggaatctatatccgtgctagggctgtcataggttgaccggttttccatcaaccatgcatgtagtttgacacatcattttactatacaagatatataattctacactcaaaaaaaaaaataaaaaagataaagacgaaaaaaaccttattataatataaaaaaaccgacattaatattgggcacaaaaaaccctgaaa

SEQ ID NO: 31710 - DNA, 201 bp, Glycine max
  Clone ID: LIB3051-062-Q1-K1-A12
ttcactcgtccagacactcttacggcttaccatctacacacatctaactcagcataggggtatagtgcaatatccgtagaagctcgatctccattgcatgtccgaatgttcaacgatgtcttgaatatactataacataatcagcaacttcggcagactatcatgatgatgcacgaactcctaattgagacgattatagca

SEQ ID NO: 31711 - DNA, 425 bp, Glycine max
  Clone ID: LIB3051-062-Q1-K1-A3
cccacgcgtccgctttttcttaatagttgctttggcagggaaagacgatcgaaggcagaagcttggaataaagccaacaaacgacgtcgtgtggtttcgaataccttgtgcgttttgaatctctggaaattgagatggcgaacgagaacgaacccgcgaagctgctgttgccataccttcaacgcgccgatgaattgcaaaagcatgaaccactcgtcgcttattactgtcgattatatgcaatggaacgggggttgaagattccgcaaagtgagcgcacgaagaccactaatgctcttctggtttcgctcatgaagcagcttgaaaaggataaaaagtcaatccagttggggcctgaagacaatttatatctcgagggatttgctttgaatgtgtttggaaaagcagacaagcaagatcgtgct

SEQ ID NO: 31712 - DNA, 428 bp, Glycine max
  Clone ID: LIB3051-062-Q1-K1-A6
tcaggatccaactgggaagattcaaggacctttttctatgttgcagctgtacaagtggaatgcaagtggatgtttccctccagatctcagaatatggagggtaggtgagaaacaagataactctatactgttaaccaatgcactaagtgagaagtgttccaaaaatgtgtcattgccattcaacagccaattgctctctctaggggtcagtgttacattggatgataaaggtaatagtcaggatgctgggaagaatgcaaagaatgaaatttctacagatggccaaattattgaacagacaaaggaacaaaagccacaggtggataatacctctacccagtctgatggcaaagatgaaccggttaggagcaatggatgttccagccagctgcctgtataccctttgctactgtcaactgccattcctg

SEQ ID NO: 31713 - DNA, 350 bp, Glycine max
  unsure (1)..(350): unsure at all n locations
  Clone ID: LIB3051-062-Q1-K1-B10
atgactcttccagacgcacttatgactgacgatatagacacacataatacggcctacgggtatactgcaatctctgtagaatctccacgtgctttgcatgaccgagggttcaacggtgtctcgcagttactagaatagaatgaccagcttcggcagatgatgaagatggtgcttgaactcctaaatgaacctcttatcgcgacattacatatgactgtcacagtgatcgactatcacaagaactttgtcctgataaggattgagattaccgaatcactatcagaatagacggacgtggtttcaccaagtgtacccatgggacgaactcctnctcagattgcacttcatga

SEQ ID NO: 31714 - DNA, 193 bp, Glycine max
  Clone ID: LIB3051-062-Q1-K1-B3
gcctgttgatcaaggagagaattggcaacaacctgctgctccgaatcgaactatgaggaggagttggaggtggtagaggaagaggtggtaatgccacagctgtaggcaaagggccatcaccagctgtacccacaaggcgaactgcagctggtagaggccgcggagcaagattgattgatctggaccctgaacc

SEQ ID NO: 31715 - DNA, 383 bp, Glycine max
  Clone ID: LIB3051-062-Q1-K1-C12
cccgtaaccatgtctcaggtgcaattttgctttttatttttctcttgtttttccctcggtttctgattcggtgttctggacttcatagctagcaatttctgaattgttatatctgcaattatttattggaatcatttgtttgacttttcaaaaaattaggaattcctgtgtttggttgggaacccttaaaactagagcaaggattataacacgattgggcgaaaattaaatgcatttgattttcattaaccatcggtttctctgtcaactattgcagaatttcttacttgttcagctaccattgttttttttttttttttttttttgtataacgcgcatgctagatctctgttttcaacactttattcctgattatatgctct

SEQ ID NO: 31716 - DNA, 410 bp, Glycine max
  Clone ID: LIB3051-062-Q1-K1-C3
cccacgcgtccgcccacgcgtccgggttttcttggatcaataattcctgatgctgtgcatgatgtgctggatcctgctcatcatcatgtactacataatgctgtccctgcaggggtcaaaagctatgctgtaattcgcaaggttgaaaatgtcaccaactcctcatcatctgaactcctagcttgtaaggccattatgtccgtaataacttataacggttacttccaggaattccacttaagcattgatgctcacaatggattatcttggtctttaagacgccaggtcaatcttttgactgtgaccatggataaagcgtcatgagtgacataaagtgttcttagagcgccaactattactgcgaagcttgaggaatcacatgctacacttaaactttcagacctactact

SEQ ID NO: 31717 - DNA, 220 bp, Glycine max
  unsure (1)..(220): unsure at all n locations
  Clone ID: LIB3051-062-Q1-K1-D1
aacaaaccaactcgaacctctcactctctctgtttctgcaatggcgaagaagaaggagagagaaggtgaacgtctccggaaaacctaagcactctctcgacgtaaaccgcagcaatgacgcgaagaaggagtcgcgctccgccgncactgtgcgccgcctcaagatgtataacaccagacccgtccgcgatcgcaagggaaaagtcttatcccacgagct

SEQ ID NO: 31718 - DNA, 432 bp, Glycine max
  Clone ID: LIB3051-062-Q1-K1-D2
accgcctggcttttcccggcgaagaacctatggtacccaccacaacaacaaaaacaagaacgttaacaattatttcaggggtaaccggaagccgacaacccgacccgaacaaagaaaacgggttgtggacaaaaggcccagtttagatgattcgaggttttcgagtttggagatggagaaggtcacgattcttcggaggggggaatcgctcgattcgaagctgaaaacagaggctttgaagaaggaaggtgataatttggtcgtggttgggacccagaggctcggacccgacccggatatggtcccgaagcagatccggatcgtggatttcaggtccgggcgcgagatttacgccggatccgcgttcgcggtgtcgccgtcgccgagcgcgctgcccttgccgtctttttcgaagaggcagccggcggtggc

SEQ ID NO: 31719 - DNA, 432 bp, Glycine max
  Clone ID: LIB3051-062-Q1-K1-D4
cccacgcgtacgcaagttcaagggaggattttgatttcgtggtcgtcaatttctacgagtttggattcatccaagacccacaagctgaagtcgacaaacaccgttctttcttgcaattggagggtcttgacatcaatggaagattatatttgaatgaacaagtatagcgggccatcaaaagatgctatgacgtatgtcaactggttaagaaaggataacaggttttctgacatcttggttcagatatctccatcagaaaagggacatacctttccaacattgaagttgcgttataagccttcattagtacaggcagcacggatttcagaatttgtatactctgaagggaggtgtttctcactatctaaagaatgaaggccctgccgaatgggtaggaaatttatttgtatttgactcccgtctatctctccc

SEQ ID NO: 31720 - DNA, 418 bp, Glycine max
  unsure (1)..(418): unsure at all n locations
  Clone ID: LIB3051-062-Q1-K1-D5
gcattgcgaaaattcgaagaatcattatgaggttcaaaggtgtacaatccgtgagcgttgacggaagcaaggacttggtgacagtgaagggaacaatggacgtgaaggagatggtgtcgtacctgaacgagaagctgaagcgaaacgtggaagtggtgcctcctccgaagaaagacgacgataagaaagagaaagaaggtgacggtggcgaaaagaaagagaaagagaaagacggtggcggtgagaagaaagagaaagacgttgctgcagcggcggaggttattaacanaatggaatatatgcaccagatggcacctccgtcgttctggtacgacggaggacactttcaggtcaaacaaattacgctatggagggtcacccaggatatggtgctagtgctaataatcattacgtggag

SEQ ID NO: 31721 - DNA, 169 bp, Glycine max
  Clone ID: LIB3051-062-Q1-K1-E10
cccacgcgtccgaaaatatttaattaagtttgctatgttgtaagcaaaaacacatccgtgtttcatttgtagtagtagcatttatttttatgcttgacgggactgtgatcccaaagtatgataacttttgtgacatgtgtaaataatatcttcaagagttcatgcccgc

SEQ ID NO: 31722 - DNA, 380 bp, Glycine max
  Clone ID: LIB3051-062-Q1-K1-E11
cccacgcgtccggtccagactattctccttctccaagacgaaggcgacattacaggtgaatctcaccaagggacagaaagtatagggatcgatcatactctagatcatcttatgcatcaagaagccgcagcagaagtaggagttacaataggagtttgagccgaagtccgggctactctaggtgattaacttgataagcatggtggtgggtgcggtggacaatgctttagtttgcatatgtattttttatggagcttgtgtgttgaaatacttcagaatgttggtattttgttcatctagtagagaggatttggcgtggttttgtttcagctttattactagacaacatttgtacttgatatttaattctaggtttattg

SEQ ID NO: 31723 - DNA, 98 bp, Glycine max
  Clone ID: LIB3051-062-Q1-K1-F1
aaaaaaaaaaaaaaaaaaaaaaaaggttagtttttgaaaaaaacaaaataaaagggaaggggtaaaaaaaaaagaaggttaggaaaaaaaaaataaaa

SEQ ID NO: 31724 - DNA, 293 bp, Glycine max
  Clone ID: LIB3051-062-Q1-K1-F10
aaaaaacaaacatataaaaacaaagttctaaaaataaaaaaaatcaaaaaaaaacacagggatattttaactataaaaatgaccaacagaacctctaaagacaccattttcacaaacatacccttccctaaatcttgctaatttaaagaatcacatcaataaaatttactgtatacactacaacaacttactcacttaaaaatctttcacgatccctcttcaaattaacttccaacctatttcacacttgcaaaaccattgacaattcaaaactcacactcctaacacatttc

SEQ ID NO: 31725 - DNA, 433 bp, Glycine max
  Clone ID: LIB3051-062-Q1-K1-F2
cccacgcgtccggcacataataaccctcaaactccatttcactcacagaaaaatagagatatagagagagaaagtgctgcagaatacacacatacacaccacttcttcaagagagagaggtgtgtgaaggaaaataagaactgaaagaaaaattttgcaaaggaagatatgaaactttgcaaatttaacaactgagaaagaagatctgtgatttctctctctctttttgttgttgttgttgtttgcagagaaaatcacacaaaagcacacacacacacacccttcttcgagtctgaatttgtatcattgacaattttttcacaaagggttgttgtctcttcagagagacacagatcttgaggttggaggcaaaatccttcacacactttggtggttatggaaacagaagagaggaaccagaaagattgcaagg

SEQ ID NO: 31726 - DNA, 142 bp, Glycine max
  Clone ID: LIB3051-062-Q1-K1-G12
cggacgcgtgggagagatagagaatggccggctggctggagaatcctgtccagaactcacatcacatgagctgttctttgttttgtttatttttcagaataaatggtttactattatttcaatgaaatttgttgatcttatt

SEQ ID NO: 31727 - DNA, 186 bp, Glycine max
  Clone ID: LIB3051-062-Q1-K1-G2
aaaaataataagaaagttgatttagttatctatgtcgccatagctaaagggatcatagtgtcggctgtttgtgagacgtaggtattggagacggatactacggcaactatgtccacctacatatgaaccaatatagtatgtataaggatgaaacacagattgcgtaaatttacatccaacaattta

SEQ ID NO: 31728 - DNA, 133 bp, Glycine max
  Clone ID: LIB3051-062-Q1-K1-G3
cccactcgtccgaaaaaaaaaaaagaattaaaatttaaaaaaaaaaaaaaaaaaaaaaagaaaaggtaaaatattaaataaacctaaaaatatccatactacattaaccattcaatctacttatttatatttt

SEQ ID NO: 31729 - DNA, 387 bp, Glycine max
  Clone ID: LIB3051-062-Q1-K1-G4
cttagagtatgcatgtatgtgaatttagcaaaggaaatgtgtgtgatgtaggtaacggatacgccttggaagtacatgtaaataatctaggtaacgaaggtgccttgattgtatatgggtgcatttttcttagttataagaatgtcttgtgcaagtgaacgttcgtgaagaagtatgcgcataagcttgctctaaatttacattgatgtttgtatttattggagggggttgtatgccatttttgttttaagggtagcatttcttggtaaaaactaactttccaaatgtttgccttcgcaggaatggccccgaggaagcttgcctcaaagaggtccaagaaggacaaagcggccgaaagaactagttccgctccggagtacgacagtc

SEQ ID NO: 31730 - DNA, 427 bp, Glycine max
  Clone ID: LIB3051-062-Q1-K1-G6
ctcactctcaccatttttctctcctcaacccattgcccactcatctattcagtatttctatcatattatagttatataattaaacatagcaatagcaaattatatatatatatacatcatccaccacccagatttaatttcactccaacccatcatgcatcaccgcagattcagcaaattaatacatgtggctgacccagatgagcccgagtcagggcccgagcccgcctcagaagctgggcctgcttctccttcttccggtgaagacactaaaactgaagcaccgtcacccaagaaaaggagggagatgaagaagagggtggtgacgataccgatcggtgacgtggatggatctaagagcaaaggagagaattatccaccgtctgattcatgggcctggaggaagtacggccaaaagcccatcaaa

SEQ ID NO: 31731 - DNA, 433 bp, Glycine max
  Clone ID: LIB3051-062-Q1-K1-G8
gttcccccctcaactcctgcaactttaggcaccattggtattggaaatgctcctaggaacgtaaacattcatatacatgctggtacctctcttgcacctattgtttcagccattggttctggggcaaataatggagaggggacaagaagtgaacaccgtaatgagcctggctctggtgattcaggttcaacacgggtattacctgttagaaatgtcatagcagcaactatcccatcacaccctcctggtgttggaatctctagtagcacacaaactgggtttggtattcctacttcacagccaccttctgattcagcttcattgtcatctgttttagcagaaatcaattctcgccttagaaacgttgttggtaatatgcatggagataacacagttccatctggtcaaatggaatcaaacagcagggacttgc

SEQ ID NO: 31732 - DNA, 428 bp, Glycine max
  unsure (1)..(428): unsure at all n locations
  Clone ID: LIB3051-062-Q1-K1-H12
gccaaagaaaaggctcaggctctcctcaatcaatttaaaagtcaaagacatgggagtgctgggaggggctgatcttgaattcccaactcgtgtggtatccaaaggttttgaattaactcctgtataatgtccaatttatatattacatggtgcaaataatgtgtgtaaaggtgttttgtatcgttttctcttgcttggaaagggaaaaaaatatttgtggaggattgattgtgtcctccttgtgaaaaacctttctgtattgcaaaaaaattatacatgtaagtctagcttttgtattaacaaaaagggtccggtttttgttgttgtggtaatggttgtggacaaataaaacatttggtttatttagtgacacttgtatttcccctttcattgagatagggatgtangtgtaaactgttatgttcatg

SEQ ID NO: 31733 - DNA, 412 bp, Glycine max
  Clone ID: LIB3051-063-Q1-K1-A1
tcgctttcaagcctcccaaacacaatgatccactcttcatcaggcatatcattgtggcgaggatctgatgataatgaatccagtgacatctttctagaaccaataaggtggaagggatttgcaaatgtgtgcactgcagtggtcaaacatgaccctaactggttgcatgaaacaagtggtgtttatattgtaagtggtgcacaactcattagtaaaggaagttggccaaagaatgtgcttcacttgcgcctcctatacactcacatacccaattgctgtataaggaagtcagaatgggatggtgcaccagaggcttcaagaaaatcatcttttctcacaaatctaagcacaacattttcattcacacaacaaagtccttctcagaagcaggctccaacagtacttgactctg

SEQ ID NO: 31734 - DNA, 421 bp, Glycine max
  Clone ID: LIB3051-063-Q1-K1-A12
cccacgcgtccgctgacttttgcaaagcacatgggggaggcaagagatgctgttggggccatccgggttcagaatatggcatccaacaggatggtccttgcaattcatttgcaagggggaaaacaggtctatgtgcacttcatagtgggctagtgcatgacaagagggttcatggaggcatctcactgggatctgttgttcaggatcctcattccagtaaaacagatgaactaaagcaggtactcgttgacaaaaacatgggtatagatatgatgaaaatagggagtagtctaggcactgcaacctgttccgacttcgaacagtttgaagctgcaactgctcatgtctcatccaaggaaggtagtcacttgccagtgtcagttgctgttcctgaaagcaaggtgcatggtggtagcctgat

SEQ ID NO: 31735 - DNA, 434 bp, Glycine max
  unsure (1)..(434): unsure at all n locations
  Clone ID: LIB3051-063-Q1-K1-A2
cccacgcgttcgcccacgcgtccgaagagagtgatagcaggccaaaaaactaccagtgcagtgtggacaagtattcacatgacaaatatgacaggtctgatcatagaagcaaagaaaaacgtagagatacatactcggagcatcagaaatataaagatatggattcttcatatgaaaaatctgcatctagcaagaggcatgcactgtatgatgaagtggagagggaggggcattcaagggactgggatggtcaaaatgaaagaagagattcccgccgaagttcaggggactacagaagtgaccaaagagatgagtcaagtccacaaagagacagtggtaaatttagtttaaaagaagcttataagagtgaacagaaggagtcaaatgatcaaaaccttncatgggaagaaaaaagaaaacatgatgacactgag

SEQ ID NO: 31736 - DNA, 444 bp, Glycine max
  Clone ID: LIB3051-063-Q1-K1-A3
gcgccacgcgttcgccagcgtccgccagcgtccgattgttctttcacaaactctgacgttccaagaggagacacttgttagttcttacattacatggctcatttggtttatggtgaaactccgtcttttggagcctcacaccatggacaggctcacaaattgttccatttcaaaccacttcgagctccttaaggatcctgctcttacatggcaacttagaaatatgggtcaacgaggccagaaaccttcccaacatggacatgttccacaagaaaacgggagaaatggtttccatgttgtcccgaaaacttggcggcaaaatcgaaggtcacatgtccaaagctggaaccagtgatccctatgttacggtatctgtggccggtgctgtgattgccagaacttttgtcatcagaaacagtgagaaccctgtttggacacagcatt

SEQ ID NO: 31737 - DNA, 428 bp, Glycine max
  Clone ID: LIB3051-063-Q1-K1-A8
ttagcattcactgtccgtgccctcgatgctggacctgtcattgctactgaaaccattcaaggtgatgatcaaataaaggcccctgatttgcttgagctcctgtttcataaaggatctaaacttctgattggagaacttccttctatacttgatggatcagcaagagtaaaggcacaacctcaagacgactctaaggctacattggctccaaagataaatccagatgaatcatggctattctttgatcaagaagcatctgttctacacaataagggtggccaggaactagagcaagagtgttagtggttgagaaaaatggtcagcagaaaactttggagattaaaattataaccacacgagttcgcagtcatgaaagtgtgcagttcgatgaagcagatgacattgcattcgttgagggtgcgttggta

SEQ ID NO: 31738 - DNA, 428 bp, Glycine max
  Clone ID: LIB3051-063-Q1-K1-A9
tcgtctcgtgtttggtctattgaatctcaattctggagagaatcaattagtgtctaatagaggtaattggagattctagtgcagttatctatctgagataataaagaaaaaacaattacgggtacaacaattatacggaaggataaatgactgctgcccctaaacgcttaacgatacagattctgctacaactccttctctttccttctcccctaactgtttttctcttctttttttttcctgttcttcgggcatatacagatacaacaataactaaaatgtccgtgttggtggactttatactgtgtcaaaaaacttgtacacattcttggctggttcaatatatcacaacacgtagtaggcctggctgagtttccatgaagtcaatgccctcttcaagaagaaaacgctgtacagctattggaagt

SEQ ID NO: 31739 - DNA, 231 bp, Glycine max
  Clone ID: LIB3051-063-Q1-K1-B5
atatacccaaaaagtactagtctctcttgtgatcatgtgctgttcaaaggttttgtggcctgggcacatacaacttgcacattcttcatatgcacctaatgcactttctcctcacggtatggttactacactaataacctgggtccaaatgctattcactaaaagattatgaacagtgcaatcattgctgagatacaggaccttcccgattggaggacctttgatttaaac

SEQ ID NO: 31740 - DNA, 334 bp, Glycine max
  Clone ID: LIB3051-063-Q1-K1-B9
ctaactgctactcgctcatcccgtggaggtttcgctctctcagtttcttttgcccaagggggtttttcatctaacaatttactttgcagaaccgtaaccctaaccccttcccctaccttgtaaccttcctttcgatccttcacctcgcagataatgggagaaacaaaggacgaagcatacgaggaagagcttctcgattacgaggaggaagacgaaaaggcccccgactccgccggagctaaagtcaacggcgaagctaccaagaagggctatgttggaattcacagttccggattcagggacttccttctgaagccagagcttcttcgggcta

SEQ ID NO: 31741 - DNA, 361 bp, Glycine max
  unsure (1)..(361): unsure at all n locations
  Clone ID: LIB3051-063-Q1-K1-C2
agaatattaactgtttccaacaagttgtattgtaaggaaatgtttctgaaaacaggtactgtaaaactgagagaaaaaagaaactggtgagaattcacgtctttctttgtagttcaacttgtcacaaaaattctggtttggattcctcaaatttagtacatatacctagtttattttaaaaaaattcaatatggattgtggttatatttaggtagctgatgaacttgtggccgaatttgctgatccaatcaaatgtgtttcaactcctgatcagcnatcatatgatgagaaaaacattcgtcgaaaggtgtatgatgctttgaatggtctcatggcaatggattattattctaaagataaa

SEQ ID NO: 31742 - DNA, 302 bp, Glycine max
  Clone ID: LIB3051-063-Q1-K1-C4
tcggggagaggaaaaagagcagcctaagaatgaaaccgagaagaaaccccgagaagccggcgggcccccaagaaagacgacggacccattcctgtcgtttacaaactcgacttgcattgcgagggatgcgtcaagaagatcaaacgcacatgtcgccactttcaaggtgtggaaaccgttaaggcagatctatcgtcgaacaaagtgactgttaccgggcaattgggatgccgaaaagctgcgagataagatcgccgagagaaccaagaagaaggttgacatcatctcagcttcgcccaaaa

SEQ ID NO: 31743 - DNA, 325 bp, Glycine max
  Clone ID: LIB3051-063-Q1-K1-C5
tgtttgatggtatctactagttttataactttagtaattctagatctaatactgtcaacgtgaccccgtcttctggaaagtattcattcattacataaaaggtcaacacattctctaactctttctttcattattcatgataactcttcatatcacactgccttaattcctgctactcattattcaaatatctgccctatctactttcgattttttgatagtctcctaccattttaattacttattactcataattaggtttcctttccatatatgtagccttataaactgttaccactttcatactatatcatcattctctcat

SEQ ID NO: 31744 - DNA, 439 bp, Glycine max
  Clone ID: LIB3051-063-Q1-K1-C6
cccacgcgtccgattaatctccgatccgaaaccgaatggggattctgtacgcgggggttggtcgtggatcggtggtgctggcggagttcagcggcaccaccaccaacgccagcgcaatcgcgcgtcagatccttgaaaaaatccccggcaacaacgacacgcacgtttcttactctcaggatcgctacatcttccatgttaaacgcaccgatggactcaccgttctatgcatggccgacgacaccgccggaaggcgaattccttttgcgtttcttgaggatattcatcagaagttcgtgcggacttacggacgcgccgttcactccgctcagccttacgggatgaacgaagagttctctacggttttgagtcagcaaatggagtattactccagtgatcctaacgccgataggatcaatcgtctcaaaggtgaaatgta

SEQ ID NO: 31745 - DNA, 69 bp, Glycine max
  Clone ID: LIB3051-063-Q1-K1-D2
tcgccactcgttcgtccatcgttcgaaaaaaaaaaaaaaaaaaaaaaaaaaaaaaaaaaaagggaaaaa

SEQ ID NO: 31746 - DNA, 438 bp, Glycine max
  Clone ID: LIB3051-063-Q1-K1-D6
accacgcgtccgggttgttcatctctcaaggaattttcagtgacatcagaggaagatgacggatttggacttatctcagactgctatacgtgcattattgacgtcaatgttatttctcctgaagcttacatattcggatttaagtggctgcagagagattgaaagccttagtgttcatataaaatctctacgggtactgacactcatcggtggcccatatctcaaggaattatccgtgacatcagagaaatcgacagtattggagttacctgacactgctatatttgcattgccaacatcaattgggcacttattatctttaaaagagaaattggtgtctctgcatgagcttccaccattcctgagcgagctttatttaaatgattgttgtaaactcgtgtctatgccggagcttccaccatcgggtaaagaggagac

SEQ ID NO: 31747 - DNA, 384 bp, Glycine max
  Clone ID: LIB3051-063-Q1-K1-D9
tcgtataaaattaaaaaagtcatggataacataaaaaattgggaagaagagagattaagcgggtggcggcccaaagagttaggtgtaccaacctcatagcactaataacacatatttgaagacgaatagaagaaagaaagctaattggaaaattcgtataggaacacaaaaaatggcagatattcctcgggtgaagcttggaagccaaggcctggaggtttccaagttaggatttggttgtatgggcctaagtggagtgtacaacgatcctgttcccgaagaggttggcatctctttgatcaaacacgcattcaccaaaggggtcactttctttgattctgcagatttttatggagcacgtgccaatgaagttttggtcggaaa

SEQ ID NO: 31748 - DNA, 361 bp, Glycine max
  Clone ID: LIB3051-063-Q1-K1-E4
cccacgcgttcgggcttgggtttggggttgagtttgaagttaggatggggagaaaataatgataacaataataatcaacaacaacaccctttcaacgtgcacaagcctcctcaatcggttccaaaccaaagggtttccgtcaatagcttgttccattttcatgatcggagctccgagatgcggtcgttcttccgcggaatagacgtgaatttgccaccgtccccgccttcggcggctctggcggcgttcgatgacgagaacggggtgtcctcgccgaacagcacgatatcgagcatcaacgggaagcggagcgagagagagggaaacggagaggagaacgagagaacgtcgagttctcgcg

SEQ ID NO: 31749 - DNA, 399 bp, Glycine max
  Clone ID: LIB3051-063-Q1-K1-F11
gattcagcatcatggttcagctaatgaggtctgatacggataatcactgtgggaaaaaggtgaagttggaggttcaagatgaaatcccccctcttcacactcacaagcgacccaaattggaatctccccctaagtgtggtgcaagcgatgaatccatttcaatcccaccagcttcatacaatcccttggatgagccaagccctttgggtttgcgtctcaggaagagtccctcccttttggatttgattcagatgaggctctcgcaacaagaggaatccataaagaaagatcaaaaggcttcttcttcttcttctgatgctgctgctgctgctgctgctgctgattctaaacttaaggcctccaattttcctggaaccattttgaaaattgggaattggg

SEQ ID NO: 31750 - DNA, 321 bp, Glycine max
  Clone ID: LIB3051-063-Q1-K1-F12
cttttggctttatcccacttgacttcatcttgccaatggttttctacaatgtgacatttaagccatctaagcgaagccctgttttctggttgaatgtgataattgttgtggctttctccgcattgggagctatagcagcagttgcagcagttaggcagatagttcttgatgctaaaaattaccaattatttgctaatgtatgatcatgttggaccatccaatgaagctttgttgttctaaaaaaaccaatgaaaaaaaaaaacaagccaaaagctgtagattattctaacaaaaatgggaccctcataagaagttaaaaat

SEQ ID NO: 31751 - DNA, 355 bp, Glycine max
  Clone ID: LIB3051-063-Q1-K1-F6
tcgagtagatgacgtttctaaaaaaagaggtatatgacgttcaataatgtttatttgtttatgtcatcggttgaagctacaggggaggacattgattttgttagagtgcacagatgagaagaatgttgtggatatgttggaattatccgtacatttgaagtgtgtggataaggtggatcttgtggttttggttgcgggatagcatgtttctctgcaatttttttgtcatgtgctacctatgaaaagattaaataaaaaaaaaggggtaaaggggaatagttgaatttcatttagactgcgtaattatcttcactgtttcagaacttaaggaaattaaatattttattctttctgt

SEQ ID NO: 31752 - DNA, 248 bp, Glycine max
  Clone ID: LIB3051-063-Q1-K1-G1
cccacgcgtccgcccacgcgtccgaaaaaaaaaaaaaaaagtaaaaaaaaaaaaaacaaaggcaccaagctaaaacaaccaaaggactcccactctcgcaggccccagcttacgtcctcgatcatgcaacccaaaaacattttcaatggcgtgacctaaacaacgttcactcgtcgatatcctccaacgctcccactcgaaaaaccctgacgttccccaccttattcccctttcgcatcatacccctt

SEQ ID NO: 31753 - DNA, 445 bp, Glycine max
  Clone ID: LIB3051-063-Q1-K1-G7
gagcgttcggcaagaaccccgtggtcttcgagaggcgcaaactccggcaggttctccagcgtggtttcgagattgttcagcctcgcagcaaccaaattggtgccatcaaggtaggactcgtcggagtcaatttcctccgatgatccccccacgctcgtattcgagccatacttgctacgatcaccgtccccgcattcctccgttacggtcaccttaaaagtctcctcaccaatggcgacatcgatggtatgttgtatttgcggcatccacgaagtcttaataagcacccgggctcgatctagtcgccgtctatcctccgcctcgtcgtccatgtcgacgaactcccccacggccgccgtgatctttcgcaagtgtttcgaactccacgcttgaagaggaactccccaaacgtaaacccaggttagtctatctcccactcgcactc

SEQ ID NO: 31754 - DNA, 343 bp, Glycine max
  Clone ID: LIB3051-063-Q1-K1-G9
atcgtggtggtcgaggcggtgttcgcttcggcggtcgcggtggaggcagaggtggaggctggcgttgtcctaaccaaagttgtgggaatctgaactttgcgaaaagggttgaatgcaacaaatgcggtgctccaagtcctaatcccaatagttctaatgatcgtggtggcagtggcagtggcggtggttataatagacgaggtggaggctatggtaacaatcgaggaggaagaggtcatgactatagcatcggagggggtcgatctggtagttatgatggagggagaggcaatgaatataatagtggaaggggtggtaatagtgaacgcagaagtggttcata

SEQ ID NO: 31755 - DNA, 398 bp, Glycine max
  Clone ID: LIB3051-063-Q1-K1-H12
gcttgctttatatgttcttcagtcaaaccaaaatctctctccgcagctccaggcaacagcccaattccccttttcagttacaaggattggtttgggtcttgttcctgcattttgtgcactagttggggtggtagtgacttgcaccatggatttccacaatccttcaaagtctttgacggcaccactattagcctagctgtgtcattgatcataattattctcctttctctaacatacaaaggtaaatggttatatcatacttggagaaatttcagctgctcggacccattggaaaattcaagcagcaagtagtactgagaatattcactttatagtttatatatatgtataatcttgtatatttattgaattattaattgttacaaatattatatgtc

SEQ ID NO: 31756 - DNA, 425 bp, Glycine max
  unsure (1)..(425): unsure at all n locations
  Clone ID: LIB3051-063-Q1-K1-H3
tgtgactgtcgctggcagctcaggtgttccttgttaagatctgtggtttggttttcgggagggaacaagaaaaaaaggaaaagatgaatagctacagctactatgggtaccaagagaagaacaccttgacaagctgtgaggagacgaggatggaatcagtgatttgccccaaacctcgccgattgggtctcataaaccactctttcatcaacacagaagtcggaccctcgaggcaccccatcatcaggaaattctctgttcttttttctttttggtttttcaagcaaatcggttataaaaattatgacttttctgtatttgttcactaaaaataagcagcttccaacctgaggtggaagattcaggagttggggcagcgcttctggacatgctcctncccaaggaaaattgctatctggaaagat

SEQ ID NO: 31757 - DNA, 437 bp, Glycine max
  Clone ID: LIB3051-064-Q1-K1-A10
cccacgcgtccgggcttctggtgctaccaatatgtaagtaacgaattgccttcacagtgatgaccgatgagaggtagataatggattttactttactgcccctgtagagagattaatcactgtctggttttgaagctttggtcattggtggaccttgcgaatgttgccaaaatttcaattaagtgtttgtttcaattacttggaaaagtggattctaaaagcatccacttggtgcactgtaaggtgaagctttgttaatattggccgtgcaattagggtttcatttcaactttataaatacaaattcaattcagtgttatgtattataattttattaaggaagggaataatggatagctctggaatgtttttgaagtaattttttgaaaaatggagattttatcatccatagactatggaatctggaagatagaagt

SEQ ID NO: 31758 - DNA, 434 bp, Glycine max
  Clone ID: LIB3051-064-Q1-K1-A12
agttgacattaaacttgatagtcacagaaggcttattccagcacacagcaagggcaaacctccctcatatgatattattgctggatttgtttttacaactgtttctgttccatatcttcgttccgagtatggaaaggattatgaatatgaagctccagtcaagcttttggataaactgctgcattcgatgccacaatcaccggatgaacaacttgttgtggtctctcaggtgctggtggctgatatcaacattggatatgaagatattgttaacacccaggtccttgctttcaatggtcaaccagtgaaaaacctgaagagcctagccactatggtagagagctgcaatgatgaatatctaaaatttgatctagattatgatcagatagtggtgcttcgcatgaagactgcagaagcagctactcttgatattc

SEQ ID NO: 31759 - DNA, 117 bp, Glycine max
  Clone ID: LIB3051-064-Q1-K1-A4
cccacgcgtccgaaaaaaaataaaaaaatttaaataaataaaaaaaaaaaaaaaaaaataggaaaaaaatgaaaaaaaataataaaaaatataaaaaaatataaagaaatcaaattt

SEQ ID NO: 31760 - DNA, 427 bp, Glycine max
  Clone ID: LIB3051-064-Q1-K1-A8
gttgcttgatgccgttgtaagacatgttccaccaccaaatgcaaacattgatgcaccttgccaaatgctggtttcaatgatggaaaaagatttctatcttgggcgaattttgactggacgcatattctctggggttgttcgtgttggtgacaaggttcatggattacgtaataaagattctggtgctgaaaaaattgaagatggaaaggtggtgaaactgatgaaaaagaagggtacaaacatggttctaactgattgtgctggagctggtgatataatttcaattgctggcctgtcaagtccagcaataggccatacagtggcaactgtggagattatgtctgctttgcccacagttgaattggaccctcctacaatttccatgacttttggtgtaaacgactccccactagctggccgtgatggc

SEQ ID NO: 31761 - DNA, 449 bp, Glycine max
  Clone ID: LIB3051-064-Q1-K1-A9
gggaaatggaggatcatggtacaatgactttgattttcatgattacgatgatacccctgctcatcccaaaaatggcaaaagtggtaagggtagtaacaatgtcaaagaaggccagatgggcccgggcccaataatgggtaataatcttccaatgcgtcatcagatggagaatattcaagcagtacaaggacttccggcgatgaatggtgatggtggctattatcaaggggtgcaaatgcaacatgctccatacaataaccttcagcagcactacatgggtatgatgatgaaccagcatcaacatcagcaagcaaatatgaacaacaacatgtacccaacacccatgatgtatggtaggccgcatccatctatgaactacatgccaccaccttctatgccatctcacccaattgccgatcctattactcataccttcagtgatgagaatg

SEQ ID NO: 31762 - DNA, 440 bp, Glycine max
  Clone ID: LIB3051-064-Q1-K1-B11
cgcacgcgtccgattttggcatgtttgatgagactgtcttggcctgaataaaatgttgcaggtggacttggatactgcggagcctcaagctcaacaaagtgaacaaacaagtgggttttaatggccttctgtatttttttctactacatatatatgctgtggaactcaaaatcccaacacttttatttgctgtgcagatgaatcaaagtttgttcgtgtatcttttcagttagaaaagaattgtaacttcggtgaacagtttcttatcgttggagatgatcctgtgcttggttcatgggaccctttagaagcattacccatgacatggtttgaaggacatgtatgggccgtggagctggtgagtaaaatctgttcagaattttaaaatattgtcggattgaaaacttttataaatgttgtttttgcttactttgtgtaat

SEQ ID NO: 31763 - DNA, 428 bp, Glycine max
  Clone ID: LIB3051-064-Q1-K1-B12
ggaattggaagttgacgagaacgacttgaaagccgccggcgctgaactcttcgccgaaggtggccggcggggcattcgtatcaatggctggttgatcgagactcggaggcactccatactgaactcttccacattccaagagtgggaacagaaactcgatacgtctcatttaccagaaatggtttttggggaaaacactttgattctaaaacacttgagcagtggaaccaacattcattttaatgcatttgatgctctacgtggctggaaacaggaagccttgccgccagttgaagttcctgcggcggctaaatggaaatttagaagaaaaaaagtaattgctggccccaagtggaaaacgatgattaaaaagataaatggatatggaaaggaagtgaagtaccaaagaaacaaaaaacgggcggccg

SEQ ID NO: 31764 - DNA, 427 bp, Glycine max
  Clone ID: LIB3051-064-Q1-K1-B6
gaaagtcttctctgcattatgtgagttcagatcccctcctaactgcaggaggcacaaatgggtcagagtctccaccagatcatgacaaggaattgtcttctgaagcagatccacttgatgaggtgaaggatatgaaggacttcagttgtaataaatataaggatccgttcaagagatctaggagtgcttctcttgtgggaatccaaacttataagggaggatctccaaggtcagagttccacactgctgaatctgagaaacatggtgaaggatttcgaggaaagagtagttctgacatggttgttagaagagaggcacatgttgttcccaagcttcggtgccgggtgttgggagcatattttgagaaactaggatccacttcttttgctgtctattcaattgcagtgactgatggtcaagagaaaac

SEQ ID NO: 31765 - DNA, 343 bp, Glycine max
  Clone ID: LIB3051-064-Q1-K1-C1
ccgaaaccttttcttctcaccgcagcaacagtcttcttcttcctcttgtttgcggcacagcaatggagccttgtcggtgacggacggcattgagctgcagcggaagagtctgtttccttcacagcgtattctgtgttgccgccaccatgccttcagtgccacggggaaacttctccaatcgccaaacccaattctccgagcggtattctcctaaacccaattagggtttcacaatcacttcaacacgaaaaaaaatacaaacttttcaatatcttcttacgcaggaggcagaagattatacaacagaggaagtctcttccgattacaccagttgagaaaaggc

SEQ ID NO: 31766 - DNA, 437 bp, Glycine max
  Clone ID: LIB3051-064-Q1-K1-C10
tgattttcatatttattttcttcccttgttcctccaatcgataagtttgtttagtgtaagggcccttagcggaaacccaaacaggttctcacacatcggatgtttaagcgtaaattcaactagaatgcttaaggactaagccaatgcccctggcaccatgcctgaacatcagctatcgcacatccagttcttcgtgctaatgatgtctgccggatacacgattgtgaagcaagccttgcccgtatacacggtcaaatcgattcactagcgtatccaaagcatgaagggaatcccattgttcgagcaaatgttaatatatcgcgggaaacagatgcattgttaacagactcttgccgaatgcttcattcagaacgactccaacctttaataagaaggccgtatgctcattacccaacaccctcaatcctgaccagtta

SEQ ID NO: 31767 - DNA, 354 bp, Glycine max
  Clone ID: LIB3051-064-Q1-K1-C2
aaaaaaccttatcttactaaccaaaaaaacaccaaaacttataactatagaatacaaaacaggcaaaaaagcctaaatcaaagacggaccgcattgaactgcatctcaaaactcatgattccttaacagcgtattctgcaactacctgcaccatgccttcaatgccacttaacaaacttctccatatcccaaacccaattctccaaaccctattctactaaacccaattagggcttcacaatcacttcaacactaaatatcacacaaacttttcaatatctccttacgcatgacgcatatgattatacaacaaagctagtctgttacgattacaccaattgagaaaacgctatt

SEQ ID NO: 31768 - DNA, 427 bp, Glycine max
  Clone ID: LIB3051-064-Q1-K1-C8
gcaaggttcgtctcgaggaaggcgcccctggtgggattcgtgtcgcggcgacgccgaatgcgttgaagcctatgttgttgcctcgcaatgggaagagtggggtgaatgcgagtggggcttctctcaaattgccgccgctggcgtcgtactctgatgtttatggtgatttgattaggcagaaagagggcaactgtggcctttgcggtcacaaatgtggttctggacattaccgatgtacacaggataatttcattatttgtattaattgtttcaaaagcgggaattacggggagaaaaggtccacggaggattttgtattgagtgagtcaagtgaaaatagtggtaagcatgacactgtctggactgaggcagaaactcttctccttctagaatctgttttgaagcatggcgatgattgggaacttgt

SEQ ID NO: 31769 - DNA, 385 bp, Glycine max
  Clone ID: LIB3051-064-Q1-K1-D1
ggcaactaacaaaaaaaggcaaagtcataattccatttccatgcgcatggcttccaaggaaacttggccgtttgagtctcgcgagatgctcgcatccttcgtctcgtccacgcccctgctgtcggactcatggcgcctctgcacccaggccaacgccactcccttcctgaccttcgtgactgagcgtgtcggcgcctccgtgtatgtggctttctccggcgtccatatggccggcgagtccgacccgaactggagaaatttgactcctttgtacagcatcggcggcctgcctctgttttcgtctcggcggagcaaggaatgggaggaaccggtcatggttcatgctggcatcctcaatctcttcttttcacttttcaattctttc

SEQ ID NO: 31770 - DNA, 352 bp, Glycine max
  Clone ID: LIB3051-064-Q1-K1-D2
gcgacacaccctcaagcaaccgtagtggtacctgtgatcatgccatttgtcaagacctggggattaagggccctattgaccgccctgctgtccacatggcctttcacatttactatgatcattatcacgatcataaactcgatgtatacacccctgatcatacccgttttcatgattgttttaacgattctatggtagatgtatacattgatatctctcatcatcgctatgaccatagatgggtacacagattggtgccactgtccgttccaattgactttgcacctgatagtttgattgaaccatattcttatcctactgcttatggtccataccaagttaaattactgat

SEQ ID NO: 31771 - DNA, 417 bp, Glycine max
  Clone ID: LIB3051-064-Q1-K1-D5
gcaaagagaaacagaagagcaaaatttgaagtgcaaagtgtgtgtgtgtgtagcgatgggtgatgtttcagattctcaagaacagcctgttcttgattccgctgaactggaaatgaagaagaagcgactgttggtggagctggaatctgcgctgggcggtgagaaatcggtgacggcgcaggcgtcttcttcttcttcttcctccttaggcttgggtattgaggttatcgacgaaacggcgttgcttgactccgttgcgaagaagaacggaggttcaagaagaaccaagaacaacaacaatggtcacaatcacaagaagtcgaagccctcaaataagattgggaacaaaaagtactctcgtaaggagttggaatcttttagattcgtgaacatggcccgacaacgcaagttcttgaa

SEQ ID NO: 31772 - DNA, 420 bp, Glycine max
  Clone ID: LIB3051-064-Q1-K1-D8
acgaacgcgtctattgaagggtgtcagtggatctttcaggccaggtgttctcactgctctgagaggtgtcggaagtgcaggcagaacaactctgatggatgtactcactggtagaaaaactgggggatatattggggggaatatcacaatctctggttatccaaagaagcaagaaacatttgcacggatttctggatactgcgagcaaaatgatatccactctcctcatgttactgtatatgaatctttgctttactcaacatggcttcgactgtccccagaaatcaatgctgacaccaggaagatgttcatcgaggaagttatggaacttgtggaactgaaagcactaaggaacgcattagttggattgcctggtattaatggtctcttaacagagcaacgcataaagttgactattgc

SEQ ID NO: 31773 - DNA, 101 bp, Glycine max
  Clone ID: LIB3051-064-Q1-K1-D9
aagtaatatccataacttttgtttttctttagaatttaaaagtttaagtagtcctctaagtaacacatatgttcttttatttttgggctcttaatagagtt

SEQ ID NO: 31774 - DNA, 159 bp, Glycine max
  Clone ID: LIB3051-064-Q1-K1-E1
aaaacacatacaaaaaacaaaaaaagttataaaaaaaaaaaaaaaaaaaaaaaaacctggcaatttgagacatccaaacttacttacaccttccataaaatctcttactccagcaaacactttacctaaactcaatacaatgccacatccctttacaac

SEQ ID NO: 31775 - DNA, 373 bp, Glycine max
  Clone ID: LIB3051-064-Q1-K1-E3
cccacgcgtccgcccacgcgtccgcttctctattttaagtaattcaatggcttacactggaagtcttgtgttcttagcttccactttccttatcataaactttcctcttctggcaaacgctatcggatgcaatggaccatgcagaaccctcaacgactgcgacggccaactcatttgcatcaacggaaggtgcaacgacgaccgcgacgtcggaacccacatctgcggcggcggaatgccgccaaatccgccaccaagcggcggaagctgccagtcctcgggaaccctaaattgcggcggaaaatcgtatcctcagtaccgttgctctccgccggtaacttcctcgacgccggcgatcctgacgctgaacgac

SEQ ID NO: 31776 - DNA, 390 bp, Glycine max
  Clone ID: LIB3051-064-Q1-K1-E5
cccacgcgtccggtgaggcgagggtaaggtcgcgttgtgttgcgtcgtgtggtgcgctgggcctctgtttctcgtttttgtgttcagaccgaaccctagctccgcatcgcaaccatgtcgaccaagcaaggtggaaaagctaagcctttgaagaaacccaagtctgataagaaggattacgacgagattgatgtggctaacattcagaagaaaaaggaagaggagaaggcgctaaaggagttgaaagccaaggcgcaacagaagggaagctttggaagttctgggctcaagaaaagtggaaagaaataagggctctttatcatgattgtatgcattcaatattgagccctgtaattacagttgctaccatgataacttctcttattattg

SEQ ID NO: 31777 - DNA, 360 bp, Glycine max
  Clone ID: LIB3051-064-Q1-K1-E6
atctccatttccatttgctgtctctaagtttccaagaatcttaagctatgggaaagtcggacccaaccgtgagcgctgattaccagaaggccgttgataatgcgaagaataagctcagaggcttcatcgctgtgaagagatgcgcttctctaatgctccgtttggcatggcactctgctggaacttactacgtgagctcgaataccggtggtccctttggaaccatatagcacccctccgaactctctaactgcgctaacaacggtcttgacatcactgtctaggcttctggagccactcaaagcggagtttcctatttcgagctacgccgatttctaccagttggctgtcgttgttgcc

SEQ ID NO: 31778 - DNA, 369 bp, Glycine max
  Clone ID: LIB3051-064-Q1-K1-E9
gcgcgcacgcgtccggtcaaattgacttgatggactcttaaaattttccaatctaaaaactgggcattgtatgagttaccccttcctgaagagcaaaccggtattttttctcttaaaaaaaaaatgactggatatgatagcacatagcagtctatgaacggtagcagtacatgtctattaatgcatgagttgcaccgaccaatcaaatatctatgcatagtgacaataattcacctaacattagcccaattatcataatacatgaacttctgcacgttagcatcactgcttacaaaataatgcaagtctatctctgcaataatcatatgaatgtcgagacccactaattaggaaaaccgtatgatacat

SEQ ID NO: 31779 - DNA, 417 bp, Glycine max
  Clone ID: LIB3051-064-Q1-K1-F2
acggaacaaagaaccatcgccatgcttgatccgagaacactccaccccaccaattctttcgaggtgcacggggcaacacgacacaaaccccacacatgggatgttacgaactccggtttgtggccttgaaaaccggctttggaggaagcagaggtagatgattccgggatttgttcacctcctatgaggaccacgagcccgtcacgccgaagaaacaaccaccgaagcctgtcgccaacgtcgaggacgcaagccatagtgagagggcagagggagctcatggaaatggtgaagaacatgcccgagtccaactacgagctcttcttgaaggacctcagtgagcactacatggttggtgatgctactagacatgaaaaaaacgcggtggaagagagaaacttgagcagcgtgtacaac

SEQ ID NO: 31780 - DNA, 436 bp, Glycine max
  Clone ID: LIB3051-064-Q1-K1-F4
cccacgcgtccgctcaagcgaatagtcctccaccaaaaccttgggaacaagcgggttccgcttctggtccagcacctttcaaacctccgtcagctggcaacacaagtgatgtagttgaggcttcagggactgcaaaacctggggaaattgtttctagttctgataggagtgcagctgtcaacaggaatactcttgggaggcctgttccctccaggccatgggagcagaattatggaaacagcacctatggaggatatggttctacaatgaattataattctgggtatggatctggaatgtatggatcttcttatggtggactaggaggtggaatgtatggatcttcatatggtggggggatgtatggtaacagtatgtacaggggaggatatggtggcctgcatgggtcatcccggatgtacggaagtggaatgta

SEQ ID NO: 31781 - DNA, 410 bp, Glycine max
  Clone ID: LIB3051-064-Q1-K1-F5
cccacgcgtccgcgttccgtgactgaaccctctcttctcttctcttgtgcgatggcaacgcgacagatacgcttctccgccagctacatcgccggaggagaacgctctctttctcgatatactacacgaagctcctcttttcgctcatcgcaaagccgcgagggttatcgggagcgttttctactgcatactactggttatgctactttggccattggagctcactggatatttcgtccagtgcaaggactcatctctcccgtgctttgtagttgtgatgttctgcttttgctgttgacaggaatctttcaacaatacctggtttatcaagtgcagaagatacgcttgcagggctattatagtttcagtcagaagttgaaatttattgtccgcataccctttgctattac

SEQ ID NO: 31782 - DNA, 182 bp, Glycine max
  Clone ID: LIB3051-064-Q1-K1-G1
gggcgagggttttcagttttctcatatttttccccttcccagtttcactggattgtttgtggtgcacctgatagcatgtaagatattgcctttgatagaaacaattgtaagtttgaaattgatactttgacgttacatacaataatagcttgtggagtaaggacatacgcatttttgctatc

SEQ ID NO: 31783 - DNA, 431 bp, Glycine max
  Clone ID: LIB3051-064-Q1-K1-G10
gcggactgacctagcttcgaatctacaatatctgtccctttctttaatggccttgccttgtaggaccattcgggatctgaaactcagctactgatgctacttctacttctacttctacttcttctttcgcctacatgatactctgcatgtgcctctccgcacctgaaccacgcttctgaacgcaatggctcggcctaattgccctcttgctctctgcatctctttcatcttcgttgctcttcctctttccctcgccaccactgacccttctgatgttcaagctcttgaggacatgtacaaagtgtccaatagtccaactcatctaacgggttggaaaatcggtggtggcgacccatgtggagagtcatggaaaggggtaacgcgtgagggatcaatcgatgacttcattatactctcaagttcaagactcg

SEQ ID NO: 31784 - DNA, 405 bp, Glycine max
  unsure (1)..(405): unsure at all n locations
  Clone ID: LIB3051-064-Q1-K1-G3
cccacgcgtccgcccacgcgtccgcccacgcgtccgcgaaggaaaaagaaaaatgatgaagggatgtgaattggtgtttgaagcttcaacaagaggagggtgtgaggagcacccatatgataagcaatcaccaggtgtttgctcctcttgcttaagggaaaagctatctcagctatacaacacaaaccctattattgatcctcgttgtttttcttctccttcttctccttcttcgcctcatcaatctttattttcttcgaagcacggttcttccggtcaccggagaccgcgctttcggaggaacgcttcgcaagcggcggaatctgcctcgtgcatgctgagcttgaacttgaagaagagcaagtcgctggcgtntgcttcgaggaatagggaaagggatgtgat

SEQ ID NO: 31785 - DNA, 385 bp, Glycine max
  Clone ID: LIB3051-064-Q1-K1-G5
cccttgtatcatttcttctccttcttcataacgctgctgcttcacttctggcgctttaggtttcgaaccaattgggatttcgggatgtgtatcgtccagtgaattgaggagaatgacatttttgggttctgttgattgtgttgtagatggggggtttggctgttagattgttgtttgttgagtacaatcttatgttcagtgaagatgatttcgtgatgtggttgagagagtggtttttgtagaggaaggcttgttatttttgttgttgatgtggtagtttattttgtttaagagtaggaacatagtcggcagacgagaagaattaagctttgttggatgggtaataaacttgggaagaagagacaagttttagatgataaatata

SEQ ID NO: 31786 - DNA, 412 bp, Glycine max
  Clone ID: LIB3051-064-Q1-K1-G7
acggaatcctgaacaaggaaaataatggcgaaaagtcaagggtagataaggggaagctcgttgctaagtcagcatcaatgcctaatctgacagaactagtagatggaggcttagcatttgctcactattgtctcactgggaatgaatttctgagattatgtacaggagcaatacctgggacacgtgactacgataagcagcactgtaaagaccttcatctcttgcctccacaggtagaaaatcctatctatggctggtgaatggattgactagtttgaatgtttgaaggaaaacttgtcacaccagattatgacaagcagtactgtaaagccatcatctaaatgcctttaggtagaaaaatttatggatagctggtgaatagatttagtggtttgagtttggaggttggttt

SEQ ID NO: 31787 - DNA, 431 bp, Glycine max
  Clone ID: LIB3051-064-Q1-K1-G8
ccgacgcgtacgctgcagtatattcgatcatatacttgttcaaataattgggtttccaggtacaataccccaaatccagatgctcatgctcatgaccatactcacggtccctataacacttacttgaagacaatttagagtcgaccttacagtctacttacacctatgcaaacacactcgatcctgaattctccttagagatgaccttacctagctacaatactggtaacaatcatactctcgggcatcagaactatcttcattctttctttgcacctgactttgcaggggataagcgaggttttagcgaaattatatgcgtaagtatgtgctaaagagctaggtcatcatagacttcatctcacacactctcctttatactacctattatattctagatttaacgctggataactcgtgattaacggagt

SEQ ID NO: 31788 - DNA, 381 bp, Glycine max
  Clone ID: LIB3051-064-Q1-K1-H10
gcgcgcacgcgttcgcccacacgtgcgcccacgcgtccgtccacgcgtgcgaatttaccagcggtactcgtgggttttgaaggctagaagtgctgcaatacaaacaatggcagctactcaagaagaagtgaagcttttgggtattgacggaagccgctttgtgtgcaaggtccagattgaccttaagatcaacggagttgaacacaaatttttggaataaaatttggacaataagactgatatgcttgttacatacaaccctgttcacaagaaagttccagacgatgatcactatgagcagcccatagcagacgctcttgttaatgttgaatacattgatgatacatggaagatcaaccacatcttaccttctgatcccta

SEQ ID NO: 31789 - DNA, 442 bp, Glycine max
  Clone ID: LIB3051-064-Q1-K1-H12
cggacgcgtgggcgcggcttcaaccttgtagttattctctttcttcttttttagctatccctctcttgagaaatctagatctcgttcttccttgatctacgttacgcttttagtgaccggatctgtatggatctgaaccagatctacacgccgatggtggttttggcctggtctttcatagatctgatgcatggaggctcagatctactgtacagagatactgtagataatcgataagaagaacgcagatccagccgcttccgcttgttcgatcgctacagacgcttgtatcggattattcatgattgattcataagcagcatgtcttcctccggctatagttgttgcagatctcggatgttgtaaaattagtgtatgatgtgaagctatgggctggaaaatgtggatgtaggagatttcgggacgaaaggcctcaaaacgc

SEQ ID NO: 31790 - DNA, 318 bp, Glycine max
  Clone ID: LIB3051-064-Q1-K1-H6
accgagaataccgttgctttcatataggtcgtatatcctcaatacatatatcgatggctcaggggatacgtgtacctaatgcgggttagaaaactaatccttacggattaggactttatggtctcatattcgatagcgtaatctgttatatccgaagactgtattcatgttcacaaacataactaaaatgacatcatgccttgcagtgatgaccaactattgcgcatgatcttgattaactgtgtctagtataactctatgtacatgactcttgtacacactcatacgcaggtcggtcattctataagattcaagctt

SEQ ID NO: 31791 - DNA, 418 bp, Glycine max
  Clone ID: LIB3051-064-Q1-K1-H7
ctgagatggtagaggttttcttgtttaagaggtgtaggaatgtaacctgcaagcatttggttcctgttgatgattgtgactgcaagatttgctcagggaacaagggcttttgcagttcttgcatgtgtcctgtctgtttgaactttgattgtgcaagcaacacttgtagttggattggatgtgatgtttgttcacattggtgccatgctacttgtggcattcagaggaatcttatcaagcctgggcctagcttgaaggggccttcagggacctcggagatgcagtttcattgtattggctgtggacatgcctcagaaatgtttggtttcgttaaggacgtcttcgtgtgttgcgcaaaagattgggggcttgaaaccttgatgaaagagcttgactgtgtaaagaagatcctcatggg

SEQ ID NO: 31792 - DNA, 385 bp, Glycine max
  Clone ID: LIB3051-064-Q1-K1-H8
cagaaaacaaggggagcaagaacattggatggagagcaatggttgcacagtggtctcgggctccattcattgcaaagaggccacgtacggtcttatcaaagaaacccatgttcgaccgtacctgggcgcactccagggcactgcactttgagagaaattaatgtggcatggtcatcaatatcatgttgcaattgctcatgcaccaccactcttccacaacgtgcttcccaagtttggagaaccagaaccttacattcacaccccaaaagatcgactagacaattaaaacacttactctgtccaaaatcactgtaatatacatgtagcgcttatatgacatctgtctcagatcttttactacttcaagacagatatacaacttact

SEQ ID NO: 31793 - DNA, 395 bp, Glycine max
  Clone ID: LIB3051-064-Q1-K1-H9
agcctacattacttgagaagcgcaaaggataggctctccttgaatggaagagtgctagaggagacgaagggtcagactatcatatacagattggggagcagtatcttgccaatgttgtgaaggaatcggtgagatgtcttaatgcttgacatgctgggaaagtttactatgtccaagattggcaggagacaatggacacagagttggatactcataagctggaacatgggcccaagaaaagaaagatcccatactgcaacaataatgaagatgatgatgatgtggaagatataaatgcgtgagaggatgacatgacagatgatgaattagatgatgattctggtaggatgatcgatgatacagctaagactgaagcatgtaatgccagcacagat

SEQ ID NO: 31794 - DNA, 437 bp, Glycine max
  Clone ID: LIB3051-065-Q1-K1-A3
actagctagtgttctataagttcacggtcagttctgaaaaatgggttccaaggttttgcttgttgtagttatgtgcatagcggctatacttctgatctctgctgaggttgcacccaatgaatacgaaaattttaacaaaaaagatgggaagcatgctccaaatgggttatatgatagcaaatggggttacggtggttggggtggtccttggtatggcggctggggtggcccttattatggtggcggctggggtggcccttattatggcggtggttggggcggtccctggcgtggtggtggcggtggtggctggggaagttggcgtcgacctaatggcaaccctcacaactaagaagaaaacttgctaaagcttctttacgggtttaagttttcgcaataaataaaacttcatgagaagtgtaattgtaataaaagtg

SEQ ID NO: 31795 - DNA, 428 bp, Glycine max
  Clone ID: LIB3051-065-Q1-K1-B11
gaatgctcacgccttctgcttccgtggcgctccaccccactccaacgcgctctcgaggggcttccgccggaggcgagtccgcatctcgctcctcagccagtccgagaagcctgacgtcacttataatgacattggaggatgtgatatccagaaacaggaaatccgtgaggctgtggagctaccccttacacatcatgaactatacaaacaaattggtattgatcctactcgaggtgttttactgtatggaccccctggcactggcaaaacaatgcttgccaaagctgttgctaatcataccactgccgccttcatcagggttgtaggatctgagtttgtgcaaaagtatcttggtgagggtccacgaatggttcgtgatgtatttcgtctcgctaaagagaatgcgcctgctattatatttattgatg

SEQ ID NO: 31796 - DNA, 426 bp, Glycine max
  Clone ID: LIB3051-065-Q1-K1-B12
attagccacccctttattatttcaggtgttgggtgggggtatgtacgtgtatcactgcgtggtactcaaatcatcaaagccgccactaacctcatacacacaatcgaaaacatggcatcttacgagggaaggccattggtgatggaaatggaaggagaagaaggtttcgaagaagccggtagcagcggttgcggatgcttccggtgtttcagcctgaagaaatggtggcaaggctatgaggaagaaggtaaagggctacttgatcaaaagggtgagggagagtcatgggttgtgaacaaattaaggaaggcaaaggaggtttcagaagtaattgctggccccaagtggaagactttcattagaaagataagtgggtatgggaagaaggtgaagtaccatagaaacaggttccagtatgatgaacat

SEQ ID NO: 31797 - DNA, 438 bp, Glycine max
  Clone ID: LIB3051-065-Q1-K1-B6
attaaactgaaggaaacaacgatgttctgttttattgctattacatttgcggttgttaggggcatgttgatggaacaccgccgaattatgtatctttatcacagtcgtgcttttcggaaaggaaaaggataacttagagtgaaaacttttacagttgatatatgtagtttgggattctgttatgaaatatttgttttcgttgggtatgactatgaaatgtggctgaagaaaccgaagtctgcttgtattatgcactccggcttcctttcattggatttaatcatttgtttattcaagtattcaacaagtgggtttggaagtgggaaccatgatctcatctatgcatgcacacaacacaaagaaagcatgggctgcattgtaggaggctgcagaattcacccattgttgctttgtgctttggttaaaactattaaagtg

SEQ ID NO: 31798 - DNA, 370 bp, Glycine max
  Clone ID: LIB3051-065-Q1-K1-B7
attaatccaactgaagctccggagttccgcttcatagctaatactactgcggatttttcagtgcggactcatggaaaatcatcgagatacttatgaatatgcagctgcaaccttcattcttgctttggatatctttccagggattcatctacagtttctaaacctacgtatgcgctactcatataagcaacactattccaaagaccttacccactgaatggtcactacttaaacctcagacgcatcggagaacgccgtatgcattggatattcgacatcgaaaaaatctcacaggctaccatgttcacgttgcaacggcccttaggcccccagatatccattatcggctatcacgccaccgttgtgcaca

SEQ ID NO: 31799 - DNA, 448 bp, Glycine max
  Clone ID: LIB3051-065-Q1-K1-C4
cccacgcgtccggaaaaacggtgttctgttctgttctgttcatgcacttgcacgcatgacagaccctttttaaggttaagctgtagagaggagttttgctcaagttactttgcttgcttctgtgatctgtttggtgtgttgcgtcttgcggcaaactgagtgaggtaaaagagggagagggaggaacagagagaaagagaaattaaaaaacaaacaagggaaccttcccttaagactctctctctctctctctctcttcttagaatttgtctctcatttctttctctctccctgtaacacagccaccgcaccattctctctctttctcgccgccatcatgttctcctcaaccagatgcgctttcctgagcaactcggggttaggtgggtgcagcagcttgtgtgatgctgcgcagaaaaagcgttcaactcgtttgagggtggtgagt

SEQ ID NO: 31800 - DNA, 441 bp, Glycine max
  Clone ID: LIB3051-065-Q1-K1-C6
cccacgcgtccgaaacacttaatttctcatctcatcatttctaattctacgctcttttctctggcactaacaatccaagatgaataccaacaacgacaccgaaaaaaaccaatcatttccagaagcacaaggagcatcatcatcatcatcttctccacccaatgttgggactgagaattggggaactcacataatgggcacccctgctgttccaagcagccacccagataacaaaaaagcagctttacaaagtggacaacctcaaccagttcaatactaccatgaccaacatcaacatccctacgtgcaacatagcccagttgacaaaccaagcaacagtcccatggagtcaatccttaacatgttcgattcatggagcaaaaaagctgaagccaccgcacacaacgtctggcacaaccttaaaactggtccatcagtgtc

SEQ ID NO: 31801 - DNA, 436 bp, Glycine max
  Clone ID: LIB3051-065-Q1-K1-D11
cccacgcgtccgcccacgcgtccgcggacgcgtgggtatagggtactactaattaaagtgagagaattgatagcaattgtgtgtaatgaaaaataaataaagggaaagggtagtagcggcatattattgcaaggaaaaatccaacgtcaaaatggaagacgacccgtgggagctctgcaacgacgacggcttcgtcttcaagcgcaagcgccgccgcatccactccccctcgccgccctccgttcccgaccaagagccggcggatacgctcctgagagagcggaagaaacaaaccctattgaagctcaaatctaagtacgagaaagagattcttctttgggaaaccttgttgaacaccttgcgctcaatgcaacaacgcaccactcaacaacatccccaaccaaacctatccctatctcttccttctacttcctcg

SEQ ID NO: 31802 - DNA, 427 bp, Glycine max
  Clone ID: LIB3051-065-Q1-K1-D12
gtgaaagtggcgacgtacttcgcgatgacgcttggagccttcgtgttctggcagtccatggacaaactccatgtctggatcgctcttcgtcaagacgaaaagaaagagaggttggagaaggaagcggagatcagaagggttagagaagaattattgcagcagcaggccagtcagaaggattctctttcttgaattcgaattatgttgtaattttgctttgtaatttccccttgcttctgtttttccaatgcaatgtcttgtgctcaaataaaatctgctactcccgagcacttcaaatttaattgcgtggatttctattgtgttcctctacacatgcacttgtttcattaactgctatgtgtcagtaattgctggaacacttctatcgggttatgaaccagattttaagcgtttagatggattgttt

SEQ ID NO: 31803 - DNA, 414 bp, Glycine max
  Clone ID: LIB3051-065-Q1-K1-D2
agtgagcaacatctgtaacgtcaggatttaggccactcataaaacgagtcattgcgtcctgagtttcctcttcggtggcggccctcactagtgtcatcttcatctccttgtagtactcctccacggacaaacttccctgggtcaacctctgaagtttctatcgcatggttctgctgtagctagttggaacatacctatttcgcataacccttctcatctcagtccatgtacctatctcccacctatcctctcttatcatctatcattgatccttattccaccaaacaagggcatactctgagaattcagctgcggctaacttcaccatctacttttcagtataatcattgcaggagaatacatgctcaattttcatctcccactcaaagtacgcatctggatcactcctgccct

SEQ ID NO: 31804 - DNA, 383 bp, Glycine max
  Clone ID: LIB3051-065-Q1-K1-D4
agaaagaaaaaaaaaaaaaaaaaaaaaagagtaaaaaaaaagagataaaaaaaaaaggactggggatatatcaagagggactcttaaatactctggcttgcgacatcttacttctaatctagggtggattcaattaaattgactgtcactggttatacaacgtctacactggaactaccctgtctttaccaagataaattgccttgcaaaaaattccccttacaacccataatggaaaatctttcacttccacaccaatctttcacactaaaagtctgactatcctacttgtagaacggaagcctacttgtatatgtcatttaggaccttattaagcagtggatccgcacaccgtttaaaattcccaggtcattgttccaata

SEQ ID NO: 31805 - DNA, 428 bp, Glycine max
  Clone ID: LIB3051-065-Q1-K1-E10
ggtaactaacttttgtttggagtctcagtctcagagtatggacactcagaaagggccgtgttcatcggctgcagctgttacttcatgtcgaaagaagaagaacgaagaagccacttttttggaggacttgaaggatcacattgacgagtttattaatgcttctatggatgaacataagacttgcttcaagaaaacagttcagaagatgttcggaatgtccaaggctgttgcagagagggacaccaatgctgccaaagaagttgagagttctctgcctcttcagacaactttgcaagactagtatcatgcttgctctcaagaaaaataatgtttgttttctagaagctcttttggaggatgttgataaaaataagtgagtgattaagttggttggtcttgatccatgggactaggttgttgttgaatgt

SEQ ID NO: 31806 - DNA, 316 bp, Glycine max
  Clone ID: LIB3051-065-Q1-K1-E2
cgatagtgtcttgcaaatatatactcgaggctatagtaaacaactactggttattcaagggggtggatctggaggggacactactgctgctgtggtactagctgatatcgtagatattcaagacttatttcctagaagggaaattctcgtgagccatcctaactatagaatgtagaaagtgcatctgctaaaggatttgacctggatagaatctgatgcccgtatctctctggtagtgcaattgtaaagattgaatacacattgctcaggaggaaggatataacatgagccttgatagaatacgttcattttgact

SEQ ID NO: 31807 - DNA, 388 bp, Glycine max
  Clone ID: LIB3051-065-Q1-K1-E4
ggggagaagccgcacaacattttcgtcggagacgacggagactgcttcggcggtgtctgtggcttccaaacgacgcgacgattcgatgatgcagccacaggatggtattaaaggcgccattttacactgcaggagatccttcaatccatgcagacctgagtgtaagtcatcacaactgccgtgatctgagagccatccatgggacgagataggcatacatgaagccaatgacatgctcctttcaacatagccagcttccttgcagcggtgtcagagtgtaccaagggaaatgtatgtgattactattagactatatgatacactccaatgagatcaagaacaagatgatatgcatagtaagagtagagtcttggtccagcatgatatg

SEQ ID NO: 31808 - DNA, 417 bp, Glycine max
  Clone ID: LIB3051-065-Q1-K1-E5
cccacgcgtccgggtgtgtgtaggtggtgattacaaagaaaaccaaaaaaggtcgtagaagattaaaaaggctttaataggtcaaattggttgccttgagcagccagtgttaacatgcaaagccgggtagggattccaatgatatgttggctgaggttgtcaagaattcttggaaaaaaagagcaaaggaatcagtcgtgattagtaaaggggagggctctgattttgtggcaaaagctgtggatttagcagccagagaattaataacaagtgcatcactaggacaaggtacagcttgaccgtgccaaggtatccacgaagtctgcagttctaatgaatttagagtccagattattggactcagtggaggaaagagactcttgagttcatcataccattactttgatattatagaaa

SEQ ID NO: 31809 - DNA, 437 bp, Glycine max
  Clone ID: LIB3051-065-Q1-K1-E6
aaacaaacagacaaactaagggaaaccatcaatagttcaacatcaagctgatccatcatatggctatggcacgttgggctttgaaaaacttgcaacaaagggtgtgtgcttactctgtcttgagtggcaatgttcacaagcagaggtggaacaatgagttgctgataaggttttgtactggaactggatgacaagggaaaatctgaaggcactgaagttgctgtcactgaagggaaaaagtctaataggatgttcccaaggaggaggggcacaagatagacttggagaaatgaggatcatgatgacttacattctgctctttatgagatgattacttcaaggcttgggagtacactgatgcaggcaagtcataacatcaacaggctgtatgagaacatgaatctgacaccttggtctctgactagcgggcgtgtgaa

SEQ ID NO: 31810 - DNA, 391 bp, Glycine max
  Clone ID: LIB3051-065-Q1-K1-E8
agacatttcattttgtttttactgcacttgttgaatcttgtatttcctgtctcaaagactggatttaattaattctttcttattttctgtagtaacagggtttgttttgttttgttgggttgaatcgatctcttttcctttccgatttttgaattaatcattttactaatgtactggtgtcactgcactggcaggaaccactcgccatttcgactcttgttggtgttctatatttggccttaattcgatgacttactcatactgaaatatctctagtgtaaaatatttatgatatactcaataaaattcagcgactttcctctatcttcacgaaatcttatgcttgctaaaagactttgaattggtgttggagttggaagcatgtctatct

SEQ ID NO: 31811 - DNA, 132 bp, Glycine max
  Clone ID: LIB3051-065-Q1-K1-F1
cccacgcgtccggtgaggccggttcaacactctgtcctccgggggaattcgaccgttgccggaaattcagctccgccccaccgctgcttgcggaaatccaactttcgtgagaccttttcgcagatgctgcac

SEQ ID NO: 31812 - DNA, 354 bp, Glycine max
  Clone ID: LIB3051-065-Q1-K1-F10
agagaacacacccaacacaacacaatacaatcgatagtttccgattcttaaaaaacccgagagtacgaggtgatgttcgaatggagccaaacgaggagaacggaggcagcacgagcagggaggaacaggaagaggcattggtggctttgattgaacaccgaacccacgaagtcaaaaaccttcgtcaccgcatcgcttattataaaacccagcttgatgaagcggagaaaaggttgcaagattctgaatccaaattggctcgccttcgaggtcagacagtgtcatctagaagtaccttagatgatggaatcaaaactttaaagacagagcgcagatcaaatagcccattggttg

SEQ ID NO: 31813 - DNA, 283 bp, Glycine max
  Clone ID: LIB3051-065-Q1-K1-F4
gcgagtttgttcaagggctgttgctgtccaccatacttgatgacaatttataaaggaaattgatggaggtggctgcttcagtagtgggcgaattcatatgcggtacctgctatgtatggtttgcctgatgaaattgtctatgtatttgatcagagtggaataataagtagtagaaaatgaatgtaatttatgttatatgtgaactgatgtttttagttcaagagtttcatcatctcctttaatctcagatcataaagcttaaatgaaaaaaaatcctttcctg

SEQ ID NO: 31814 - DNA, 307 bp, Glycine max
  Clone ID: LIB3051-065-Q1-K1-G12
attggaactgagccagctatgcttatgatagacgatgtggctcagaaccctggaatgctggtgcacctttgctctaactgtactggacaatttgaagttaactcaagccgaagacgcaccaatgaataaatttcacataggcacacacctagatgcatttgtcgaagatatcagataacaatgccatgagccgaatgacatgaaccagaatgctatagccgccatcagaggtgacaacgctgatgccatgaagcaggacagcatgcacacgttcacagtgacatgcgcatttatgatgaacacacta

SEQ ID NO: 31815 - DNA, 428 bp, Glycine max
  Clone ID: LIB3051-065-Q1-K1-G3
ggttgggatccctcactgcattctggaaagataattgaatgttcttgggattttgacaaacgggaatggaaggttatgcgaatcagaacagacaaatcaactccgaatgagtttaatacttacaggaaggtcatgcgaagcataagagacaacatcaccgaggaagatttgttgaatgaaataagtgagataattcgccttcccatgtatgctgacaggatcagaattgatagtaaagcgaatcagcatgctaatgtcgcaaggcgaatgtgatttggtggtggtttagatcagatcagggacttttatgccttcaatctttacattggtggtagtgggtgacatcaagtgaaaacaagatttcgtgtataccccgatacttgtctctgggatttgaatgaaattgtattgggtttggctatgtattt

SEQ ID NO: 31816 - DNA, 434 bp, Glycine max
  unsure (1)..(434): unsure at all n locations
  Clone ID: LIB3051-065-Q1-K1-G8
tgggaagcctgggtgaaaagcaaagtcaattgctgctaaagattgcttataaacatttctggcttccacgtttgatatgttctggattttgatctgatctcacactagacacatcaccatacttttctttgcaaaagaaggggaaggttgcacactaactccaatgaaagaaaatgttcttccacccgtgactgtaaatttccagcaaggacttggccagaagtttaaacagccagctggaactggtattgatttttcaacatttgaggagtctgagttattgaaagtaggggacatggatgtctatcctgttgcaattaaagcagatgcatcctncagcgaccatgatgaatcaaaatcaaatgaaactccatcatccggtagctcaaactctcagataactcaagcagtgtttgagaaggagaaaggagaat

SEQ ID NO: 31817 - DNA, 374 bp, Glycine max
  Clone ID: LIB3051-065-Q1-K1-H1
cccacgcgttcgctttaattttctttgtattttattctatagtcttaattctattcctgttgggtgaatactgtcggatgcctgggttcttggtctccatttgaaaattgctacctaaaccagcctatcaaaatctgcatattttcctaaactgaatttctctgtccttttttggtaacctatcaattaggccgtatttctgctaaaaaataaaaccaattccccggggtttattatcatattgtgccaagttagattcgaagagggtgtgctcttgttcgagaatgcatattgagggcggtaacggataacaatgtcgaatctggtaccgggggtgcttctcaagcttctgcatcacatgaacacctatctta

SEQ ID NO: 31818 - DNA, 431 bp, Glycine max
  Clone ID: LIB3051-065-Q1-K1-H10
aatgcccgctaacacacctgacaccagaccatgatacccactgacaagaaaagtacaccgaatcaaccacgcacaaccataagcctctctcacttctcttgttaaatcaattggaatcagattctttcttctgttctctccgtttcagttgctatggataataagaagagaggggcgagggagggtgaagatgaagatgagatgaagatggagaagttttacgcgctgttgaggaacttccgcgacgcccgtgatcgccggcgaacggagttggtggagttggaaaaacacgagagcaacatctggaagaagaatatgaaaggcaccgtcccaactgcaacgaacgacaataaggcagaagtttctttcgaatttcaggactttaccaccgagattcaattcagaaagccacctttggttttcctaatcca

SEQ ID NO: 31819 - DNA, 440 bp, Glycine max
  Clone ID: LIB3051-065-Q1-K1-H7
gcggcagtggtgcctactggtttgactctatctttgaaaaactgaattgggctccacatttcagggttaaaggttgtgaaatctggttaatatctgcttatctgctcacatacactgatacacacatattgaaggcatgcaatcttgaacataattatctgcaaccattcagacttactaaaggaatacaatgtggaactaaagggtcccttcaattattcacctctagataaatctgatattcccggcgattgttatgatgatgcatcatccgcaagcactaaggacatgaaagtacaaagatggcaatcaaaaacagctctatccagtaagtgacaatcatactgatcattccttcaacttgtatcatctcaatttttatgtactggccatgttaaactcaagtactcaactaatcagaaattatgatggttgtgatt

SEQ ID NO: 31820 - DNA, 287 bp, Glycine max
  Clone ID: LIB3051-065-Q1-K1-H9
tcgaccacgcattcaaacaggactacccttgtattaatccaatgggcctatgggagatacctggggggatccaataataatacgatctgggaaacttatatcagccactgtggtttactacgctttttgtacttttaatacttatcactctagggcatgctattatctacaaataagggaagtgacattgaccccagtgatagctactagcgagatctgattgtatcttgaagaataaaacctatgggcattcgatatgatgatgattatatgaatgtagaacctat

SEQ ID NO: 31821 - DNA, 444 bp, Glycine max
  Clone ID: LIB3051-066-Q1-K1-A10
cccacgcgtccgcccacgcgtccgcaagaagggtggaatagttgacattaatgctgctgcaagaatcgttcttcatgattggaatgaaggtaaaattatatattataccatgcccccaaatagggatcaaggggaaccttcagaggccaatatagtttctgatttttcaaaagagtttaacattgatgaagtttacagcagtgaatcttcatatattgggagccttatatctgttgataacttcaatgctgttgaagttccttcaagtcaccctctcactcttgatgagatgatgttagaggacgagacacaaatcaaaccagctgaacaaggtgaaggtcctggaaacctggctgaagttgatgaatcaatggaagaagatgatgttggcaagaacaaggggaacagtgaagctggcatgcaaaatgaaaaattatatgctgc

SEQ ID NO: 31822 - DNA, 373 bp, Glycine max
  unsure (1)..(373): unsure at all n locations
  Clone ID: LIB3051-066-Q1-K1-A12
caattctgaattggttcaaaattaaaaagtataaggatcctaataacctggccaattgccttagggggtgcccttttggcaacaatttgtccaaggatattggaatgttggtggatgccaataggaaaatgcatctggctctcagtgatgatcccttcaaaattaagttcaaagaagcctgagatcaaagctctttcaaatgatggcaaaattaaatgacaatgcatgaatacgtgtgtttataatgatcgatccttgaaattatatttctttgtgaagaattagtaaatgaataaaaaaattaagagtgtatgtttttgtcctgctgttacaactntaatttcactattaaataataaatacaatttttaat

SEQ ID NO: 31823 - DNA, 328 bp, Glycine max
  unsure (1)..(328): unsure at all n locations
  Clone ID: LIB3051-066-Q1-K1-A2
ggcttctcagcaaccctatgcggtgccctggagcgcttcatttttcggagaggaacgacaccgttataagctacggtcttcagaccaattccaccagtcttcagcggcgaaggaagtacgaggatcccacggcttcgtttcagctccctcttcagcttgctgccgagagggaaattgccagataccttattggagatgcggatttcagttggaatgtgtttctgagggaattcgcgcacncttccatgaatcctttctctgctgtggtttcaatgggtcctgcatttttcctggcaatcgcctggttaaatttggtccttaaaataac

SEQ ID NO: 31824 - DNA, 386 bp, Glycine max
  Clone ID: LIB3051-066-Q1-K1-B12
cccacgcgtccgcccacgcgtccggtcaactctagataaggtgctcggaaccaaccttcaaaagtctactactccgggggtctaccagaaccaacttaaaccccatcttttttgggtttttcttgccagaatggtaactactggggtaggaacaacaccttgatgcctttgggttgggagatttgttgctgatgcctacactggtggatttaacatggtcatattttctttcctcgtatacttaatgggtaatccaaatttttttaatcaatgtgcaacatgtttttattataacttagtaatgtgagcttctacaacttatataatctgtctttttgatcaatttgaccactctttaatccctgaaaataattggaatttctttt

SEQ ID NO: 31825 - DNA, 60 bp, Glycine max
  Clone ID: LIB3051-066-Q1-K1-B2
aaaaaaaaaaaaaaaaaaaaaaaaaaaaaaatataaaaaaaaacaagcttacatacacat

SEQ ID NO: 31826 - DNA, 383 bp, Glycine max
  Clone ID: LIB3051-066-Q1-K1-B8
attgcagtttattctatcatatccttgttcaaataattttcttttcaattacaataccccaggcccagaaacttatgttcatgaccatcctcaaggtcccaataacatttacttgaagacaattttgagttgaccttacagcctaattccaactacaaacacccttgatccttcaaaggctctcatagttccaatactggcaaccattatactcttgggcatttaaactatcttcaatctttttttcccctttcttttgaatggaatttccaaggtttaaagaaatttaatgccgttttatgtgcttaaaagactctggattatataattcatctcacacatactcttttttactatcctttatattttagagattatatttg

SEQ ID NO: 31827 - DNA, 372 bp, Glycine max
  Clone ID: LIB3051-066-Q1-K1-C1
ccttattttgcggatcccatattgactcagagacccacaaagctttcctggtgctacccttggaatggttggtagtatttggataaaaaatagtataagtgaaagaaaaaagtctgtagattagatcagaattgaatccaagtggtgcagaattcagagcagcatttggtgtccaaaagaagaggagtaataggagagaggtgataaaggtgtcaagaatggggatacctggtgttgatggagaattgaagaagattttgaacgctaacatggacgaaagtggtgctagaaagcgtgcaacgtaaggctttaaaggtattcaacttggaaatgatcatatattggttaaaaacccatgtgattgaattaaaa

SEQ ID NO: 31828 - DNA, 252 bp, Glycine max
  Clone ID: LIB3051-066-Q1-K1-C10
cggacgcgtgggctccacaacactaaaacatgagaaggcaaagcaatcagaggagtctttcagagctgtcatgtacttaagctgctggggccccaactagaaattaaaagagaaagaatattttcttattagacttatgatatctagttggggccccagctgcttaagtctaataagaaaacatactttctcttctaattgctagaaattatcaagcttagtcccaaacgaagatgacggttgagatttctg

SEQ ID NO: 31829 - DNA, 404 bp, Glycine max
  Clone ID: LIB3051-066-Q1-K1-C3
ggttgggtcacgtggacgtagcagagaggtctctgattaaactttcacgctcacacctctcgtacagaacgcaatccaaattttccttgcttcttttcttccatggatttggattggtcgtgttcttccaccaccaccaccaccaccggcaacccctactgtctcctcttccaagcgctatcactcattccaatctcgcactacctcctcttctcctccttcgttttcctctccttcctctaccgtttcctggagctccatttccttcaagacctctttttcctcttcttcggcttcttcgtcaacttaacctaccattccggtttccaattctaccacgccctgggtttcaaatgccagattcttcaccggacctaccttggcacgccctggcttttcaggcc

SEQ ID NO: 31830 - DNA, 361 bp, Glycine max
  Clone ID: LIB3051-066-Q1-K1-C4
gctacgtctacttcatacttctaaatacatctctccttactctctcgatgcaaaaagcttaggacagagagactttccgaatcgagcatgaccttcatctgaagctattgctgctgccttcttcacctctgctatcccttccattgtagcatcatgcttagtaaccaagtcatcgtatctatcttgtatatcagcatagcgctctaccattctatcatgttccataacaactctctttagggcatcatccatctacaacctttttgtacgatagccgtaagacttaaaaacaggcttaaacttaataataaacatagatccactcactttcatttctgtacatctctggctttcattctct

SEQ ID NO: 31831 - DNA, 119 bp, Glycine max
  Clone ID: LIB3051-066-Q1-K1-C6
cctctctcgatgcagaaagctcagcggagggagatttggcgaagcgagcatgacctttttctgaggcttttgctgctgccttcttcacctctgctatcccttccattgtagcatcatgc

SEQ ID NO: 31832 - DNA, 174 bp, Glycine max
  Clone ID: LIB3051-066-Q1-K1-C7
atacacttgtactgttctattagttcatactaagttctgaaaatgagttccaaggttttgcgggttctacttatgttcttggccactatacttctgatctcctctgaagttgcacccgatgatgcatacgagaattttgacaaaatagatgggaaagcctagtgcaaattgggt

SEQ ID NO: 31833 - DNA, 441 bp, Glycine max
  Clone ID: LIB3051-066-Q1-K1-D10
atgaattctcaatagaggttgcagctagatttttggtgcatccaaacttgacgtccgcaacagagatggctttacgcctaagctctaagactaaaggagtaagcacactggatatctggccttggaagtatctggttccatggatgagggaagacctatttgctaggagagaagctaggtacagtaggggactgaatatcattgaaagcaatgattcttatgacatggaagattttgcaatgccattacaagaatacatcaatgatcctgtggctgtggatgttgtacataatggagccacattccaggttgcaggtttgacaaacaattcttatatagcagaagcacatgaagtgcgccattgggtacagaaatataagactcttggtaaatatgtgctacaaggtgcaaagaagaaactggatgaaatggtatatggtg

SEQ ID NO: 31834 - DNA, 281 bp, Glycine max
  Clone ID: LIB3051-066-Q1-K1-D2
agaattctcagatttgcggggcgagatgatgcagcagccaggacccggcatggcacctcccgccatgggccagcagccgcagcaacagtaccagcagcagcctccgccgcagcagcaacaaccctacgtcatgatgccgccgcagcatcaggcgccgcagcctatgtgggccccatccgcccagccttcgctgccgcagcagcctgctagcgccgacgaggtccgaaccctctggatcggggatctgcagtactggatggacgagaactatctctacacct

SEQ ID NO: 31835 - DNA, 179 bp, Glycine max
  Clone ID: LIB3051-066-Q1-K1-D5
gtgtgcttgcattgcactaacaggttacgacttagtagctacctatgtaccgttaataaggggggataccatgatcattgctaggatgaatcatgtctagatcatccagaatatagcaatgatgatcacacttgttcttctgaactaaaatcatcgtcatctatctttgcagcacgcac

SEQ ID NO: 31836 - DNA, 235 bp, Glycine max
  Clone ID: LIB3051-066-Q1-K1-D6
aaaccctaaaaacgaaaccaactatggcagcatagcaggcagaaagcgataaacgaagcagagtagaagaagcaaaacagaggaacacagaagcaggaacgaggaggagcactgtgtagaagaaatggggaagaagcagaacgagatccagaaaacggggctaggtcgagccctggtgaagcagcacaaccagatgatccaacagagcaaggacaagtctcgcttctacaggaag

SEQ ID NO: 31837 - DNA, 262 bp, Glycine max
  Clone ID: LIB3051-066-Q1-K1-D7
tcgttagatcctcagtttccaatcgaccttcaatttcaaaaattatctgccctgttgagatcggatttgttcagcttgatgaatgcttcagactcagagaaagaagacacagaaattgaagtaatagcaattacacccaatgaagaaaactcgaaattgatgaagaaagagaagaaaaagaagaagaaagtttcgttgaaagatgcagagaagaagggcggcgtgtgttatatgagtcgaatcccccctcatatggaccacg

SEQ ID NO: 31838 - DNA, 304 bp, Glycine max
  Clone ID: LIB3051-066-Q1-K1-E1
ctggattatagttgatggttgtcataaattcatgttgggggttgtgaggcctcatctgttagtcgggttcttttgaaatttgacccccccctcccccctttggatcgttgtttcatgctgtactagttagtggttaccatttggccactcttagaggtactttttgttaaactttgtctgattttgttatcagttagtttggaagagaccatagaaaagaatctgcttgtggggtggtttgatatatcacttgttaaggaggggtggatatgggtggcaaaaaaaagtttgggttggttgaaac

SEQ ID NO: 31839 - DNA, 446 bp, Glycine max
  Clone ID: LIB3051-066-Q1-K1-E2
gattgatccgatccggttccggttccgattccgattccgatcccgatggcttctacagagggtctagtgcccataactagggcctttctggcctcttattacgacaaacacccttttactcctctttctgctcatgtctccacgctttcttctcagattcgttcaatggctaatgattttctcactcagcatcctcctatccaaggagagagcatcttaataaatgaagctgaccagcaacctccgcacaaaatggatgagaacatgtggaaaaaatcgagagtacattgaagaaacaatttttttacttcaaaagtcttattggccaaaagcccttaaacaacaatccacaacttacaatggtgaatttgccattacgcttgggaaactgaaagattaacttcatattacattgaaggctttggaatctttccaaactaaaaatg

SEQ ID NO: 31840 - DNA, 443 bp, Glycine max
  Clone ID: LIB3051-066-Q1-K1-E3
ctggattatagttgatggttgtcataaattcatgttgggggttgtgaggcctcatctgttaggcgggttcttttgaaatttgacccccccctcccccctttggatcgttgtttcatgctgtactagttagtggttaccatttggccactcttagaggtactttttgttaaactttgtctgattttgttatcagttagtttggaagagaccatagaaaagaatctgcttgtggggtggtttgatatatcacttgttaaggaggggtggatatgggtgacaaaaaaaaagttgaattggatagaaaccaaggttccattaagtattctaagggaatgcactccgattggaaaattgggggtgccaatattgcgaggtcttctggaactattggtggcctggggaattctattaatggcaaccgaggggatttgaatgggtcttct

SEQ ID NO: 31841 - DNA, 401 bp, Glycine max
  unsure (1)..(401): unsure at all n locations
  Clone ID: LIB3051-066-Q1-K1-E4
cagaaattaaccgtttttcctttctgggttttgtataattttgttgattttccattccttcgatggttttgctgctgctaagtagcagtggtatgtatgacttatgagctntgagcctctntatattttgaaaagaagattggaattttttttttcttcttttgggaaaggcttctagtggttggatttttgtccatcaagttattgatcgaggagggggttatcacttatcaacctttggtagtgcgtgatcacgggatcttgtagatgatggagaaggttttttgtgctttgtgattctgagatgtgaattaatggttggtgaagtaaagaatcaaggcggagtttgcatgataaatttgacttttggatcgaggtgggtccatttttgtacacaattt

SEQ ID NO: 31842 - DNA, 204 bp, Glycine max
  Clone ID: LIB3051-066-Q1-K1-E8
cttaaatgagataaatacgactttctattgtgtgcccgtgggcacagtgtgaaagcgttgtgtatacctattagatgcggtaaattacttacaaatcgtacattgaatgattggtgtattgtctatacataagtagttaagtactttgtattttcaacttcttatcatgtgctgacccccctgtaaaaaattgagtgttgagcc

SEQ ID NO: 31843 - DNA, 396 bp, Glycine max
  Clone ID: LIB3051-066-Q1-K1-F10
gtgaattggatgggttttcctcaactagctagttaagtcttctttttggcctatggggcaaggagatgctgctctctctggcttgtacttctgccttggcctgcagtaatggctttttcttggttgagtcttcctcaaagtctgctgctttgcacagtttgactacttctactactactgcatgtaaagagaatcaagaatgtgaacacaggggatttgcactgctatcgcgagctacacttctgttgcataatgcgtttgatgtatgagatatgtgcttgtacacttaacctatggggaccatgtgcgtgctgactgtgtgctagatatgttccctgtgggcaatttgcgagctacaataagctgttagcgacccatgaacttctgaaaatatta

SEQ ID NO: 31844 - DNA, 114 bp, Glycine max
  Clone ID: LIB3051-066-Q1-K1-F4
aaaaaaaaaaaaaaaaaaaaaaaaaaaaaaattaaaataaaaaaaaaaaaaaacaaccaatatgtagggatccaaaataacgtacgcatacatacaacataatcaaaaattcta

SEQ ID NO: 31845 - DNA, 352 bp, Glycine max
  Clone ID: LIB3051-066-Q1-K1-F7
agggtgcccattccccccggcaaggtcacgtcatcataggtaagtatgcatatcgctcgactgatttctgatttcatctattgtttgcaaggatcgcgcctgcaagacacccaatggacccgaagaagtccaacaaggtcttggagttgtcaagctctaattacaattctctgtcaagtctaccgaatgtctggcaacttcaacaaagggcttaaggcccttaactaatcaacctttaataaaaaagtcctgcttcccaagccagccccaggttgaaccaccccagaaccttgggaatggccaacagcggccaacaaaaaaacggccttaacttttaaagttaacttaagtt

SEQ ID NO: 31846 - DNA, 310 bp, Glycine max
  Clone ID: LIB3051-066-Q1-K1-F9
actagctagtgttctataagttcacggtcagttctgaaaaatgggttccaaggttttgcttgtggtagttatgttcatagcggctatacttctgatctctgctgaggttgcacccaatgaatacgaaaattttaacaaaaaagatgggaagcatgctccaaatgggttatatgatagcaaatggggttacggtggttggggtggtccttggtatggcggctggggtggcccttattatggtggcggctggggtggcccttattatggcggtggttggggcggtccctggcgtggtggtggcagtggtggc

SEQ ID NO: 31847 - DNA, 332 bp, Glycine max
  Clone ID: LIB3051-066-Q1-K1-G11
ggagagtgaagagttgttgtgagaaggatgaagaatgaaattgaaaagtgaagtttagagatggaagaagaaaaagcagcggcgtactacgacgagctggcccgtaagggcgagggagctgcgaggttcaagcaaggtctaggcttttcctcttcagcaccaaacgacgacgttccaaaacccttcttcttcttcctctccaaattcgtcaaagccttctccgagtcggagaagcaagcgcagctccaatccatccacgacaagcttaagaaaaatccctcttccgagtctagggtttcgagcagcgacagaagcaggagcagagaaaaacg

SEQ ID NO: 31848 - DNA, 405 bp, Glycine max
  Clone ID: LIB3051-066-Q1-K1-G12
gagcaatttgcaaaggaaaatggacttctgttcttggaggcttctgctaggacagctaaaatgtaaaaagctttatagaactgcttgcagaatcttcaaaatattcagaaagtgtgttgatgtgtccatgagtcatttgataaaaggtgctatggacgttcccaaggtcaaccaagtgccagagatgaactgttcagcagagtggtgtgcactgattgagaggaaaacactctgaaatctaatccttttgtgcatcgattctgaatccctgtttaaaccgagtgtatactttttaaacttaaaacatggacttttggataaccttcaattcatggattgaacttatcttaaaagccttttttggacaaatattacttcataagttaatgggtggcttgtggggtc

SEQ ID NO: 31849 - DNA, 210 bp, Glycine max
  Clone ID: LIB3051-066-Q1-K1-G5
taagttctgaaaaatgagttccaaagtttttcttattctacttatgttcatggccactatacgtttgatctcctctgaggttgcacccgatgatgcataccagaattttgacaaaacagatgggaagcgtagtgcaaatggggtagatgaaagcaaatattggcgtggtggctatggcgactatggtggttggcgtggtggtggttggcg

SEQ ID NO: 31850 - DNA, 155 bp, Glycine max
  Clone ID: LIB3051-066-Q1-K1-G7
cgaaaccctaactcgcgatggcgatcttgctgggcgaaattctttaatagcttgagctgtgggtgaagcttatcaagaacccgcagactcatgcctacgtgaaccctaatctggaccccgttttgctggtgccccatagtatgaagctccatgct

SEQ ID NO: 31851 - DNA, 460 bp, Glycine max
  Clone ID: LIB3051-066-Q1-K1-G8
acgcgtccggagtggacccagagggtgatgttagcagggcgagttgagttcttcgaacacttaagtcggagggactgctgaagacgcaacccaaccaaccatggctgcttctgatcccaacaagttgatggccaaagctgataaacaaacaagactcagtctcacgaggtggaatgcggattggaaaagtgctactgttctatatgagcaggcagctaatgggtttagagttgccaaggactatgagaatgccaaatagcatatgagaaagcttcaaaggacaagagatgctttcttcaccttgggatgcagctaagcacatggaatctgctgctgctctagcgaaggatctaagacactggcaagaagttgtggacttctatcgaagggcatctgaattgtatatggagtgtgggagaccccaacctgcatcagacgctcttgcaaagggagcccgtgc

SEQ ID NO: 31852 - DNA, 379 bp, Glycine max
  Clone ID: LIB3051-066-Q1-K1-H1
gctgggtctgataccaaaaatacactaagttatgcagttgatgtgtcaaagctacatgttgaagaaaagaagaactcatattcaacaaaagatggccatgatgctgaaaaaatagggtttggagaggcaacacaggaaagtgtcgatcaaccgaaaaggactgcaaagattcatgacttctgtttaggcattccctttggtggatttgttttaacaggagggattattggattccttttttcacggagtcctgcaacactaagcagtggtgtgctttttgggggggcttaactattcctaagaacttttaccttaaaggcttgaaggcaaggaacctaaggttaccaattatttttaggccaaccacttttgccagggg

SEQ ID NO: 31853 - DNA, 317 bp, Glycine max
  Clone ID: LIB3051-066-Q1-K1-H10
aaagcatgctgggtggtagtgctatgccagatcctgctttattgacccagctaatgcaaaatgcagctatctcacaaatgatgcaaagtatgctttccaacccacaaacattgaatcagattcttggtgctaatactgagcagcgtggcatgcctgatttaaattctcttagagaagtaatgcaaaatccagaattccttcgtttgttttcttcacctgagacattgcagcaactcttgtctttccagcaaactcttatgtctcagcttggccagcaacaatcaacatgggaatctggtcaaactggcggaggcact

SEQ ID NO: 31854 - DNA, 280 bp, Glycine max
  Clone ID: LIB3051-066-Q1-K1-H12
acgcttttaacgaccatgatcctttgcttaacgcttactctcggatctaagtcgcaattccacctgcaaggttaacaaccttttcaatcttcctaatggatccttttacttttggtccagctgtagtcatcgataatggctccggttatcctaaaatggggttggctggtaatgttgacccatgtttaaaggttccgacagtggttgcaattaacgagtcctttctaaatcaatcgaggaattcctctaaaggcaatggggttgcccagcacaatgctgg

SEQ ID NO: 31855 - DNA, 388 bp, Glycine max
  Clone ID: LIB3051-066-Q1-K1-H3
cggacgcgtgggcggacgcgtgggcacggacacccgaaaagcctttacgctgcgatcgaaatcgcagctggggactgtttttattatagagattgtgattggaaattgcaattgatgtgtccacaattgtagtcgaaattgcggccacaactgcgatcgcaatgcgatcgaaatcccagttgtggattgttttttgaaaccaaggtaatgagtaggttttatttttggttgatttaaaccgtatattggtggttgttatcttctaaactaaggatttggtgagtgagggtattgtgtggctaatgtctaacaactttgactcttaactttactaaaaagtgggatggcctacagaatctttttggaaaatggttggggattttgttgc

SEQ ID NO: 31856 - DNA, 330 bp, Glycine max
  Clone ID: LIB3051-066-Q1-K1-H7
cccacgcgtccgcttcctctacttctttgttccacaatttcacggttttctccaaatttcagggtcaaattcaataggctaggctacggcgacactaagttgcaggcctcaaaggtcacgtcgccgaagcttatcttcaaagacccgcgctgagctttctcatcttctttggtctactaccatttcatggcttatttcaaatttcaatttccaaaattggagccttcggcttaattgcttccatacccattagaatgccaggtgcctggggtggactatctttaggtccaagattccttaggttccaggggtttaaatgggacccaacca

SEQ ID NO: 31857 - DNA, 394 bp, Glycine max
  Clone ID: LIB3051-067-Q1-K1-A10
cccacgcgttcgctgaaaatgagttccaaggttttgcttgttctacttatgttcttggccactagacttctgatctcctctgaggttgcacccgatgatgcatacgagaattttgacaaaatagatgggaagcctagtgcagatggggtagatgaaagcaagtattggcgtggcggctatggcggcggtcgtggtggcaggcgtggtggctatggtcctaatgaacataacgaggctggggttgatgctaaccctcacaactaagaaggcaactttctaaagcttatatatgggtttaagttatcgcaataaataaaacttcatgagaaagttagttgtaatagaagtggaaaactttgtaaaggaataatacctttcatgaatttgcttatct

SEQ ID NO: 31858 - DNA, 306 bp, Glycine max
  Clone ID: LIB3051-067-Q1-K1-A5
atgaaatattatggtggttgggggtctggttgggatagataccgccgtggttggtattgccggaatggttgttgtcaatggagctactactatcaaacctgttggaggtgctgctattatcctggtgaacatgttgatgtgcgtactgatgctcaacctcgcaactaaacatgaacattgtgcttaaagtataggctattgttatctatataaataaaacttcatgggacgtgtacttcatgagacgtgtacttatctagttatgcatgaaataaaagtgaaaatctttcactgtgcattattact

SEQ ID NO: 31859 - DNA, 411 bp, Glycine max
  unsure (1)..(411): unsure at all n locations
  Clone ID: LIB3051-067-Q1-K1-A8
cccacgcgtccgcccaaacatcccttcagctccatgatcatggatagatcatctcaaagcagctccgattcaccgactcgagagcccaaggtgttatccatcgaatgtcttaaaggaagctccaaaggcgacgagtggaccggcgacatgctccaaaccggcgatatcgtggaggagctccgactcggatcgacggcgaactcacagatccggtaccagtggccgttcaagggcgggaagagcggcgtgcagaagattctgcaggatgcgttcaaaaaagaaggagccgtcgatcgcggttcgggtgcggcgaggatcggangagctggcggagctgcaggcttgcatcgtccccaacgaattcacggccaagaagaacttggtgcttcgatccatttttgacccgaatta

SEQ ID NO: 31860 - DNA, 428 bp, Glycine max
  Clone ID: LIB3051-067-Q1-K1-B11
cccacgcgtccggaggaattgtgttcagatcttcttgacaggctcacgacacccgttgaaacgtatggacggatgcaaaggtcgcgtttaaggatcttgacgaagtcatccttgttggtggatcaacacgtatcccagctgttcaggatcttgtaaagaagttgactggcaaggacccaaatgtcactgtcaatccagatgaagtggttgcccttggagctgctgttcatgctggtgtcttggctggagatgtcaacgacattgtgctgttggatgtcactccattatctttgggtctggaaactctaggtggtgtgatgacaaaaattatccccagaaacactacccttcccacctcatagtctgaggttttctcaactgctgctgatggacagaccagtgtagagatcaacgtccttcatggtgag

SEQ ID NO: 31861 - DNA, 450 bp, Glycine max
  Clone ID: LIB3051-067-Q1-K1-B12
ggaaacgccagagctccatcaccggaacaagacccaggcaggtgtcgcagtacgcggagaaaggactgtatataaatatatgtgtccccgatgctctctatttcagccactcgtatattcttactccgctcaacaactataagattatcttcttcttcttcttctcttcaattcttctccaatcccaaccgcaccctcttccgtccctttcttcacacttccttcaaaccacttccttcgtctttctctttccgaacagatcacactatggccacctcaaacgccaaatcagtccatgatttcaccgttaaagtatcttttttcgttatgttttgcatatgcatgtaaattttagattttaggttaaccccccctttttttatccttttgcaggatgccaaaggaaatgatattaaaccttgtgactacaaaggaaaagtccttatcatt

SEQ ID NO: 31862 - DNA, 367 bp, Glycine max
  unsure (1)..(367): unsure at all n locations
  Clone ID: LIB3051-067-Q1-K1-B2
cccacgcgtccgggaagcagtaccggctcgtacccaagaacaagaacatggattatggcttcgtgctgttgctcctcttcttccatatcttccttcctcactcctctggtaaacccagtggagtgtgtgtttctcaaggaggtcgttttcctcccttcaaatcagagggtagcactcccaaaaagggtcctaaagatttgactctttgccggatctttcgcaaaaagacttgctgcgatgtaacccatacacatcctgcacttctgtctgtaaggaagcttgcttctactggggaagctagccaagagtgcttgcacttatgggaactgttggaatgttccatatgcgatccacgtgtnggtactca

SEQ ID NO: 31863 - DNA, 425 bp, Glycine max
  Clone ID: LIB3051-067-Q1-K1-B3
cccacgcgtccgaatttcgggttttgggagagtctctattgacgttcgctgatcagggttaaagtatgggtctttgatccaagtcgtcaatggattttcatattgatgttgttgatcttcctcgatcaacatagttaatgtttctgttcatcacttgctttaccattgttattctgtgaatggaaaatttgtgagccaaaaagttttgggctttgcatgaagaattaagtctatggctaggatttaatcattgagttaatgactgaaatcatgagccatggacaattacattgataggatgcagtacctgatctgcgatgtcattacaatgccatgtttgcctattagaatatcatggatacaaagtttgcacgaatgactgaacgcattcgtagaacatcatgctcttatttgaagagctggaa

SEQ ID NO: 31864 - DNA, 339 bp, Glycine max
  Clone ID: LIB3051-067-Q1-K1-B8
cttgttttgtactataatgcaatgtgccaatgcctcaatcctatagtttaatgaagtagttagttgtttgtccctagtacatctgtcagcaactaagattaggcctagacataatctggcttcccatatttagttggatgaacttttctgttagatttgagagttacacacgcaatctagataatgttatttataattctttctgaattaaaccaaaaaaggtttcaacagataccagatagaaagtgtaaaacacatgataagggcccctaacagagaggtacttctctcaatacacaatacacaggcttctcaatcacacccaaattacaatactga

SEQ ID NO: 31865 - DNA, 338 bp, Glycine max
  Clone ID: LIB3051-067-Q1-K1-C2
cttagagcgtactataatgcaatgtgccaatgtctcaatcctatactcctatgaaggggggggatgattgtacctagtgatatgagtcacaactaagattaagcctagacataatctggctacccatatttaaggaggatgaactttcctgtaggatatcaaagttacgcacgcaatctatataatgttcattctcaatcatactgaattgaaccatcaaacgattcagcagatactacatataacgggtgactctcacgataagcgtccctagcagagagtaacgtctctcaatcacattacacaagctactcaatcacacccattgtacaagactt

SEQ ID NO: 31866 - DNA, 438 bp, Glycine max
  Clone ID: LIB3051-067-Q1-K1-C3
gtgcatgcttaggggattccggcttctcagatgcccttactggattaggccctctataaccgtgtgagatcacagtggtgtgttgttctcaaccaaaaagcatctgagaaccagggagcttttgccagaagatttttggtttagtgcgccaaaaaagggagtgatggtctttgctttgccgggagagcctggccttaccgagttggctggggacttcaaaatccattttcatgatcgccaaggagatttttactgttggttgaacacaactatgacagaaaataggaaagtattgaacaccagtgatctggatggctttgacaagagaaaattgccttctccgggatttatggttgaggttgtgctggtggattataatggcaatgatgtaacttctaaaactgaaactactacaaagaaatcagatgagagttcaag

SEQ ID NO: 31867 - DNA, 309 bp, Glycine max
  Clone ID: LIB3051-067-Q1-K1-C7
ggagagaacatggatcagaattttctgcagtttgatccagctcccagacaaattgagcccggcgctacacgaaagacgccagattattttttgtaacttcatatatctctttgtttgtagctactgctttatgctgttactgtagatgtgtctttaaggagagaagagtttcactgtttaagtggacggttttcatcaacataattctttcttttggagtttgtctgctgttgccgccgctgctgcggtcttatttggacaagaaacaaatagaaattgacacaactggtgttgtatatttttgataaa

SEQ ID NO: 31868 - DNA, 433 bp, Glycine max
  Clone ID: LIB3051-067-Q1-K1-C9
cccactcgtccgaacactcgtacgaccactcgtacgaccactcgtacgctttttcttttcaaagggaggaatcataaactgagcaggctggctggctagcctttggtcaaccaatcaatgaacaaagacaactttcacagaactgcctctattacttccatcttcttctttgatatacttgagagagagagaaagaagcataagaaaattaacatatgtaaaccttcagaaatctcaagcttatcgaacgtttactgtatcctagacatgcttctctgcgttcttacctgttgatcagagactgtgcacatgaatcatagctgatcgttcatgcaatgaagtgcttctactatttcatagacacatctaggagcacttttcaaaggtcaacacctgaactgacagatccagataaactcgagttatcacggcc

SEQ ID NO: 31869 - DNA, 407 bp, Glycine max
  Clone ID: LIB3051-067-Q1-K1-D12
cagcggcagctagattgctgggaggaagcaacggaagccgggcacttagttttgttggaggcagcggtggcagcaagagtaatggaggaaatactaggattggttcgattggtgcttcaagtacaagtagtgcaatggcgaatccgaattttgacgggaaaggaacttacttgatcttcaatgtcggagatgcaattttcattagtgatttgaattcacaagacaaggaccccataaagtctattcacttcagtaactcgaatcctgtgtgccacgcatttgatcaggatgctaaggatgggcatgatttgctcattggtttgaactctggtgatgtctactcagtgtcattgagacagcaattacaggatgttggtaaaaaacctgtcggggccctgcattacaac

SEQ ID NO: 31870 - DNA, 426 bp, Glycine max
  Clone ID: LIB3051-067-Q1-K1-D4
attcaaatatgagcagattgcaagatattggaagtcaccatcatgggttgctattccttttagcttgcatgcatatagattgcaccaaatacatcgagcagcaaaatttctaacagctatatcatttcaagttaagaaggggtatagcaaactgcctgtagccaggggttctttgtcaacaactacaaatgcctttcgtatccttattgtgatttggatttggtctttctcaagcttcctcatgagattcctaacttctgcttctgcttctacaactaagcagtgatgcctagatgatgtaaggtttgttcacaatatcatctcactgttcaaaacagaccccgggtcatctttgggccgaatatttctatatgtactttgtctgtggatgcatttttgtgtgtgtgataaaaactagacaatctg

SEQ ID NO: 31871 - DNA, 378 bp, Glycine max
  unsure (1)..(378): unsure at all n locations
  Clone ID: LIB3051-067-Q1-K1-D5
cccacgcgtccggttgctttgtgcttaatggaaggcccttgagcttttctttctttctctgcgctcttttcttttaggttgccactctcacacactctccctcttctctttctctgcaataatctctcttctcttcttcactctctcaactcctgccaaacccccatttccgcagttcttaaatttggagtctgatgtctccgccattgctggttaccgaagatgaagggcagtgccatgcctcgatggtagcatctgcatcttcaccatccctgaactgtttctccctaaatgaggccggatntaaagaatgcaattacctgngattgtcagatngctcttcngtggacagttctactgtccccgaattgtctgatg

SEQ ID NO: 31872 - DNA, 418 bp, Glycine max
  Clone ID: LIB3051-067-Q1-K1-D7
agtgttcatggggtagcaagcctactcctccagggactgcctcaactcctctcccaccacctgcttctgcgaatgtgtcgggattttctcttgctagtcttgcagcttatgaacgccaaatggctttgagtaaaatgggtggtgcacatgcccttatgcatcaacaaggtcaacatgccctaaaacaggtagccatgggaatgggtgctcctggggctggttatgatgcaagattccagaatgttgcgaccacccaacacctaatgtactatcagtaaaatgtgttggtgtgcaactctccgcgataaacaagggaggattaaagtatgtaagaacggttttacaataccgattgtttcttctgtgcttatgtatggttattacatttgtaatactacagttatttagccgttgcatg

SEQ ID NO: 31873 - DNA, 352 bp, Glycine max
  unsure (1)..(352): unsure at all n locations
  Clone ID: LIB3051-067-Q1-K1-D8
ctcgaatccaaactcagaacattcatttccctataaactcgacgtcgtttcattcccgtctcgaagaaaacatctagctgaagattccaatcggagctcagaaaaaagaaacctaatcgccgatcgcgtcgccgtcgcgccgaaagttcgttgttgttctgtgaaattgccggttttaatttttcgttttgtgataattctgagaattagtaacaattattgtggtttttttttctgttaggtaacgttgctgtggttctttntttttcttttttcttttttataatttcgttgccggtttgtaggtgaagatagtcgatttggttgctgctgtgtttttggttttctggtg

SEQ ID NO: 31874 - DNA, 290 bp, Glycine max
  Clone ID: LIB3051-067-Q1-K1-E11
attactactagttttacacatgagttttagtggctccttgcctttgatagggtttagcccatacgattgaatagggttagttcttgcgattgtattttatagctacctcaaatgaatgggttaaattaaaaaaaaaaaaaataagaattaaacactacaaagtaaaaaaaaaaaaacttttaactacaaaaaaaagatataaaagcaaatataccaaaaaatagaaaagttctaaaaaaataattattacattggaatgttaaaaaaaaaactcttggacgaactaattg

SEQ ID NO: 31875 - DNA, 352 bp, Glycine max
  Clone ID: LIB3051-067-Q1-K1-E8
cccacgcgtccgcttcgataaaatcctcaaaccctcttcatgatgtggaaccctctgcgcacggagtccaaccctgaaccggagatcaatcaccagtttcattcacaaattcaatcctgaacgtcttttctcgcaagaaaaatgagacaaagcacacatttcatacccttcccaattcaaatgaagaaaaacagcataaatcttcttcttcttcagctgctgcaaagacaactaaagactcaaggatgcatgagactaaatctggaatgcctcctccaaaagttttgcatgcgtatccaggtttgtcctccccaatggattatgcactcatagagacaagcccttttcttgg

SEQ ID NO: 31876 - DNA, 427 bp, Glycine max
  Clone ID: LIB3051-067-Q1-K1-E9
caacaatggcttcttcgtcttcagaatcggcggtgtcggagcgaagaggaataccaggggctcggttggtagaggatgtccaaacttacctcactcaatcgggtctcgatgttggttcagccctggcttttctccaagagagacttcagcagtacaaggtagtagaaatgaagcttcttgctcagcaaagggatcttcaggcaaagataccagatattgaaaagtgcttagacgttgttgctacattgaaagctaagaagggtactggtgaggaacttattgctgattttgaggtatcagaaggcatctattcacgagcacgcatagaagaaaccaattccgtgtgtttatggctgggagctaatgttatgctggaatattcattagaagaggctactggtcttctacagaagaacctggataatgc

SEQ ID NO: 31877 - DNA, 419 bp, Glycine max
  Clone ID: LIB3051-067-Q1-K1-F12
tgatgatgctggagaaatcgtgcaaattccattggatgataacgaaatacacgatatacagtggcaggatgctaacaatgtggaaaatgatgctgatgccgtgccaattacagatgctccccttatcggtgctacatttagtttgatatcatacgttgctaattttgatagtggtgctgacttggttgacccaagctcttcaaacaccgctcattgacgtggttgaccaaagctcctttttattggcaagattgaacatacaataacctcacttacattaggcagaataccaatataggttggcctaacatgggccatcattaatgattgcatgttaagtctttgaacaaggatatacagtactggggaaaagtctatagctctatgtgcgttcttacttcatgaagccataacaaaac

SEQ ID NO: 31878 - DNA, 341 bp, Glycine max
  Clone ID: LIB3051-067-Q1-K1-F2
gacacacaaaggaaaaaacagagaaaccatgtcttctccaagcacgcggcaagagatggactggatgggactgttaatccaccacttcttctgtcttccttttaccttctatttacattaaagttatactcttattatatctaattgggtgtctaaatttgactattgattctgattctgatattagctacacatctaattaataggatgatgagtaactacaatgtgcatataattaatgatataatgcacaagttttatgtacatatgaattgacccaatgcgagatcttattaaccacgattgttaaaagtgacggttgaactgccatatgcttatcc

SEQ ID NO: 31879 - DNA, 401 bp, Glycine max
  Clone ID: LIB3051-067-Q1-K1-F4
cccagagcgtcccataaatagctggagcgtatataatatatcatatggtatatgattatctttatatctcattgtggttgatcttcataatatacactgatctctcataaatacatcccaaatttcttctctgaatttttgtaggatggaactggtcttcagttcaagtctgtgatgacagggaagtatctttgcgctgagtccggaggaggaacaatcctagttgcaaattgcacagatgcttcgggttgggaaacatttagattgtggaggataaacgaggatactttcagattgagggtgtttaacaaacagtttgtcgagttcgatgggattaacgttgatgctgtttccaatatacgcacttattctgagacatttcatatagttaaggaaagtga

SEQ ID NO: 31880 - DNA, 426 bp, Glycine max
  unsure (1)..(426): unsure at all n locations
  Clone ID: LIB3051-067-Q1-K1-F5
cttcctcacagcactcatcgattcttttggtgccttatttgtctattcggttgaagttgaatgatagaacattccatggctgaagaaatgaaaatggtagaacctggaagaggtaagaggaagtttttcaaaacgcaaggccataaaaagtcaagtaagaaagcaaaagtgatgccaccacaacatggacaaaagaaagttaaaatagacaaaaaaatgaagaaacttttccgcaagcgagcacgggagtataattctgatgatgaagaagatgatgaggccactgtccctgctaccttagagcctaaaagtctggcatctatcaccaataaaagaaatgacaaggatggcatagaaagtgaggataggtctgaggatgaangagctgctggacccacaaaaaacatggattaagaatgctactga

SEQ ID NO: 31881 - DNA, 400 bp, Glycine max
  Clone ID: LIB3051-067-Q1-K1-F8
gcaatgcgccttattgtccgttgaaatttagttctggtacttctagttcattcagctgctgggcaggaagccaaccccaactaaatctgagtctcttccatagctcacagcaacaaagccacattgattgtgctaacaagtccttaaagtcaaaggattccactttaagatctggaggcattgattttcatccacttctgcagaaatctgatgatacacagtcaccaacaagttttgatgccattcagcctgagtcactggttaatagtggtgtgcaggctatagccaatagatcttctggcctcaatgacaaatccaatgaacttgacttggagattcacctaagttctgtatctggaagggagaaatctgtgaaaagtagacagctaaaggcacatga

SEQ ID NO: 31882 - DNA, 458 bp, Glycine max
  Clone ID: LIB3051-067-Q1-K1-F9
tgtttgtgtttcaccacaacagtttcctcgattggttgatctgctttctgggccatgttggtgtggatgaggaggatcatgttcagaggcatccacagtgagttgtagaatagaagcaaaaagagaagttcttggtggcgatttcttagatgggtcttcttctgtgggtgtgagtgggtgtgagttttgactgtgttggaaaaagaaggcttttttttttttctttttaatgttatgagaggcattattcttggtgggttttgtgaggggtggctttgatttgcctggattttgatatggggtggtgttttccttggtttggatcatccaacaagggaggcaatggttgtggggttaaggtcaaagggggtcccaacaaaagatcttcttttaaaggaactggttttggtggtccttaatcttaccttcccagcaagggtaacttagattaatcaaaa

SEQ ID NO: 31883 - DNA, 434 bp, Glycine max
  Clone ID: LIB3051-067-Q1-K1-G1
gccacgcgtgcggtcagggtcgcatttttaggtctgccaggactgtggagaggagatccttcggacggtgagattgaacagatgtttgaagtgggagagtgcgtgaggttgaacgacaatgcatataattggaaatcaattggagcaggtagtgttggtgtcgttcatggaatagggtatgaaggagatgaattggacagaagcatttgtgttggattttgtggggagcaagaaaagtgggtaggaccaagttgccatcttgaaagatttgacaaactctctgttggacataaggttagagtaaaacaatatgtaaagcaaccgagatttggatggtcagggcatacccatgctagtattgcgacgattcatgcaattgatgctgatggaaagctctcgatatgcacaccagcatgatccaaaacatggatggt

SEQ ID NO: 31884 - DNA, 452 bp, Glycine max
  Clone ID: LIB3051-067-Q1-K1-G10
attctcaaacatgaatatcagcacaagatactatgattcattatggtgggggagagcagagccgatcgatgtcactagttgcccacgagactcaagctcaaaggaggcttcaatctcaaatgtacttttcattaacattactgcaaattcggaaaatggcatcttcctgtctggttcaaagagaggattgttaagaaatttgagattcattgatatggacattacttacagaaggttcaccaattatgctggtgggttattggactataggccaggatgccaagagttggtaaaacacaggactgcagggattatgatggagcacattgaagggcttgaggttaaaaatgttgaaatgagatggtcaaacgatcaactagagcagtggaataatcctctagagttcaggccatctactgtgaataacatctctttccttaattttaattctg

SEQ ID NO: 31885 - DNA, 306 bp, Glycine max
  Clone ID: LIB3051-067-Q1-K1-G12
cccacgcgtccgcttcggagcaaggtgccgcctgctccggtgaatttcttccgtaggttgcctgtctgtcacagacagcatgctgtgaatggatactcttgtgtgttctagaatcttgaaaacttatctgctgctgccagtgtttgaattaatttttggtagtggttgtagaatcattggcgctatctcactttgtgttgtttattaagtgttgaccgttggtgcaactgtatacttagtttggtaaactccaatgtagttttcatgttaattaatcagcgtttgtgagcttgtgttctatacttg

SEQ ID NO: 31886 - DNA, 399 bp, Glycine max
  Clone ID: LIB3051-067-Q1-K1-G2
acggctatgcttctcatagatcatcctaactcaattttcgtagtcgtacctcattcggatgaaggggaagatgacaacgatgcgtaaaactccgtatgtgacttagatgaataggacgctgacgaacatctagaggatccgccaccataaaccctaaaggatcaacatgatcctctgaccctgtcggctgctatccactctctagtgaactgtgataatcaacagtacaaccaagaatatgatgacgttgatctcactctctaggaacatcccgtagtgcagcttatagaaccgttcacttatgagcatcttgactctctcgataaacatgcactggatatgtatcctgaattcgtatattgcatgcgccaacttgctgacatgtaccctgctcacagg

SEQ ID NO: 31887 - DNA, 430 bp, Glycine max
  Clone ID: LIB3051-067-Q1-K1-G6
cctcttcttaacatgtcttgcattaactaaatgttttaggtcataaatcatatgcttgaatgtatccatattatctgcacgatcaaactttcacttcattgacagtcataccaagtcttttagcatgcatcttaatatgcacaatgatcatcaaatgataacttgcgagtcaagagccaaatccatgtacaaaatgcatgttctcttcgttttatctgatttgatttcttttttgttcttctttatgcatagatgcacagaaacttgaattattcctgatacccattttgtggatgccaattaacctgccaatttgtcacaagtcttttctgcaacatctgtggttcaagtgcatgaatgaaagagctctgaagcatgacttaatccatagtatcttctatcattgaattgttgttaactttcaaaaagt

SEQ ID NO: 31888 - DNA, 387 bp, Glycine max
  unsure (1)..(387): unsure at all n locations
  Clone ID: LIB3051-067-Q1-K1-G7
ctcctctttctctctccaattcttctccttctctatcttccaagccaaagtttccatctttgggctttctctctggcaacaacaccttgagggtcaaatgcccaaaaccttcgcactcaacaactgttgttcatgttgctccagaagcgttggattcttcacctgatcccttagacccacctccagaaacccttgatgatgactctgacgccaccacctttgaggttggtgacctggggactcctagcacttcggcaattagcattggtggcgatgcagatacaatggcaccaaagcagaagattagaatcaagcttagatcttactgngtgcccttgatagaggattcctgcaagcagatattagatgcagcanggaataccaatg

SEQ ID NO: 31889 - DNA, 349 bp, Glycine max
  Clone ID: LIB3051-067-Q1-K1-G9
ctgcatctctcctacactttctttctcttatcttcccaaacccaccaaaaaagaatggattgtttaattccccagaaggaaaaaacaggaacttttttctccctcaatccacccaccctcttctctctctctatttctcaacacacacaagcactcctcttcataaagccgtgaccttaggtggaattggaattggagatctagatgtgcctaatcagaagcatgagatcgcagtcgcagcgtgtggtgcaggaacaagaagaagcagagtgtgtcggcgacagcatgcgacagagttgttgggccaacatgccccaagagcttcttcgagaggtcctcttcagaatcg

SEQ ID NO: 31890 - DNA, 244 bp, Glycine max
  Clone ID: LIB3051-067-Q1-K1-H4
cccacgcgtacgcccacacgtacgttcaaaatttactctacaaaaaatacataaatacatacagaacgtaaaaaaaaaaattctcagctaacaaaattaatattaaccatacattaaacaaaaataaaacataaatgaaacctaatacaagccccttttatcataaaatgcttactttcaatgctatcaatgtatcaaatagactaactatgttaatactattacactatctattacacttcaa

SEQ ID NO: 31891 - DNA, 235 bp, Glycine max
  Clone ID: LIB3051-067-Q1-K1-H6
caacaggatccgatcttacgctccattgttctctgctcgagatgcttccatgcatagagagcgtggtacgtaactactcagctgtcgcatattctgagccatcaataggactacatagacaccaaccaaacctaataatagcctctttgaatgtacaacgcttacttctaatgcactcagcaaatgaactcgataaactctgctactactatgcgactatataatacactgcaat

SEQ ID NO: 31892 - DNA, 371 bp, Glycine max
  unsure (1)..(371): unsure at all n locations
  Clone ID: LIB3051-067-Q1-K1-H8
caaattttcagtttcttcctcgcttttctgcaaaatcatctaaatccgtttctgatcctggggcatcagtttttcccttgaaagatgggaggtggcaaggacaaacacaatgaagaagagaaaggagttttctcacatctggctcatggagtagctcaagctgctcatggttaccctccaggggcataccctccacctcctggggcataccctccttaccaagggtacccacctgctcatggctaccctccacatggtggctatcctccggctggttatccccctgctggctatcctcctgctgcttgtggttacccccctgcttgttaccctacacatggntatccttgatcatctgcttcacatggatc

SEQ ID NO: 31893 - DNA, 446 bp, Glycine max
  unsure (1)..(446): unsure at all n locations
  Clone ID: LIB3051-068-Q1-K1-A1
cccacgcgtccgtgaagactctactggagaagcatctgcttataatagcaataagagtcatagaatgagcactaaacatggtgttgaggggatgcgatctgattctgcttctaaccatagtgatcactatgaagagaagcttacagttaagcagaaaaccttgatgctgcatggttatgataacatcaatccaaagaatatacaaaggagtgaacatgtaaaatctaaaccttctagttcaatccataattcccgtgttcctatggatactgaagaacggnggttatctgctaggatggcaaaggaagagatgtttaaggggaacaggaaagcaaaaaatacatactgcgatgtataaggagcaaggatgctttcaaatgaaatcatggntgcaaaacgagctaaagttgacatgcttcaacaatacaatgtgaaaaaatcacctg

SEQ ID NO: 31894 - DNA, 384 bp, Glycine max
  unsure (1)..(384): unsure at all n locations
  Clone ID: LIB3051-068-Q1-K1-A10
ctgacgttggcattctaccttttcttgattgttccatagaagatgatgacacattgggtgggaatgaaaacaacagcattgaggtgagacttgtttggtttactatggaaagagaagtgagaaataaaattaaaaccatattttatccctaacaataacactcaacacaaacacacataataaaaattccaactaagaaaattgattatcaccgatgaaaatcaatttcctagtatgatgcaaaaattgtttataaaactatacaattgattatataagattacaaaatcgattggaagactacaaaaattgattntttttcagttttttatgtaatagatgaaagagatagatataacattccaaactattttttttatcaca

SEQ ID NO: 31895 - DNA, 368 bp, Glycine max
  Clone ID: LIB3051-068-Q1-K1-A2
cttgtactgttctattagctcatactaagttctgaaaatgagttccaaggttttgcttgatctactgatgtccttggccactatacttctgatctcctctgaggctgcacccgatgatgcatacgataattttgacaaactacatgggaagcctagtgcatatggcgtagatgaaagcaagtcttggcgtcgcagctattgcggcggctatagcgttggatatggaagccttctaggaggctacataatgtccctgttactctagatactgaagaacgggggatatctgctaggactgacgaggtagagatgtctaacgtggacactatagcagaaactacatactgcgacgtagaggctacagggat

SEQ ID NO: 31896 - DNA, 389 bp, Glycine max
  Clone ID: LIB3051-068-Q1-K1-A5
cccacgcgtccggcctctctttaaggacgtcctatttgctgctcctgctcgtgacaacacgggttcagctgttgctgcaaatctctcactaacccgtaattctcagcaagaatctgcaccatcaggttattttccttgcagggagcatgatgtgttgggaaatttagaccatccctccgaccaggattttgctaggactggaccaatactaaacagatggaagaaaaaggaactgctgcttgatgatgttggtgctagtccttcgctgagatctgcatcaactcctggtagttctttaataggtggagcaaagggaaagaggagtgaacgagacagggacaaagactcttctgtagaaattctgtttcaaaaggtggtcgttcttctgc

SEQ ID NO: 31897 - DNA, 468 bp, Glycine max
  Clone ID: LIB3051-068-Q1-K1-A6
accacgcgtccggcctctctttaaggacgtcctattcgctgctcctgctcagtgacaacactggttcagctgttgctgcaaatctctcactaacccgtaattctcagcaagaatctgcaccatcaggctattttccttgcagggtgcatgatgtgttgggaaatttagaccatccctccgaccaggattttgctaggactggaccaatactaaacagagggaagaaaaaggaactgctgcttgatgatgttggtgctagtccttcgctgagatctgcatcaactcctggtagttctttaataggtggagcaaagggaaagaggagtgaacgagacagggacaaagactcttctggaagaaattctgtttcaaaaggtggtcgttcttctgcaaagggtgagcgttaaacaaatgcaaagtccaaaccaaaaacaggtcaactatctagttctggaaatggatctctaa

SEQ ID NO: 31898 - DNA, 462 bp, Glycine max
  Clone ID: LIB3051-068-Q1-K1-A8
cccacgcgtccgcttccattgtcttgaaagagatgagctctctttgatggccgtatttaggtatgagcttcctgcccaaggcctcttatacaaacggccttcgattgttaagggggatgacatggatttcagcaggtttgattctggcataatgtatgatttgatttatgctagtgctgtatttcttcacatgcctgataaactcgtgtggactggattggaaagattagcatctaaattgaaaccttatgatggacgaatctttgtatcacataatataaagttctgttcaaggttgggaggagaggaatgcacaaagaggcttgcaagtttggggcttgagtatcttgggaagcatactcatgatagcttgctattcaatcactatgagatatggtttgaatttagacggtcaaaggcataatatctggattggttccataaagaggcatcataaacatc

SEQ ID NO: 31899 - DNA, 234 bp, Glycine max
  unsure (1)..(234): unsure at all n locations
  Clone ID: LIB3051-068-Q1-K1-B11
aaaaaangacagacacggcgcnnaggggagnggaggaangaaggccnacacggcatgcagcgcggcannnaaagcgancgatccaagcagagcggggcaggggataaagggnagactgcaaaanggaggcanngaaagcatgcgangggganggaaccgcagacncagagnccgaagcggcccaggcaaagccaaccncggcgcccncagcaggagncacacccgngccaccac

SEQ ID NO: 31900 - DNA, 455 bp, Glycine max
  unsure (1)..(455): unsure at all n locations
  Clone ID: LIB3051-068-Q1-K1-B4
cccacgcgtccgcccacgcgtccgcccacgcgtccgcccacgcgtccgatttgcaaaggaagcattttttcatttgccaatcgaccttcttcaaccctctagatcgaaaggccaattttttttttcttttagtttttgttattatttcgcattctttttaccttttcaattcttcaaaaattctcgcgactgaattcacgtcagaacacggaaacataaagttcagttttttgcatcgtttttattaaaatttgttggcgaacaaaacagagaaaaaaaaaccaaaaaattgaaatttcttatccgttttggcgaattgaactgcgtgttcaattgggttgttgaattcgaggcagagggaaccgcgggtgtacaaggaatttcgattctgctgttgttagaaacggtgtagtttggtgtgagagaagctggngacttgnngtggtcgtaacgac

SEQ ID NO: 31901 - DNA, 81 bp, Glycine max
  Clone ID: LIB3051-068-Q1-K1-B5
tcgcaacactattcttttaacgattcttggttatgtagagcctacaacttttaagatcaactagatcactaaagggattat

SEQ ID NO: 31902 - DNA, 465 bp, Glycine max
  unsure (1)..(465): unsure at all n locations
  Clone ID: LIB3051-068-Q1-K1-B6
ctacatcaagagagaaattaacatagagagagatgggggcttgtttttcttgtgactcatgctccacgttgaagaatatccgtgtggttcatctcaatggttatgtagaggattttgatcaaccaatttcagtgaggcaagtaattggatacccccaaaaacactttgtttgcacttccactcagcttctttccccttgctcaacatcaatgaatggagacacccacctgcaacctggtcaagtgtatttcatgctaccatactcggtactacatgccgatgtttccccggtggacctggctggccttgcaaagagactcaccgcaatagcaaaatcaggtcctttgtcaagccaaacccaaacattntggaattcaccctgcaggagtcctggtagagttggggtggcagagcaatatggtgttggtatgatgaatattggaggaaaaagcccttctaaagtgc

SEQ ID NO: 31903 - DNA, 440 bp, Glycine max
  unsure (1)..(440): unsure at all n locations
  Clone ID: LIB3051-068-Q1-K1-B7
cccacgcgtccgcccacgcgtccggtttcacgtgcatcattttgttgatggagtcaaaatgtgacgcaagaaccatttaatttaagaaaaaaagcctcgaatcttattcaccgaatcacagttgtatgtagtctaaaaagttggcggaatataactctgttgtgtgcagtggtctctcacaagggaataatagtctcacatacattcacaaaaacctgagctttattgcgttgttgttgctgtagatggaaaagggtagaaccgtggtggtgtccgctctgcagtttgcttgcaccgatgatgtctcaacaaatgtcgtcaccgccgagaggctagttagagctgcacataaacagggtgcgaacatcattcttattcaggaactctntgaaggttattacttctgtcaggcacagagagaggagttcattcanagagct

SEQ ID NO: 31904 - DNA, 449 bp, Glycine max
  Clone ID: LIB3051-068-Q1-K1-B8
ctctctccatttcccatttcttctcaactctccgtttcccatttttgttccggtcttctggactctctgttcctctccattcttctgaactctctgtttatctcaaaacttcatgagtaacggttcataaacacaaaacctttttgtgtttaggtccttttttggtggtgtaatggttcaatatattttttggcatgttgtttgcagagaaagtggaagaacacactttagctgcgatttttatctcgatcactaaaggtgcgacctttttgtttatctttatgagctttgtgtttctcaccatttttctgatgcgcaggtatgtattttcatgtgggtatctcttgcgttcaattatttatggatgttcctaacctctctatggtccagagctctcgatttctctcgatgatggtagctgtgacctttgtggtgctctcgatcgctaa

SEQ ID NO: 31905 - DNA, 480 bp, Glycine max
  Clone ID: LIB3051-068-Q1-K1-C1
tcgcccacgcgtccggcgtttaactcggtgtcccctgattttccagttttctgtgttacattgagattcttaaaacaacagatttttaggacattgagaaaagtcatcttaatctgcatggaattttaccacgtaatacgggtaccaattcattttgtcaaatgtacctaatacgggcaccaatacatgctgtttgtatgcagcttagtatgtatctaatgagactaggtgtggtttaaggtatagttaggtatgtcttacgtactaataagatcatcctgccccattccccaaattaaagattttaagatttagtgatcttttggctttttttctcaattttctcatgtttggttctgtatttaatcaaaatccattcatccttgcttgtgagatgtgagatacaagtttgtcaatttcttttggtatagatgtttaaactataatctattaatatttcatattcttctatagaacacc

SEQ ID NO: 31906 - DNA, 452 bp, Glycine max
  Clone ID: LIB3051-068-Q1-K1-C4
tttaattattctgacgttatcatgttaactagttgtgctcagatttggttgaagtgcgaggagctcgaatttatttttggttttttgaatatttctaattattaaattaattcttgtctaggccgcagatttatatgtctgatttcatttccttgtgaagggatattatcttaaagctggaatatggtatatttatgttattatgtttaatcttggttggcccttgatatgaaataaatcgtattgggaggagaatacttgtgtgcacccccatcctctgacgtagatgtgtcactcctttcggaccttggtcagaaaaaaaaatacttaccatattttgctgtgtaatgagtaatttggcttttgcttgaccatgttctcattcttactgaattgggttgctttgaattcttgtgtgtgacttcattattatgattttactatacattcaa

SEQ ID NO: 31907 - DNA, 454 bp, Glycine max
  Clone ID: LIB3051-068-Q1-K1-C6
cccacgcgtccgcccacgcgtccgcccacgcgtccggaagggttgtggggtttgagttccgtttcgctcctttccatattccattttcatttccctcctctatttttttttggccagaacacgaaggaaggtggccggaagaagaatgaaggtgactggaacaaccttttgttacctcattcgaaggtggccagaatacgaacgaaggtgacggaacaacaaggagacaaacgattgacatggtgttgatggaccaaatgggtgcaaagattggcgcgactctctgacaaggattgtcccttgaatttcaacctaagttgcatttgggttggttatatttgatccagaacatcaaagttgtggacaatcagtatgaatacaaacatcgcaccacggcatactttagtagatgttgtgggtgttgatgctgaagttattgaacgtaaaacagtga

SEQ ID NO: 31908 - DNA, 311 bp, Glycine max
  Clone ID: LIB3051-068-Q1-K1-D6
aaatatatgtgctcctaggacctgctgtctggactcttagttagtgagttcttgaattatgctgcttcaaatatggcatcttggagcctctctggcgttcatataagcattattgctggctactcagagtgtcatatcattcacgtgtcgctgatttgatctgagaccgatagctaccttcaaatatgatgcgatatttagactgcttatcgggtcatacatgtgattgctaagatgatctttgtgaataaccctgtgttactgatctgttcgtctcacgattgtctgtaccatatctactggatctgtga

SEQ ID NO: 31909 - DNA, 453 bp, Glycine max
  Clone ID: LIB3051-068-Q1-K1-D7
atataatgtagctggaggcggtgaaagccatctgtatgggactgaagggcgtctttattagtctgaggaatggatttaacaatttcaacttttgttttgttcttgctctgctgttcttggggattttgcctattgcaaagaagaaatatgcaccagacctactgattgtgatatcacctatatatatttggctggggtttatgtctttgcagccacacaaagaagaaaggtttggctgaatttttacctggtcttctgttacaaatttaaatttagtcatatgatgttatttgagacaaacacttgcacaatgcacacaccatgtatattattatgttttatgctatgacattgaaatggatatcaatttcttatttcctacaattttgggttatacaagttcacataccttatatttattcgtaatctccaatataggcttcattttataag

SEQ ID NO: 31910 - DNA, 403 bp, Glycine max
  Clone ID: LIB3051-068-Q1-K1-E3
ctgcggtctgttgattgtgttggtttgttgagtgtggcgttaacgtaatttggttttgagtgaagatgaggttgtgatgtggttgagtgagtggtttttgtagtggaaggtttgttacttttgttgttgttgttgttgttgtgttggtttattttgttgaagagttcggaacatagtcggcggacgagaaaaattggaatttttggatgggtaataaacttgggaggaggagacaagtggtagatgagaaatatacgaggccgcaagggttgtataatcataaagatgtggatcacatgaagctgaggaagctaatactagaatcgaagttagcaccttgctatcccggagatgaagaaaccgcatacgatcgtgaagagtgcccgatttgctttctgtatta

SEQ ID NO: 31911 - DNA, 470 bp, Glycine max
  unsure (1)..(470): unsure at all n locations
  Clone ID: LIB3051-068-Q1-K1-E6
cggagcatttcaagagttcagagctgggtgttgcagttcctggagttttctgcttttatgacatatctccaatcaaggtcaactttaaagaggaacatactccatttttacatttcctgaccaatatttgtgcaattattggaggtgtatttactgttgcgggaataatagattcatcgatatattatggtcagagaacaatcaagaggaagatggagcttggaaaatttacatgatgtggtcaaattcagcatgagtgctctaatttcctaattgagtctgcttttgacgtatttggttggctggtgcattgagtatcgtttataatatggtagcatatgcacataatgccaagggtaagcagagcagtaggttcagttgatgcatgaagtgtatttnttggatcatgatttttcctttcatttatagcaatttcaattcagttgctactttggtggctttttaatata

SEQ ID NO: 31912 - DNA, 447 bp, Glycine max
  Clone ID: LIB3051-068-Q1-K1-F12
cccacgcgtccgcccacgcgtccgccgaaccattccactccctcgcaaaacggtgtcggggcgatcgcgttcgttcggttaaactcgcgcgttcagaatccttcggaacaacgctcttcgcccaattccctataattcactcctctctctctctcgctttctctggtaacctcctcgcgacggtggctcttccgcattccgccgccgccactgccatcgccgttgccgccgccggaaaacactaatcaatagatggatgattctgcgttcaaacgaggcggtcactttaatcgaacttactcgtgctcttctcagagagatgtctgttacagctgtggcacttgtggttatgagctgaacctatcctcctcaaaccggaacactgcatccattggatctaaatacgggaagtccataaagcgaggtattatatcattctttaacatt

SEQ ID NO: 31913 - DNA, 345 bp, Glycine max
  Clone ID: LIB3051-068-Q1-K1-F6
cacttgcgctgttctaataggccatactctgtactgcaaatgaataccaagggggtgctggacctacttatgtccttggccactatacggctgatcttctctgaggcctgacccaagcatgcatacgacaatcttgactgcatatatggaaagactagtgcgaatagcatcaatgactacatgtatgaatctactagctattgcggctgatactagcatggtgcaatgaggaaccaagttactgtatgccataaacgccgatgcttcctcccatacacgataaccttaggcagcatatctaactatatctgtaacgacgcaaccgagagataatgactcacagat

SEQ ID NO: 31914 - DNA, 464 bp, Glycine max
  Clone ID: LIB3051-068-Q1-K1-F7
gaaatgatatacgtatacccattaatcatgatgaaatcttcttcacatctgggtgcaatagtcctattgatctttctgcttactgccctaatcacttcggatggagtttcattctcttcattcctaaagcaattaaaacagaagctggagaagagttctaccctaaaagatttcctgaaacccaccactataggggatatttattatacgttgaatttcacagaaatcttctcttccgaagagagaagcgcaccaccggtgtctctcatcaaagattacttatcaaactacggctacattgaatcctctgggccattgagcaattcgatggaccaagaaacaataatatcagccattaagacctaccagcaatatttcagtttgcaacccaccggcaaactaaacaacgagacttttcagcaaatgtcgttcctacgatgtgggcgtcccgacattaacattga

SEQ ID NO: 31915 - DNA, 401 bp, Glycine max
  Clone ID: LIB3051-068-Q1-K1-G10
tctataagttcacggtcagttctgaaaaatgggttccaaggttttgcttgttgtagttgtgttcatagcggctatacttctgatctctgctgaggttgcacccaatgaatacgaaaattttaacaaaaaagatgggaagcatgctccaaatgggttatatgatagcaaatggggttacggtggttggggtggtccttggtatggcggctggggtggcccttattatggtggcggctggggtggcccttattatggcggtggttggggcggtccctggcgtggtggtggcggtggtggctggggaggttggcgtcgacctaatggcaaccctcacaactaagaagaaaacttgctaaagcttctttacgggtttaggttttcgcaataaataaaactttatg

SEQ ID NO: 31916 - DNA, 388 bp, Glycine max
  unsure (1)..(388): unsure at all n locations
  Clone ID: LIB3051-068-Q1-K1-G12
cccacgcgnccgcgaggcncnccagaacccacgncaccgccgcaccagagagaggagggggcnggaganccagaagggagggaanaangccgaacagcngcatacngaggagcaacaagaccccncnaccgagcgccaacaggcagcacaccggggagcacaacacgacaacaagcaaacaagggancaagagaanggcgaaganggccagggaagnaaaanncnggccaggaagnnaccagaaagcaagnacccngnagnncgagganccgaaagacccgcgaagcagnnggaaaacgagaaagcggagcagaaaaaaanggggaaaagacccaggccnaanaaaaacagnnngaaagangccaacggagangggaggaaaggaaac

SEQ ID NO: 31917 - DNA, 215 bp, Glycine max
  Clone ID: LIB3051-068-Q1-K1-G2
gacgaccgtaaccagacgcctacgcaaaaacagactgcattcagtggacagaattcagagtatggagctgcaagccaaggagcagaaattgactagtatatatgagtgcttctatgttagaactgacgcgacaactcattaaagcagctacccatacaggcatattgatactgtgcctgtccctgttattcgcccagactgcaatgcagatgatt

SEQ ID NO: 31918 - DNA, 459 bp, Glycine max
  Clone ID: LIB3051-068-Q1-K1-G3
acgcactccactgcactgttgttctctctcgaacttatcagatgagcagagaaaatacgcgagcaatggcaaaggaagaagtctgtgatgatggttcctccagtgttgagaatgtggatttagaatctcatgctcgaattagtctcgacaaggataatggcttgggaacctgtcgtgtgtgccaatgtaccgaatctgataaaaaggcagatgccgcactagaatttttgggcatcattccaggttcagaaatgtgtaaaaccaagggggaagtgggatctgatggtggtggcgatggaattcccgaaaatacgtctcttgacagaaataatgagaaaaatgctggtatggtggaatttgtaagccctaatggggaggttttcatttgtaaaagcgatttggaacttggtttgtgtcatcaagataaattagttgaacttggatgttcttgtaaaaacg

SEQ ID NO: 31919 - DNA, 390 bp, Glycine max
  Clone ID: LIB3051-068-Q1-K1-G7
ctccacgcgtccgtccatgcgtaccttatcttatgagcagagaagatactccggcaatggggcatgatgaagaccgtgattatggttcctacagtgttgagaatgtcgatttagaatctcatgctccaattactctccacaaggatcatggcttgtgaacctgtcgtgtgcgccaacgtaccgaatctgatgaatctgcagatgccgcactataatttttgggcatcattccaggttcagaaatgtcgtcaaccactgcggaagggggatctgatggtcgtggcgatagaattcccgaaaatacatctcttgacagaaataatgagaaaaatgctggtatggcggaatttgtaagccctactggggacgctttcatttatgtaaaccgat

SEQ ID NO: 31920 - DNA, 477 bp, Glycine max
  Clone ID: LIB3051-068-Q1-K1-H1
cccacgcgtccggcggagagttgaagagcaagagctagggaaagggacaaacagcccttcggagatctcaagggcctttccctcgttctctccgaactctcactttgtcttcttatttgctccttttcttctctcttccctccccaattattcattccctcatggccaccacgctttattcaacgccttgtcgttcactggctacttcatcctcctcttcctcgtcgttgcaaccctgccctctgtcgtctaacctcgcttaccctcaacgcgtcaccttctcacagcgctttctcgcctccaaggtctctctcaaatctcaaccccaaccgtatcagattcccgttcacacccagcagccggaaggtacagtgacagctgctgtgacccctgttgaaaatggcacttctcacaagcagttgaaggctgacttattgtctcttaagtccccagatgagtctgaagacggttttgaaa

SEQ ID NO: 31921 - DNA, 169 bp, Glycine max
  Clone ID: LIB3051-068-Q1-K1-H2
accacgcatccgacggcacagttcaagaactctaactaaattaaggaacatacaactccttgggagatctggaaaaccattaacgtccaactctccctaactctaactaatctttccatactctgctcctctacttctatcttcccttaccaattatccataccctaat

SEQ ID NO: 31922 - DNA, 472 bp, Glycine max
  Clone ID: LIB3051-068-Q1-K1-H6
ggggcctatgtttcaaccgacgaccttgacatggaacttgattggagtggtataattgacgagtgatactttgccatcattgaactttcattacggggagtgtagtagccatgctgagtattccaaagtattcatcaaggatcaggagccattggcagacacttttgaaatttcttgtcctgaaaatgtctggcctcttgatatgactgggcaacatggcgtgggtacaaattcaggggaagatggagacagtggtgagctgagcaatattggcaattttgatctttcatcgaataatatgaatctggatctttactgggatgccaacgagaatcttccgatggatgatgatggatttttggaatacaatgatattgcaattgggaatggggataatcctaccgaggctgatctttctgcaaatgccatgctagatgagtatgctgcactcgctgatgatgatatttacaag

SEQ ID NO: 31923 - DNA, 398 bp, Glycine max
  Clone ID: LIB3051-069-Q1-K1-A1
tgttgacatgcaagatggaggatacaaccaagatgtacctcaaggccgtggtcgtggccggggcagggggggatatcgtggaaggggtcgtggcttccgatcgaatgggccaatccaagcagctgcctgaggcaaccagtaggccgccattagtgcagtgcagatgacttgactagtgaaagaaagccatgtctaattttatgttttcttttatttgttcaattttcttcatttcccccttctttttctctggggccctgaagaactgtaaggcattttcttcttacagttttatgtagacttttagttttcagactgctgccacataaggcggcaaccctttatgttttagaccttggtcagatgcttgaacagttgtacttctggtttggcccctg

SEQ ID NO: 31924 - DNA, 409 bp, Glycine max
  Clone ID: LIB3051-069-Q1-K1-A10
cctgtttgtgcttttcggtttgtggaacagagtagaacatgaaacagaagatagttatggtgtggctttgaagaagctatgagaacaaatggctggagtgacaaaggaggaagagaggggtagtcctagttggggtgcttcattttttacgcagacaacagaggatgtggctagagctgttgccactgctatgaattctcagaggccatctgtggtatattcattgaaaaatgatcatggtggcagccaacttcaaaggctgcagtatcaagttacgaaaatgataaaaggattttctagcccttcagaagttaaatattcaaattacaatccggaaatcttgacaactcagaagcgtcaatgggcttgaaactttcagttgcagtacacggaccataagtcttggaag

SEQ ID NO: 31925 - DNA, 202 bp, Glycine max
  Clone ID: LIB3051-069-Q1-K1-A3
acgaataaacatacaattaacaaactaaaacacttttaaatatctatacaaataatataaatataaagaaaagtaaaaaacttaaagatgaggttaaacaactaaataaataaactaaaacatttctcacatacttatattttctaccactatatttccaactcttacttctatcattatttcaccaaatttcaatacaatt

SEQ ID NO: 31926 - DNA, 344 bp, Glycine max
  Clone ID: LIB3051-069-Q1-K1-A4
cattcctgaagttaccccattattagtttatttggttggattggtggttaaaaaagtatctgcatggccgtgttggatgttggacagtttgagaaatgccatggcattagcaaaaaactatatataagattggactttcgtaggtgaacttaatgtgaactaatccctataattatacttataatattcttattcattgctgcagtggtttgacacagacaaattgccaaggaatgaatgtattgtacgagaagtacaagaatcaaagtttgtcactttactgaaagacaaaattaaagaaagaaatatatgtcaactatatttatgagctactggatttttaa

SEQ ID NO: 31927 - DNA, 348 bp, Glycine max
  Clone ID: LIB3051-069-Q1-K1-A7
cccacgcgtccgaatttgtcccttttgtgtttttctgcagatgtctcggtgggaagtaggggatgttcttgttcttggtcttgattcgtgaaagaagaactgaaagcatgaagctctccttctccgtcccatcatccaaaccccactcgaagcccaaagccgtctccaacaccttcgacgacaattccacctcccaaaacgacaccggcggaaccaaatacctcatcaccgaattcgacccttccaaacccgcttccacctccgtccccaaaaccctaattcccccaatccaaaaccaatggcaacccttcaagaagaataagaaatttcaacttcccaaccgccgcc

SEQ ID NO: 31928 - DNA, 287 bp, Glycine max
  Clone ID: LIB3051-069-Q1-K1-A8
gaacaatgcatggaggatgccgcgggccattccgacaagcaccttttaatgctactttcatggattccgcctatcaattgccagcttcttattcaataattggggtttcaccgtttgtcccttcggccagtcacacctacttcgcttcctttggcatgcccgtaatgaatcaagccacatcaagatcaacccttgaacaagtgaaccaatttgcttcacaagggtcttaatggcaaaaatggcattcatctgtataaggagcccatttttacccttattattaccca

SEQ ID NO: 31929 - DNA, 132 bp, Glycine max
  Clone ID: LIB3051-069-Q1-K1-A9
gtccatgagacttgcagtatggtatctctttgtttcctgttggggtcatgagttatgtgtttggcttgtagagttggatggcgttttgaggatctccaaggcttaatttatgatggcttgatcttgcaggag

SEQ ID NO: 31930 - DNA, 437 bp, Glycine max
  unsure (1)..(437): unsure at all n locations
  Clone ID: LIB3051-069-Q1-K1-B11
gatattttagcaggccaatcaactcacaatggtcagcttaatggaattcaatgcaatggtttagttgaatcaatctatatgaattcttcatgtgacatgctgggaaatatagtgcactcgttaaagattgaaggtccatattctggtgtctgtccatccaatggatctttaccttgtataaggtattcagtttctttggctgtagagggtgagaatctgaaagaagttattgaagtttgtgatgagtttgagtttgaagtgggaattggtgctgtggtttcctatgttgaagatgttgtgatgcagatgtctgttggtcagtgcgcttatttctcttcaaacttacttactactgagttgattnttgcttcagctggtgattcagtcanaatgctggcctcgttatcttctaaagactggtgtatggaatatgaaat

SEQ ID NO: 31931 - DNA, 305 bp, Glycine max
  Clone ID: LIB3051-069-Q1-K1-B12
acggttggcggcaaggcaaatctgcattgcgatggcctacgaagctcttagtctttgcgcgggctgggaccctaattttcggcgtcgtcggggccaaagccgatatttccatcgcaggaagcactccagagcctgatacctacgacatcaggatccaattagatcaactcaattccaagatccaaattctcgagtctcaaatcagcgaaaagttggaagaagcgaataagaaagacgaaactatagcagataaagaaaagtccattgaagatgaatcaattaccatacaatacttgcagaatgag

SEQ ID NO: 31932 - DNA, 345 bp, Glycine max
  Clone ID: LIB3051-069-Q1-K1-B2
cagaattaaacctgtgtcttacaatcttgcaaatcacatgagggaaaaatgataggaggtgtggtgtgtcttggatgaaattgtgacccttctagtcttttttgtcacattatggcatgtggggaaatgcatctaagttacttggctattttaacttctcacattgttggcgcttcaaatggtcaaattccaaattgcaatggttttttggaccatcatatataccacggcatgaacctttcggctgtgaagaaattgtcaacattaggtcattacaatgttgggccttgtcaatttgtcatcttattcatgaagagttctatttgacttcaaactttaaacaca

SEQ ID NO: 31933 - DNA, 405 bp, Glycine max
  unsure (1)..(405): unsure at all n locations
  Clone ID: LIB3051-069-Q1-K1-B6
aagccccattctatattcttttgttaatttatttgccatgccctttgggatatgtgtgcaatttgtgctggctgtatggtatgaatacaatacaagcaccttggattataatgcctcgacccttctaccaaagtggaaggatcaaaatgcttattggctccaagtctatgcgaattaggttcctttattcgcttcaaattcacgatgttgtacaatcgatttataggcatagtaatacataatattataaccaatgaagaataaagagaatatattctcatatatngggtaattgctcatacctgtccatagaattgactgtaaccagggtttttaaaactactgaaccgatcaaaatattaaaggttcatgacaacctctagcctgtgtcctgtgtccctttaa

SEQ ID NO: 31934 - DNA, 408 bp, Glycine max
  Clone ID: LIB3051-069-Q1-K1-B7
cccacgcgtccgcccacgcgtccgcccacgcgtccgcccacgcgtccgaaccaacttaagagacgttgttcggaatccagctagaacttcaaataatgcaaatttaagtattccaggaaatgttggttcttcatcgcggacaggctcaaatccagctgtcaatccaccacctgcttcggcgtgggtttctcgccctaatcctcagcagtatccgcgcagattatctgaatatgttcgtcggtccttggtttctcctggtttggaagctgctggaagttcaagcaatagttatactcccttccgtggtcctcctacttcatctgaatcaaggggactgtcatctggggtaaacccgttcgagaagcaaagtgatagtgaatttggaattccatattcggtacaatcttt

SEQ ID NO: 31935 - DNA, 234 bp, Glycine max
  Clone ID: LIB3051-069-Q1-K1-B8
cccacgcgtccgcccacgcgtccgcccacgcgtccggtctgatgcaccctctcaattgagaggctcagctagtgcagggagcttggaagctgcaaaccatttaaatgcaatacaagtagactattctgaaagtgatctagagtcaatggattatgctggaatgtttacaaatacccaatggacttcctatgtggcttcacattacaagaaacaagcttttgtgatgtatttgca

SEQ ID NO: 31936 - DNA, 303 bp, Glycine max
  Clone ID: LIB3051-069-Q1-K1-C11
gggagaggaaaaagagcagcctaagaatgaaaccgagaagaagcccgaggaggccgccgcagcccccaagaaagacgacggacccatccctgtcgtttacaaactcgacttgcattgcgagggatgcgtcaagaagatcaaacgcacatgtcgccacttccaaggtgtggaaaccgttaaggcagatctatcgtcgaacaaagtgactgttaccggcaaattggatgccgagaagctgcgagataagatcgccgagagaaccaagaagaaggttgacatcatctcagctcccgccaaaaaaga

SEQ ID NO: 31937 - DNA, 393 bp, Glycine max
  Clone ID: LIB3051-069-Q1-K1-C3
cagaattaaacctgtgtcttacaatcttgcaaatcacatgaggaaaaatgataggaggtgtggtgtgtcttggatgaaattgtgacccttctagtcttttttgtcacattatggcatgtggggaaatgcatctaagttacttggctattttaacttctcacattgttggcgcttcaaatggtcaaattccaaattgcaatggttttttggaccatcatatataccacggcatgaacctttcggctgtgaagaaattgtcaacattaggtcattacaatgttgggccttgtcaatttgtcatcttattcatgaagagttctatttgacttcaaactttaaacacacgtgcaatggtaaagcactgttgatagtgaaacagcaatgattggtgtc

SEQ ID NO: 31938 - DNA, 418 bp, Glycine max
  Clone ID: LIB3051-069-Q1-K1-C4
aagaaaaatgttaggaaaagagtgctacacaaacccgccatcaatcctaaattcctctagtgggggtggccatgttatcaatatcggtggtgttaattcttacgtcactggttcccctctctccatcctcgccataattctagtctctgatatttttggatttaaaccaccacttttaaggaacattgcagacaaggttgcagctactgggtattatgtcgtggttcctgacttcttcaatggggaaccctatgatcctgagaatgtgaaaaggccgaaagatgtttggttaaaagatcataatccggaaaaaggtattgaagttgcaaaacctgttattgaagccttaaaaagtaaaggtgtctctgctattggagctgctggtttctgctggggtgctaagaccgttaccaacctc

SEQ ID NO: 31939 - DNA, 261 bp, Glycine max
  Clone ID: LIB3051-069-Q1-K1-C6
ttcactccaaaagcgagatgatctacatctttcaactctccttgcatagagtgcaagggcggggatcgcaattgaggagctggaatgctcatttgtatcgaaatccaatacgaagtatatactgataaatggtaaatatatgtaatcacttatgtttttgtcaaacaatggtcaagtaatgcaaacaactgatgatgatatgctccagtatgtcacaccaccaaattcgtgattagttactagttagacaaaacatgtaca

SEQ ID NO: 31940 - DNA, 246 bp, Glycine max
  Clone ID: LIB3051-069-Q1-K1-D1
aacaaacacgacatacgtattactcacaatcatatgactcttaataatcatcgcccaacattcacattaccggtaatttttaaatcatcggtcgaacaacacaactaatcatacctatcaaaatcacttaatatcacaaaaacatatacatccacactacaaatctcaataccacataaacaacacaatcaactcatacttccaaatcatccaatctaccctttataccaacaataccaaatgcaa

SEQ ID NO: 31941 - DNA, 452 bp, Glycine max
  unsure (1)..(452): unsure at all n locations
  Clone ID: LIB3051-069-Q1-K1-D10
ttcagtgaagagcgaaaaaaagcgatgaagaagggcgaaaataagggccggactcggagcttggcggtggatccgaacgtgccccgatgggtttgccagaactgccgcaaccctctctgcatcgtcggcgccgattcttacgccgacaaattcttcaacgatccttctcgctccgggatgcaagggtcgtccattcatggtgccagcagtgtgctgagtacgactaaaatggacaattcatatgtggtgttgcccaagcagagacctctggctcagggaaatgctcctcggccacgcggtgatgccgctgcacagcctgggaaggcgatggaggagtcatttgtggttgtgtacaagtctgaatcggggattgatggaaacggggcgcatttgttgggcacaggggctgattctggtggccatttgccgnctcataactctgggtttaattc

SEQ ID NO: 31942 - DNA, 407 bp, Glycine max
  Clone ID: LIB3051-069-Q1-K1-D3
aacaaacaggagatgaggagaatcatggctctaatgagcatcgtgaagatgcacatgagggagaagatggggatcatctgtcgaaggacaaaggtgggcagaggtatagaaatcaaggaagatcaagaaaacataaatatcgtgctggaaatggaatgggccatggaagtacaccatcaactcatgctgccgaagcatcgaagccaccccctggaccaagaatgccagatggaacacgtggcttcgcaataggacgaggtcggtttcctgtccctgcttcgaattagcaaagattggacgccacaaatgagggattgtatttagcagtattatgtgttcgatgctttagtgatgtactaggttttacttgggtccctatgcgtgttcgcttgagtcaacatgggttt

SEQ ID NO: 31943 - DNA, 103 bp, Glycine max
  Clone ID: LIB3051-069-Q1-K1-D6
gctacgcgtccgctatgagtcgcgctacttcttgatggaccaggtcccacaggaacacaggggggcaaatggattcgtggtgttgaattacagcataacggtg

SEQ ID NO: 31944 - DNA, 232 bp, Glycine max
  Clone ID: LIB3051-069-Q1-K1-E11
cccacgcgtccgaccacgcgttcgggaggtatcaatggccaaagcgttgaaaccgagtttaaggagtgagttcatcgctcagaaaatgcactgagaggatattttcagcctgaacgcgaacaccgttatcgtcggcgaagatttctccgtggacgacctatttgacttctataacggctctctgcacaacgaacaccaacaagagtgctaccaagagaaacagattttatct

SEQ ID NO: 31945 - DNA, 333 bp, Glycine max
  Clone ID: LIB3051-069-Q1-K1-E12
agcagggccagaagaggagaagggtgcttctttctgattcagattatgcatcttctggatcatgtgattttgagtttaccatatctgaagaagagagagaacaggtgagagaagccaagagattgtgtggaaatttgagaaataacttgaggagttcatcccatctaataaataatgaagaggttggagtccatgagtatcaacatccgcagcggaagcctccagctcggaagggtaaggaaaagatagaagaacctctgggaagaaagggtaaggaaaaggtggaggatttaaaaagtaagggaaagcaaacatgtggaatttgtctatctg

SEQ ID NO: 31946 - DNA, 137 bp, Glycine max
  Clone ID: LIB3051-069-Q1-K1-E3
attacatcatgccataggaaaaatatattgttcgaacaaaacagcaattggatcagtatacgtgactgtttcacacctcttgagtaacgagttaccaaattttctggttgatttatctgggctagtaaaaaaacaga

SEQ ID NO: 31947 - DNA, 330 bp, Glycine max
  Clone ID: LIB3051-069-Q1-K1-E9
acgcatgatagttctcatcatataaaagttcctcttgacaagagttctcaaatgctaggcagcaccgctgagaatcttgggggaaggcacgcattgaagcatataaatctactggactatttaagaattcataatccaaacttaaatgactgctcttgacacaaaacaaatgtctaagcgatatctaccatattaaaatcacttacccacattatacaaatccctacatatgcatatactccagacttaaacatgatgagtggataaaccacactcaacctgaacttcacactatgacactggcacaacatcttcagacattcaccaatc

SEQ ID NO: 31948 - DNA, 345 bp, Glycine max
  Clone ID: LIB3051-069-Q1-K1-F10
cccacgcgtccgaagccagcagatttctgatgcatctgggtcaattggacgctcaaaaggagcgtcagtagtttcttctgaacagcaaatatctgttactgttgtaacagagttcgtgcgttggaatgaagaagcaatctcaagatgcaatctctttgcttcccagcctgctacacttgcaacccatgttaaagcagtgtttacttgcctgctagaccaagttagtcaatatatagctgatgggcttgaacgggcaagagacagcctgactgaagcagctaatttgagggaaagatttgtgttgggtacaagtgttacccgtagagtggctgctgcagctgcatc

SEQ ID NO: 31949 - DNA, 438 bp, Glycine max
  Clone ID: LIB3051-069-Q1-K1-F11
aacagccgcaactttcaactaacacaatatagcatcatctccgatgtaacaccttccgtggaggttacaactcacatttgaacttcaaaaatatctcaaccacttcactttgcaagacgtacgtgcagcatcatcgatcagaatgaacctctggatatactactggttctcactcgatttcaatccattcacaacgcatacgatcatgaacactagctcatgcatacggatatcaccctcatcaacttggaccacccatatacagagagcttattgcaactcattgtcatgccatcatgcctgatccaatcgacagtcagagccttattagccaatcacgctctcagcatactcttcaggtccatcgcgatgaaactcaacctcaccactggtatcattacttcactcaaaatctctgctcgccttgtcgatatcttc

SEQ ID NO: 31950 - DNA, 423 bp, Glycine max
  Clone ID: LIB3051-069-Q1-K1-F2
cagagtctagggttttgatcgtccctcttcccaatttcagggtaagctttggatctcggagcggagccttacccatcgtttctaaatcttcaaggaacgctttgggacactaaagtttccaaattgtagagaaaaaaacagaatgagagggaagacttgaatcaggattcaggggtgagatatttgaggatggttacttatggtgaaaggtgggctgataaatagggagtaagcatggaaaatttggtgagcaaatagtttgatctgctttgaattttgataggctcagagattacaatatggaggatgagagtgggcttgagctcagcttgggtttatcttttggaggctcgtcagccaaacccaagggtaagaatggtagctcctcagatgctagagatgaagaagttggtaggggtggca

SEQ ID NO: 31951 - DNA, 293 bp, Glycine max
  Clone ID: LIB3051-069-Q1-K1-F6
agaaaacaagaagatgaatttgggtccgggtatggtggaaggaaggaggagtctgagtatggatctgggtatggtgggagaaagcaagaatctgaatatggatccgggtatggtggaaggaaggaagagtctgaatatgggtcaggatatggaagaaggaaggatgaatcagaatatggatcagggtatgatgggagaaaggaggagagtgaatatgtatccgggcatcgtagaaggaatcatgaatcttgatatggatccggatatgagtgaatgaagcaagaatctgaata

SEQ ID NO: 31952 - DNA, 395 bp, Glycine max
  Clone ID: LIB3051-069-Q1-K1-F7
cttcctcaacacgtcaaaaattcatctcatctatctgtagatcggagaaaccaaaaggaaggagatggagttcgacgagaggaaagcaatgatccgcgacgtggcgttacaagtcgttttcatctcgctcacgattttcagcttcctctggatgcacggcatccctcaaaacctctacgccaagctccgccaccgtcccccgaacccacgggccgtgcaagccaagcgccatttcgtcaaaagcgcgcagctcctttcccaagccagatgatccaaaagcgcttcctccgcaacttccctcgtcaaacaagccctatccgatgcctagaaagccatcgcgctcgaccccaaagactccggcttgcaccttcttaagttcattgcgcttgaccttc

SEQ ID NO: 31953 - DNA, 408 bp, Glycine max
  Clone ID: LIB3051-069-Q1-K1-F9
acggagagagagagattcctatttcctagattcgaattcgattcccatttctcactctttgtgtgcggcatggcgaagcctcgcaagcgcaagaacaacgaagacccgaagcccgaaaactccggcgccgtagttcaccaccaaaagctatgcctctacatcgacatcgacaaacgccaagtgcacgggtacactgaattggagattgcggtgcctgagattgggatcgcatggttgcacgcggagaatttaaggattgagagtgtttgtggttacggcgagccaacggagttcgagtattacccgcaccatcagcagcagggggaggatgagaagaaggttagctccgtgtgttctcctagctctgctgccgatgctgctgtctcagtgtacatgtccgctcttgag

SEQ ID NO: 31954 - DNA, 334 bp, Glycine max
  Clone ID: LIB3051-069-Q1-K1-G1
ctcacgcgtacgcctagatccgttgctcgtgcatcaaggaaagtaagagtttaaagtttgagctctgtttttcatatgcacaaagcgcagatctctgtaatataatgtaatacatgaaaatcaaagactaggatgaagttagagatgctttcgttgaggacgtttgaaaatcatttttgctgtcagtcctagataacgatttgagtgcttagtcataaaccaaaattgacagccatagggagaaagtcaagtgtacgctcaagttacttgttacacttgcatttacctgtcttactaattcgcaagccattctaatctattggttcaagatatc

SEQ ID NO: 31955 - DNA, 298 bp, Glycine max
  Clone ID: LIB3051-069-Q1-K1-G3
aaaaaaaaaaaaatacaagttattaaatgatgttattaaataagactataaataaagctaaatgtacggaaattacattctaatgtgaaagcctaatgacatacatttctatcactggcttattcagacaataaccttataacgttgaatcttaatattgaccccaatacttttgtgtttctttctaaatgcttgcatataatatcaaatcatatatcttcttcttcttcatataatgcaaatttaaacaaaaattcaattttaccaagaattaccataaattctaaaacatatattt

SEQ ID NO: 31956 - DNA, 406 bp, Glycine max
  Clone ID: LIB3051-069-Q1-K1-G5
cctgttgagtctgcaaaattcgtgcttgatctcggaggctcaatcctctgggctgactgtgggtccagaaccaccccatcttgcacccttgccccaatcttccaccgttcaattcgctgcctcacggcaaagggtcctgaaattgagacacatagatggctctcgagtctcgcaaatcccatagatcaagatcagccgtgtcaaattcctgcagagaacagcatctcggggaaaagggtcaccgaaggagagcttgtggaagacttagtgattaatcgctctcacgagcttctcttcacttgctcacccactcttctcttgaacgggttagctaccggtgccaaaagcatggtaagtcttgatcgatcttgcacttctttttcggctcaggtttttcactcacttg

SEQ ID NO: 31957 - DNA, 399 bp, Glycine max
  Clone ID: LIB3051-069-Q1-K1-G6
cctgttgagtctgcaaaattcgtgcttgatctcggaggctcaatcctctgggctggctgggcatccagaaccacgcgatctggcacccttgccccaatcttccaccgttcaattcgctgcctcacggcaaagggtcctgaaattgagacacatagatggctctcgagtctcgcaaatcccatagatcaagatcagccgtgtcaaattcctgcagagaacagcatctcggggaaaagggtcaccgaaggagagcttgtggaagacttagtgattaatcgctctcacgagcttctcttcacttgctcacccactcttctcttgaacggtttagctaccggtgccaaaagcatggtaggtcttgatcgatctcgcacttctttttcctctcagggttttcac

SEQ ID NO: 31958 - DNA, 211 bp, Glycine max
  Clone ID: LIB3051-069-Q1-K1-G8
acgtctgtttaatatacaaaattctagctttatttctgacactcaatactacatactgacgctggtttaaaatcaaggtgagcttccaaactagccccaacattacaccgttcaatagactacgctcacatcaaatacttctataaactatacaacatccagaactcttcattatatcaactcctatatattactatcagacttaccaaat

SEQ ID NO: 31959 - DNA, 434 bp, Glycine max
  Clone ID: LIB3051-069-Q1-K1-H11
gttagttcacacactaagttctgaaaaatgagttccaaagtttttcttattctacttgtgttcgtggccactatacttttgatctcctctgaggttgcacccgatgatgcataccagaattttgacaaaacagatgggaagcgtagtgcaaatggggtagatgaaagcaaatattggcgtggtggctatggtggctggcgtggtggctatggtggtgggcgtggtggctacggaagttggggtggtggctttggccctaacgaacataatgaggctgggattgatgctagccctcacaactaagaaggaaacttgctaaagcttatataggatttaagttatcgtaataaataaaacttcattgtaagggtagttataatagatgtggagatctttcttcgctctggtcatataaaggagtaatacttttctat

SEQ ID NO: 31960 - DNA, 203 bp, Glycine max
  Clone ID: LIB3051-069-Q1-K1-H3
cccacgcgtccgcaatcacagactcaaaggtgtgcagttattattatcattatctacatatgtttgcgaagctgcttcatctgtattattacgcagatcagattcaggtccttatcaccaagatccaacaacttctcaaccacaacgagttgctatttccttcgattcacgaacccagaaaattaaagaattaatagagatat

SEQ ID NO: 31961 - DNA, 412 bp, Glycine max
  unsure (1)..(412): unsure at all n locations
  Clone ID: LIB3051-069-Q1-K1-H6
gaaatttctacaagcaaaggccatgtgtagttgttgcaattgtagggaagcaaaattggacgatgatatggagagtggagaccaattccagaaattccattgagaaatatctacccccatggttgttaaaatcgcgctttaactcatgaaatcgtatgattttacgattccaccaagggtcggcgagttgaatcggaagtagaatcgaaaccggagtagactcgtccgatttagcgcagactcgggcgagtttaggtagactcgcgagtctgcgacgagtccgcaagttcatgaaattttcaaaacgacatcgttttgaagcagagctactcccttactcatcatgagtcgtgactccgtggccgtgctgtgctgaagctgctactcaccgctgntcactcgcatcgtcatc

SEQ ID NO: 31962 - DNA, 169 bp, Glycine max
  Clone ID: LIB3051-069-Q1-K1-H7
tccacgcgttcgcacaaatgatgcactagatccagctccagctgacatgtgcttggtgcttggcttggagcagtcaagggttgaaattgctgttcttctgaatgagttggcgtacttaaaatatgaagcacctcaggatacttctgccacagctgaagcaattctttca

SEQ ID NO: 31963 - DNA, 209 bp, Glycine max
  Clone ID: LIB3051-069-Q1-K1-H9
gagatgcgaactcaatgttttatggacactacgggaaccatacataccactccctcacggccaggctactcactcagcacaccagtaatccccaaatccaattgcatcctacatgttacccacatgccactgatagcaaatcttataccaccttggcacatgtgtaacttcacattcgcctacatccaaccaattgattgtagcatctt

SEQ ID NO: 31964 - DNA, 252 bp, Glycine max
  unsure (1)..(252): unsure at all n locations
  Clone ID: LIB3051-070-Q1-K1-A10
tggaattgaggttctgggattttgctatatatgaattgaagtggagatgatattggtgtagggggcttttcaactggtttggtgagatgaagggtgttctttccatcagcttcttgttttgttgcttgctgctacttttggattcttcagtttcacttcctctatgcgttgattcaagggcaccctttaccttgaacaagacacttgggttntgtccttacaatggaagcacgtgttgcaactccacacaag

SEQ ID NO: 31965 - DNA, 270 bp, Glycine max
  Clone ID: LIB3051-070-Q1-K1-A3
caaatattctcatttggggaaatcgtctataatacttatcccacccattgtatcttccgtgcttgtgcttttgtcacgaagattgatgcttacataacgccagcttcgataggaatacgcattaatgcgtgcttctcttgaggcatgtaataagaggtgtcccccctttgaggtcaatcagtcctttgtagaatgaacgttcacatttaccctgtgtcatgatcttcaaatatcttaatgacaaataaaacttatactctgatactaaac

SEQ ID NO: 31966 - DNA, 306 bp, Glycine max
  unsure (1)..(306): unsure at all n locations
  Clone ID: LIB3051-070-Q1-K1-A6
cccacgcgtccgatcacagacatccaatgacgatgacgagttgtgtcaacctgaaaatgtggcttcttaactntgttatcttgtttagtatggtttccttgtcccatggaagactaaatgctcaatttcaagtgaaagcagttaatctaagtggttggctcgttactgaaggttggatgaaaccgtctctgttcgatggcattccaaaataagacttcttggattgaactggtcttcaattcaagtcttggaataccaggaaatatttttgggcttaattccgaagaaggaccattcttagttcca

SEQ ID NO: 31967 - DNA, 432 bp, Glycine max
  Clone ID: LIB3051-070-Q1-K1-A7
ggcagatcgagtttccaacttggcatgggccaaggatggacaggctctgctgtacgttgggacagataagaaaatgaggccttaccggtgggtggattgttgttgatctatcggtggcttggtgctgtgatagaattgaaagaagtgcaaaatttatatacagttccttggttgcttttagtgatgttcttcaatcagaattgaagtttcatcttcgtaacctatgttaaattagttttgattgaagaatattaccaaaagcacataggaattgcatatgagttgcgtcttttaaagaatcccttagtttgtgttttgcttatgattgctagaattgaagttcatgcgatcttcctcaatctcaagtttctgcttggtgccacagtatctactacagtctgattggatcaactgatgaaagatgtttgcttt

SEQ ID NO: 31968 - DNA, 383 bp, Glycine max
  Clone ID: LIB3051-070-Q1-K1-B10
gttctcaggtccatggatctcttgcgacaccacgtttctcccatcacttcgtagatgtctgtgtagccttttatcttctgaactatgtaccttctgttgctcatcataaatatgaggcttagtggtacttctttgtacagcttcgcttttccttcaagatttgtgtccagaagctccattaccctcattaactgcgccgcataagatgttcctctcactgtatcttagacaaaatttaagcaatttaaggccgagatgccattttccacgcctacattaaggcattggtggaaaatccagactatacaaaaacctatgcccaaagttggaagaatgagctggagttcaaaatccaacttctctcggtgagttttcattccaag

SEQ ID NO: 31969 - DNA, 245 bp, Glycine max
  Clone ID: LIB3051-070-Q1-K1-B7
aaaaaaaaaaaaaaaaaaaaacttaaaaaattataaaaaaaaaaaaaaaaaaaaacgcaaaaattgcaaaaataataactcacatatcctaacacctaaatacaatcaatctcaactaataaatacaacttcaaatccttacaaaaccctctctctacccaacttaatctccttccatcacattctcctttcttcttctaaccctcatatctataaaccccacacctatcacccttcctcccatt

SEQ ID NO: 31970 - DNA, 446 bp, Glycine max
  unsure (1)..(446): unsure at all n locations
  Clone ID: LIB3051-070-Q1-K1-B8
attcagtaaggggtgaagaggttgaggttgtttcatttcatgctcttcaatggcggttcgactcataatgaaccacaacaaacgaggcggcatgcttgctcgcttgaagattctcgtcaactctcactctcagagcttccactcccctgcgcccaaacgaccaaagcaagatcaatcatcaacagaaaatgacttggattactctatttgccggggccgcattgatgtctcaaaatggaagactttggatgcaaaggagcttggtataactagttctatgatttcatacccatctcagtttgtcctgaaacttcttcggagaaatggatttggtcctacttagtaggtgggtgtgtgagagatctactattgaataaaactccaaaagattntgatgttatcacgacagcaaagctgatggangtgagaaaagcggttcgtggttc

SEQ ID NO: 31971 - DNA, 416 bp, Glycine max
  Clone ID: LIB3051-070-Q1-K1-C2
atttgttagaggagaggaagcatgtgggtgcctggtgggatgacattagcagtagaccatcatggaacaaggtatgaaaccaaatttattgaagagattgtcgagaaggtctataaaaagatacctcctaaagcattatacaccaatcaaaaccctgttgaacttggcgcccgcataaaagaagtaatgtcacttctagacatgaaatactggtgataatgtactcatgttgggcatatatggacttggtggtatcggaaatacagaacttgccaaagctttgtaggacaacattgtgcaagactttgatgctgcaagttttcttgccgatgttagagagaaatcactactagaataagccttttctaagtcggtcgattagacccttctaatcgatgttaatcaaacaaaatcaa

SEQ ID NO: 31972 - DNA, 392 bp, Glycine max
  Clone ID: LIB3051-070-Q1-K1-C5
cccgcgcgtgcgctccaaggtattataatggaagatgccatgacagccacatggataagggtagatcgctgaatcactgtaggacatgtgtgtacggtattgagatgggatgaatgaatgtaagaatagagatatcttctacattgcatggggaggactggagctagggttacacttgcatatggtggtatacaacctgcatgattacgatgatgcatcttatgtgtcatctactattatataggctgctactctttctagaggataaattgatgctaggcacatgatgtctgagaataatcaacaactctaatgcataggctaggacatatgaatccgtcttggagaatcaactaggagtcatgatgaatgtcacgcggctatatacatga

SEQ ID NO: 31973 - DNA, 377 bp, Glycine max
  Clone ID: LIB3051-070-Q1-K1-C8
ctaggttcttgctttcaacgataaacctgttaagaatctgaagagcttggccggcataggtgagagctgtgatgatgattatctaaagtttgatctggaataccaacagaaggtagtgttgaagactagcactgctaaggccgcaaccttagacatcctcaccacacattgtataccttctgcgatgtctgatgacctgaagacataaaaagttttggtgaaagttatttaaattactcccattggcctcatcttaatttttttttaagtgttattacacctagttcactataacattgctgtactattggatctgcactagtcaatgagataaataggcttcacatacagatgattagagaatcataggatgggga

SEQ ID NO: 31974 - DNA, 372 bp, Glycine max
  Clone ID: LIB3051-070-Q1-K1-C9
ccaatgactgcctaggccatcttcccttcgtaaataaaaaactgccattgctaagagggtaggttagatcatagtgtgctggttttattaataccactgatccttttctttttctcctgaaaccaacacacacacacacaaatagtaaaatgaaaaaagtaaaataaaaactactgattctcaaacacacacgtctttataacaacctaccaaccggatattcctcctactaccacaaaccgctttctgattaatttcttcccttgtcttatgtgtgttctgtctatgcttctctctttctcagtatcactgctctctctataactccatgccaatttttcaaggctcatgattgaggcctgaactagtagt

SEQ ID NO: 31975 - DNA, 342 bp, Glycine max
  Clone ID: LIB3051-070-Q1-K1-D2
ttcacgcgttcgcattcgttcattcttattctatatataaacacattacacacttaacagtaacaagaacaagaacaacactcaggtgcggaatcagtcatcatggtggtgatcaacaaagaaataatcgatgagccctacgaacaagaggagtgtatcgactacgagcagctgaagaaacgcatgtggaaggaccgtgtgcttttgcagaagctgaaggagaagcgcgagaagcaagaacccgacgtggaagcgaaacaagaggcgtcaaggaggaagaagatgtcacgcgcacaatactcggtgctcaagtacatggtgaagatcatggatgactggaac

SEQ ID NO: 31976 - DNA, 148 bp, Glycine max
  Clone ID: LIB3051-070-Q1-K1-D3
accactcgtccggttgatcttcacaagcccaatttttactatcttatgcctatattattgcatatttctaaagtcagggaccactatactactgtcattacctatcttatttgcttatattgtctcaaacaactaccatactttcctt

SEQ ID NO: 31977 - DNA, 474 bp, Glycine max
  Clone ID: LIB3051-070-Q1-K1-D9
cgagaaaacaagaagtagtgagaagaatggagagaatggaggaaaaggcaaaagctgagcagaggaagataggtatgaccgagacttggttgaagaagcaccgtcttctttacaatggagccactagacaccctcttattattagcattcgcgatggcaccatcaacactgcttccttcaaaacatggctcgcacaggattacttgttcgttcgggcgtttgtcccatttgtggctagtgtgctgataaaagcgtggaaggaatcatattgcagtggtgacatggaagtcatattggggggcatggcttctctggaggatgagatttcatggttcaagacagaagccaacaagtggggtatatcactttctgacgttgttcctcagcaggcttacaaaaactattgtgggttgctggaaagtttaatgagttcagacgcggaatatatctgtgctattacagcattttgggcta

SEQ ID NO: 31978 - DNA, 379 bp, Glycine max
  Clone ID: LIB3051-070-Q1-K1-E12
cccacgcgtccgcaacaaatggcagcggatgacacaagtgactactggtgctgctgccattgggggaaaatttcatgcttttaatcaggatattagcaatcaagttgctgcttatatgagagatcctaatagaatgatcaatcagatgcggctgagaagatcagctgttaatatatttggatctgttccagaggttgacgataaacataaagaagctgaaacacgtactgatggtgatcctgaacttctggatgactctgaattttatcagcaattattgaaagaattttttgagacagttgatccttcatcgtctgagaaagcattatatgctgtgaagagaatgcaaccaaagaaaagaagaattgctgatcgtcgt

SEQ ID NO: 31979 - DNA, 437 bp, Glycine max
  Clone ID: LIB3051-070-Q1-K1-E5
cccacgcgtccgcccacgcgtccgcccacgcgtccggaagaaagagaccgaggtctcggggatagctagcatcatggcgtccaaggcgctcctcgtggtagcgctcctgctcgccgccaccttcctcgccgcctccgctaacgagcaagcccaggcggccaaagaggagaagaaggcggaggtccaagactggcacggcggcggcggctacccggggcacggcggcggcggcagcggaggctacccggggcacggcggcagcggcggcggcggctacccgcactgccggtggagctgctgcaaccgcgggtaccatggcggctgccggagctgctcgcaccctgatcatataccaaatcccatggaccgttctgagctcgtcgaggtccacaactaaatagtaatgagatgcgcttgttctatatattccggtacgt

SEQ ID NO: 31980 - DNA, 339 bp, Glycine max
  Clone ID: LIB3051-070-Q1-K1-F5
tactaacaaaggctcaaaacgttttctggtctatggcattacatggttcctgggattcggaacaatgttcgtgatgaagacggtctctgttacgaggcgttaactcagtgcacattttcaacatgtgttccgactgaccatgggattgatattcctcacttttgtcttgaatcttgtcattttgattgctcttccgtatatgacattgcaggtcattgctgtatgcattcttgctttcatgccaactggttgctgaatgctgcatattgcttaagcattaaaacctgtttttcacctggctgggatttggtgatcatttgaaacttttgctctatgtta

SEQ ID NO: 31981 - DNA, 438 bp, Glycine max
  Clone ID: LIB3051-070-Q1-K1-F6
gttgcattaaaaaaattcattatctttcatcgatttcatggatttcgaattgatcaagggttctttggctgtgttcccttttgttttttgattttgaaaaatgattttaaaacaatgcttttatatttgttataataaaagtacttttgttcaatcggttaaatttatctataatttctattaaaaaatagtctttcacccatatcaaattttacgagccttgaaagagtttttttgctaaatttttttggatggcttagaagattaccctaacacgatttgttggttaaatctttacttccgaataagccattttttgttgctagtgctatttgtttcttgtgtttctggattcatttgggtttgcttaattaatttttctgttgattgtgttgacgcaagactgaatgacctaatggagtctaaaggtgggaaaaa

SEQ ID NO: 31982 - DNA, 434 bp, Glycine max
  Clone ID: LIB3051-070-Q1-K1-F7
cccacgcgtccgcccacgcgtccggttcgctttggtcgcaattgagagtagcggtcagaggcttggccgcacctacgctttgcttctcttttgtgccatcttgctcgacatttcttggttcattcttttcgccaacgaaatttgtaaatttacttttcatgtaccgttgtggactatgttgttgagaccaagtgactgagtgcgtgtttgaattagcatccgtcatccgcgattgatcaaattttcacgtcaagatgcaccaaaaacaactaaaagttgcttctgtgatccacgtttgagtttggtggatgtgaatccaaacacactatgagttttggcttgcttgtgtaatgattcttgcccctaaagaaagggaattgactattgatgtggtctttatcttggattatatgtgaccttaagttatataaaaa

SEQ ID NO: 31983 - DNA, 357 bp, Glycine max
  Clone ID: LIB3051-070-Q1-K1-F8
taagcctcttgatcatcattctagaggttgttattctgaaagtgctggacaggcttctggtatgatgtttttggaagaggacgttgtcttcaagctcttgtgtcaccatgaaaaagttggcagtcttattggcaaaggtggttctgtagtgcgggctctccagaacgaaactggtgcttctatccaaattgtggaggctggtcctgattcatactagcgtgtcgttgtcatatctgcgcgagatacatcagatcataagcattcttctgcacaagaagctgtcattcgtgttcattgtcgacttacagatattggatatgaaccaagtgcttcagatgttgctaaacttcttgtgcg

SEQ ID NO: 31984 - DNA, 388 bp, Glycine max
  Clone ID: LIB3051-070-Q1-K1-F9
ctccgtcgtatgctctagcttgggattctccaatggaggatacccaagaaattgaggggcaggctcacaaagaagtgatgtcagacaaaacatctgataagcagcaggaaactcttgatgaaattctttcacgacacatgaaagagatattgcaactgcagaaaaaagaagttgagatgaaaaaagctgcagctagaggtagcaaggctgagcagaaagctaataagaagcaagtggaagaagaggtttgtcaactttctgctaatcttaaggagaatcatgccaaagaactgactgcattaagctatatcagtggtaatggaaatgaaaagagcaatttggacagtcttgtgaaggccatatcttgagtatctgttactagttaacc

SEQ ID NO: 31985 - DNA, 470 bp, Glycine max
  Clone ID: LIB3051-070-Q1-K1-G10
atttctaatgaagcataagttggacaaaaatttactttttaattgaaactaatactgaactgactttcttagttagagtgaatcatttcttattttttatatgtaagatctaatatacactatataaagaaacttgagagattagtgggggcatttccccccagtgttaaacctgcatccgtacctgactcaggtaattgtttaaagcaagtattgttatatgactttcaatatctacttgttccttctcatttacagcagatgaaatatacttgggttgtattgaactattgatcaattcatgcttcttaatgacaaaaccttaaggtattgtctagtgcattgtataaagtaaatctttattgtaagaaaattccatttttactaggtgttgcacctaagtagtcaaatctagccaaacattttgaatccttacaatcactattgcaacacttgatatcacctaaata

SEQ ID NO: 31986 - DNA, 184 bp, Glycine max
  Clone ID: LIB3051-070-Q1-K1-G3
tatgatctttcataatattcgttggatcttctgcatattcatattcaatatgagtacctgaggaggggacaccgctatgtgtgccatatcgttgcttattggaatattatcttccactggcgtagaatatacagcggcacaatctgatggtgtgagttagggatgaaatggcatcactctacct

SEQ ID NO: 31987 - DNA, 562 bp, Glycine max
  unsure (1)..(562): unsure at all n locations
  Clone ID: LIB3051-070-Q1-K1-G4
tccgtccgtgagagaattgttcaaaggttcaaaacgtgtaccgtagtggnnaagaatgacttcnncaaaacaccatggggtgcgaactannctcttnntagaaaagtacccaatgttannatgtaaacccatcttgcttnngattctgtgaagtaaccttatgaaatnggccttgcatgggactnnngttgatatgtnncttagtatgaatttaaattagctgtnnttctgaaatannaaataaagtatttaatcaagtaagaattatttaattttttaacccgcgacacatnntgaaatatagagagaatttttttannaatcttgcaaattcctgtgaagaagttcnncaagcccaagtgtgaattattttacttcggtannaactgaagaatgtcgaagaagaagcaatttnncattttaataaatcatactaagttagggttcaatcattacatnatttannacctaaataaaatattgaaccctatatattgatagctttgcaatgaatactnaaatgtgttgccatgtacaanntctcattgagtttaaaggtaaa

SEQ ID NO: 31988 - DNA, 348 bp, Glycine max
  Clone ID: LIB3051-070-Q1-K1-G5
cccacgcgtccgctggcgtcctgtacatctcacgatgataaagagcaccaccgggctcgggatctccatcttggtcctctcgcttgcctcccagttctcatggtgtgcagaagcagctgagggaagcgccggaatttccacagagcctgatctccaggtgcaagaacaagtgcacggcgatatgaaaaaccggctggaaatgcagggtcgcaaccggaagcttggccatgaggtgaccacagtggagtcgaagcatcacatgaggattaccagtgggcacaatggtggcagcgcggatggaggcgccggcgccggtgccgagggcgcaggcacgggtgggcataacgt

SEQ ID NO: 31989 - DNA, 246 bp, Glycine max
  Clone ID: LIB3051-070-Q1-K1-G6
tcgcccacgcgtccgagcaaacacttcttccttcctacctggctgatggatgattgtgaaccactaaactcataggccacctattcacccgcaccgactcgatccgagttccaactcctgagctctaagctgagcacaacctcagtggtaggcctatacgcgtaatggaaacccgttcgaaagtatttccccagggttgcattgctacaaatcagatactataactcaaattcgttcatactatac

SEQ ID NO: 31990 - DNA, 350 bp, Glycine max
  Clone ID: LIB3051-070-Q1-K1-G8
attcaagcatcatgaccttgtttcctttataaaactcacaaccctaactctggtcataggattcattggaacaggagcttattcacattctctttatcactggctgcgcctggcttgcacccatctcgacaaagttaatttcaccttcgacagatgccaacagatctatagataggaacacagatcctacaagtaccacacgtgcctaaaatacgaccacaacagcagaaaggacgatgattgcgaagcatgttgcatgtccatcgagacccccgggcatgtggaacaagacgtggaggcaatctttcacaagcacctgagagcctggtattgtgacacctaccaagaat

SEQ ID NO: 31991 - DNA, 150 bp, Glycine max
  Clone ID: LIB3051-070-Q1-K1-G9
tcttccacacatccgctcactcattcgacattttctcacactccaatagtcacctactcgtcctacttcaaactaactgaggcctttccatccccattatatctcataacattatccaactctgattacaacctccaccacacacacctt

SEQ ID NO: 31992 - DNA, 380 bp, Glycine max
  Clone ID: LIB3051-070-Q1-K1-H1
ggatcaccttctaatatccttagtcgcttttccatctattccaattgagacttgcaagtgtaaactggtgatgtaaatggatttatttccagagcctcaaagaacccagtagattggtcttcacagggagatccactacatgtccagactctgaactatgcgaatgtttatgacactgctcttgtcagagatcaacaatcacatcattgcaccggtgctgatatgttaacaccaacttcgacccttctgcattgcgcaaacatggatctgaatggtcaaatgaatccgccgagtagtttagacgctagcattagacatacattacaatcccagatttgacaagctattcacaccaattcgtcctctttgcagcattttaa

SEQ ID NO: 31993 - DNA, 445 bp, Glycine max
  Clone ID: LIB3051-070-Q1-K1-H4
attcaatgtccacacaagagaagtctccaattcgatctgtatctccagaagagaggagtgggacaagcagtgaaggtcgaagtcctcatgagagccctttgaaacaaagaagagaaaagttgtccaatggaagaagcatgagtcctctgaagaaaccaagaacccagaaacctagccgtgacaggccagattccagagaagaagccgaagaaacatactctttcagaggaagcgcaggttccaaaatggattcattcccaaagatattaaaaactttcccctttagtaaggcaaaagggtacactggcaaattttggatgtgaggatttctctcctgaaagggtgtcaggtcatacagtttttgaacatcattatgataacgatgattggagtaagaaaggccgggagataaaacgtgataaatttttcagacaggacaatgaat

SEQ ID NO: 31994 - DNA, 409 bp, Glycine max
  Clone ID: LIB3051-070-Q1-K1-H5
ataatttagtgccttgtctgctgttaattcagttccttcccttcagctggactttgaaggtcttacttaccacctgaaattatggggtggagctgtcattaatggaattgaattgagctggataaacctctccatgactatcaatgaaattgaatcaaacaaatggagtttatagctttggtcctttggagtaaatatatatatagggtggcgtcccaaagaaccgaaacgacccttttccttttggtatgtggtttggttttgcaggggataatgcagttgagactgaccaaggccttcacatggtttacatgcatgctgggaccaatccctttgaagtcatcaatcaagctgtcaagtaaagcatcctcccttgtctgtgttatccttctaagttgataaaaattat

SEQ ID NO: 31995 - DNA, 189 bp, Glycine max
  Clone ID: LIB3051-070-Q1-K1-H7
cacactcatacgcccacgcgttctatcctatgctgcgcaggtctactaacagcgggctctggatcacacgaacaggctagtcatcgatcttgctggtggacttaccatacattacaaccattccaattctcgtgactccactatttttgattggtaccgtcataagccttctgctgaattctattgata

SEQ ID NO: 31996 - DNA, 146 bp, Glycine max
  Clone ID: LIB3051-070-Q1-K1-H8
gagcaattcaaggttgtattgtataaataagtgatatagactatatctataagccaaatgtactcgaaaatcacaagattttgaaagtctagttgattccccaaatgttattcaaaattcataaaaaaacttgaaactcaaatatt

SEQ ID NO: 31997 - DNA, 179 bp, Glycine max
  Clone ID: LIB3051-071-Q1-K1-A10
tccactcgttctctcacaccttctctaatgacgaaaatgcacagacacgaatcaaccatgttggctcggatgcttagataggtactcaagtgagctctttccgacatagcaggtaacagggacgaagcatgtacgctagagttcgcatggtcgaagaagaccataggtgtcgagaaaca

SEQ ID NO: 31998 - DNA, 243 bp, Glycine max
  Clone ID: LIB3051-071-Q1-K1-A12
attactcttctattctctttcactttcatatttctattttccatcaacttatcagtcatgtaggatggggtagccatttagtattggctgggttgatatgaacgaacacatatcctttgtagtgtaagccatgtctgttgacactattctcgctgctgctaaatctctcattttcttcttcattcttactggatctttgctgactgacatcaataattcattggccccaaaattgaccccaat

SEQ ID NO: 31999 - DNA, 438 bp, Glycine max
  Clone ID: LIB3051-071-Q1-K1-A4
gcggcttcatgtatggcaccgtctcggaggagggaaaggtcgaggtggacttcatctacgagcctgctcagcagggttcggaggacaatctcgtctttttcagggataccgaagaggaaaagtttgttgaggctattgcggtggggttggggatgacgaaggttgggtttattttcacgcagacgataactcaggataagaaggattacactttgtcgaacagggaggtgcttcaagctgtggagtaccatgcggagagtgggttgaaggagtgggttactgctgtggttaagcttgaggcgaatgaggaaatgggtggtgcagatgtgcattttgaagcgtttcaaatgagtgatgtgtgtgtgaggttgtttaaaggaagggtggttcgagacggagatcaaggaggacgatgatcccaagttgtctaagatgaag

SEQ ID NO: 32000 - DNA, 444 bp, Glycine max
  Clone ID: LIB3051-071-Q1-K1-A7
caactccatcaggaggcagtcctttccagtttggttgtcaacagaatattgctccacagaacccttctccttttcaggcttctggcagtctaggagggagtttctcattgggcacaggtggaggtgacaaatctgctagaagaattgtgaaagttaaacataaaccacgcatgaagtaggacctaaagttatgaaaatggttaccttgtatcatgctgcaggctaatcttatagtgcaacaaataaataagctctgaagagtgattgcaggatattactgctcacatggcagtctggacaagtggggtgctattgctaatcagcatatgcaaacttgtcagtcttcttttcccttccatattcaatagaatacaaggctgaagttttaccaattgcgtattagtatgatatgatgaaacatgacggtctgtactaccagtaatg

SEQ ID NO: 32001 - DNA, 253 bp, Glycine max
  Clone ID: LIB3051-071-Q1-K1-A9
gcggacttatgtgtggcaccgtctgcgaagtaggaaagggcgtcgtgggctgcatctacgggcactgtgaacaggagtcggaggacaatcgctgctttttcagggatacctaaaaggaaaacgtttggtcaagatattgcagcagggatggggatgacgaaggttggcttgattttcacgcagactatgactcaagataagaaggatcacactcagacgatcagcgaggcgacttaagctggggagtaccatg

SEQ ID NO: 32002 - DNA, 300 bp, Glycine max
  Clone ID: LIB3051-071-Q1-K1-B1
aacacaaatgataacatactctctccgctgccttcaacaaccctggctcatggcactgtcaccgtgggctctatctatcacctgcgctgctcctagctgctaaatccatcttcgcacacctaccacgctcttcattcgcttgacctcaacattcaccagcacctctactaccccgaaaaagagactctcatcattcatgcatcaccctaccaaggcactatacaatactataaagcctatagccacacagaccaaatattccagcgcctgatgactagccgtcggttaccactcccctat

SEQ ID NO: 32003 - DNA, 159 bp, Glycine max
  Clone ID: LIB3051-071-Q1-K1-B10
atctaatccgtacggtcacaactgggacagtttcatgatgaggctaagctaccaggacatggcgtgaagagctgccaactacctacggtcctgcgacaacgtacgcagctgcacagcgcatctgtcgaatcatggactggtcatcagcatatataacac

SEQ ID NO: 32004 - DNA, 280 bp, Glycine max
  Clone ID: LIB3051-071-Q1-K1-B12
gtctcatgcggatgttgaataccgatgcttttttggttggctcgcttggtccactgacaacgtgcgatggttacaaagccttctgtgagtgcggctacttcattgaatcgaaggtccgcatctcatatgatctgacacaattcggatccggaatttctccatcccgttctgatctgtgatctctgatctattttcgttacttgttctatgatatgatacttgtgttactatatgattcttatattactcactccaatatgttctttcatcttcatcattt

SEQ ID NO: 32005 - DNA, 469 bp, Glycine max
  Clone ID: LIB3051-071-Q1-K1-B6
cgtggacgtagcagagaggtctctgattaaactttcacgctcacacctctcatacacaacgcggtccaaattttccttgcttcttttcttccatggatttggattggtcgtgttcttacaccaccaccaccaccaccggcaacccctactgtctcctcttccaagcgctatcactcattccaatctcgcactacctgctcttctcctccttcgttttcctctccttactctaccgtttactggagctccatttcctccaagacctcttatccctcttctccggcttctacgtcaccttaacctaccatcccgcttaccaattctacgacgccgtggtttccacatgcaggattctacacggcacctacctcgccacgctctgactctacagccctcatctgcagaacgtgtctcttaacttcttcagcagacctaccttcttcaaattcagaagacaactgtttactac

SEQ ID NO: 32006 - DNA, 66 bp, Glycine max
  Clone ID: LIB3051-071-Q1-K1-B7
cccacgcgtccgaccacgcgttcgaaaaaaaataaaaaaaaaaaaaaaaaaaaaaaagggaagagt

SEQ ID NO: 32007 - DNA, 408 bp, Glycine max
  unsure (1)..(408): unsure at all n locations
  Clone ID: LIB3051-071-Q1-K1-B8
catgaatttggctacagcagagattaaggcaacgctagtggagaaatataggcgttcaacagatgccagaagggcaaagaacagaattcaagaactgtctaccgatgaagggcttgaacctccaacacaacatggaagtcaagctagttggtggaagcaactatcaacgttgacaaagagatcatttgtgaacatgtgtagagatgtgggttactactggttgaggatcataatttacatcattgtatccatatgtgtgggaaccgtttattttgatgttggctatagctacacttccatcctggcccgtggtgcctgcggtgcatttatatcangatttatgacattcatgtcaattgggggctttccatcatttattgaagaaatgaaggtattttatcgagaaag

SEQ ID NO: 32008 - DNA, 446 bp, Glycine max
  Clone ID: LIB3051-071-Q1-K1-B9
cgggaatctgaagggttattactgggacggttccaggtggatgcttaactaccaggcgatgactgaagcctgcgagctcccccgctcctgcggttcgtacggtttgtgcacgccgggtgggtcaggatgctcctgtttagataaccgaacccggttcgaaccgggtgggtgttttaatgatgcttcttctggagacgcagacttgtgtagtagtgaaggaattggtggaaaaagtagttactgggtgctaagaagaaccggaatggaagcagcgcataaggagctactaaagcacgtaacgacgtcgtctctggcggaatgtgaaggattgtgccagaacaactgtagctgttggggggcgctgtatagcaacgtaaccgggttttggtatttggtggagtattcgatccaaaccttgctgggtaccggggatggatcaaaagtgg

SEQ ID NO: 32009 - DNA, 394 bp, Glycine max
  Clone ID: LIB3051-071-Q1-K1-C4
tatcactctcccatggcttcctcttccctctttctctcactctgtctcaccctttgccttgggtcgtctctctgctatgctcacaaatcttccttaaccctacctgtgacaaaagacgattcaacccaccaatacctaacaaccctctcttatggcacccctgttgagtctgcaaaattcgtgcttgatctcggaggctcaatcctctgggctgactgtgcatccagaaccaccccatcttccacccttgccccaatcttccaccgttcaattcgctgcctcacggcaaagggtcctgaaattgagacacatagatggctctcgagtctcgcaaatcccatagatcaagatcagccgtgtcaaattcctgcagagaacagcattctcgggaaaa

SEQ ID NO: 32010 - DNA, 468 bp, Glycine max
  unsure (1)..(468): unsure at all n locations
  Clone ID: LIB3051-071-Q1-K1-C6
cccacgcgtccgcatgtgctgtgttgtgtttatgcattggtgattactgattagctagcaggggcatcgtccccttctccaaagatcgtataaccttcaatccatcttcatctccggtgagtcaagttgcagctactttggcatcgtattttctgggtcagttctgtcgaattccttggtccaagactttgcagctgaaccaacagcatggcgggtcagtcctccaatgaaggctccagtactggaaacatttcagcagaatgttccgattcaactgttcagctcaatatcaagactctagattcccgcatctacagttttcaagtggacaaaaatatgcctgtttcattgttcanagagaaaattggcaaatgaaatggtgttcctgttaatcagcaacggctgatatttaaaaggaaagtcttaaaggatgaacatgttctttctgaatatcatgttgagaatggg

SEQ ID NO: 32011 - DNA, 416 bp, Glycine max
  Clone ID: LIB3051-071-Q1-K1-C9
cccacgcgtccggaattttagggttttctcttccagatttcccccaatcttcttcgcctgggttcctttttctttacatttctctctgattgaaacgccacacccatttgagaggatcttttttctagagaagccatcccaaagtgtgttttcatggggttgttgtgatcttgagaaatctgagagtggtggtagttagctaatgttatgaggaagaaaaggaaaggaagcaaaactgatgggtctgcggatctggctgttattttggctcctaatcatggctctgcttcgtcgaatttgaagtcccattactcgctggaagattgttgtaggctgaagaagaagtgttgtaaggaggaagatgctgacactgatccggctacttactttacgaggaggcttgctggcattgctac

SEQ ID NO: 32012 - DNA, 326 bp, Glycine max
  Clone ID: LIB3051-071-Q1-K1-D1
gtctctacaatcactccttcctctcatccgctataattaaagtgcttaatttgtgttgttacgtggggcagtttccatggattgggggcttgctatatcttctcatcctaaaccttattcagtcacaactggtggaaatctcttgcagagtaaacacaccaccaagaatatttactttgcaagttcttggatatcaaaagcttcacgacacaaaagggaaactcaaatataacataatgttttaaggttccaacaaccaagtttggatcatcattacaaatgcatcataggagggtctacattattacgaatgcattagaaaattt

SEQ ID NO: 32013 - DNA, 208 bp, Glycine max
  Clone ID: LIB3051-071-Q1-K1-D10
gcaaagatgaataccaagccctttttctacttgtgcttactctgcgcactgcttctcatctagattgtggcaactgatccatccaaagatgcgacacatgaagaaccaaagacacggtcagatgcctggagaagcggtggaagtggaagacatggtggaagtgggggacatggtggaagcgggggacacggtggaagctggggacatg

SEQ ID NO: 32014 - DNA, 330 bp, Glycine max
  Clone ID: LIB3051-071-Q1-K1-D11
tcacgactactcaaaccctatctatactttcgcttatctttccaatgcttatatcagggaagagtcctgatccattgaagcatgccatacaactatcaccaaagacaccgacagatacctacataaatcatgatactaaaataccttctacacctgctctacataatccaatcaagaaacacaatgaagagctctgacatgacctaagctagagccatgacattgaacatcatcataaatgcaaactctatatcccaaaggacatcctatgcttctcccataaaactttctcaaacattaacttaacacatacttaagcttgtactcaca

SEQ ID NO: 32015 - DNA, 392 bp, Glycine max
  Clone ID: LIB3051-071-Q1-K1-D4
gaaaaatatagacttagcgaggacttatattggtggtgtgtacagtgcagaaatttcgtccgtaaacgctgcagactacacccactatatagttatgcttcaaaagtttggtgtcactctgggaaaaccaactgagttgtagtaacaagcttaaaggctacataaatggaagataaagctgcgataaaagaattgctggaagacgaggaaaacccatatgataatactggaaacaaacaagatgcggagaaattaccaatgctacacacccggcagtttttgaatatgggcgagtcttcatcaattttatacggctacacaaaaacatgttcaatagcagaaaacgcttaaaaagaaaatgttaggcataaaaccttgcatgtgatgataat

SEQ ID NO: 32016 - DNA, 412 bp, Glycine max
  Clone ID: LIB3051-071-Q1-K1-D8
gccacgcgtacgcccacgcgtccggcagaattcaagtttgctttagtgctggtaaagggaaggtctgagtcatgcttgctcacctggtagtctttagcccggttaggagaagggagctttggttggtggtcttgaatagcaacaaggccactaaaagagagcgagtccaatgaatatgaaatgctatcatacgccacatgtgaggtgagcttgtccattgatttatataaccaaaatggctatgtgggttgaaaacttgtatatatatgcagaaacctgcttagacgctgggaccactttaatgcagctagaatgtgttctgctgagttgaagatgatctggttttatatttttctttttgttgtccgctttgtggttggaaggggtaaagccaatacgcatattgaatttt

SEQ ID NO: 32017 - DNA, 388 bp, Glycine max
  Clone ID: LIB3051-071-Q1-K1-E10
gacaggcgaaaatgttgacaagcttctatcccagaaagttcctaacctaactctcttgcatggggctgtacacgagcgaaggagaggccggacgtgcgatccttgctaagcttctggtggttcagccgcacgtgctccctgagaagctgttgcaggcgaagctgaacgaagctctgtgcctcgcgaactccctcgaagaccagcgcgatggctacttccacaccgatttcttcgacaaaccgttgccacctcacgttctcgttcagaaccgcctttcacgctgccactcctattttggccgtggaaccggcgacaacatcaagggtcacatcgacgccggcggctaatctaacggtgacgtcgatgctcgttttggttatgctatact

SEQ ID NO: 32018 - DNA, 439 bp, Glycine max
  Clone ID: LIB3051-071-Q1-K1-E12
cccggcgacaccttcttcttagtctccaccatcaagttccagaacctcaccactttcccctgcgttggagtcgtcaaccccaccctcctcgccaccaacctctccatcggccaggacaccatcttccccatcttctgcaaatgcccccccaacagccaaggaacaaattacatgatctcctacgtcgtccaacccgaggataacatgtcgtcaatagcttcaactttcggtgctgaagaacagtccatcattgacgccaacggcggtgagacaactctacatgactatgacaccattttcgtgcccttggcgcggctgccggttctgtcgcagcccgcggtggttcctcccgtgccgccgccagtaattgggagcaataatgatgataggacaaggactgttaaagggttgggggttgaattggggattgtgggggttg

SEQ ID NO: 32019 - DNA, 243 bp, Glycine max
  Clone ID: LIB3051-071-Q1-K1-E2
tcccactcttccgaaaaaaaattaaatctatattatattaaataaaaaaaaaataaaaaaaaaagaaagaataaaacaaaacagataaaaaataaatataataaaaaccccaataccatatatttatctttctcctcttttctttcatcatcacataacattccttcatattacatctgtctattttttctttcatccttttcacatattcatctcttatcatactttatatacctcttactt

SEQ ID NO: 32020 - DNA, 372 bp, Glycine max
  Clone ID: LIB3051-071-Q1-K1-E6
cccacgcgtccgcttttaatccttttagctgtgtcctcacacctttattttggcatgcttgagactgcgacacatttcatggtctttcctctcctaggggccttggggcagatatctaacattctcctcaagtcagaagcaacacatgacaaagatcaagatgacaacagtggatccataaatacaaaagtggaaaatagtcaactggaaggtttctatgtagacctatcaattaccaaggaagttattgtcgaaaactctatcagtgtctccattaggaagtgctctgagacagctaagaatattttatatttagaaacagatatacctggagatattctccttcacttgggtgtttgtagggatgatttg

SEQ ID NO: 32021 - DNA, 52 bp, Glycine max
  Clone ID: LIB3051-071-Q1-K1-E7
aaaaaaaaaaaaataaaaataaaaaaaaaatattaactaaaaccttaatcat

SEQ ID NO: 32022 - DNA, 374 bp, Glycine max
  Clone ID: LIB3051-071-Q1-K1-F1
ctcagctgcgagtcatgcagaacgcgaaggtattagatactcgtggacatctactgactgcggtggggtatggattgtggccttttatggttcttctatcagaaattgtgcaaactttcattctggcagatttttgctactactacgtcaagagtcttgttgggggacaacttgttcttcgacttccttcaagagtggtgtaacttaacattcaagtaggacgttcctttaacatgcagcactcaaggaagtcagagtagctagttaatcttttgatatgttatgtatctatctgcggtcattgagtgaacagttcttaactgcggtctaactttctaaaattttaatttatcttttgatcaatttgggttagt

SEQ ID NO: 32023 - DNA, 401 bp, Glycine max
  Clone ID: LIB3051-071-Q1-K1-F10
cccactcgtacagtctgatggatgtcctatccactcccattcatactctccttgttgctggggggtggtgccatctacctggctaaggaagctgattgctcatttgattgcacaatcgaacagtggccttctccaaataaagtgtcattcccacctattatccttgtgagatccctagaggaaacttaaaataccacccaaggatcaggagggctacaatggctgctgaattcctagaagaaacaggagggctagcagttcagcatcaaggatcagactcatgggtttggaagcatgactcaaatggaattcattcgaccagatctgcatataagtttctgctgggggaagtaacgtgggaatcagaggatgggaagttctcgcttctgtggaaacttaaa

SEQ ID NO: 32024 - DNA, 333 bp, Glycine max
  Clone ID: LIB3051-071-Q1-K1-F11
cccactcgtacggtctaacgtatccacaaatcacggctattgattctattactgctgatccggggaagtgcaatctacctgtctatacttgcttagtgcttatagaaattgacaatataccagtgctaaaatccatattaagtgatactatatcctattatgagtgagagatccctaatcgaaactcaacttacctgccaaggatcatctatggctacaaatgatggtgaattcctacaagaaacgatagggatacctgctcaacattaaggatcagactcataggttgagaaacatgactcagatggctcttattataccagatctgcttat

SEQ ID NO: 32025 - DNA, 201 bp, Glycine max
  Clone ID: LIB3051-071-Q1-K1-F12
tcccactctttctgccacacgtacgcccactcttcctttataaatactataaataaaaaataagtgaaggttcaatctacctgaggtcaagaaaactatctcatactttcattttacaatactacagtataacttctcctaataaaatttcattaccacctattattacttgttatatccctatactaaacttataatacc

SEQ ID NO: 32026 - DNA, 388 bp, Glycine max
  Clone ID: LIB3051-071-Q1-K1-F2
agagaaagaagaggacttgggggttatatggctggtgggtcgttaccccccgagacaagtggggttgcaccagggtttgggaacaggattagagggaagggtttggagggtaggaatgagaatttgtatggtaggagggaaggtgggagaatggtgtctggtgagaggagcaatgtgggacttgttgatcagcttgatcgtcctgggccaccggcccggagtcaccttcattcgggttcggggaatgagaccagtggcattggtgaagttggtggtagggatagtaagcacaagggatgtgggagattgacgatggatggttttcctgagtctggttggaagggttgctggatttgatgttcttggcgagcaattaacttgattcctt

SEQ ID NO: 32027 - DNA, 364 bp, Glycine max
  Clone ID: LIB3051-071-Q1-K1-F6
cccacgcgtccgcccacgcgtccgaccacgcgtccggaaatttaaagctgggggagctcagggctttaattatattaactgttggatctaattcagaagtaattacttggtgtatacatagtttttatgttttgtttaccttaattagcgatttatctattttgcaatagaagtctcattttctttgcttttgaagataaactgatttgagaaggagagaagtgttcttggctaagtcaatttttcgctttttctgtcttttacttgtcaaattcatggtattctgtgcctaacagctgtagtaaatgtctctatcgaatatatatcaaccaaagttacttccttatgggattttgacctgaag

SEQ ID NO: 32028 - DNA, 281 bp, Glycine max
  Clone ID: LIB3051-071-Q1-K1-F8
aacacaatctctcccttccaaatgccaattttctctgtcctccatcaggttctgaatggagggcctaaactcactgctgacgaggactcttcacctaacttgcgattctgagagcagtgtttcactgtagtgacacaccagacatctatcgtctaaaacgccagacctccttcataccaacatcggtctcatactggcagagcactggttcaaaccaagtgttctggcaactgtgcacatcgtatgatccttcgtgatggccctgaagcgtcaacattcct

SEQ ID NO: 32029 - DNA, 452 bp, Glycine max
  Clone ID: LIB3051-071-Q1-K1-F9
gagcatctgagagtggaaacagaaagcaaaggtcattgccagattatagtggacgtggttgggatgaatccagaaagcaagtgatgaatgaatttggagggctgaagaggtcctattatatggatccacagtcactgaaccattttgagaggcacctttatgagtatgagattagcaagtgtgatgcatgtgccttgtaccgattggaactgaagcttgttgatggtaagaaaaactccaagacaaaggcagcaaatgattcagttgcggatctgcagaagcagatgggaaggctctctgctgagttttcacatgacaacaaaagggctgtcaaaggcagatccaaaatcaacaccaaagttggcatatgtggcggagtctattcagcttcacacagagtgacttcactgaatggaacatatgagtatgggttaactgcaccatattactat

SEQ ID NO: 32030 - DNA, 419 bp, Glycine max
  Clone ID: LIB3051-071-Q1-K1-G1
gaatttggaaaattctcactctcgacggaggcggatcttcgtgctctcgacgcggagcctcggtcactcactctcgaatgcgaagcctcactcttgaacttctctctctgctgtataaacattctagttatggaagattctgatcaaccagccaaatctgctgaaaaccagcaaactgaactagtgtgtagttttttcagaaagccagttaataaaaagaatataaggaaacgaactattgttaatgaagataatgaggaggactcaaacaatgaaacttctctgttgcatattcagaagaagaccttaaagcctgataataagttgtacttttccactggttcttcaaaaagctctgcatctgctgaacccagtgaagaaccaggaaaaccagtctttcaagtcgagtcttcaaaaga

SEQ ID NO: 32031 - DNA, 380 bp, Glycine max
  Clone ID: LIB3051-071-Q1-K1-G10
ttaaggttcattgtgcatagtcggactctattaccttctatcaaaacccaatttgctacttggtcagggaagcactctacttcatcatgcccaaagactctagttctcttctccttcgcactccttattcatattcctcttcgtctgtcagaactccgccgtcttcacttgctttcttcaaaaccacccaacactctcactcgcctcaccttctccgtcttcgcgtttatgccctccctaaccccgacgccgatgaacccaccaacgacttcgctttagcgtctcatcctcaggaaaatttaagccattctgagactgagagttccgaagatgatcaagatgctccaccacaaatggacatgttgtggtcaacgatcaca

SEQ ID NO: 32032 - DNA, 275 bp, Glycine max
  unsure (1)..(275): unsure at all n locations
  Clone ID: LIB3051-071-Q1-K1-G11
gtcgtgtccatttcaagtgtttgcgagagaatggagttcctggacgaggactcaaggcctaggttcgggttccactccggttcagcttccacgagcactgagccaccgtacccgatccacatacctaccaagccatttctcttcgtcaccgatttcctctgctcactacttgctactctctacctcttcttactctaagcgtagcccttcaaatcgctcctcttctggctcgcactctctatnctcgatggcccctttcccacctactccatcac

SEQ ID NO: 32033 - DNA, 366 bp, Glycine max
  Clone ID: LIB3051-071-Q1-K1-G12
tcgtgccttacaagattgagaatgacaaggtggttaactattccatcacccaaagcttcaataagctcgggaattcaactaaatctatcaagtacactctttgcaatttgaaatgggctctctattggtttgtaggaaatactaactttcagcctatttcagcaatggtatcttctcatgctgtaattcctgctgctggtcctttgtacacgaaacgtggtgtttatgccaaatctctatctctaaactgaacctactaaacatattctctgttaggttacatagttaagtctcatacaaatgtgtacatttaacttctttaaaaaatcgttgcttgatcaaaatgtataagacatttttaaattt

SEQ ID NO: 32034 - DNA, 280 bp, Glycine max
  Clone ID: LIB3051-071-Q1-K1-G2
gttagttagaaaaagagagagaaaaaggaaagaaaataaaatgaactgacagtaacagatagggaaacaaccaaacctacaaccgccatgaccgaagaagaccgctccgtccaggaaaccgtccacaatggcgtcgcctcgacggagctaggccgcgaggagatggacatcgctgacgtgactgccgccggaagagtgaagggaccgtggtcttcagaggaggacgcgctgctgagccgattggtggcacaattcggtgcaaggaactggagcatgatcg

SEQ ID NO: 32035 - DNA, 302 bp, Glycine max
  Clone ID: LIB3051-071-Q1-K1-G4
ttaaggttcattgggcattggcggattctatttccttttctcaaaacccaatttgcttcttggtcatggaagcactctccttcatcatccccaaagactcttgttctcttctccttcgcactccttcttcatattcctcttcgtctgtcagaactccgccgccgccacttgctttcttcaaaaccacccaacactctcactcgcctcaccttctccgtcttcgcgtttttgccctccctaaccccgacgccgatgaacccaccaacgacttcgctttagcgtctcatcctcaagaaaattta

SEQ ID NO: 32036 - DNA, 444 bp, Glycine max
  Clone ID: LIB3051-071-Q1-K1-G8
aaataaaggagaaagaaaaaggaggtttgagagactagaagaggattgggatttggcaggagatttagattagcatggaatcaagaatggagtgtagtagtcatcaacaacctcagtcactgtaaatttttttggttattatttatctctctcaaatgcatatgcaatcgcaatcaattgcaaagcatttcggatccagagggagagaccctttgtgacagcctgtatcctctccatcgtctgatagattcttcattttttttccatttctcgcggcaagatctcacactctgcacctagggttagggttttggttcttgcggcatggcgacttcttcgagttcttcgagctggcgcgagggcatgtccttcgacaacataaagggactgtgcctcgctctctcttctagcttcttcatcggcgccagcttcattgtcaaaaag

SEQ ID NO: 32037 - DNA, 325 bp, Glycine max
  Clone ID: LIB3051-071-Q1-K1-G9
ttaaagttcattgggcattggcggattctatttccttttctcaaaacccaatttgcttcttcgtcatgggagcactctccttcatcatccccaaagactcttgttctcttctccttcgcactccttcttcatattcctcttcgtctgtcagaactccgtcttctccacttgctttcttcaaaaccacccaacactctcactcgcctcaccttttccgtcttcgcgtttttgccctccctaaccccgactccgatgaacccaccaactacttcactttagcgtctcatcctcaagaaaatttaagccattctgagactgatagttc

SEQ ID NO: 32038 - DNA, 184 bp, Glycine max
  Clone ID: LIB3051-071-Q1-K1-H1
tccgacgcgtaccggtctggagtctaatcctacatcagttactatatctatacttgctttttcagtctcatcctctgtctcgtaaacaagggagtgccgtctcatattaccttgatcacactttcactcttcatacgtgacctggcatctcgtatcagtatctcgaacacacaatacatacaca

SEQ ID NO: 32039 - DNA, 62 bp, Glycine max
  Clone ID: LIB3051-071-Q1-K1-H10
acggaaagcattccgaatcatcctgctaattcctttcaattttcaatacttgctagagacca

SEQ ID NO: 32040 - DNA, 323 bp, Glycine max
  Clone ID: LIB3051-071-Q1-K1-H2
acgttacggttcattcgacattgaccaattctatttccttttctcaaaacccaatttgcttctggtgcagtttatcactatccttcatcatccccaaatactcttgacctcttctccttcacactccttcttcatattcctcttcatctgtcataactcctacgcctccacttactttcttcaaaaccacccaacactctcactcacctaaccttcttcgacttcacgttttttcccttcctaaccccgacgcctattaacccaccaacaacttccctttaacatctcatcctcatcaaaacttaagccattcttaaacttat

SEQ ID NO: 32041 - DNA, 250 bp, Glycine max
  Clone ID: LIB3051-071-Q1-K1-H4
cccacgcttacgcccactcgtccgaccacgcttacttatcgcactcttatatcttcatacaggacaggccaaaaaccaaaccacccccgattcccgaaaccctaaccctacctccttgcccctatgcccatggcttacaaacgaaagcttcgaacctccaacccataacctaccaaacccgtcgagccacaacaacataaccatgagactgttgaactcgaccaacatcaacccatcccctaaccaaccc

SEQ ID NO: 32042 - DNA, 471 bp, Glycine max
  Clone ID: LIB3051-071-Q1-K1-H5
caattccgagagtgatgaagggttgttacttgggatctgtagggatggacgaagaatgaaagtgaaaagtgaaaagtagagatggaagaagaaaaagcagcggcatactacgacgagctgagccgtaagggcgagggagccgcgaggttcaagcaaggtctcggcttttcctcttccgcgccaaacgacgacgttccaaaaccctcctccttcctctccaaattcgtcaaagcctccttcactgcgccttcaaactctgagaagcaagcgcagcttcaatccatccaccacaagctcaagaaaaagccctcttccgagtctaaggtttcgagcagcgatagcgatagaagtagaagacgaagcagagatagatacagggaatcgcggaggcgaagtatgagtagagaaagacatcggcataaggagaagaggaaacggatgagtagaagcgtttctccttgcaagcaacgc

SEQ ID NO: 32043 - DNA, 284 bp, Glycine max
  unsure (1)..(284): unsure at all n locations
  Clone ID: LIB3051-071-Q1-K1-H6
gtagcggtagaggtagtagaagtttgtgtaaagaaagaagaatggaggaggaaggtgacatggacgacggtgttcgagctcagttccctctctcattcgggaagcaatcgaagcctcaaacccctcttgaagccatccacaatgcgacacgtcgttccaattccaatcccaaaacagccaacgaccttccttctgtctcctcctcttccagggattggctcaattccctccgccctcccaaaacccctactnctcctnctncgctgncgncgncagatcacgac

SEQ ID NO: 32044 - DNA, 283 bp, Glycine max
  Clone ID: LIB3051-071-Q1-K1-H7
ctatcgctagaggtactataagtctgtgtgttgaaagaggaatggtggacgaaggtggggtggactacgttgatcgagctcatgttactctctcattcgggaagctatcacaacctgatacccctctagaacccatccacaatgcagacacatgcatgctattccaataccaaatcagacaacgaccttccttctgtctcctcctatttcacggatctgctcaattgcctacgacctctttaatcctctactactcctacttttttatcgacgacagatcacg

SEQ ID NO: 32045 - DNA, 143 bp, Glycine max
  Clone ID: LIB3051-071-Q1-K1-H9
gaaaaacttgctttccatcgccctggaagtttataaatttcgtgctgaacatgctaatactagatacagaaatactaaagctggtatgtacatctataacactaaccccttattctacaaaatatgctcatctataagaatct

SEQ ID NO: 32046 - DNA, 382 bp, Glycine max
  Clone ID: LIB3051-072-Q1-K1-A11
ctgtgactgaacatgtggagagaatccgtatgaggaagaacaatgatggtgtggatgtgagggaggatgctatagttaaaaggcaatatgcttgtcctcctggggatagattggcaagacgcaacagccttggtactggtggtttgtctgttgaagctgtatctgatagtcaagagttgagaagtgtggagtgcaatcatttgtcaaacagtgggcaagatgatttggatagaacagagtctcctgaagctgcttcaaattctagtgtgattacatctgttggttcttctgaagatattgtatctgtgtaagtggctggttgtgttgagaactccaggggtgttgaaatgatgaacaatggaaggttcgaagatactactta

SEQ ID NO: 32047 - DNA, 146 bp, Glycine max
  Clone ID: LIB3051-072-Q1-K1-A12
ctgttccatcgtcaaccctacctatccatcttcgtatgaccttcatgtttgaagacctaaggacggatactatatttctgacagcgtaatcatgtcctgcttcgtatggctaacggttacttatcacactccgtcttcttggtttc

SEQ ID NO: 32048 - DNA, 169 bp, Glycine max
  Clone ID: LIB3051-072-Q1-K1-A2
aaaaaaaaaaaaaaacaaaaataaaaaaaataaaaaataaaaaaaaagataataaaaaaggggggtcgctattaacgttcccggcttacgtacacaatcatgcgacattatatggtattctatattgacacccaagccaataagtggcacgtttttaacaagcgtacac

SEQ ID NO: 32049 - DNA, 287 bp, Glycine max
  Clone ID: LIB3051-072-Q1-K1-A4
cactttcactggaatcacaatcctgaaacataaacatcttatcatttaacatactactagacgacagtgaccaccacattggaaagaggtttctcggaagagcaagaagctctggtggtgaagtcatggaatgtcatgaagaagaattctggagagttgggtcttaagtttttcttgaaaatatttgagattgctccatcagcttagaaattgttctcattcttgagagattcaactgttcctttggagcttaatcccatgcttaatcttcattgctagtctgactt

SEQ ID NO: 32050 - DNA, 358 bp, Glycine max
  Clone ID: LIB3051-072-Q1-K1-A5
cccacgcgtccgggaaaccgttaaggcagatctatcgtcgaacaaagtgactgttagcggggaattggatgccgagaagctgcgagataagatcgccgagagaaccaagaagaaggttgacatcatctcagctccgcccaaaaaagaagccgccgtcacggaaaatccaccggagaagaaggttgaagagaagaaacctgaagagaaaaaaccagaagaaaaacctaaagagagtatggtggttttgaagatcaaactgcactgtgacggttgcattgcgaaaattcgaagaatcattatgaggttcaaaggtgtacaatcggtgagccttgactgaagcaaggacttggtgacagtg

SEQ ID NO: 32051 - DNA, 239 bp, Glycine max
  Clone ID: LIB3051-072-Q1-K1-A7
aaaaaacaaaaaaagcacctaataataaaataaataaaaaataacaaaactaatcaagggccgggcatacgtactcactcatacaataacataagcatacctatagtgtcacataagataggttgactgaccttccatttacaacaaaggtcactggaaatacattgtgcacttacacaacttattcgcaatacaccacatacatttttacacactttcacttttacatagacggctca

SEQ ID NO: 32052 - DNA, 416 bp, Glycine max
  Clone ID: LIB3051-072-Q1-K1-A8
caactcaataacagatcaaaccaaacccaaactgttaggtttcctttgtttggtgtgaagcgatggctgattcttcttccaacctgaaatccgacgcgataatggagcagatgaagcaacacctcgccaccgacgctggcaaacaagtcaccaataaaattggactcgtttatcagtttcacattgctcctaagaaacttggattcgacgaggtcgtctacaccgttgatctcaagaaaggagaggtcaccaaagggtcatatgaaggaagaaagcctgatgcatctttttcgtttaaggatgaggactttgttaaagttgccttagggaagatgaatccgcagattgctttcatgaggggtgcgatgaagattaagggaagtttgagtgctgctcagaaatttactccggatatc

SEQ ID NO: 32053 - DNA, 381 bp, Glycine max
  Clone ID: LIB3051-072-Q1-K1-B11
ctttgtgtatctcctataactgtacaactctttttctcatgcttacttttagtattgatgaggatgacttttacatgtgcttgtgttgattcaggttctcagttgttccatttcatgccaattatccactgtctactcaaacccaattgttagttccttccaatcttagttactcctttgctacaacaggtagacacactctcactgtctttgacttcttcccttgtcttcatttcttatcataatttgtttactgcaatgctttctctgttggttgcacgaaccagaaagttcaagtcttttcagctcaaagctggattttgggaatcaattaaatctgggttgatgaacaataactccatgcacgtcattgatccaccc

SEQ ID NO: 32054 - DNA, 207 bp, Glycine max
  Clone ID: LIB3051-072-Q1-K1-B12
tcttgatcaaaagtcgtagaactagaaggttaggttgagggcgatatgaaggtaaccaaagggaaggaaactaaaattgttctgacataaccctttcaattggaaggtgaatcagatttagaaccgtcttatagagctcccaatcttctacatcgcttgttaagtttactcaagaacgtgcggccaggatcagatcttacacacttt

SEQ ID NO: 32055 - DNA, 216 bp, Glycine max
  Clone ID: LIB3051-072-Q1-K1-B4
ctcaagcgtacttactcaccaactacgctattctcaaagacgctgcttcattcaactgtcacgtatcggtgctccattcaccagatggcagtgccagacttaaattctcaacatcttaacactcatcacttccaatcactcccaacacaccaactattctcatcactatccctgcatactctcataatctgagatactttcacaccttttaatcca

SEQ ID NO: 32056 - DNA, 342 bp, Glycine max
  unsure (1)..(342): unsure at all n locations
  Clone ID: LIB3051-072-Q1-K1-C1
cgtctcgtggtttcttgctgcatatggttgcctcataccacataatcaacatcctatctaaagaattaatgccttcttaatgtagctgatgctnacttaaggagaatctgaaataaangntatttttcaattcnttaggtgatgtattcatgtatttgtatccaaaanntattttggtaccgtaaagtnncttttaaaaaggtttgcatttctctctctttgtgttttcccttaagttctgataagttattctcctaatgaagacctaatcatatgtacctgtactgtagtgtgaatgatattagtatttgtattgctgtcagaatattgtattgtctaata

SEQ ID NO: 32057 - DNA, 422 bp, Glycine max
  Clone ID: LIB3051-072-Q1-K1-C2
gttttgtgctagtgagttttttcttaaaaaaaatttagtttttgtttttttggaattgcagaattgcctggagttcggtgggtgcttcctgattcttacttgaatgttaaggaaaaggattatggaggtgagccctttattaacgggcaagctgctccctatgatcccaagtatcacgaagagtgggttagaaacaatgctcgtgccaatgagagaaacaggcgcaatgacaggcctcgtaatgctgacaggtcaagaaactttgagaggaggaaggaaaatgtggtaaacagagacatgcagggcaggccttcttcgccaaatcctggccctaatgtgggcggtccttcttcaagcaatgcagctgggtacccttcaagcaatgcagctgggtacccttctagcaatgcaggatatgcccc

SEQ ID NO: 32058 - DNA, 342 bp, Glycine max
  Clone ID: LIB3051-072-Q1-K1-D3
caaagcacgacttagcttaggaaataagaaataatggaataaccggtagccaaacaggtcagagccgaagttgatgggtggttctacttgtttctgcaaagcacaagagcaaaaccctacttgaaccctttctctctctcaggtcactgctcacaaacatcacaactatgtccttgggaattcttcgatcccgagcgatttcattggcatcgaagcgattcctctgcaccaatgccgcttccgcttcccctcctcttccccctcctccttccgccgcctctcccagccgctggagcttcctcaaatacgccctcgtcggcgctctcaccggaggcactgtct

SEQ ID NO: 32059 - DNA, 360 bp, Glycine max
  Clone ID: LIB3051-072-Q1-K1-D7
acagaagcactctttctctctcttcatttcatcttcttcagcttcagcgaaatcctgttctgaccgtatatcgtgcctgttcttttgtgcctgaaaagccacttctctacttgcgttgagtgagggagaggatgtctggtcgcacacagaacagtctgagaaaagcacttggagcccttaaggacaccacaacagtctcgttggctaaagtcaacagtgattacaaggaattggacattgctatagttagagccacaaatcatgttgaacgtccggctaaggaaaaacatataagagctatattttcagctatctcagctacaaaacccaacgcttatgtttcctattgtatccacgcac

SEQ ID NO: 32060 - DNA, 272 bp, Glycine max
  unsure (1)..(272): unsure at all n locations
  Clone ID: LIB3051-072-Q1-K1-E1
tcgggcaaacaacaacactctntctctctcttcaattcagcttcttcagcttcagcgaaatcctggtctaaccgtagatcgtgccttttcttttgtgcctgagaagccacttctctacttgcgttgagtgagggagaggatgtctggtggcacacagaagagtctgagaaaagcacttggagcccttaaggacaccacaacagtctcgttggctaaggtcaacagtgattacaaggaattggacattgctatagttagagccacaaatcatg

SEQ ID NO: 32061 - DNA, 94 bp, Glycine max
  Clone ID: LIB3051-072-Q1-K1-E11
caacaccaaatctggatggtggaccagatattccttcttctggcggctcatgcatggacaagaattgcttgaagaaactgagggaagcatcatc

SEQ ID NO: 32062 - DNA, 225 bp, Glycine max
  Clone ID: LIB3051-072-Q1-K1-E12
gtgactgcatactaaagccagatgaaaagcgacggtatgctattatgttcgacttgatctttgtgagttcttgggatcctctctctgcatgcataagtacacttgacaacaagtgtcaaaacatgccaaatagtgaacgggctgtggtcaaggaaaaaatcaaccccaaagaaagggatacatgcagtggtggaatgaatggttacatattcttatgtggtggag

SEQ ID NO: 32063 - DNA, 353 bp, Glycine max
  Clone ID: LIB3051-072-Q1-K1-E2
agcgatcgccagacactatagatatctattcgattcggcttcttgagctgcagcgaaatcctgtgctgaccagatatcgtgccttttcttttgcgcctgagaagccactcctatactcgcgctgagtgagggacaggatgtacggtggcccacataagagtgtgagctcaggacttggagcccttgacgacaccacagcagtctgcttggctaaggtcgacagtgattacaaggaatcggacattgctatagctagagccacatatcatgctgaacgtgcggctaccgaacaacatataagagctatatttctagctatctcagctacgagacccagcgctgatgaatcctat

SEQ ID NO: 32064 - DNA, 313 bp, Glycine max
  Clone ID: LIB3051-072-Q1-K1-E4
accgcccacgcgtcaccccactcgttctctcacgcttccacccactcgtccttccacgcattcgtgcactcatcctaaatattgcatggtatatatcgcctgaagacccttctctacttgcgtcgagtcaagtagagcatgtatagtggcacacacaagactctgacagaaccacttagaccccttacggacaccacaacagtctccttggctaatgtcaacagtgattacaaggaatcggacattgctatagttagagcctcatatcatcgttaacgtccagctaatgaaaaacatataagatctatatttt

SEQ ID NO: 32065 - DNA, 338 bp, Glycine max
  Clone ID: LIB3051-072-Q1-K1-E7
caaagacagagaaaaaatccaaagagtaaatggaacagaagagaaagcttgaagctagggtgaacaccattgaaaggagtgaagagaccaaggtgatgaaagttgatgtagaaacgttcaatctgtttacttcatgcagagctctcgacttcatcttggactacatgtatttcatgtcactacaatacctttagttcattatttattgtattttgttcttgattcttgtccttaatttatcataaaaactcttttcattcatagttttagaattcatatcaagttgtttatattttctgagaaatgaatatggttcttttctattactttgaatttat

SEQ ID NO: 32066 - DNA, 419 bp, Glycine max
  unsure (1)..(419): unsure at all n locations
  Clone ID: LIB3051-072-Q1-K1-E8
cacgcgtccgacaaaaactactatttttgtttcctatacagcagggaagaggaaccagttattttcggtgagaagtacaccggaaagtttttgcctaaagaaatcatggagggaatgcgagacacaaagtcacagcttgaaatccaagaccaagagggtactaatattgggtcctctttgtcaaagctcatattagcaagtggcagtggcacaaacacccttgactcaattttctccaattgcccacaaacaacaaatggcagcactagtagcaactccgtgttagatgatttagaaccctttaagtcttcggggtgtgagtctttaggctctttcgtgtaccttcgccaaaaggacatcctncaaaaattctaccaagaaagccgaagaaatgggaacaataacgggtcttataatat

SEQ ID NO: 32067 - DNA, 444 bp, Glycine max
  unsure (1)..(444): unsure at all n locations
  Clone ID: LIB3051-072-Q1-K1-E9
gatggagaaaactgttgatatcaatgagaacagtcaatttttggaagatctagaaatgcttagtgctgtacatgatgaacacctgccaagtttcaaagaagagacaagcacagatcaacctcaagatggattgggtgggatcaagctacagggaaatcccttggaacagctagggttgtacatgaaggatgaggatgaggaggaggatgaggaggaagaggatgaactgcctccgagtggtgctgtaggaccatcaaatgatgttgaagaaggagagattgattgatttgttccccttgattgttccattattttgaacggatatataaacggtatttctggggaacagttgctggacttagagatgctgcttttttgttgctacggngaacagttgctgaacaaataattacgggttgtatgtctgatgctggttcacaccta

SEQ ID NO: 32068 - DNA, 360 bp, Glycine max
  Clone ID: LIB3051-072-Q1-K1-F1
cccacgcgtccgcccacgcgtccgataatggaagcagtcatgatactgatcttaataaaacgccacggcaaaaaccaaggagaagaaagcaccgtcccaaggtcatcaaagaaggcaaacccaaaagaactcggaagccagctaccccaaagcctgttcaatcaaaagaaaagcaacctgtcaagaggaagtatgtgagaaagaatgcactgaacaagacttctactcctccaacagaagagactggggaattgactaaagaaatgtcttgtaaaaagtccttaaatttcgacataagaacaacatatgaaagttctgctgccatagaaaatacaagaacgctattgggaaaagaaaatg

SEQ ID NO: 32069 - DNA, 401 bp, Glycine max
  Clone ID: LIB3051-072-Q1-K1-F12
gaattaacaagtaaagcaaatctcactttttctctctatctttcctcttctggtgttcattggaaaggaatatatagactcgaatggaaaatgaagagttttggagctgattttgaagaattttggctatgatcttttcaagcacatgaatttataaaagatcagatttcaggaaacaagctcagataatttgctgctgctgccatgaaggagtttccttcttgttttggagaaaatggtgttcgggttgtagattcctcctattcaagcaccacaaggggagcacaaaatgctgttacttgtgtctatcagtgcaagttaagaagtcgttcatgcttgatcactgtctcttggaccaaaaatttgatgggacaaggcttgagtgtgggaatagatgaatt

SEQ ID NO: 32070 - DNA, 252 bp, Glycine max
  Clone ID: LIB3051-072-Q1-K1-G10
atttactagctagtgatctataagaccacggtcagttctgaaaaatgggttccaaggctttgcttggtgtaactatgttcatagcggctatacttctgatctctgctgaggatgcaccccatgaatacgataatttcaacaaacacgacgggaagcatgctccaaatggaggatatgatagcaaatggcgttccagagcttggagtagaccttgctactgcggctgtggtggcccttactatggatgcagct

SEQ ID NO: 32071 - DNA, 362 bp, Glycine max
  Clone ID: LIB3051-072-Q1-K1-G2
gatatctggagagacaggcttcctccactgtgaacgcagggtcattatctgacttatctaacgtagcgaatgcaagcctttacggctttgaggattaccatggaatagacatcggagttgttcgagctgttcgcctatggtatgctccggttgcaggagagttctctattgagatcaaactaaaagaggaagatgcaaagcttggctttgccattagtcgaactgaagagggatttattttcatctcatcagtgattaatcaagaaaatgtaccggccgcacgatcagggctgagcaatctctataaactagcaacggatacttgtaggatgttggtagtttcaagagtgttcaatcaaaaa

SEQ ID NO: 32072 - DNA, 146 bp, Glycine max
  Clone ID: LIB3051-072-Q1-K1-G4
cactgcttctttctttcttgcagcgccgattgctgcatcctcctccaataagagctcgctagtagcgagaccctaacacggcggcaacgtgaggtgttcggtatatgtacatttcagccatggccgcatcaacccccacttctctg

SEQ ID NO: 32073 - DNA, 266 bp, Glycine max
  Clone ID: LIB3051-072-Q1-K1-G6
tcgcccacgcgtccgccctaatcaaactgtgttgtttgcttaaaagggattctgtgatgtttctgttttttgttcaaccaaggtttttgtttttgatgatgtgtagattaagtagtttcattcgaagagaaatgttggagattggaggaaaaaaatagtactttgggtacacctaatctgattttttttttttctttttaaatggaagtgccattcacatgtgcaattttgattcacaattttaatgcaattgagttaatttttct

SEQ ID NO: 32074 - DNA, 284 bp, Glycine max
  Clone ID: LIB3051-072-Q1-K1-G7
ctcacacttcctccctaatccaactgttttttttccttaaaagggattctccaatgtaacggtcctttattcaaccaaggttttcccttttcatgatctgtagattaagtaacttcattccactagaaatgctagtaatcggactaaacaaatactacttatagtacacctaatctgattatatattattctttttaaatgcaatttccattcacatgttcaatcttgactcacaacttttatgcaacttaattcatttttctaatacatataccattcacata

SEQ ID NO: 32075 - DNA, 304 bp, Glycine max
  Clone ID: LIB3051-072-Q1-K1-G8
atcacacgttaccactaatacaactttgttttttccttacaaagaacttctccaaggtacggttttttattcaaccagcgtttttccttttcatgatgtctagactaaaaaactccattccaatataaatgttagagaattgacgaaaaaaatattactttaggtacacctaatctgaatattttttattcctttttaaaatgaatttccattcacattttcaatttttattcacaattttaattcaacttaatttatttttcttaaacaaaatcctcttatatacctttaaaacaaaaggctt

SEQ ID NO: 32076 - DNA, 51 bp, Glycine max
  Clone ID: LIB3051-072-Q1-K1-H10
ctccacgcatactaaaaataaatattctacattttaatagctggaacttaa

SEQ ID NO: 32077 - DNA, 423 bp, Glycine max
  Clone ID: LIB3051-072-Q1-K1-H11
gttaagatccttgttattattccttttcttttgagactatgttcttgtttggtgtcaaacgggtagaggattttcttctagtaatgatataaaattgttgatgaataagatggtgggtggatgtggatcaatcagtccatcgttgctcatttaatgggtctctgtctattcttccagatctgattcaattccgaattttccgccctattgatatttccaaatccacttgtctttatgtgaagcttttcaaatttgcgcaagtatctgtatttacccctgcactcactatctctatctgtcaacttccagtgctggaaaattcctttcaattctggctctgctttgttccaatttccaaacccaaacctacccacactttcgatcattgtcacactctgttgaactgaaaacataattgctact

SEQ ID NO: 32078 - DNA, 410 bp, Glycine max
  Clone ID: LIB3051-072-Q1-K1-H3
cccacgcgtccggcccgggcgcggtgtccattgcgggccgagtgtttcggcccgcccggaagacgtggcggcccactagccacgttgtcgaatacggcgtcgtcttggactccgacggcaacgtcatcgatgaggttttggcggttccgatgctggcaccgaggtcctacacgcgcgaagacgtggtcgagcttcagtgccacgggagcgaagtgtgtctgcgccgcgtgcttaggacttgtttggaagcctgagcaacactcgctcaaccaggctagtttactcttcgcgcttttcttaacggtcggttggatctctcccaagccgaaaacgttgcaagattaattgccgcgaaatccgtggctgctgcagatgctgcactggaagggatccagggtgggttctcttct

SEQ ID NO: 32079 - DNA, 432 bp, Glycine max
  Clone ID: LIB3051-072-Q1-K1-H4
cccacgcgtccgcagtgaactcttgccataggttatactatgacccccactgtgttcagtgtgttgtatggctgagatatataagtcaaaggtcatcaggtagcaaagcaaattttgggaacttacgggataaattcttataattagcattctatgctggcctagaccccacttgaccgcaatacgtcaataccaaaagaagaaaagaacaaattcctcaaatgcttaactagctgaaatgttcagggtaatataaagcagaaatcctaagatatgcggacatattttaagaagttttgtggaaagtagaaaaacagatttcaaaaaactcatcacatttgaagatattaagatgctacagaatttcaaacacaaaccaactatattataggaaaatataatttagtggtctccattttccttggggccggc

SEQ ID NO: 32080 - DNA, 306 bp, Glycine max
  Clone ID: LIB3051-072-Q1-K1-H5
cgttgctaattgcttgcacttcctcctatggttgcttcctttgtttctcattagctggtttggtttttgtcttagttctacacctttcctcatttccgcagtagcaacctgcgaaccaatctctctgagaaaaaaaaaatggcgtcgaacgggaatggcagcgttgcgaacgggaacgggaccgctaggaacggactggcgaagattcagacgcacaagaagcataacggaatttgtcacgacgacagcggtccgaccgtaaaggctcaaaccattgatgagcttcactcgcttcaaaagaagaaa

SEQ ID NO: 32081 - DNA, 437 bp, Glycine max
  unsure (1)..(437): unsure at all n locations
  Clone ID: LIB3051-072-Q1-K1-H6
gtgaagtgtgctttccaaatttcctttactcattcatagttttctttctttctcttggggccggtgtgagggagactgagaccgaagcaagagtcgatggcggacccctactactcatacggtgctccgggtagcgctgacggagctagcattgcaagggagcagctttgctggttatatcccctctgagccttcaaattccactgaattgaggggcattggatcagattacctgcagagagatataggctngttttacagtgctgatgataccttgngctccagagttcattctgagcctgttaagggttattcgcctcttgcagatccctgtctgagtaaaaaacgagatacaacaccattgggcattaataatggtgttcctgatgtaagcagtgaaagaccagcttctaaaagcagttatgacggtctaccaa

SEQ ID NO: 32082 - DNA, 384 bp, Glycine max
  Clone ID: LIB3051-072-Q1-K1-H7
acaccttctctattttaagtaattcaatggcttacactgcaagtctcgtgttcttagcttgggctttccttatcataaactttcctcttctggcaaacgctatcggatgcaatggaccatgcagaaccctcaacgactgcgacggccaactcatttgcatcaactgaaggtgcaacgacgaccgcgacgtctgaacccacatctgctgcggcggaatgccatcaaatccgccaccaagcggcggaagctgccagtcctcgggaaccctaaattgcggctgaaaatcgtatcctcagtaccgttgctctccgtccgtaacttgctcgacgccggcgatcctgacgctgaacgacttcagcgaaggccgctactgatgggacccgt

SEQ ID NO: 32083 - DNA, 221 bp, Glycine max
  Clone ID: LIB3051-072-Q1-K1-H9
caagggctgcgtatatgaattgcctttgctttgatgcatggaccatcaccctgatccctcggtgagctcgattgttcttggagagtgcgtacatctcatgcagaaaagcctattgcactacgacattacacactgggaaaccaaggtcattgctgctaagtatgggttacatgatcagctcaatgaagcattgcaccttaagaacagaccaactgactatg

SEQ ID NO: 32084 - DNA, 326 bp, Glycine max
  unsure (1)..(326): unsure at all n locations
  Clone ID: LIB3051-073-Q1-K1-A1
gtgtaattattccaaaaccttgtttcacttactagctaagaagcaaaaggagagcaccgnctggcactgcgcatgcagagaaaaacctaaagtggcggaagatgacggaggtggcgagatcagtggtgcacgacgttttggggcaaagagtggtcgacgtggaccagccaatcgtcgattatatcgtcaacgtcctcgccgacgatgacttcgatttcggcctcgacggcgaaagcgccttcgatgccctcggcgagctcctcgtcgccgccgactgcgtcgacgatttcttccactgccgctccgtatgcatgacgctgtgcgac

SEQ ID NO: 32085 - DNA, 236 bp, Glycine max
  Clone ID: LIB3051-073-Q1-K1-A12
atgaagaaataataataataacaccccaatagaatagaagataggataagtcagtagggaagagccctttgtggttgtggttgtgggtaggtgctgctgctgcttccattcctattcttacagtgaaggttcaatggaagggacaatgcagcttgcatacgagactgttgtgaagctcatgctggctgcactcgaacgcaacgtgcttcctgacgtcatcaccaggagactcacgc

SEQ ID NO: 32086 - DNA, 317 bp, Glycine max
  Clone ID: LIB3051-073-Q1-K1-A2
cccacgcgttcgcccacgcgtccgctcaatctgaacagattgaggttgaggtcgaagttgtgcgtgagcaccccaataaaacacctcctgttgttggttatttcccttccggatttgatccggtcaagaatcatggcggcggtccctccaattttcaagtttaccggcacaggagcatgcccaagatgctggagcttgtggttcgcccttcccggtcttcagtggaatttgttggaaccagttatgctggcgaggctgcggtcagacaccgtgccaagtacgcacttagggttcttgacaaggaagccggtacccct

SEQ ID NO: 32087 - DNA, 246 bp, Glycine max
  Clone ID: LIB3051-073-Q1-K1-A3
gcctatctttcgcacacccttgcgctaaattctaactgatcatcgttaaggtagcacttgagcgcgaggagcatgcttagacagatcctgatgttcggtatatgacttccgtatctaaatcagtcttgcatcatggcttcggtccctcagattttgaagtttaccagcacatgatcattcatatcatgctcgttcttgtcgctagtacttccatttctgactggaattcgatggaaccatctatgc

SEQ ID NO: 32088 - DNA, 318 bp, Glycine max
  Clone ID: LIB3051-073-Q1-K1-A5
ggcactgatcgtgcaaggagtctgaccacttggagtctgaatgtgtatttgtagcagaacggagtgtaacttacgaagctgagataaagcttggaagtggtttgctctcataaaattataatagtttagagactataaaacatcaaaacaatttccggacgcgtgggtccaaattctcacttagatcggttgggaatcgatgattttgatgtggaagaagaggtgagacctgattttccttgcccggattggtatgaagactttgacattgcgtctttggcttctcatcttggagattgacattcttgggaattaagg

SEQ ID NO: 32089 - DNA, 221 bp, Glycine max
  Clone ID: LIB3051-073-Q1-K1-A6
cccacgcgtccgcccacgcgtccgcccacgcgttcgccagttacaatttaacattaacatcggcctaaacgccaaaccccccatgcccttttgatcccatcccacaattcaatgccctaacctaaccttccaaactacaaacccgttcggcagtttcccgtgctggacctcatcttgggggcgttctttggcctggggttcctctttttcatgctcgtctt

SEQ ID NO: 32090 - DNA, 178 bp, Glycine max
  Clone ID: LIB3051-073-Q1-K1-A7
cacgccgttacgaagcttcgagttcagagggtcgacgcatcatagcattcaagctacggcggcggataccaccgttcgacgccgatctttttccaccgtttcttcatagagtaaagtcttcgcttctcccgttcatttcttcatatgaacgtcatggcattgtatccgtccaggtata

SEQ ID NO: 32091 - DNA, 169 bp, Glycine max
  Clone ID: LIB3051-073-Q1-K1-B10
gaagaagggaagcagatagggttctagtatttataaaaaggtaatattgaggatggtgaaggtggaaattcatttaatgtaataagtaaagagtgattagtagtaattaggggtcaagaaacaaagtggagatcggagagagagagagagagagagaggtgggaaagga

SEQ ID NO: 32092 - DNA, 191 bp, Glycine max
  Clone ID: LIB3051-073-Q1-K1-B12
atccgttacaattgcggtggtggactggatctgtgtgctggaaaatctgcttccttgaatggcctcattggacatccggctttgccaactggtgagaatggtgctaccagggctcccattagcattgaatcgaatagagacacctctttaagcagcaagtcaatcatcctgcatattgacaattcaactca

SEQ ID NO: 32093 - DNA, 359 bp, Glycine max
  Clone ID: LIB3051-073-Q1-K1-D1
cccacgcgtccgcccacgcgtccgcccacgcgtccgcttttatgtggttggcttcctttcgcggtcttctctgcaaatgcttcattccaagatggttaggactctgtaggctgataaagacaacactcataccgttggaaagaaagatgctgctggccatgttgcttaatttagttcttgcttcctttgtcttcttgagttttatcagagacgggagtgcagggatcactagctctttcattcggtcagagtggccggcagttgacatcccccttgatcatgaagcatttgcagttccaaagggttataatgcacctcaacaagtgcacatcacgcaaggtgactatgatggaaaagca

SEQ ID NO: 32094 - DNA, 260 bp, Glycine max
  Clone ID: LIB3051-073-Q1-K1-D12
acgaattatataactgcaaatgataaccatctgtgggagatgcagtatgttgcactgtttggtggtcgtgctaaactggttgaaggcaagaacaataggcttttgctggaacccatagatactagaatcattactgattggaaagaagctgttaaaggagcatatactggagcattatccaggatattaacaatccagtcgggatattgtggacactgcaaatcagtaggttgggtaaaataactaaaaatccccaaatg

SEQ ID NO: 32095 - DNA, 112 bp, Glycine max
  Clone ID: LIB3051-073-Q1-K1-D4
cctagttcttgctgcatccaataggcctttctactgggatgtagctattattaggcgattggttagatggatgatgaggatgtcttccatctgtggagaacagggaaaagat

SEQ ID NO: 32096 - DNA, 165 bp, Glycine max
  Clone ID: LIB3051-073-Q1-K1-F12
cactcttatccttttgcaggagcttcaaagttaaagtgcgccttggggttgtttgggtagctggaatctccattacgtggatgaatcttctctgtgggggcacggaacagcaaaacaactaggaggaatatttggcaatgagttaattttattcatgtatacatt

SEQ ID NO: 32097 - DNA, 315 bp, Glycine max
  Clone ID: LIB3051-073-Q1-K1-H11
agccctaactcatttacaaccaaagtcttaaatttcacaaacttatacaactattactgtcatgacatattacaaaatatctaaactaacataatactaaatattaataactattaacatcataacaacccatccttcactaactcaatcatttataccaacacctattcatatcataataccttaacaactattgaacctaatcccatctgatccctagttctcctacataatctctcccatcatctaaaacattccatatactaatatactctttattcttacctaaaaaatctttaaatatactcctataac

SEQ ID NO: 32098 - DNA, 321 bp, Glycine max
  Clone ID: LIB3051-073-Q1-K1-H12
tcgccacaatgtattttattttatttattcttatcagtcacgaaaagcaattgccattgaatttagccaccattttttttaattctggtttatcaaccctaatttttaattatttttgcattttcattcaaagattcctttcctttccctctttgaaattcaagtgtttttaagaacaggccaattcagttgatttgcgtttcatattattcggctcggtatcaatcgagaagaaaaaaagcttctttttttttttttcggtttaatcggtaaatttgtcaagtttagggttttgtgcaattttgatttatgtgcgttctc

SEQ ID NO: 32099 - DNA, 324 bp, Glycine max
  Clone ID: LIB3051-074-Q1-K1-A11
tcgggggaacatggagtggacaagaaaaaaacacgtttgttctgctgctgctgcacggaatggttcggatgatttctatgatggaatcccacggtttactgattctttttcccacaagtctaggtcagttaaatcaaggcatgctgtggcgaatgtctcagaggtgagtttacgcctgggcagagctggtattgacgttttggacactcttggaagcagtatgacaaatttaagtgctggtgggtttgtatctggagctttgacaaaggggaatgaaattggtattttagcatttgaggttgcaaacactattgtcaagggttt

SEQ ID NO: 32100 - DNA, 102 bp, Glycine max
  Clone ID: LIB3051-074-Q1-K1-A2
gccagctggccttcgctggccccgttccggctttaccgtcgagcgtgaccccgtgtttgatagcaccgaggagattttgtgagcaatgtagtgctaatgatc

SEQ ID NO: 32101 - DNA, 412 bp, Glycine max
  unsure (1)..(412): unsure at all n locations
  Clone ID: LIB3051-074-Q1-K1-A3
ctggctggttgtcgaagggtggatgcaagaaccatctctctttgatggaattgtcagcaaagatctcttggatggaactcaagtgcaacttaagtctacaaagtttaacaagtatctcacttctgaaaatgggggtggagctgatgttgtagccaaccgtgactcagcttctggttgggaaacattcaagctgtggaggatcagtgactcatccttcaacttgagagtgttcaacaagaaatttgttgggctggaaaatcatgggggtggaaacaaaattgaagcagtttcagactcaccaaacaacccggaaacttttgagattataagggatgacaacgaccccttcaaaattagaatcaaagcatcaaatggccactttntacaggntggatcagagacatcagtgact

SEQ ID NO: 32102 - DNA, 290 bp, Glycine max
  Clone ID: LIB3051-074-Q1-K1-A4
ctctctctttctcgcgcgcgctacttattgtagatttctggttacatcaatttgtaagtgtatatgttggtgatcttcacgatcccgagtgtgggtttcagatactatctagtttttcttttaatttcattagaagaatggaagtactcgaaggatttcttttcgctttcaagttttggatctacacgacgaatcccaatccttacccttatgctaatgcaaggggaatttccgggttccgttccaacatgttcatgatattttaatctgatagctattaatataatgat

SEQ ID NO: 32103 - DNA, 284 bp, Glycine max
  Clone ID: LIB3051-074-Q1-K1-A5
aaacttttgatcattgaagcagatttagaagaagcaggtaacgtttgttttattcgttgtttgggtcctttgagacgaaggattcgatttgatctgaaatagcttgattcgaagaagaatgaatggcggtgagaaagaggctatggccgaagtgaaggaatggcttgcgaagacgttcgaaagcgcgggtaaattcgttcctgaattcgaatacacgccgggcagcgtcaaacatttggaccatctcatgactcttttcaaagccaaagacgaatccgcgcgcc

SEQ ID NO: 32104 - DNA, 308 bp, Glycine max
  Clone ID: LIB3051-074-Q1-K1-A9
ggggaacatggagtggacaagaaaaaaacacgtttgttctgctgctgctgcagggaatggttggggtgatttctatgatggaatcccacggtttactgattctttttcccacaagtctatgtcagtaaaatcaaggcatgctgtggcgaaagtctcagaggtgagtttacgcctgggcagagctggtattgacgttttggacactcttggaagcagtatgacaaatttaagtgctggtgggtttgtatcttgagctgtgacaaatgggaatgaaattggtattttagcatttgagggtgcaaacacta

SEQ ID NO: 32105 - DNA, 55 bp, Glycine max
  Clone ID: LIB3051-074-Q1-K1-B1
acgcccacgcgtccgaaaacacagaagaataagaacttctcttcttgtaattacg

SEQ ID NO: 32106 - DNA, 372 bp, Glycine max
  Clone ID: LIB3051-074-Q1-K1-B12
ctcgctctccgtatagcaggtcacctgtcagcatgcatgacagatcatactctgcgggtgaagtgcgatatgactcggcggatgcgcactcctacagaaggcaccgttaccgatctgtttcacgaagtgcctcgcctgatgatccttattatggaaggcaccgttacaggtctgtttctcggagtgcctcacccaggccaaggagaaggtcaaggaggagctactcacggagtgctacacctgtttcaaagagaagcaactcacgaaatgtgtcctccaggtcaaggaggagccattcaagaagctctaagaggagtggcaaatgtgagaaacgctacttaagaagctcgagtgtgaatgcaagttcaagat

SEQ ID NO: 32107 - DNA, 182 bp, Glycine max
  Clone ID: LIB3051-074-Q1-K1-B2
caacaagaacgatcagcagctattctctcacggtcatttaaaatgtgccatgataagctggtgagaggagagagtattattcttcatggagactcaaggtaaatgatttgtgaagccgcatagcaaatgcaaattaatctcctagtcttgggtagccggggccttggcacgctcaaaagaca

SEQ ID NO: 32108 - DNA, 407 bp, Glycine max
  Clone ID: LIB3051-074-Q1-K1-B3
ggcttcatcaacgttgctctcggagctgatggtggcgatcgggaagaacaacaacacgggagagactaccgtagtagaagctcctgggctgaagtcgtctcccaggatcaacaagatcaccctcttgctcatcaccaacacaaggaacaatatcgtcctcagcacgaggagccccaatctcaaagttcctacaaaccctagaaggtggatgaaggtgaagatggatggcagactgttggtagaaagccttcaaggcatgcacataaggttcaaaaggactactggaacagctattaacgacctgctgatgagcaagaatactctaacgaggttgaagtaggagcttatgtggagccctcacaagatgtacttgctgatctgtcaagagcttgcgaaaaactctgggc

SEQ ID NO: 32109 - DNA, 387 bp, Glycine max
  Clone ID: LIB3051-074-Q1-K1-B7
cccacgcgtccgcccacgcgtccgctttgatttctgttatgtgaattcaagtgatgctgactcgatcaattttttttatggttgcgtttgcagcaaaacctattgccctttctgcgtcgatgtgaagaagctcttcggtgacctcggtgccaattacaaggccatcgaactcgacactgaatgtgcgtcccttttcaattcttttctctttttctttcgctaaacccttttatttaaaaaaatcgtgaagctgttcgccaccgaattgttgtctgataagacatgtgagtcagcctgttttcgaatcgtttcgcggcatgcttttttttattattattattgaaaaatggctgtagttctatgttaaaacatctttagtgaaagaac

SEQ ID NO: 32110 - DNA, 381 bp, Glycine max
  Clone ID: LIB3051-074-Q1-K1-B8
tcggaggaaaacctctcattgtctctatctttctctctaaacacagatttcatttacaactgtctatgtctagaaaatgggaacaacaattcttcgttcccacgattgcctccaatgcctgttccttcacaacgaaaccttttacattgccgcatcaagtgtcgcatcgcgaagaaactctaaccctaacaataatagctacgtcttctacgccaaaccaaaccgctgccggaagcggagtccggtcaccaatcgagaccgccgtcgatctgcggccaatgccaccttgacggcaaatctcttcatagcacacgcttagatcctgaaacgaggccagaaaatgagcctccataataataccaaccaaagactcccggagaa

SEQ ID NO: 32111 - DNA, 440 bp, Glycine max
  Clone ID: LIB3051-074-Q1-K1-B9
aggtcgtacatccatttgatgctcaagctgagggggagttaagcctatcagttggggattttgttgtagttcgtcaggttggacccaatggatggtctgaaggagaatgcaaaggcaatgctggatggtttccctctgcttatgtagagagacaggacatgataccagccagcaagataacagaataacttcacaggataccaacattggtcttttgattaggtgaggcaaaaattgtatattataatcacggaatagatgcagcatttgaaaagccatagcatgtgcttgccattatttttgggtggttctatcatctcatctgtgcaatatgttgtatatgcgagtcataattgaaataggaaatagcactggcagtttgaatatgtaattgatatgtttattattggcatttgctttggccctttggtcaggaactt

SEQ ID NO: 32112 - DNA, 414 bp, Glycine max
  Clone ID: LIB3051-074-Q1-K1-C11
ccaaaacaaacttcaaacataacttctttgtgaaccaaattgatattatggcagaggctcagagaattcaccctgtgcaccatgatgttgaggcacaaaaccacccttcagcaccattggtgccaaggagcatgtccaaatctgatgcaggtgatccacaacgagtagtagtacaacaacaacaacaaaacattcctctgaagcaaaccaagccaccaccgaagaaaagaagaagctgctgctgcaggttcttctgttggctaataagcatattgctgattctgatagtggcaattggcatcactgttggaatactctaccttgtcttcaagccaaagcttccaaagtactcggtggacgaacttagagtcacacactttgatcttgcagacaacaacagcttatcagtgacat

SEQ ID NO: 32113 - DNA, 305 bp, Glycine max
  Clone ID: LIB3051-074-Q1-K1-C12
tcgatccgttgctagaacataacgtgcatacgatttccaaatatgatccatgtctgagacctaaaggttacccattactgaccattcaaaggatgcactgatcagatgtctatcatcatctatggatataatcataatctaatctgatgcgtatgatccacacaatgttctggtacatcaactacctcttcaaatttttcggataatatcctatccaagtcttatgattggatcactctctagttcaacgagctctgttaacgattatgcatatggtctggtactattcagactatagtaattac

SEQ ID NO: 32114 - DNA, 152 bp, Glycine max
  Clone ID: LIB3051-074-Q1-K1-C2
aattagcatccctattatggcgagggcatagtactccgcattgtttgtgacatgatggtacctgggcacgtgtatctacaactgctctgcaatcttatgatctgacgccctatgctatatatagcgttacagatagagccccataacaaagg

SEQ ID NO: 32115 - DNA, 172 bp, Glycine max
  Clone ID: LIB3051-074-Q1-K1-C3
aaaataaataaataggtttaattgaaattcaatgtggtttcggctctggcactcaatgcaccagggctagcgtccccatgcatggagcgactgattgtcctatcgaggcgccataaatcaactacctggactgacgtatacacctgacgtacgtgtgaaaacggctgactcg

SEQ ID NO: 32116 - DNA, 343 bp, Glycine max
  Clone ID: LIB3051-074-Q1-K1-C6
gaagttggctaatatgtcgattggtactcgaagacaatccttaggacaaacccgtccggctccgatgaaagctggagtcaattggatttctgaatctggaaatttcatgctcaagtccggacaacaaattccatctgaaagaagtttgacaagaaaagttgccgggtgagatgatgagaaagttttgctgactttggagattctttgatgatcaatatttttaagtcttctaatgatgatattgggtttgcacctcttgccctgatgcgtttggtgatgatttttggttctattacgggtttgatatgttttttttggggagatactgtcagttttacatttg

SEQ ID NO: 32117 - DNA, 238 bp, Glycine max
  Clone ID: LIB3051-074-Q1-K1-C8
gccacgcgttcgtacgcctaccggttcacgaattccatacttacggcaaaccatcagcgacttcgagtcacgctgcagcaactgggacatctgcatctggtagactaatgctacagtccgaaccacataattgttccagtagaagactgatatgaagaggtccacaaccagatcatgacatgtatttactgactgtggagaccttatgatgaacaatccatttacaactattaatgat

SEQ ID NO: 32118 - DNA, 201 bp, Glycine max
  Clone ID: LIB3051-074-Q1-K1-C9
ctcagtctgggattattgttgcccttgcaaacatcaaaacgaaattgaaatctctgtcccttgtgaagtgcatggcagtcaaagatatcgatatggaagtgccgctactttcatctagtgagtcttttcgatcataaatcattccaaagttaacctgtttttgtacctacttgcttgcccttgattggaaaatgctttccc

SEQ ID NO: 32119 - DNA, 405 bp, Glycine max
  Clone ID: LIB3051-074-Q1-K1-D1
gtccaatattcctattattccttatccttctcgaccaatccatttcggcgagtgctgctataaatattaatggtctgagaaacaaaattagagaagttctaaacaagcacccgagcatcaatcttccggcagataaactgaagaaggtgaagagaccactgaaggcactggattatctgcttggcgaatgtaaggacaggccgcctcaagaatttcaagaattttgcccgaaatttaagaacgattatcaacaaaattgcccgaatgccgcgtatgaagcagtttgcccgttactgaagcaagcgattcaaatatgttgccagaaacacgcataactctgcaagccacggtgggcgtttggatgtgcttttagttaccactttctctcttggatttgcttacgta

SEQ ID NO: 32120 - DNA, 466 bp, Glycine max
  Clone ID: LIB3051-074-Q1-K1-D11
ggttgagacttgagagaaattaaaaaagccaataacaaaacaaaacaaggaacctgagagagggtgagacttgagagaaagagagagctgaagtagagtccgaaccaagtctcatagctgagagtttaggatcggaattctgcctccgttcttcttcatctcacctaccaccttaacctcgggattaaagaagtcatggctatatggggtggttgatggaagatattagcacaaacttggtttgcttctatgagccaaatctcgtgtttccttctgcttcataatggtcttgaagggtctatgtgagaggattgtttcttcaaaatgctcttctaaaagctcaaccgagactgtagataatacacagtggttgaaacatatagtgaatcatcagcttctgaaaagaaagcagttccttctcgaagtaatgggtgggcagctgctgttaagaaaagttgtactggtg

SEQ ID NO: 32121 - DNA, 256 bp, Glycine max
  Clone ID: LIB3051-074-Q1-K1-D4
ctttgtttgcaggcaaattctgttccgctagctaaggatgatgcaagttaactagctatataagttcaccaaaggcttgacagcagacataataagagtcatttatgtaaatataatagtctgcttctcgtgttttgaaatctagtgaggcgacctagaggagtttcatggaagacttgtcttgtctatgttaacttcgattatgtaagagatggcgagcactggttgttgaaattgggatgtctcttggtttcgt

SEQ ID NO: 32122 - DNA, 202 bp, Glycine max
  Clone ID: LIB3051-074-Q1-K1-D5
acgggtagttcacacactaagttctgaaaaatgagttccaaagttcttcttattctacttatgttcatggccactatacttttgatctcctctgacgttgcacccgatgatgcataccagaattttgacaaaacagatgggaagcgtattgcaaatggggtagatgaaagctgatattggcgtgggggctatggcgactatg

SEQ ID NO: 32123 - DNA, 203 bp, Glycine max
  Clone ID: LIB3051-074-Q1-K1-D8
cgtacattctagtggtaatgcgactgttgctgtcaaaatatagcctgatgtagacatgagtacgccaaatttgtagactggaacttcacttaaataatatgattttatatcaactaatctaccaaaatccattagatctatgcctgtataggatcacccttacactgtcagactacaggacttggatattaccttatcattta

SEQ ID NO: 32124 - DNA, 442 bp, Glycine max
  unsure (1)..(442): unsure at all n locations
  Clone ID: LIB3051-074-Q1-K1-D9
ctttccttttcttttctccctccaagatcacatttttctttgacccttttgctccgtgtatctgaaattcccctctccacccactttccctttaagtcaatttcatgcttctctgtctcagatcctagatcttgctgtcggtgggttgatcggagtagatgtcgccgtcaaacgggttgcagaacggcggcggcggcggcggtaatggggtgagttatatagagcaccaggtttcaaaacttgacactcttgctggtgtggcaatcaagtacggtgttgaggtagctgacatcaaaaggatgaatgggttagccacagatcttcaaatgtttgcactgaagacattgaaaattccattaccaggacgtcatccgccatctncttctcctggtccacatgaagaacctacaaaatcaagagatgctagcagtgagaggaaccc

SEQ ID NO: 32125 - DNA, 335 bp, Glycine max
  Clone ID: LIB3051-074-Q1-K1-E1
ctgaagtccatgttggcacgcagcagtctctgcacgtgccacatggtgttctccgtcgaccgggttactcccaccttcgtgtctgtgttttctgccaaggccagagtgttggctttccgcttccaattgcggaggaacacagacctcgttaccggccaactttccaactctttcgccttcaatttcggattggattcccagagtttgaattccattgaatcccatgctgcaccacagttgccttggactggtccagttccaggtgacattgctgaagtggaggcatattgtaagatctttaggaattccgaaaggcttcattctgcgttaatgca

SEQ ID NO: 32126 - DNA, 302 bp, Glycine max
  Clone ID: LIB3051-074-Q1-K1-E10
cccacgcgtccgcgagaacatcgtcaaaaagtttaagggtgaataattagcagctgcttctagttccggtgtcggtgtgggtgtttgaatctggtgaaggatgtcaattgttccaatcaaccagggtgatgccaacggctccaaccccttcgcttcgtggggtcaattcgtggattttcctctccctccttccatctccggcttcttccccggcttggaatacggattcggattctgatcatccgtgaacacacgtgtggactggagggagactactagagcgcacgtgtggaagctggtgc

SEQ ID NO: 32127 - DNA, 352 bp, Glycine max
  Clone ID: LIB3051-074-Q1-K1-E11
atgaaatggggtttattcatttcttaatacacttagttcgagttacattttctcatggaaaaaggattgtggtaggaagaatggatttctcaatgggaaatagcagatgttaagtttgtttttggtatttttttggtgtatagcatatttttggtattttttttaacttacatattgggcctattgtgaaccaatggccacaaagcatttgactgtttggtccttaaaattgggttcctccttgtgaaacgtttgtaacatgcaaacttgccaaatgacaatggactattgcttcctgcaccttctttatggcttatggaatggtcaatccagaatgcactctctttttgac

SEQ ID NO: 32128 - DNA, 298 bp, Glycine max
  Clone ID: LIB3051-074-Q1-K1-E12
ctttcatttgcttcggaattcgagaatgagagaagaggttatcagctccggaggcaccgttgatccaacacctgctgccagttctgctggggcatcatccccagctgttccaatgaatgttggcagcatagatgggtcaagtcatggacaagtctctaaagcggcttctctctcatgtgttggttcacaaccaccatggacttcattgagcacaagtgctggtggttctgcttttggttcttcaagatcttcatgtagaccttgggaaagaggagatttattaagacgtttggctaca

SEQ ID NO: 32129 - DNA, 76 bp, Glycine max
  Clone ID: LIB3051-074-Q1-K1-E4
aataactccattttccctctgtcttccccccttcctctacacaaaaatatattattagcatgggggaaggtgaatt

SEQ ID NO: 32130 - DNA, 271 bp, Glycine max
  Clone ID: LIB3051-074-Q1-K1-E5
cccacgcgtccggctgttgttgattgagttggtgactgtgattatattttgtttgtttggtggatagcggagattattttctgctttcctttgatggtcatatttgttattgtaattagtcaatttctcatgtttttcaaaattagttttgttcggtgatcttctgattatgtgtgctgttacacacccctggcagaaaacggttcattgtcccacagaacgataggcattaccatgattcagttttgttagcttatttccgtagttgaat

SEQ ID NO: 32131 - DNA, 174 bp, Glycine max
  Clone ID: LIB3051-074-Q1-K1-E8
cccacgcgtccgcccacgcgtccgggcgaaattgacagggttttagattccacaagagactcaaatgcatcaaaggaggagacaaatggtatgccttctctgacaaaagaagaaacaaatggtagtccttcaaaagctgatgcaattctagataaaccagtagaagcagatctc

SEQ ID NO: 32132 - DNA, 245 bp, Glycine max
  Clone ID: LIB3051-074-Q1-K1-F10
cccacgcgtccggtttctctgattttgttgagatactagatcatggattggtactatgggaacggcattaatgattatctggttcccagagatcaggatttattggacaggcatccttcaccagactattggtcaaactggggaataagtgcaactgaagatcattctagcagttcaagtgtatgtgggggattgcctgagcaatcttttcaacagacagcattttaatgcgatcagcttaatta

SEQ ID NO: 32133 - DNA, 292 bp, Glycine max
  Clone ID: LIB3051-074-Q1-K1-F11
aaagaaaacaaaaacaaaacatcaatctgcattttggcattgggctcttcttgtttagtttgtttgttccaatccaacgttggtttggttgtgtgtgtgtgtttgtgttgggaagaataggaatagcattgggaatcaatcagcgaccccatgagacctcagagaacgtcgatccacgccgtcacgacatgtgtgaggcgacagcctccaaaggtgaaggcttttctcgccgtcgtttccagcatggcagctctcgtgctccttcgcttcatcgtccacgatcatgacaacc

SEQ ID NO: 32134 - DNA, 312 bp, Glycine max
  Clone ID: LIB3051-074-Q1-K1-F12
gaagggggaaatctcttcttcaatggcggcagagtcatctcgcagtagcgctaaacgcccctggatggaagaagacgacaatgaattctccaaaaagccaccagaaaaaagggttaggtttccaaagggaaagaaagtgaagccaggagatgaagtggtggtggacaaagcaaatgttgaggagggtgaagttgacttggtgaatgctaaaactgccaccaatgctgcaaaagagcgggaaaaactcagaaggtttctaaagggaaagaaagtgaagccaggagatgaagtggtggtggacaaagcaaatgt

SEQ ID NO: 32135 - DNA, 455 bp, Glycine max
  unsure (1)..(455): unsure at all n locations
  Clone ID: LIB3051-074-Q1-K1-F4
cggacgcgtgggcggacgcgtgggagacctaataatggtttatatctctaacaatgacactgagaatttcttgcaaaaactgtgccgtcataaaataattaaaaaatcaattttctttcaattgattgaatttgaactcanaattcangatcatagaaatataaaatttagcctgctcaatattgatcaacaaataataacgtatggacacactataacaataacaaccaagatttatcccagtagatcagattggcaacatggattaatcatcgacattgagctataataaaaaccaaacttctcagtgaacanagcattcaaggttttttccaatgtcttaacaatatggacactaaaaacataaagttaatgtacaatatgtaacagtcaacactaaacagattgtaactcttaattattngtttataaaagcanaatcatgacagcaagga

SEQ ID NO: 32136 - DNA, 281 bp, Glycine max
  Clone ID: LIB3051-074-Q1-K1-F6
gatagtccgccgcatgcaaccacagttatattacgattccacttactgtgaccctaaggatgagttgtactagctgtgctgacatctataactttccaaatccattctcattcaatgcattagatcgaacttccaactgcgagagtttctctactgtgacatagccatggctatattcatcaacggatttgaacgtttggacacactgtcgcaaatacccccatgactgcttccactagatgataaccctaacatacattgattataggccttgacctata

SEQ ID NO: 32137 - DNA, 336 bp, Glycine max
  Clone ID: LIB3051-074-Q1-K1-F7
aaagatgtcaaattgctgaaaaagaagctgtaagggctactgaagtagctgacaaagctagggctgaagccaacttggctcagaaggagatgagcgagatgcagaggcttgcaattgagagactggcacatattgaaagggctgagaggaaaattgaaaatttggagagggagaaagataatttggaaggtgaattgcaaagagtgagggattcagagaaagatgcacttgttagggtttcaacactagaagaaaaggtgggacagagagagaaagatatagattcactcttggagaaagatggaacacagaagcgaaatagcacacagattcttg

SEQ ID NO: 32138 - DNA, 339 bp, Glycine max
  unsure (1)..(339): unsure at all n locations
  Clone ID: LIB3051-074-Q1-K1-G1
tggacatcagtcctgaagcaacagttgaggaggaagatgacaccgaagtagaggctgaaagtgagtcaaagcctgaagctgatgcggttcatgatggtgatgttgatgatgccaaggacgagttgtagatttgcatgacatccactatttaatgacggtgctgtcggttccctttgtttttcatggtttcagctttaagatagaccgtaaaagccttctctagcatgagntttttatttcacaagttgttaaaggagaacattagtcttactgtaatcatactatcccttggaattttgccgtaccatatcagtcttaacacaatgttcaagttcctag

SEQ ID NO: 32139 - DNA, 207 bp, Glycine max
  Clone ID: LIB3051-074-Q1-K1-G10
atctaacctacttgcacacatgcataacaatcccgttttctcttgaactgccccaggggaactggtccgaaacccgattaaggcacctaaccattggaagattgggccctagaagtacctaaggcacccatctgttgcctaaggtcaaggtcgaaaaccctgacacaatactaactctcgacacatttaaaaccctgagcacacacc

SEQ ID NO: 32140 - DNA, 370 bp, Glycine max
  Clone ID: LIB3051-074-Q1-K1-G11
aaaaaatcacaaaccaagcttaattacccaagagagaaattaagaagctagtttgcgtgttttggggtgaactcagggagtcagatagataatactgatccctcgagatattgagattcatctaagagattaatatcatcctacccaaccacaagcttagattgaaacaagatggaagtggtggtacaaagtcctagtagtccaaccatggataatttcgattttggtggcaacatgggttcgatctatcaaagtgttccttcttcaccaaaaggttttggtaattactacctaagcgcacccgcgagtccatctaggatgtctgaattattcagcgaatttgaatattattcttcagcttcaccctctt

SEQ ID NO: 32141 - DNA, 317 bp, Glycine max
  Clone ID: LIB3051-074-Q1-K1-G3
gcagaggaatgcacctctaccactggagatacctcttctgcgtctgttgctggtgtctcagaagtggacacaaaagttgaatttgatttaaatgaagggttcaatgcagatgatgggaaatgtagtgagatgcctgggtctacacctgctgcaagattggtcagtcctgttccaattttctgcttcatccatgtctttttggtattctctcgatcacagtagctggttgttgcaaagagcccctttgtggcacctgaagatttattgaaaagtaaaaaggagcttggttggaagggatctgctgctactagtgcatt

SEQ ID NO: 32142 - DNA, 340 bp, Glycine max
  Clone ID: LIB3051-074-Q1-K1-G4
cttagcaatagctacccctatcacaacaatactctattaggcaaaaacaccaaatgggagaggaaaaagagcagcctaagaatgaaaccgagaagaagcccgaggaggccgccgcagcccccaagaaagacgacggacccatccctgtcgtttacaaactcgacttgcattgcgagggatgcgtcaagaagatcaaacgcacatgtcgccacttccaaggtgtggaaaccgttaaggcagatctatcgtcgaacaaagtgactgttaccggcaaattggatgccgagaagctgcgagataagatcgccgagagaaccaagaagaagggtgacatcatctc

SEQ ID NO: 32143 - DNA, 356 bp, Glycine max
  Clone ID: LIB3051-074-Q1-K1-G5
tttcattctcattgccgtcacagagagagacatgaaacaatgaagtttaaccctagggtttcctcaagccgtcgcaagagccgcaaggctcacttcaccgctccgtcgagcgtgcgccgcgtcctgatgagcgcgcctctctccaccgatctccggtcaaagtacaacgtgcggtccattccggttcgcaaggacgacgaggttcaagtcgtgaggggaacctacaagggccgcgagggcaaagtggtccaagtctatcgccgcaagtgggtcattcacattgagcgcattacccgcgagaagggtaacggcttcaccgttaacgttggcattcaccctttcaaggttgtcgtcac

SEQ ID NO: 32144 - DNA, 54 bp, Glycine max
  Clone ID: LIB3051-074-Q1-K1-G6
tttcattctcattgccgtcacaaacatttactttaaacaatcacctttaaccct

SEQ ID NO: 32145 - DNA, 393 bp, Glycine max
  Clone ID: LIB3051-074-Q1-K1-H11
gagagataaagttaaagaaattaaatagcaccaatttcgcccacgaaaccctctctgttgtctcgtcgcttcaaactcctctgcggtttccccttcttggtcttcttcacagaaatggaggtagcagtggccaaagcgttgaaaccgagtttaaggagagagttcatcgttcagcaaatgctctgcgaggatattttcagcctgaacgccaacaccgtcgccgccggcgaagatttctccgtcgacgacctatttgacttctctaacggctctcttcacaacgaacaacaacaagaatacgacgaagggaaacaaagtttatcggcttcagaggaccgcggagaagacgattgcaactccaattccaccggcgtttcctatgattcacttttc

SEQ ID NO: 32146 - DNA, 394 bp, Glycine max
  Clone ID: LIB3051-074-Q1-K1-H12
gtttcttgagggtactaatatgaacagaatctcctctcaacacctttgccttgctgcagttcggaactgcaactgcactcaaatataaatatatatacatatatatatatatatatatatatgtattacttcatggtcacacatagttaagtttattaattactaggtagctggttttgaatagggtagttggtagttatagttgttgtcccagatatggaagaagcaggtttaggagattgttgttcctcgaattcgacgattacgaggaagagcgataagcgaaagcagcaacaccaacaacaagagaagccatacagaggaataaggatgaggaagtggtgcaagtgggtggcggagatatgagaccccataagcgttcgaggatctggct

SEQ ID NO: 32147 - DNA, 446 bp, Glycine max
  Clone ID: LIB3051-074-Q1-K1-H3
gagcgtgtcatcaccgtggagaactttctgaggtatcatcctacctgtgtgaagcagctcttgagcaaaggctcaaatcacaactgagcagacaaatcaaatacaccaccaagtatcagatcattgcggttgctaaaagacgacgtggtcaaaccccaacaccatagaagtatctaaggctgagaactattcgtgctcaacggcgttctccaagtgaacttactcgtcgataccctagctattctacttatataaaaagctatagccgggctacctattcttcaaaccgaactaggagtcgttcttactctactgactataagacgaggaagtcaaactatccatatcactctaggcgaatgtcatactctccatactacagccggtacaggtcttattctcgatatgatcgacacaagtcatattctcactcttgctctccttat

SEQ ID NO: 32148 - DNA, 438 bp, Glycine max
  Clone ID: LIB3051-074-Q1-K1-H4
gcttaccagaatttcgtagacttctaagaactgcaagcatgggttctcgaacagtaatgagcccaagtgagcgtcatcatcgaaagatttagattagatatgtttcggagacagggataattcaggagatgagagtgatggatttccttttaagatgatgatctcttatgcagattgtgctgaagccctccttgtgatatctattctgctgcacattttgcactctgaccatcattatatggaactctgaaactagagttaatattgactatggcataccacacaggattgtgtgttaagcttagtctagacgaccatgtcaagaggaatttaaatagtgtgtggattgacttgaggtatcagagtttcatcggtgtacatcattggcttggttgtgccatacatgtaatgtgtaatactgtaactataaataaaaac

SEQ ID NO: 32149 - DNA, 398 bp, Glycine max
  Clone ID: LIB3051-074-Q1-K1-H5
cacagagaaccaagcaaacaatgggtactgacaagtcaaaccgggtcgggttagtgatatccagggctgacccgattcgggatttcctttccgacgcatcaaaagacgcgactctctccgacgaacttcaacgaacattctccgatctgctccttcagtcggagataccctacgtgccatttcgcactgtgtggatggcctctgacccatcaaccagacccgacttgacccgactcttttcgggcacccgcttcatcttcttcagccctaagcccaaggaaaagagtgaagaattgaaagcgaagcttaaaaagttggaagatatagcggagaggaaagcgtatcaagagcttgtgaaggatattacgccgcctaaggatgttcaagaacccttctct

SEQ ID NO: 32150 - DNA, 297 bp, Glycine max
  Clone ID: LIB3051-074-Q1-K1-H7
gcggagaagaaggacaggcttctgtcttcgattatgcggcatgaggaagaggaatatgagtagggagaacccatgtggtggctgtcgaagtcgaacagtgataatcccgttcatgataaggcttgacatatggatccttctgagccaaggaagatgattttgtctgttaaaatgtgacttgctatgacccttatttcctatcttaattggtctacagaaccatcctttaaagatatgagccgctactactgctactacattctaactgtcatcggtgacttttgattcaccataggg

SEQ ID NO: 32151 - DNA, 426 bp, Glycine max
  unsure (1)..(426): unsure at all n locations
  Clone ID: LIB3051-074-Q1-K1-H9
gcagtttattctatcatatccttgttcaaataattttcttttcaattacaataccccaatcccagaaacttatgttcatgaccatcctcaaggtcccaataacatttacttgaagacaattttgagttgaccttacagcctagttccacctatacaaacacccttgatccttcattcttttttgagttgaccttacctagctccaatactggcaacaataatactcttgggcatctgaactatctccattctttttttccccctttctttgcagtggatttgcgaggttttaaagaaattaaatgcgtttttatgtgctaaagagctaggtaattatagaattcatctcacacatacttctttntactacctttaatcttttagattttattcttgaattatcgttgtttaacggagtaattaaat

SEQ ID NO: 32152 - DNA, 371 bp, Glycine max
  Clone ID: LIB3051-075-Q1-K1-A9
ggggaacatggagtggacaagaaaaaaacaagatggttctgctgctgctgcagggaatggttctgatgatttctatgatggaatcccacggtttactgattctttttcccacaagtctaggtcagtaaaatcaaggcatgctgtggcgaaggtctcagaggtgagtttacgcctgggcagagctggtattgacgttttggacactcttggaagcagtatgacaaatttaagtgctggtgggtttgtatctggagctgtgacaaaggggaatgaaattggtattttagcatttgaagttgcaaacactattgtcaagggttttagtcttatggaatctctttcgacaaaaagtattaagcatttaaaaagag

SEQ ID NO: 32153 - DNA, 238 bp, Glycine max
  Clone ID: LIB3051-075-Q1-K1-B10
cccacgcgtccgaaaatcaaaggaatcgtctacagccagctaaactgtaagcaaccatgatggagtggtgtaatttactaatcaactgagtcttaggttgataaaggagcctacctaaccggaactagttgcaatgacctttttccaaccaaaggattgaaaagccatttttgatgaatttaccattttcggatagctaaatagttgggccatttcctccgggtttttaacccctttt

SEQ ID NO: 32154 - DNA, 286 bp, Glycine max
  Clone ID: LIB3051-075-Q1-K1-B12
cccacgcgtccgcccacgcgtccgcccacgcgtccgattgaaagttattgatgaagttgccagcgtgtaatttgaagttgaagcactagcatatttggcgttttgaaaaggataaaaatgtgccccttgattaatatatgcagttcaatagtgtctgagtgagcgaaatgcaggacgttggaaatggttctatgtactatttggcttgtatgcttgtattacaacgctaataagaatattaaatgagcttgctggagaaaaataaaataagaacatattatctatt

SEQ ID NO: 32155 - DNA, 228 bp, Glycine max
  Clone ID: LIB3051-075-Q1-K1-B2
tccgaaggtggcagcccctacgacctactctgctacgcttgcggtggctcttcccattaacatggtaatgtggtattagccattagcattacatcctacaccttcaaaaggtctatttattatctggttccagtgacttatgtatccctctatagctgtattcctgctaagtttggcttatgatatctggatcctttggtcgatttttatcgggttaagacaatgatt

SEQ ID NO: 32156 - DNA, 460 bp, Glycine max
  unsure (1)..(460): unsure at all n locations
  Clone ID: LIB3051-075-Q1-K1-B3
agtcaatttccccaacgaggacgaccctctgccgcaatacggatcttgcaagagcctcaacttggagttcgggtacgatctcaaccaaacagggcttttcccttcttctaacgctgatgagaattgcgggtcccacgtggcttactccgttacggaagccaacaacaaagtagagaagctttccgaggagcttatggcgtacgagaatttaatgaggttttatcagattccggaaaacgtcgttggggatttgtgggcctttcctgacacctctccacctctctgatttctgtcacatcgtttcttctatcattaattctccaattctgttcttaaaatatgatatgtacaatcagcaatttcaatntgcatgtatntaactttcagactcttaggagatgtttggttcgggtggtttctggtttcaatttcaactgaaataaaaaacggtgatgaaaat

SEQ ID NO: 32157 - DNA, 283 bp, Glycine max
  Clone ID: LIB3051-075-Q1-K1-B4
ccatcgccttctaaaggacgagaatcaggagaggcatatagcactgctggaacgactttctaagcgcactaagatccgtgcacagagtgactagtcttggttcatactcatacgcttctagcatctaaaagcctgcatagagtgactaactaagtccaatgaacaatacattttctgagaccctttcaagctaagactggacattaagcaaagctacgaatctatctgcgaattagaagaactagtctcagaaaactgctactccctacgactggtacgacgt

SEQ ID NO: 32158 - DNA, 298 bp, Glycine max
  Clone ID: LIB3051-075-Q1-K1-B6
tcggccacgcgttccgctggttcttcttttggacaccccagatttcgaggaacccaactttccttgggtctcaatgaaaaggtttggtcttttggcttttcttctggttgggtggattggggtatctggattttcaacaaccaccattggtaaagtcccaggtcctggcttggattccttgccagctggctccttgaggtgttttgtccgattggatggtgttcgaagtttttgcgaaattaaagaaacactgcatacaacacaactgtaacttcatccaagaatctcaattcaattt

SEQ ID NO: 32159 - DNA, 159 bp, Glycine max
  Clone ID: LIB3051-075-Q1-K1-B8
cccacactaccttcaaaccctaatttacatctttttaaatctcaataaacctagggggcgattcggtctcatttaaaaggtgcatagatatgacttatctacaaagcctgtcaatatactaatattaaattctatcatcaacaattactcaactacaac

SEQ ID NO: 32160 - DNA, 59 bp, Glycine max
  Clone ID: LIB3051-075-Q1-K1-B9
taacaatctcataaataaataatcagaacgatttagaagaataattgaattccaaaaat

SEQ ID NO: 32161 - DNA, 443 bp, Glycine max
  unsure (1)..(443): unsure at all n locations
  Clone ID: LIB3051-075-Q1-K1-C1
gggtgaagagcacacccacacatcacatcaacatggcatagcttatccttaaatcccaattctaattctcttcttcatttcctttccccaaacaaacatggctcttctctctttcaattccttcacactctcccctctccattcaccattactcccctcttcttccacttttgctcttcccaccacctctgcttcaagagcaaacgtgattctgcccccgaagcccttgaatggagttcgaatctcgacacccaaaaggaggactgagtcggtgattgtctccgccgccgcggaggacgcgagttcggctgtggagggtgggtcgccgccgncttctnncgcggagagcgagaaagagagcggcgcctccgtggagaagcttccgttggagtcgaaggtgaaagagaaagaggagccaaagctgangatgaagctggcgaaga

SEQ ID NO: 32162 - DNA, 274 bp, Glycine max
  Clone ID: LIB3051-075-Q1-K1-C10
gacagacacatagacacgcgtccgagtacaacaagatcacgacacagcgagagtaatatagtgaggtgaaacaccatgagctgcaacctgtgagataaacagctgaagtcgtgtagcatacattgcacgtgctatcatgactacgttgacgtgcgttacggtttgactgcagacacagagactgttgaattgcctgttatggctgtgcagtcacaaattggggatgctaactactgtgaagcgtgatgaatcggaagcattgactgcgcatgat

SEQ ID NO: 32163 - DNA, 345 bp, Glycine max
  Clone ID: LIB3051-075-Q1-K1-C5
acgaacagatcttgctatatactccatttgccgtatctgaaacttcaaacgcagaactgggactcgggcaaataataatttctcagagactcatgtgtatactatgtttacactaacgtacacacttccgtttatcaaatccaatctactgaattcaagagactactagctacttacaactagcatattctggatcatgctgacgcgactctatactctaagctcttgaatggagttggaatctatgctctcactacgaggactatactcagatattgtctgccaaagcgactacaaatctagatctcttgtcaatggcgagaacgccccgcatcatttccttga

SEQ ID NO: 32164 - DNA, 331 bp, Glycine max
  Clone ID: LIB3051-075-Q1-K1-C7
aaaacagattcagttcctaattactcaactcaacagttacagtgatacatcttacagcgtcgtgtatcttccaaaaaaagaagataagatggttagaattagaacgccgtgtttgcgaaaaagtgggcgtttcgcggaaggctcgcactcactctcactcgttctgtccctaaaattaaaattcaccctatatgcactccaaataaatccaaaactcgaatatctacttatactctctcttcccaatctcaatcccagtgagtgctttctttctgtaactaaccccaatcatcaactcattcagcgaatgaatctgtggacggacgagaac

SEQ ID NO: 32165 - DNA, 437 bp, Glycine max
  Clone ID: LIB3051-075-Q1-K1-C9
gagagagagagagagaggaaaaaaggaggaacaacagaactacggagagggagagggagagggagaaaaagagagtggttcttcacactctcgcattccgcagatcagatccaaacattctgaattcctagatctatttccgctctccacccgcgcttgaatttccgattcgcgatttcagtttcgtgttttcggcgcaattaggttttctgagatcgaatggcgtgcatcaaaggggtgaatcgatcggcgtcggtagcgctggcgccggacgccccgtacctggccgccgggaccatggccggcgctgttgatctgtctttcagctcttccgcgaatctcgagatattcaagctcgatttccagtccgacgatcaggaactgcctcttgtcgcggagtgcccgagctccgaccgtttcaaccgtctctcgtgggg

SEQ ID NO: 32166 - DNA, 223 bp, Glycine max
  Clone ID: LIB3051-075-Q1-K1-D11
tcgcccacgcgtccgatcggatcgtgcaagagagttccttggtgtggctcggtgagaccaaagacgggtcaccggttgtgggattcttggccactgatgcttctgaatgggtcaacggtcaaattgtttgtgtcaacagtcgctatatttagtgatgatttttttttaaaataataacaattataataattagtgtattttctttcactttgtcactacttgg

SEQ ID NO: 32167 - DNA, 84 bp, Glycine max
  unsure (1)..(84): unsure at all n locations
  Clone ID: LIB3051-075-Q1-K1-D2
tggtgggtttatctatctattattctatctactattgggtcgntccatctcacaaaaaccagagagaaaaaaaaaaggaaaaag

SEQ ID NO: 32168 - DNA, 378 bp, Glycine max
  Clone ID: LIB3051-075-Q1-K1-D3
cccacgcgtccgctggtgggtctggcagaaatgttattgacaatggtaagaatgacagtgatggagattgcaaggattttggtgtgtgcctagagaaagtaatttccagcaattcagataatgttggcatgatcaagtgttcaccagtgcatgttgatggagactttgatgatgttgttgttgatgatgaagaagaagatgaggagattgatgttgagatggagaaggggagctttgatgttaaggaaatcagtgtgccagaatccaaggttgtgaatgaaccagaaaggaaggaggttgtgaatgtaccagcaaaacagaagattgtgaatgaaccggaacctaaaaaggttgtgactaccaacagacaatttcatc

SEQ ID NO: 32169 - DNA, 446 bp, Glycine max
  unsure (1)..(446): unsure at all n locations
  Clone ID: LIB3051-075-Q1-K1-D4
cccacgcgtccgcccacgcgtccgcccacgcgtccgaagaccaaggatcttagcactctgaaggagaagcttgaaaaaattaacggaaaaatacaaccactccttgaaaagaaggctgatatagaaaggcagattaaagaagttgaagctgaaggtcatgtggtcaatgaggagaacaagaatgaggtacagtagctgttcaggatgttcaggacacacttatactatattgcataatatacaaactatgtttgttctttttatgttgttttgacttttgtgtaataaagatgtctttntatttgagtaagaagtgatacatttgtacacattcttatgcttcatatgggagtgatttcattccctttgtcaatgaaaggctgtgctacttttaaaggctgctaacatgtcaactnccaatcaatggaggcattacttaacgtggc

SEQ ID NO: 32170 - DNA, 125 bp, Glycine max
  Clone ID: LIB3051-075-Q1-K1-D5
cccactcgtccgtccactcgtccgaaaaaaaaatataaaaataaaaaaaaaaaaaaagtaaaatgtaaaaatttttaaacacaaattaaaacaataaacaaaaactattataaataatctttttt

SEQ ID NO: 32171 - DNA, 474 bp, Glycine max
  unsure (1)..(474): unsure at all n locations
  Clone ID: LIB3051-075-Q1-K1-D6
gggttctaaacttgccacattaccccgtccagatagtgtccttgaagtgctattgattaattttccacgtggtgtggtctatggatgtggtgatttgatattctcatcacacatgatctttacacttgtttttgtgctcacgtatcagaaatatggcactcgaaggtcactaaagcagctagggtggttgcttgctgtggttcagagtcttttgatagtagcatctcgcaaacattacacggttgacgtagttgttgcctggtacactgttaatttggtggtgttttttattgacaagaaattgccagaattaccagacaggtcaattgcagctgcaaccttgctacctttgagcaccaaagacaaagacagcaagaccaaagaggagaaccacaagctattgaatgggggaatctgagaccctgtaaatgggaggcagagaacacaagtgaatggcangatcatggaagatgc

SEQ ID NO: 32172 - DNA, 479 bp, Glycine max
  Clone ID: LIB3051-075-Q1-K1-D8
atttctgtagctctatggccgaaatgatacagtttgtttccttattctaaaccccagggtagcaatagttagattagagtacatagtttttgtcacacctcacttctctccgatttgcgcttgttcttcttcttggtcaactcgatcgtaagtcgtagaactagaagggtgagggcaatatggaggtaacaaaagggaaggaaactaaaattgttttgacgaaacccttccaattggaagctgaatcagatttagaaccgtcttatagagccccccatctcctacatcgcttgttaagtttactcaagaacgtgcggccaggatcagatctcacaaacttccaactgccgcctgtgtttaatttcccaaaatctcaacttcaatgctatggtgaatcagtgtactgcacatcttccaacttgctaagccaatgcaacagtgggcagagtccactggacaggttcacatcagtagtagca

SEQ ID NO: 32173 - DNA, 276 bp, Glycine max
  Clone ID: LIB3051-075-Q1-K1-D9
tccacgctttatctatctattattctatctattataatgactatccatctaacaactacaataggatatttctgaaaatttttactagaatctaacaccaaaactctacaatcttataataataacaaaaataacattaatgacttaaattttttatttcatttcatcaatcacattatatctattgaattcttaaacatttatactgactttactatatacacacatcaatttatactttatttttcaatttcttaaaatttttttcatattaaa

SEQ ID NO: 32174 - DNA, 200 bp, Glycine max
  Clone ID: LIB3051-075-Q1-K1-E12
tcgcccacgcgtccggtgaccggcgtgagagagcatatatggtgtttcttggcaccacctcaccttggatttcctgcttgccgtcttcaactcaaaccgactacaaagcgcgtcgatactggtctttttcgcaacgcccacggccaagcccaagcgctttacatttcttttgccgattcccttttggttcaaatggcatt

SEQ ID NO: 32175 - DNA, 407 bp, Glycine max
  Clone ID: LIB3051-075-Q1-K1-E3
aatgtttctactttcctagtacacgctggtatcttgaagaaggatcatatcaagagtgatggcgtgtgagcgacactagtctcaagagctatgcctagtgtctctgactatgtcttaggcataatagatacataaactaacaacgatctgtaaactgggaaattcagatctgttctaatggtgaactatgtcatgtggcattacgtgtaagacaccatctaacggataaacgatcaaaaccttcacctccgtaacatcactgtttacgtaactcaatcccgtactggctgccgccgactacgcggtccacgtcagcgtttatcagctgaaccctgttattgctcatggtgtacacggccaccttaccaaaaaacctgcagatattgcgctggtgaccagcgttacat

SEQ ID NO: 32176 - DNA, 339 bp, Glycine max
  unsure (1)..(339): unsure at all n locations
  Clone ID: LIB3051-075-Q1-K1-E4
cccacgcgtacggaaggctctgggcctaatttggctggagatggagaacttgttcaagctcctgtggggtggtttcctcggccatggcctacaaattctgatgcttcagagagtagccagttttcaaaagtcattgagtatttccggctactangtcgtgttatggctaaagctcttcaagacggacgactactggacctgccattgtcagtggcattttataagcttgttctctgccaagatcttgatttgcatgacattctgttcattgatgctgagcttgggaagactttacaagagttcaatgcccttgtttgtcggaaacattatatagaatct

SEQ ID NO: 32177 - DNA, 346 bp, Glycine max
  Clone ID: LIB3051-075-Q1-K1-E5
caattttctagggtttatacaattctcgatggcttcttcagatgttgagtaccgatgctttgggggagggctcgcttgggccactgacgaccaagctctcgagagagccttctctcagtacggcgaaatcgttgaaacgaagattatcaacgatcgtgagactggaagatccaggggttttggatttgtgaccttcgcctcggagcagtccatgaaagacgccatcgaagggatgaacggccaaaaccttgacggccgtaacatcactgttaacgaagctcagtcccgtggtggcggtggcggcggatgcggtggaagtggtggatatggtggtggtcgcggtggt

SEQ ID NO: 32178 - DNA, 455 bp, Glycine max
  unsure (1)..(455): unsure at all n locations
  Clone ID: LIB3051-075-Q1-K1-E8
attctgtcgatcgctcgcgattccctcttcctccctctctcttctactcacgagcgtcctgctgctgcaggcaaaccgcgatccgttggtgatgaaatccaaggcctcaaccctagcttgccctcgtggtcggattgatgtggattacatgagtgtcggttctggtgtagagcctagcgatgatgaagacctcgtccaagtccagcgtcaccacgatcactgacgtatccctcaaagcacctaaaatttgaacgaacgaacacgaattaggttgaaaattggcaagtgaaagtgatgaaatgaaattaagggatggaccccaaaccactacaccttctcttttgttttcaaagcttgtgtctgtcgaccttccctctatctccattgatgncttccttcacgctaccatttcggaacttggtgtggcactcttcgtcacgcacacaacatgtttg

SEQ ID NO: 32179 - DNA, 302 bp, Glycine max
  Clone ID: LIB3051-075-Q1-K1-E9
agccttcgggcggaacccattttggatttaacccttttggcattaataatttttttgaccactcttttcttgggccatggcggccattccacatttggcttgacccctcttggattatctaatagcttaaacttggaaattccaaagccttaccaccttgcaatcaacgagcggttcaactttttaaatggagtgcaccaaatttggggattcttcacggacaagccttatattccagggagcaattccaagccaccaactgagaatcgtatcgctggataccattattcattcggggtgtg

SEQ ID NO: 32180 - DNA, 93 bp, Glycine max
  Clone ID: LIB3051-075-Q1-K1-F12
agttcatcgaaaaaatatttttttattctgttatcaaaactatattctcaattcggcctctggggatcactaggcagagtatatgaaactacc

SEQ ID NO: 32181 - DNA, 415 bp, Glycine max
  Clone ID: LIB3051-075-Q1-K1-F7
cccacgcgtccgcccacgcgtccgcccacgcgtccggttttatctgagctgggattggacttggggaagcggctgctaacttatgaccctgaaaagaggataacagccgaagatgctccccttcatgattggttccatgaagcccctcttcccaaatctgatttcaagccaatttttccttcttggcagtgatgggacagattagaagcggcagattgatgtatagacctgagaaggacaatttagtaatagatgatggatatttgctctggaaatgctcttaaaaaatttgggtgcattgatgcacaagcattggtagctgttggatatgtagaaaaataaaccgattgcaaggaatattcattttgaacatgatcaacaggaaatggctctgaaaatttgggtgcattgatgc

SEQ ID NO: 32182 - DNA, 233 bp, Glycine max
  Clone ID: LIB3051-075-Q1-K1-G1
gaagatcggtagagggatgaatggaaatttacaactctaagatatagtcctgaagaggaggaacaccttgggcataaaaaaccgatcatcgagcttaacttctgatcaccagatacagaaaccaggctgtcataatgaaaacctattgagtcatctattgtaatcatgatagattgtcactattatacttctgctatcctacaagactctgcaggtttggttaatatctatat

SEQ ID NO: 32183 - DNA, 349 bp, Glycine max
  Clone ID: LIB3051-075-Q1-K1-G11
ccacgcgtccgacgaaatcagaggacctaggttaaggttgcggtgctggtggtcgagttcacaggaagaggaagagataaaatttgaaagaggaagttgaattgaaggtataatggcgaggcgagagctttcaagcacgttgaagaacttaaagttcatgcaaagggcagctctgagggaggagagaaccaagaaagaagaagaggttaagcctgatgtcagtgttggcacatccactgcggttactagaaagtgtgtggttataatggaaggtgatccccatcctggagcagctaaaggtcgaatgtcatttcaaaagttcaatcccttaggtgataaattaaaatga

SEQ ID NO: 32184 - DNA, 419 bp, Glycine max
  Clone ID: LIB3051-075-Q1-K1-G12
cccccggtgggtgacatgaacgacttgaggaagaagagaaaagccgcaggcgcagagtgagagccgaaacttctcatggaatcgcaaacggatctgcagaaccgacccggaatcttcattatcggatcctccaacgtcggcaaacgcaccctcctatcccgattgacctctgttgatgttgatgatgcttttgattcggcttctcaagtgaatgtccatgggtggactatcaacaataagtactacactgctgatgtttctctttggatggctcatcttcacgacgatttttctgctgccaacgtgaccctgtctcgacgaatgactgcactggtgatggtttttgacatgaatgaaccatcttccctagctgcacttcgagaatgggtatctcgcactgatattcagaactttgagat

SEQ ID NO: 32185 - DNA, 285 bp, Glycine max
  Clone ID: LIB3051-075-Q1-K1-G2
ctttacaactttgtatatccctgtaaggtgaattttggcatcatttttaacaagtatacactcgaccaaatgtccaaatccatgggagatgggaatatgcaagtatacacacatcaatacctcttcacaggtgtcacaattctttaactggtgccacctttacaacatgcatgttggtatatgaatttgttttacactgacgattatttgttacatgtgatttctgcaaatttgtgtacagtttgattttacgatatatacaacgactctactatgtgttactcc

SEQ ID NO: 32186 - DNA, 310 bp, Glycine max
  Clone ID: LIB3051-075-Q1-K1-G7
cccacgcgtccgcccacgcgtccggagattggcaaagtatcgctttctaaggaaacgatccgatcttttgctgaatgctgatgatttggatgcaatgtgggtgtgcttaagagagaactgcgtcattgatgatgctactggtgcagaaaagatgaattatgaagacttttgccacattgcctctgtatgtacagaacaaataggtcctaaatgccggcggtttttcagtccttcaaactttatgaagtttgagaaagatgagcagggaagaattgccattctacccttttacctttatgtgatgcgaacg

SEQ ID NO: 32187 - DNA, 372 bp, Glycine max
  Clone ID: LIB3051-075-Q1-K1-H2
caactcctcaacaaattaaagatctttgttgaacaaagttaatttaagagtaaaatctagaagatagaggttgtaaagagaagtggtgtgaaatgaaatccataattagctagttgtttagcgcatgaaaaaaagtgtttaatttttttaaaatctcacaaaccctgcaaggaataaaaaagaaaagaaagatcggagatagatcatatgccctaatagtatatgaagaaatctttcccgtaaaacaaatataaatgatatacatgtatacatacaacattgtcacaactcctgagttaagcatttttattggtgaaaacatttttattttgtataaattgttgcagtttcgttattagatatattaaatga

SEQ ID NO: 32188 - DNA, 372 bp, Glycine max
  Clone ID: LIB3051-075-Q1-K1-H4
aactgggacctctattagtcctcctcacggcttgtgccttgagagaattggtaatggatcttagctcaacatggtggctcatccggatggctctaaccgtgcattcttctctaaccaaatgggaaaggtttttctggcaacacttacggatgagggatcaggaggctcattgaagcttgatgaatcaagtccttttgttgatctgactgatcaagtttattttgatactcaatttggaatgatgggcatggcatttcatccagattttgctaaaaatggacgattctttgcttcatttacatgtgataagtccaagtggtctggatgtactgtaagatgttcatgtaattcatacgttaactgcgatccatc

SEQ ID NO: 32189 - DNA, 445 bp, Glycine max
  unsure (1)..(445): unsure at all n locations
  Clone ID: LIB3051-075-Q1-K1-H6
cccacgcgtccggcaaagagaaccaaagcgccacgcaattgcacttcttcttcttcttcttcttcttcttctttggcaactcagaatcgcttaaacaatgacagaggatagcatcgttagggtttcttcttccaacgaaacctccgcggccaacgaggcttcgcagacgcggcagagaaagaagagaaagtgggatcaaccggcggagtcattgatgccagttgggatgacagtccctggagcactccctttgagcaatgccgtgactcttggaggggttgcatttcccgccatggctccggtgatctccggcactcttttgacgaatcctctggcagcttctgctcagcttccgcaacatgcagctgcagctgctgttgccgcgcaaaagttgaatcaaatccaagatgaattaataattgctcgagaaatngtcataaatgat

SEQ ID NO: 32190 - DNA, 344 bp, Glycine max
  Clone ID: LIB3051-075-Q1-K1-H7
cccacgcgtccggggaatagaaagaataaggcattttgcagggtgtatagtaatgggatggagagagaaacattgtaaaaatgaaatggtcaaggattgaagaagagagggaaattgaagagcttgagagagaggggatggggttgaagcacgcatggcgtggggtcggagatgagaggttgatgacgataaaaaaaaaggggggtaataataatcatcaacatccgtgcggggaaaggggagtaatttatgaataataataatgattaggtcgtaatgaagtgaaatctatctagtgagtaatgctgtaaaaaatccacaattcacctctgcttccacctttc

SEQ ID NO: 32191 - DNA, 407 bp, Glycine max
  Clone ID: LIB3051-075-Q1-K1-H9
aagcatacagcaatttattctatcatacttcgtgttcaaataattatcttttcaattacaataccgcaatcccggaaacttatgttcatgaccatgctcaaggtcccaataacatttacttgaagacaatttttagttgaccttacagcctattttcacctatacaaacacccttgatccttcattcttttttgagttgaccttacctagcttcaatactggcaacaataatactcttgggcatctgaactatctccattcttttttttcccctttctttgcagtggattttctaggttttaaaaaaattaaatgcgtttttatgtgctaaaaaactatgtaattataaaatttatctcacacatacttctttttactaccctttatcttttagattttatttttga

SEQ ID NO: 32192 - DNA, 343 bp, Glycine max
  Clone ID: LIB3051-077-Q1-K1-A10
acttaaagtacatataaaaaaaaaaaagataaaattataaacatagtaaggacatataagggggggataaatatcatctatcacgccagaaaactgtaattgtatcaaaatcccatggctgtcttgtacaaaaattgtaaaaattacggcttacgtcaaagcctcaagcttctctttgtatttcacattcccttaatcaacattgaaaaatgtcgtctgctgctgtcaccactcttagccctgttccaagggaactattgttgtccacagatggatactataccccattgcacttgtcattggatcaagagtttatccccatatatctgtcctattatggatc

SEQ ID NO: 32193 - DNA, 446 bp, Glycine max
  Clone ID: LIB3051-077-Q1-K1-A2
atacttggacggataatgtgaaagatttccccactgctctatcttcattttcatttggacagagatcagactagagatgctacttgtttgattaaggcttcatggagttttacctcctgaatttatcaataagttgattctttattttgaatctctaaagagatgtttagttactttggatgaattacttttttgttttacagtgatatgatcagaacaaaggtgaactcattagccctttgttgagatagtagtaataagagcactacttcagcaattaataaagtcaaatagttagtttcatgggatttatttggcttggtgtcttcctaagatagtaaaaagcataatgcactggtaaaatttgctgcttgaatgatttgatactattgaagtttttgtgctgaaggggactactagacaatgctaaagatgcattgatatct

SEQ ID NO: 32194 - DNA, 60 bp, Glycine max
  Clone ID: LIB3051-077-Q1-K1-A6
tcttcctataacacttcataagacatttcagcttattcataaactaattaaaacaacttt

SEQ ID NO: 32195 - DNA, 355 bp, Glycine max
  Clone ID: LIB3051-077-Q1-K1-A7
taccacgcattcgcacaaatattcgttcctctaaatgatcatctatacatcatatcataggtagagctattaacccactcgtcagatcacactgctattcatataatgccataaaggattatacaaaacctactaatcttcccttaaattcctcccaaaccaaaatgtacgttatgacctcctactcttatcaacttccaactcacatatactactctaatgtcacatcatattcggtaacatcacacttcaaaccattctacatgattcttcctatcacaaggctacttatatcactattcgtgagacttgagaatctacttatctaccgtatatacaagattgtataattccc

SEQ ID NO: 32196 - DNA, 457 bp, Glycine max
  Clone ID: LIB3051-077-Q1-K1-A8
gcgtttcacaaatagagagagagaaacagaaacagaaacagaagaagaaacttttcttattatgtacagtctctgattgatcggtttttcggaaactctttttccgtgaaatccacgctcgcgcttcggttatggatttggacgatttccgatccgtattggacaccgcgggcgtcgacgtgtggatgttcatcgacgccgcaatcgccgtcgcctccgcggattccgccggtgagctgaagcgccgccgcgacggaatcgtcgagcgcctctacgccgtcacggcggctactccgaagtgccggatttgcgacgactgaggcaatgacctcaacggtcaccaaatcaagaagcagagcagccccagccctgaacggcaaccgcaccaacgccgcgccgctgccatcgcagctgccgcttccccggcgacgccgcagtctctcgaaaacgacaacga

SEQ ID NO: 32197 - DNA, 451 bp, Glycine max
  Clone ID: LIB3051-077-Q1-K1-A9
ccttgttgtgcatattttgttaaaaagtttcgattttgagcttgtttggtcatctgggtaggtgtctgtgtcatctcacacccaggcagctgtaattgtacaaatcccatggctgtcttgtgaaaaattgtagaaattagggcttaggtcaaagcctcaagcttttctttgtattttacattcccttaatcaacattgaaaaatgtcgtctgctggtgtcaccactcttagccctgttccaagggaactattgttgtccccagatggatactataccccattgcacttgtcattggatcaagagtttattttcatatatctgtcctattatggatctttgactccaatgcgggttcttccctgcgataccatcgagtctgtgaaactcaaaatccagaagtctgatgggcttccttcattgacaaacaaacaaaagttggtttgcgatggg

SEQ ID NO: 32198 - DNA, 362 bp, Glycine max
  Clone ID: LIB3051-077-Q1-K1-B10
cataaatgaggctggagagcctgatgcagctgcacttagatctcaatttttggaaatgcatcggattattggagctatgagagagagaaaccttcagcctgctctcacatgggtgtctgctaatcgagagaaacttgtccagattggttccaatcttgagcttaagattcacacgctgcagtttgtagaggtcctgcaaaatggaacccgagctgatgccttaaaatatgcccgaacttaccttgctccttttgcttccctcaacaagggtgagttcccaaagcttatgggttgcctcttgtatgcaagaaggctggagagctctccttattctgaactgttgtcccaattcattgggagat

SEQ ID NO: 32199 - DNA, 238 bp, Glycine max
  Clone ID: LIB3051-077-Q1-K1-B12
gaagaccatcctccaccatcgaaattcctcacgaacgctaccgacataacgaccgtcgcacccgtgaccccgatgtctccgacgactatcgccgccgccgcagccctagctacgactcatatgaccgccacccggagcgccgccgccgccgttcggtatcgcccgagcacagaaaccctaggcacaccaacggaactcacaacgacaacgctctggcaaagaaatttggccggcgaaa

SEQ ID NO: 32200 - DNA, 354 bp, Glycine max
  Clone ID: LIB3051-077-Q1-K1-B3
aaaaaaataactaaataaacaaaaaaaacaaattaaattataaccaaataaactaaaaaccaaggtaatatttcaaacgttcgtgactatcaccacactataattactcaaaaccattcatccatattccctccttaacccacaatgcatacattacaaccattcatctatcaaattttacctcctaacttaatcaaatattgtagaccttctctaataacagaatcttggatacaaattatcaaccttctatatcaacatccaccaactgcagtaaattctacacactctagccagctacaacaacacctcccactgtgcaccctacctcaatatctcccatttccattactc

SEQ ID NO: 32201 - DNA, 224 bp, Glycine max
  Clone ID: LIB3051-077-Q1-K1-B7
tcgatttaccattgccaacagtactagttgtaattgtttctctcttcttccttcaatccaggcaagattataaggcccgtcgccatataatttccctatctttgaaagccttaattaattcatacatataatgttgtacataatatacatacatccctgataaaattgtatgaaaaggttccttccaaattagtccttccaatttaagttatatttccaaattg

SEQ ID NO: 32202 - DNA, 373 bp, Glycine max
  Clone ID: LIB3051-077-Q1-K1-B9
cccactcgtccgcccactcgtccgattttaagtaattcaatggcttacactgcaagtcttgtggtcttagcttccacttggcttatcataaactttcctcttctggcaaacgctatcggatgcaatggaccatgcagaaccctcaacgactgcgacggccaactcatttgcatcaacggaaggtgcaacgactaccgcgacgtcggaacccacatctgcagcggcggaatgccgccaaatccgccaccaagcggcggaagctgccagtcctcgggaaccctaaattgcggcggaaaatcgtatcctcagtaccgttgctctccgccggtaacttcctcgacgccggcgatcctgacgctgaacgacttcagcg

SEQ ID NO: 32203 - DNA, 382 bp, Glycine max
  Clone ID: LIB3051-077-Q1-K1-C10
tacaaagtaggaagatacagcttcttccttggcatataatgaaaacataagacattaagaacggagaaaaggatcgtgagttgactcttggatggttgaatggtttcctattactgttttgatccaacagaatgtgagaattctaacaaattttttggttgtgtagctcatgcatattatctgaaaagcctctgggttttatttcggaacttgtacatgctttccatttcttatgtcttgtgatggatgtcactcaagaaaatatttgctaaatatctccagtggaatttgaacctttgcactggaggtaaagtttgttcacacggaactcagtttgtcagctgagccacattttatgtgtgctagctgtcacattttaatg

SEQ ID NO: 32204 - DNA, 453 bp, Glycine max
  Clone ID: LIB3051-077-Q1-K1-C11
cccacgcgtccgctccttctcaatgcaagagttctaaccaagcttctcacactaaggcctcgggtagaactgcagattctgatattcatcactcatctgtcataacatctaatgctccaaccctcaaaagtttttcccaggaacaagggagagttttgccaggtcatatgcaaatttcttttgggggaaattacataacgcccctgccaccccaagggcaaccactactcaataacaaccatcctttatgcgcaacagctcaaggaactccatacagtgggggcaatgcgaagtcaaattcagaaggaagtaaagttagttcgtcggtgaacgcttcacaactgcaacaaactgaaaattctgctgggagtggccaaaaatcttctccagtttgtgggagaaatgtcccgtcaatattaagttcatgccccatgcacctatcagagctaaagt

SEQ ID NO: 32205 - DNA, 452 bp, Glycine max
  Clone ID: LIB3051-077-Q1-K1-C12
aacacacatactttattcctttggagtgttagccgccaccacaccatcgcccaactacagatcgactcttgttcttggtcgcggtctctaatccaggctcatgtggccaaccacgccaaagatccgcactacagaacacccaccaattgactcgtgaaaccctaaccttctcacacacacttgccacacctttgcttgttgcttaattggagttttagttgtcaatggttggaaatggcttgaagactgcagtattattgcgaagttctccagtagagattcctgagaaccgaaagtggatgtattagaggttggatgctaataaatgtcggacaaataagttcagagaaggagtgtttgaatttgtatagtgagttactagtcaagacatgcttcaaatgcatggagaacaaacaaggtgtacctgcatgaaatgcatatataatgttttc

SEQ ID NO: 32206 - DNA, 476 bp, Glycine max
  unsure (1)..(476): unsure at all n locations
  Clone ID: LIB3051-077-Q1-K1-C3
tcggctcatccacgaccttcatcngctccataccattgctttcacattgctgtctcaattatacaggaaggtcattgttgataataatggtattcttaggttcggcgtagcctatctatacaaataacacataccaaataatggatagcagaaataagagaagcattcaccccaattcacttttgaatttccagttgttaatttagatttaattagaaaaggattaataaagtaatgcttgtgatttgtgaacagcatatacggaagtaacacacactgaagtcttgtggataattatactctcataacacttttatgatactttttacaatttaaaagagaaatgttttttttttctttggataagatgaataatgtaataaagagaaaaaaaatattataataaatcattataagaataatattactcaaattttatttcaccaaatgtattagttgcagaggaagtctcacag

SEQ ID NO: 32207 - DNA, 470 bp, Glycine max
  Clone ID: LIB3051-077-Q1-K1-C6
aattctctttgtgaaagcaacaatgaagagtcgtgtaagaataccaggtttaagagactggctgtgatggactatactgcagggcagaagaaaaagaagatgaaagcattgattccttagattatacaagctatttacttcggagtcctttccatactccagaggttcattggattgctatagcttggtttcatttgtgacatcgttgcttttcttgattcagccaatccaagtatatattgatatcaaggttcagctcatgaggaactgtctttggttatcatcaatctgaaaataaagaatcacacacgatgtatggaaagcttacaatgaatgcatgcaaggagaaccagctgctgaacgcttgcttgccatgagcaggttcaaaaataaagtggttgaaaaaccagatgctgctgatttgatttggaccgtgttacaagggacctgaaattcaatcgatgacatgc

SEQ ID NO: 32208 - DNA, 454 bp, Glycine max
  Clone ID: LIB3051-077-Q1-K1-D10
ttacagagcattttccaacacgattactcgaccgaatcaaacccctctttctctccgaagctggttttaatatcgtactggccttcgattgttctcctctttaatacatactgttctctcttcgatttgagggaacagtacaagagtctgagcatcggttaacccaactgcacaggtagtctccaaataatggagcctcatgatgagactggatgccaggctcctgaacgccccattctttgcattaataattgtggcttctttggaagagcagctaccatgaacatgtgttccaagtgttacaaggacatgctgttgaagcaggagcaggacaaatttgcagcatcatccgttgaaaacattgtgaatggcagttccaatggcaatggaaagcatgctgtggctactggtgctgttgctgtacaagttgaagctgtggaggtcaagattgtct

SEQ ID NO: 32209 - DNA, 386 bp, Glycine max
  Clone ID: LIB3051-077-Q1-K1-D11
cccactcgtccgcaattcccaacccaaaccgcctccacccttttccttcctactcacgcgtgcgctattctttgtcaacccagccaaaacgaccgtcgttattttcctctttctttcaccaaatgatgatgggttcaaccccgcctcgatcataagaaacaccaaactaacaaagaagcagaagaagccaagaaggcgatggttcatcaaaacgactacgactactacggcagctgcaccgtcaccttcctacatctcgcgtagtgatcgacgacgacgacgacgacgacgatcggcgattgaattcttcttccgcggtgatgatgtcgaacctgtacggcgaatacaaccacatgatcgactacgtgttcaaagtggtgctggtc

SEQ ID NO: 32210 - DNA, 466 bp, Glycine max
  Clone ID: LIB3051-077-Q1-K1-D2
gattgtcatcctcagtctctctgcctccgtcggcgcccgccccttcgtccttatcctctcccaggaagactacaaggacgacccccccgccgatcccgactcgcccgccgagtgggatgagttcgcccacggagacgcccacaaatccgaggaggacctcgaccccggctcatggcgccccatcttcgagcctcccgccggagatccccaacccctccccgaatccgacgccgcctactactccgccgtccacaagctcatgtccggcgagcccgccctgatccaggacgccggcgaggagatcgccggcctggccgtgagcgggcaccctgcggcgcaatcggtgctagggtttttgtgggaaatggggctctttagagagcggagcaaggggaaggcctttctgtaccaccacttcgccgcggagggaggcaacatgcaatcgaagatggcattggcctacagc

SEQ ID NO: 32211 - DNA, 469 bp, Glycine max
  Clone ID: LIB3051-077-Q1-K1-D5
cactatggagatgcaagcagaatcagatagaaaaaagagagctcaaattcttgagtctgaaggagaaagacaggctcacataaacattgctgatggaaagaagagttcagtgatcttagcatcagaagctgctaagatggatcaagttaacagagctcaaggtgaggctgaagctatacttgctaaagcaaaagcaacggctgagggactggctgttgtgtcaaaatccctaaaagaaaatggatgacctgaggcatcaagtttaaggattgcagagcaatatattcaagctttcagtaacatagccaaggagggcacaacaatgttgcttcctagctctgcatccaatcctgctaacatgatggcccaagctcttactatgtataaaagcctgcttggtaatccttccagtggtaagcttagtggaacttgcaccccttcaatagcatggcaattagaaggaaatgat

SEQ ID NO: 32212 - DNA, 453 bp, Glycine max
  Clone ID: LIB3051-077-Q1-K1-D8
cccacgcgtccggaaacaaacgctcactcactcactcactcctttgtttgttcttttcgccctgtgcttcctcatccatcagcgctatcattagcaattaagaaaccaaggtacataactcacaccttcaccaccacctcttcaaagtttgattttttcttcacaattcaacttcccccaaaggacacgatgagctactagtactagtgcgtggtggtagctagtagtatttctcaagaaaaaaaacctaagcttttatagtttatataatagttttgtgctactactactactacacgttctcttgtccctttccttcttttcctcttttttttcttttttttctgccttagatcttgcactcactcaccaccttgcagttttcagacatggggtttctcttcttcttcttcttcttcttctcctccttctttttcttctctccaaccactt

SEQ ID NO: 32213 - DNA, 214 bp, Glycine max
  Clone ID: LIB3051-077-Q1-K1-E1
ctttctctttttttctttttccaaacttggcaacacagtttttaattatttaattaataaatggtgggggcgatgacgtcgtcgatggcggccaagttcgccttcttcccccccaatccagcgtcgtaccgtgtcggcttggatgacgtcacggggaagctgaagatgaccggggttgccaccaaggaaaacgtcgacgtattgaagcttttca

SEQ ID NO: 32214 - DNA, 450 bp, Glycine max
  Clone ID: LIB3051-077-Q1-K1-E11
gtgacggtgaattgggtagaagaagatgagaggggtgaagagagcagtatttgtaggcagagcgctaagaagcaattccaacaccgccgtgtacggtgttggtgccacccttcatcgagatcgaatggctccccatggctgcttaaccccatcaaatccaaatccttctgtttctgttactgggtttagatacctttctgcttctgctgctgccacgtctcttgcccaagacgctcagaccaaggccttcaaacccaaggaacttgtcctctttcagtaccaggcctgtccattctgcaacaaggttgcagcgtttctggactattatgatattccattcaaagtggttgaggtgaatcccataaacaagaaagagatcatatggtccgactacaagaaggtgcctatcctcaccgttgatggtgaacataatggtgactcttcagacat

SEQ ID NO: 32215 - DNA, 479 bp, Glycine max
  Clone ID: LIB3051-077-Q1-K1-E4
gatggaagttgagaatgcaaaactgaaagctgaacttgctggtagaatagctttaatatgtgcgctctgtcctgagttagagtacgagtcattggatgatgaaagggtgaataatatattgaggaatgccgcagagaagacacaagaagccttgcatttgaaagatgaatatattaaacatgttcaatccatgcttaagatgaagcagatgctatgcgtgtcctatgagaaacgtattcaagaattggagcagaaattgtcagatcagtatgtgcaggggcagaagatgtccagtgtaaatgatgcagctgaccttccccttgtggctgggaagacagataattacaagtcagaatctatcagtggtgaagccaacatgccttgcatatctacttctgagcccatggatgaggtttcatgcatctcaagttccttggatgcaaaacttggtttgttcatgttcacagagcatactggta

SEQ ID NO: 32216 - DNA, 466 bp, Glycine max
  Clone ID: LIB3051-077-Q1-K1-E5
aagcaaattacctttctaactaatctttaatcaatcctctaataatctccgattcaacagcaagctcaatctcaaacagcaggcgaaagctgaatcaatccttccaagttccaccaccaccgtcccaaccctcttcttattattcttcttcttcttcttaatataaacaacctcatccatactaaggaaacaaacgacatatactgcaaccatatacgttgatcacacgtcttcgatatctgactaagatgtcattatgggaaccttgtacaccgtcaacatcaaacctcccatcacggacatcgccctcgccgttacccttctctttgctacatactcagcatcgtcataagctccctcatggtctacaaccatgtcatcggcgacactgttcacagcatcttctatgcaattctgggacttatcttgttcataccggtactctactacacgcaaattgcgtatt

SEQ ID NO: 32217 - DNA, 256 bp, Glycine max
  Clone ID: LIB3051-077-Q1-K1-E9
ggttcttctacgaagctccaaagttcacagagaatgaccctaactacctaatcctcagtcggcgctcattctacagcttcacttaacggtctcaaataactgaccatttatcgaagggatttgccatcagtggagtgctgtgttgaaagtgaaattaaacattaatgtgttgggatgctatgagaccgtattgtcaagctagtggtgcgccttaattactgcgttgcgcagatatacattgccatctaattacttt

SEQ ID NO: 32218 - DNA, 457 bp, Glycine max
  Clone ID: LIB3051-077-Q1-K1-F10
atctttccctcaacagaaaggataaaattcacgccccttcgcaggaagagcccctcaactctggcggtgtcgccatcggcgacctcatcttctactctctcaaccctaccgtcttcacccttgaaaccctcctgcacaagccagaaaccgctcctcgtgatggacccaccatccaagactcatcggaaaccctcaccagtgactcccccttcgttctagacgccgaaaagcctccgactttagatgccgcggaactggaatccatggaaatgattgatgggtctgacgagacggtggtggtgggtaccaattccgagcctttcttcatgagaagggttttgaaagaagcgcctgggaacaacgttaatgatttcaagttattagtgcttatggctcatggtgttgttcttgaatctggatttgtttgaatcgacaaggattctggtatggcgtttag

SEQ ID NO: 32219 - DNA, 346 bp, Glycine max
  Clone ID: LIB3051-077-Q1-K1-F11
catttatactttagttgttcagtacttctctattttctgtgcttccacgctctatcttcaaacgcgttcaatcgtcgtctttgtcattaattcccatattgtttccacggcagctttttctagcagtcgatggaactatgaaagatggggtggatttgattccaatatcaagccgcaatgcaaagcctccaggtgttgaattgtgggcagttcttgatgtccctgtacattaggttggcgcttcttggaaaaatttaagccattcactatcaggtctcttttgtgcttcaatcaacttcatggagtcttctaccacttattctactcctgaattggcatttcaatc

SEQ ID NO: 32220 - DNA, 454 bp, Glycine max
  Clone ID: LIB3051-077-Q1-K1-F12
cccactcgtccgggtgaccatactgatgtccatcctgctcctttaaacaaatctagttgttgggaaggtctcagttactgtcaatcaatgttttcttttgcaaggcacgacgaatccaagatccaaatgttcgatccacatgcatcttatggtgtcatccatctacggacaaaccgtacagtcttccttaattgtgcagaaagagacttgtatatggataagtcgggcattgcaaatggatcttctacctgttactttgacgaagctgataatatggtcagtggtcattccatttcatgttctaataagtttcctgacatctcaagagcacaagtatcatcccctgcaggattctccattccaagcatgttgccaccacctggctattcttcccatgagagagtggatcatgctattgattccatttctgtgaattctctgcttgaccattctt

SEQ ID NO: 32221 - DNA, 471 bp, Glycine max
  Clone ID: LIB3051-077-Q1-K1-F7
ctccattccaaactcaaccaaagtcgttcagagagagtgcttacacaaagcctgaaccggagcgtaaagtgaaaaacacacacacttgctagtcccttcacaatcacaaggttgaagaagacatggccgaagatcgcagcctgcctacacgcgccttcattccctccgtcgataactccgtttgggccgatgtctcccctgtcctccaagccgcctgccaagatcttcaagagggagagcttattcatggagacaacttcaatctttttgccgtcatgtccgcattggagataatggacccgaagatggattctggaattgcttgtacatactactctttcgatgaatccattgataatggtgttgctcctggtcctattaatgcggataaaactactgatgttcgatgcatgattgacatcattgaccatctacttgcctttgaggcaacatggcacaagggtcattcat

SEQ ID NO: 32222 - DNA, 308 bp, Glycine max
  unsure (1)..(308): unsure at all n locations
  Clone ID: LIB3051-077-Q1-K1-G11
cagagatggcccttagaaataatgataaaaactatatgtagtttcaaaacttcaaaatgatgtagtatgtattatgttgcactctggtgttttgtgtctaaacaaacacccttagaataaagtggtcatttcttgcccttgagcaagttcaagtgttttggacttgtgatgggtgtgttaaggtcatggttgccttttatatatatatatatataaatgtttggtaattggtcgcttctgtataaagttcggctagttaatctgaatatgaatctctgttaaatattaactagtactatngctggaat

SEQ ID NO: 32223 - DNA, 372 bp, Glycine max
  Clone ID: LIB3051-077-Q1-K1-G12
acaaaattgaactttactataaggaaatcctctatccggagtatacagactccaatgtgctgtgcttcaatgcatgcgactgtctgcctactcttcacacaacaaaatctatcataacaaaacacgtgctacaagcccttcatgagagctaggtgcacagcaatcgaaagatgcaaggcaacaccataatttgtcctataattacatggttgccactatcgcgaataatcagatctcttcggtacaggatatctacatgtacctctacataaccttctgaaatcaacactcacatacactgcactacatctgttctttgctatgtgtgtgcatgattcatttttgacttgccttctacatcatatgaaatca

SEQ ID NO: 32224 - DNA, 385 bp, Glycine max
  Clone ID: LIB3051-077-Q1-K1-G2
gtgtcttgttagttcacacactaagttctgaaaaatgagttccaaagtttttattattctactgatgggcatggccactatacttgtgatctcctctgatgttgcaccctatgatgcataccataattttgacaaaacagatgggaagcgtattgcaaatggggtatatgaaagcaaatattggcgttgtgactatcagctactatagtggttggcgtggtgtgaggatgccattctggctatggaggctgacgtggtgcctatagcactggacatggtctctattgtctctggcgtgatgactatgcgtgtaggcctgttgactactgacgttgctacggtggcttatgccctatctaacataatcaggctcgaatacatgcta

SEQ ID NO: 32225 - DNA, 329 bp, Glycine max
  Clone ID: LIB3051-077-Q1-K1-G3
cacaagaccaaactcacgctaagccttataagttttgattgatcttccaagtaccactacaaagaagggtttcatctcactttatagaggtgcatttaccatcccgcataattgctgattggacaagtgacgcatgagcaatccttgtgaatggtgcattctaatcacctctcgctaaagtatgctctatgatacatacacaatatagccttttttaagtcctaatttatctaacacaatgcccagtgtacaattacacagctgctgcactgcctctatactctattatccatcatcagtaatatactcctgtacttctgttgagcatt

SEQ ID NO: 32226 - DNA, 464 bp, Glycine max
  Clone ID: LIB3051-077-Q1-K1-G5
cccacgcgtccgcatgactatatacgacgtcactaaatgaatggatactacatggacaggtatgattaactggacgtaattcacaaatatgacagcttatgtgctccaaagcatactacttctatgacctcagttcaaaggttttagttttaggcagtttccttgcttttaatcgagataatctggtgatgggctagtagtaccatatgcattataattctatcataatttttaatcagaggctggatgtgtcaatcctttgggccattctttactcaaattgtcatctcgtgcatcaaatttcatgggttcttcttattaaatttttattttaagcataaaaggatagaagtagtgttcagtctgaagttaccaattttagacagaaatcttcctttggttccctttcccttataacaaggtccagggatgggaaaaggttaataaccaaaattgaaaatatc

SEQ ID NO: 32227 - DNA, 325 bp, Glycine max
  Clone ID: LIB3051-077-Q1-K1-G8
tcttactataccgtttttccctaacaaacttaccactctctaacttctatccaaaacactacattgttccgttttatttacataactctaccctaccattaatatacacatacacaataacaatctaccaatctacacttcaaaatatattccacacttaccataacacactatattattcttaacataataatttcatcatctaccaataacattaacacaacaccataaacaacgaacaccacatcacactcaacatcaatcactacatctttatccgcaactcaaacaacattctcccattaccaaaccacaaatccatatc

SEQ ID NO: 32228 - DNA, 290 bp, Glycine max
  Clone ID: LIB3051-077-Q1-K1-G9
atacacttgtactgttctattagttcatactaagttctgaaaatgagttccaaggttttgctggttctacttatgttcttggccactatacttctgatctcctctgaggttgcacccgatgatgcatacgagaattttgacaaaatagatgggaagcctagtgcagatggggtagatgaaagcaagtattggcgtggcggctatggtggcggctatggtggtggttatggaagtgggcgtggaagctatggaagtgggcgtggaagctattgaaggggacgtggtggata

SEQ ID NO: 32229 - DNA, 392 bp, Glycine max
  Clone ID: LIB3051-077-Q1-K1-H3
gttttgttagttcacacactaagttctgaaaaatgagttccaaagtttttcttattctactgaggttcatggccactatacttttgatctcctctgaagttgcacccgatgatgcataccagaattttgacaaaacagatgggaagcgtagtgcaaatggggtacatgaaagcaaatattggcgtggtggctatggcgactatggtggttggcgtggtggtggttggcgtggtggctatggaggctgtcatggtggctatggtgctctgcgtgttgactatggtggctctcgtggtggctatagtggtgggcgtcttggctaccgaagttgtaatagcggctttggccctaacgaacataatgaggctgggaatgatgctagccctcacatc

SEQ ID NO: 32230 - DNA, 400 bp, Glycine max
  Clone ID: LIB3051-077-Q1-K1-H4
tctccgtttttttttgtttgatgatattaatgttttgtttctaaaagttagcatttagtctggaaacgttatagtctcaaacaggtttcacgtctaaaaacgtttgatgattgtaaattgtagtaggatgttgtctaactgtattgtgcacgttaaattgtcagcgattatggctgaaggtctattgacccttatctgaccattgatgtattgactgattatgttaagagatatttgaagctcaaactggaacgtatactagttcagaagatgttggaggagacactaggtggagatcaacctatagccataaaaatttctggcatgaagttgcaataaagagagactgtaaattgatagagcaaatttcatgatagacaggaaagaatgttcttatttg

SEQ ID NO: 32231 - DNA, 324 bp, Glycine max
  Clone ID: LIB3051-077-Q1-K1-H5
ctcactcgtactaagatgatataaatgataaagtttcagaaaaaaataatcaataatacgtgtagggtcattatgatgaattgatagcaagtattacagtatcatagaacgggtgatgttgtagataaatctggtcttacatgatgtttcatgcagaacttatggttgctcacatttacaattgatcttgcttctttcagagctgtggggcactctaggaccattatctgcacccactttgatatgtttaacttattcatgttatatgagatatgtgtaagctataaactgcaacgtatactagtgcattaatatgttatatga

SEQ ID NO: 32232 - DNA, 306 bp, Glycine max
  Clone ID: LIB3051-077-Q1-K1-H6
gatatcgtctcttgatatattattgctgttaagagatgaccttacctgcggtgccaagacaggaataaaatttcgtctatggttcccggggaaaaaaaaaaaaaaaaaaaaaaaaaaaaaaaaaaaaaaaaaaaaaaaaaaaaaaaaaaaaaaaaaaaaaaaaaaaaaaaaaaaacaataaaaatagaaaacactaaaaaatatgatgaaatcaactgatcattaagggcacctaccaagcatatggataacttataaatggtaaatcaactgtgggaaagacatggtatgaaagatatactgctg

SEQ ID NO: 32233 - DNA, 227 bp, Glycine max
  Clone ID: LIB3051-077-Q1-K1-H7
tgatacgctcactagatatattattgctgttaatatatgaccatacctacttttccaatgcaagaattaaatttactctatggttaacctaaaaaacattaacaaacacaaaaaaaaaaatatcaaaaaaaaaattacataattctcaaacactaaataaaatcttacaaaacttacaactaaaaaacaattctctctaacatatacttcatccaaacataagtaaa

SEQ ID NO: 32234 - DNA, 228 bp, Glycine max
  Clone ID: LIB3051-077-Q1-K1-H9
gccaggtggacctttctctctttcttccattccatcgcattgtatggtccccttttcatacacgacacatcacattccctcaacacaacactttccattttcaaacacccaccaccaccaccaccaccaccgcttttctctctctcgggttcggatctccgaccaccgtcgcaccgcggaacgagcttccaaactcagaatccagatccctactttcacaaacaaaca

SEQ ID NO: 32235 - DNA, 443 bp, Glycine max
  Clone ID: LIB3051-078-Q1-K1-A1
cactgtcttccttctctagggtttttagctcctccaaattcttcgcccacccacgcgtgcgctggagagaatccgtttatattaaaaaataattatttatatatcaaatcaattattttttttattcaaacaaattgaagacacgttatgagctagaccttgacatttttttatcatttatatacacatgcaactctcacacacacattcctacataatgttattgatttcctaaggataaataccaattcggatctttttatcctcattccatatacttgttaacttgaatataacacactacacataataacaatgaactaagtctagatattgtattgcttcattgcccgaaataaactaaatttgtaataaactcaataatttaatttttttcaatcaatacttaatgattgtgtccaattcctagtggaaaattactt

SEQ ID NO: 32236 - DNA, 397 bp, Glycine max
  Clone ID: LIB3051-078-Q1-K1-A2
tccacgcgtacgctttctcttgttaactaattaaaatgactctcacaaaggccttgttgtttgtgaccgatctatgctggacctctgccgcatatgctgcaaggtttgacatcacaaaccgatgctcataccctgtttgggccgctgctgtgcctggcggtggcatgaggctgaactcgggccagtcatgggctttagacgtgcctgcaggaacgaaaggggcccgcgtttgggcccgaaccggctgcaacttcgacagctcggacccccgtggatgccataacagtgactgcaggaatgtcctcgactgcaaagcttacgggacgcctcccaacaccctaacggaatacgcgcttaaccagtttagcaatttcgacttcttcgacatcttccttgt

SEQ ID NO: 32237 - DNA, 354 bp, Glycine max
  Clone ID: LIB3051-078-Q1-K1-A3
ttctcgacgcacgcgtccgattaaagccaacattcaggttccatcaactgatacaggagttttatttggtaacataggctagtatacatcttctaatgttcttgagagaacagttattgttctaaatgatatccatattgacatcatggactacatttctcctgcatcttgtgccgatgtggcattcagaactatgtggtctgagtttgagtgtgaaaacaacgttgccgtatatacagtattacaagattagagggacttcctgaaccacattatcaagtctacacatatgaactgcctgactacaccatcggcattggaaagtgattgtggattcctttgctcaaaccttta

SEQ ID NO: 32238 - DNA, 316 bp, Glycine max
  Clone ID: LIB3051-078-Q1-K1-A4
gtttgagattcaggattgaagagcaagcttatcgtttgaagaatgatgatgactttcggccagtttcccattgaatgccagtgaaggatggtgaatatgtaatagcattaacagtaatggtcatacatggaaactattatgactttgcctgcttttcatcaggtgctaccaaaggatggcgattttgtaagaagtaagaagtaagaacagtgtgcattcgtctcaaaaatgaagatagcttcccttaactctgggtctcttctagagattgttgaacacataaaaaatgagaagtccaactaaagtagaaaatgct

SEQ ID NO: 32239 - DNA, 363 bp, Glycine max
  Clone ID: LIB3051-078-Q1-K1-A5
gtttcttagcattgtctcttttaaggggcatctggaaaaggaggattcgccggataaagacacatctgagtctctctctcagtgtgggaagaacgaagcagaagaagcatctcagaacagaaccaccgaacccactcagaagcaaatccgaaaacccctcatataatagtactggtattcagctgttcatgacaaaagcctgaaccgatcatgtcagaaggtgcagaaattgatgagcgtgtggaccttgacgaggaaaattatatggaagagatggatgatgatgttgaagaacaaatagatgatgatggagtggatggaagtgaagatgaaaatgctgaaggtagtgttgaagaacatgaa

SEQ ID NO: 32240 - DNA, 441 bp, Glycine max
  unsure (1)..(441): unsure at all n locations
  Clone ID: LIB3051-078-Q1-K1-A8
caaggtttccattctctctctatctgttcaatcttctctcccttctacttctagggttgagcttctgcatcggacatgtcttcttcaactcatcacagttgactttacgagcgaattcaatcaggcttgagaaggtatcctgatgttttttgttcaccatcatatccatgatggaatactgtaaagatgtcctcagctatcttgattctgatacatctattaagatactcatgtctctggatgatctggctgaccttgttcgggccacctgtgtctcgcgctcttggagagacattgtgattgcaaatggtctttgcaagcagctgtgcttgagaatgtttcctcagttatctagaagtgctttttagtgtgaactgaatncaaatggaacgaaggaacatgcaaaggttggatctagctattctatggaatggctatctc

SEQ ID NO: 32241 - DNA, 366 bp, Glycine max
  Clone ID: LIB3051-078-Q1-K1-B1
gtggcaatcaatgaacaacgccaattctgaaacttcttctccttcttcttcttcttttgtttctcttgtgtacttctacttcttctgaacatggaactgttgtctctgagactcaccccttcaccttcgagttcgacttcatcgcttcctgcagcacttgctcactgctccaagctatgtgaatttcagccgacgaagaagaagaaggcgtgcttcgacgcgcctaggcttgcggtgcggcgtgtgaaggcctcggcggagcgaaccggtgatacgatcgatgatggtgaggctcgtagcagcttcaccacacctgccatggaagtcaccacattcaatcgaagcactattagcgatgctgctgac

SEQ ID NO: 32242 - DNA, 307 bp, Glycine max
  Clone ID: LIB3051-078-Q1-K1-B3
tggactgaaccgaagacgaatagatgtttctcgccgtcggaatcgtcggtcttcatcgagaatggcttctacatgcaccgtgcattggactctaacaatgtcatgtacgctactaagtatttggcttatatgctctacgagctcaggacttgcaagcatttgcctcacaatcactactatctatacatgcgcccctgtgaacagttaaggaatccttagacgctcttagagtaacagactcgtatctgaaggtccattattgacctttatgaactcctacagaacaccggcaacattttgccccgat

SEQ ID NO: 32243 - DNA, 425 bp, Glycine max
  Clone ID: LIB3051-078-Q1-K1-B8
aattggttaagcataagcccattgaagaatgcattagagctgggtgttatgcagccagggttatcatccaaaggcctggctgcacatacccaccgacgcctgattttcattgagtgattcctctttttctgttactgctatgaatttttttctttttatcattgagaaggattttaatagccacactctaactggtgtggggttttttaaccccccggctagggaaaacagcgtgaaaaagttgcagcaagagataaaacttgaataagttcatatatttgaagtccgatcaagcatcaattctcatattgctgtttgtgatcttttttcattttcattttttccaccttttcttctttttattacagtttatgcttgatttgtacccctatcaaagcacatgtatcttaattatgcctgttggt

SEQ ID NO: 32244 - DNA, 305 bp, Glycine max
  Clone ID: LIB3051-078-Q1-K1-C6
cccacgcgtccggccacttataggtggggaagaagcagcttcttcagagagtgagtgcggtttctggacccgtgagattccatggcttcagttggtgcagtcaattgcaaattcttcttgtgtctacttctatggctctggaactttctacctgcttctcaaggtaataagcactggcatgaaaatagatacccttttatcagaaatgcaagctcattctcatcaccgtcaatttcaactaccacctgcaataatgcctatgactacataatagttggaggtggcacagcagggtgtcctttggc

SEQ ID NO: 32245 - DNA, 439 bp, Glycine max
  Clone ID: LIB3051-078-Q1-K1-C7
gcctaagcctgagacataccatagagaaagtgattcaattaatatattatatggtgttgctcttcaattcccatggagcctaagacacaacctcaagcgaatagtcctccaccaaaaccttgggaacaagcgggttcctcttctggtccagcacctttcaaacctccgtcagctggcaacacaagtgatgtagttgaggcttcagggactgcaaaacctggggaaattgtttctagttctgataggagtgcagctgtcaacaggaatactcttgggaggcctgttccctccaggccatgggagcagaattatggaaacagcacctatggaggatatggttctacaatgaattataattctgggtatggatctggaatgtatggatcttcttatggtggactaggaggtggaatgtatggatcttcatatggtgggggga

SEQ ID NO: 32246 - DNA, 364 bp, Glycine max
  Clone ID: LIB3051-078-Q1-K1-D11
gccagagcagggtcgctcctcaatggggctcttcattggtttgtcttctcggagagcagggaggatcatgtgattatcgcctttgatctcgtggaaaggactctatcggagattcctcttcctctcgctgatcgttctactgtgcacaaagatgcagcttatggtctgagaataatgggagggtgtctcagtgtgtgttgctccagctgtggaatgactgagatatgggtgacgaaggcatatacagtgcggtcatctcggactatgacctttcttatgcatacttctaatcggatttccccatatgcacaatcaaagatggtgagattataagatcaaattgcgcaggaactggaagatacag

SEQ ID NO: 32247 - DNA, 435 bp, Glycine max
  Clone ID: LIB3051-078-Q1-K1-D12
cgaagcaagacgcacttgatctcttgcaaggacattatatagtttctgttggccgagatacagctgccactgctgagaaaggaggccttgaagctatagcttcatttcctctggctttgggtctgggtttgactggtttcctctgtgcaaccatgtcactgaggcaagttcaatatgatttccggcacatcttcttttcactaatgtgggcgggcattagcatcggcatagcagcatttgtgagggccaatggccgagttttctgcaacaggcctcgcctacacaacccccggtgataacttctattcagaccagtttgggcaatttatgcgaagtgtccagcttctgcagcatcagtcacctgcagaggccttagttctacatctagatcactttaacgatcaatatttacatgatgctccttcttgaagctta

SEQ ID NO: 32248 - DNA, 446 bp, Glycine max
  unsure (1)..(446): unsure at all n locations
  Clone ID: LIB3051-078-Q1-K1-D2
ggagctagtgtggcttagtcgctaaatttgttacgataaagaaattaattcagcaacagatacaatgggttctcttatggcaggatgggactctctgatcttggatcctgaatcagctacaatagagaggaatcgatcactcaccaaagaagaaattaatgcttactggagagtaaagaaggagacagagttagaacacctcagagctatgtccaaactatctgagactattcaggcccgaaaatttgaggattcagagaattctcataagtcaagtaccgtgaccttggccagcataaaggagtccttaggcatggacgttgaccagaaaagtttagagcaacttatcaagaaaaatggctggtggaccaaaagcagctgggcatttctgaatgaaccgncagtgatagaagctgcttncaataagtatgcatcacaggttcacg

SEQ ID NO: 32249 - DNA, 420 bp, Glycine max
  Clone ID: LIB3051-078-Q1-K1-D6
cgtcgctgctccgtaccagtttcactgcataaatttgagagaaaactctgcagacatgggggtttatcaggacctgcttacaggtaaactaatctctctcttttttttcctatcgcagcttttccttgtcgatctattgccaaagatctgcttatgttgcgcttctgatttttccattgtagagtattaaacttttatcgacgcttggatctggctttttttcttctcgatttaattactgattgtggacaagcgtttgtttcacgcgtatctgattattctattattgcatttcttgtcgctaattatagctaggttattgattattaccgatgttgtttgatttgattaacgtaaaacgctctgattttcaatagttttgggaagcctttagtcagtgattgagagttccacgttttt

SEQ ID NO: 32250 - DNA, 269 bp, Glycine max
  Clone ID: LIB3051-078-Q1-K1-E2
aaaaaaaaaacaaacaaaaaaaaaaaaataaataaaaaaaaaaaaaaaacaaacaatagagaggaatccaaactaaaaaactcaaacatacaacataataacaaataacaaaaaaattacctaaatacaattaactaaacccaaaaattgcccccccttttttgggaacccaattttacttacccatctttaaaacctttcacttcttctttatttcccccaatatcaatctacctgccaaccatttaaaaaattgatctttggaaaac

SEQ ID NO: 32251 - DNA, 114 bp, Glycine max
  Clone ID: LIB3051-078-Q1-K1-E5
taaaaaaaaaaaaaaaaaaaaaaaaaaaataaaaaaaaaaaaaaaaaaaaaaaaaaaaaacgcatatatataaaaatataaaaaaaccattaattaataatacacaaatattaa

SEQ ID NO: 32252 - DNA, 218 bp, Glycine max
  Clone ID: LIB3051-078-Q1-K1-E7
atagattcatgtatgtgagactcagaatctctggggaaaattgtgtgtggtgtggactgcttgttttgtttgtcattgagctatatcgctgttaattaggattttgtttcaaaatgatgcttataagttgtaatctaggatttctccctttgaaatcctaggttgttcttgacatttgctatttcaaagaataaatatatagcatctttctatttctc

SEQ ID NO: 32253 - DNA, 393 bp, Glycine max
  Clone ID: LIB3051-078-Q1-K1-E8
aaaaacctcgtaaattatattttaaaacaaaaataaataaataattggtcaaaaagatgattcacaaatgaatggattagatgtcacgtagctcttcccttgttgagttaaatggtagctaaacagaagggtctattgtaatatttttttaagttaatagattgggacaaatttaacgttgggtgatgccattttgcaaaagggtaaagtctaagaggctgattgtaattttcccttgaaaaatatgtgctatttatactattttatgtgaagaatctgtattgcatatgttttggtcataacatgcttgtttgtctgtgatggacttcttcgacttgactggtgatcttttttctcaactcctcttaataatttaacaagtttaatttggtt

SEQ ID NO: 32254 - DNA, 432 bp, Glycine max
  Clone ID: LIB3051-078-Q1-K1-F12
ggatccttctcttctttttccctctttctccttttcttcttcttctcttcttcagactgaaaggtgttttgaaaagccggttttggagttctccccttccggtgtttcttcagtatgggagcggtgtacgacatcgtgaagagcggcgtcggggttgcgtcgatgggtcacgcctgagctggattgattttgtgcttgattcaagaggagcgtgaatttgacgagttgagtagcctagacagaataagccactccagaagcaccccaaacccccaccctccaacccccattgtccacaagcacactaaatccatgataaagagatcagatttcgagaaagatggctctgtctcttgcaacaagtgtagaccacactcctgcgacaaaatcttcatccttcccttggatcccataattatggctagtggtatt

SEQ ID NO: 32255 - DNA, 269 bp, Glycine max
  Clone ID: LIB3051-078-Q1-K1-F2
atcattgtcattgtacgactctctgattagtttttcggagttcaattgagcgcaacgggatgatttacgtatcatgttgttggacatattagtcttatggggtgttgcgtataccctataataatgccttcggtgtctgctgatctccgtctagtttcttctatcaccacgatccattaggaaacttattttaatcgcctgaaaaatctcgaaaaatgagatcgtcgtagtaatcctatttaacactacgtcttgtcatactctttcac

SEQ ID NO: 32256 - DNA, 442 bp, Glycine max
  unsure (1)..(442): unsure at all n locations
  Clone ID: LIB3051-078-Q1-K1-F3
cccacgcgtccgctgagtcagcatattactgaattggaaaaaactatagaacaaatgagaaaggaacttggtatgactcaagattcagatgttgaagatggggggagcatcgaggaagatgaccataaccaaatagacatctcagaattggccctaagtgaggatgaagattctgatggttatgatgatgaggaagacagtgattgggacgatggcgaggcctccgagttttcagaattcataaatgatgagcacccttgaaggcaggttgacatatttgcattgatgtttccttgatcacatattccattgcctgcggctagaaggaccatcaagaaggggcaggctaaaatcaacttgtgtggttcttcctctatttgcacattctttagagctganaatatggagttccattttttcaaacttgtacaaagatgtgcct

SEQ ID NO: 32257 - DNA, 272 bp, Glycine max
  Clone ID: LIB3051-078-Q1-K1-F6
cccacgcgttcgcccacgcgttcgtcttatctctgcctgttgtacgtcttacatgagcggctgcttaaagtactaacacatcaccacgattcgtgatcttctcatgtacccgacttgtggtcaccactgtgacccatatctgtatcttctggcgaagcactatccgcactttctgacggatcaccgttatcactgttcgacttcttattgctatctgcttaaacgatcagattattcatgggtgaaaagctcatttgctcacttgtataggt

SEQ ID NO: 32258 - DNA, 283 bp, Glycine max
  Clone ID: LIB3051-078-Q1-K1-F8
cccacgcgtccgggcaaaacgtaacagtgagttgcaggcttcaaggagtagttttgctgaaactttgagcaaacttcaaattttggaagcacaagttcagacaagtaatcagcagaagggatctcctcaatccatcatccatataaatcatgaaagcatttacagtcaaaatgcaagcaatgcaccaagcttcatctccttgtctgaagatggaaatgatgatgtgggaagttgtgcggagtcttggtctacagcaattatctctgaggtatcccaattccct

SEQ ID NO: 32259 - DNA, 397 bp, Glycine max
  Clone ID: LIB3051-078-Q1-K1-F9
acgcagtgttagtgtgtatttcctctcttctcactccggagatcgatattttcaagaagagaggcgaatagccgttcatcgatggggtggatctgtcactgataagatggttactaagacagatgatgactcacactgaacaagctcgaaaacctggtcgataacggcggttagatgctcgtgggagtacctctgactcgtgcggaagctcaaagttcggctgtctgagaaagttctgaatcacggtctctccatcttgaacgacctcaaacaacgatcctctatcagctccgatgaatggaccttgtatgagcatgctgctgatgctgctatggactgccaatgtctcgacgttgccaaggactgtacaaaggttcttcggaagagattcctagag

SEQ ID NO: 32260 - DNA, 392 bp, Glycine max
  Clone ID: LIB3051-078-Q1-K1-G1
atcttcgtctactcctggcttcgtctgtcactctgtttctcccagcggcaacaaacaaggcagagctaactccttacttctttcactaatccaacgaacaaacaaacaaacacctctctctctctctctctctctctctctctctgcttctgcttctctctctagggtttggagtttcgacaccatgacgagggagaagcgttctgcgccataattctagtacagtttttgctctttctccatgccaattccattcaccgcgaacgtgaagaaagaaaaggaaagttgaaaagagaaagttcagatgacaaacctgtgtaagtatcacagtcacctggacatgatcagttatttcatactaagatccttaaatcatatgatagaagtaagct

SEQ ID NO: 32261 - DNA, 260 bp, Glycine max
  Clone ID: LIB3051-078-Q1-K1-G4
attcattgtcttaatgttagcaatgtcttcctctttctccatccatttcttcctcctgctcgcaatagcccttttctcagtttgttgcttagcagcatctcaagctcccaccaccaaatcacacccctatatccttcccattaagaaagaccccgcaacaaatttgtactacacttcagttggcatcggaactcctaagcacaactttgatttaatcattgatctttctggtgaaaacttattgtacgattgtgacactc

SEQ ID NO: 32262 - DNA, 339 bp, Glycine max
  Clone ID: LIB3051-078-Q1-K1-G6
aaacgtcgagggagaagccgaagaaaaaggagaagaatgttaaaaaggatgaaggacggggaaagattggaagtatttatatcccagatcagaaggttggagaaactcctttaccttacaaagcaaaaggagtgaagagggagcgccgagaatcgaagcggaaaaatgagagtgatggaagtgcttcaaaacggaagaaggaagattcttaatacttacaaattacacttgtctttccctggcatctgattataatagaatgatcaattgtagatcatatgatattaaactgcatgttgtttacgtgtcatgaatattcatgattttcccctataaggg

SEQ ID NO: 32263 - DNA, 194 bp, Glycine max
  Clone ID: LIB3051-078-Q1-K1-G8
cccacgcgtccgcccacgcgtccgcccacgcgtccgcccacgcgtccgataagttctcggtgagttctgaaaaatgggttccaaggttttgcttgttctagttatgttcatggccactatacttctgatttccgctgcacccaatgaataccagaattttgacaaaaaagatgggaagcctgctccaaatgggg

SEQ ID NO: 32264 - DNA, 335 bp, Glycine max
  Clone ID: LIB3051-078-Q1-K1-H1
gcgttttagccgcgacgcacttcataagctgagagcctatggcgagggccgagtactgccaagaggcagcgacaacaacgtgctcaggaaggagtatatacaggagcttagcaacgataatatacgtggggataacatggatacgactttactgaagacttgacataaggtgaattgaagaccgaaaacgggtacggatacggatgatagctctacagctgaagctgggctcgcactgctgtcgtactgaggcactcagacgaagcaactggcttagaccacaatgacgacacagactatgtcagagatctgacatcaccgggtcaagactggac

SEQ ID NO: 32265 - DNA, 177 bp, Glycine max
  Clone ID: LIB3051-078-Q1-K1-H2
gagaagatgacatagtgtgtatggattctactggtgcatgtgacttatgcagggatgtctatgcaaagtatgcaagagggatcgactaccagtccatgaaagctgcgttatacgtacaaatactctcaactgtggaccagctattttgggacttaccgtagactgacgataggaact

SEQ ID NO: 32266 - DNA, 241 bp, Glycine max
  Clone ID: LIB3051-078-Q1-K1-H4
attacactagaacttgtgcttgatttatttgcatgtcgatagcagaaggatggaagagctgggagtgtgccacagttagcacttgtaattaggtaaactaatgctgacatttgcctggagtgagtttaggaccatgtgaattgtcctgctactttttggatcattgtttcccttaatatctgaactcttcatagcttgagttaaggatcataaagacctatcatgtttagcatgagttttg

SEQ ID NO: 32267 - DNA, 224 bp, Glycine max
  Clone ID: LIB3051-078-Q1-K1-H8
tccaataaaaaaaaaacttaaaaaaaaaaatataaaaaaaaaaaaaaaaaaaaaaaagggaagaaaaaataaaaaaaaaacaaaaatgactaccatattttaatgcccacatcttacctgggctgacattaaaaccctttccatttttacattcccccctaagcaatatttactcccctttattgtacaccttatagcctgggaaaaccccatttttacccaat

SEQ ID NO: 32268 - DNA, 342 bp, Glycine max
  Clone ID: LIB3051-078-Q1-K1-H9
tacaaaccctctcaccaaacctacatcgatctatctgtcactttataaaatatagtcgggggactatgtcgtctctgtcagtatcaatccatagtccttacaggtagtgagtatgttcctccttacttaatctattgtgtgaccaaagtcattattattaaattacgataatgagataaccatgtcgatgaaactgctattaacttccctatacatttcagtgagtcttttcatagcaacattatgcgtagatcaatccaacaaccgctacgtcttttactcacatggcgaccctcttgatactgactatgaatattacatgaagccggccataacagacaa

SEQ ID NO: 32269 - DNA, 169 bp, Glycine max
  Clone ID: LIB3051-079-Q1-K1-A11
acgctgaaactacttcttacgaaacgggactacatctggctcctgagcgtacgtactgtgcgccatagtctaaggtctgtggagatgctcatgcacgcactgaaccggatctattgggtcggcctcaaagacgcttgactggtggtttggcaacacgccgttatactga

SEQ ID NO: 32270 - DNA, 184 bp, Glycine max
  Clone ID: LIB3051-079-Q1-K1-A6
atcaagcatgtggcggtttaacgcagattctaggagacgcatgaacttcattcaccacagggcgagcgattccgatgtcagactgaccccgaagacaagatatgccgagtatcagctcgaggagaacacatccagtgctgatggttctgctactacgtgctcatagtagaccctagacgtgaat

SEQ ID NO: 32271 - DNA, 438 bp, Glycine max
  Clone ID: LIB3051-079-Q1-K1-A7
aatgccttctgctgtgggttatcaacccactcttagtactgaaatgggttctttacaagaaagaatcacttctaccaaagaggggtccataacttctattcaagcagtttatgtacccgcagacgatttaaccgatcctgcgcctgctacgacatttgcacatttagatgctactactgtactatcaagaggattagcggccaaaggtatctatccagcagtagatcctttagattcaacctcaactatgctccaacctcgaatcgttggtgaagaacattatgagactgcgcaaagagttaaacaaactttacaacgttacaaagaacttcaagacattatagctatccttggcttggacgaattatccgaagaagatcgcttaaccgtagcaagagcacgaaaaaatgagcgtttcttatcacaaccttttttcgt

SEQ ID NO: 32272 - DNA, 73 bp, Glycine max
  Clone ID: LIB3051-079-Q1-K1-A9
ccgaaattcggcgtttccgaacccctttgcctttaggctcagccccgacctgttggggcgccgttttgcaggt

SEQ ID NO: 32273 - DNA, 372 bp, Glycine max
  Clone ID: LIB3051-079-Q1-K1-B2
ctgattcatggctagtctatagtctattgtgtcgtggctgacttctctctcgactcagcgtcacgtctggtttggcagtgctcttacctgcaacttttgtattcttcttttccttttctattctttctctgttcattcttgctacttccactccttgcgtactagtaatcccccttcaataccatccatcagcattcatattttcacaattgttctttcaattcccataagcataaactgaattaaaaattgaaaatcagagcaataagaacacgcattctttacttccaattcccaattcttcttctgccctagattgtaccccctttattattgcactacagcaccactgtgcatcgatcgatcgctggt

SEQ ID NO: 32274 - DNA, 406 bp, Glycine max
  Clone ID: LIB3051-079-Q1-K1-B4
gcttgtggcagtagtgctcaagaaactagaaagaaaacaaacaaacaaacaaacaaacgaaaccctccctctctatatatcattcccctctcttctctttcgtttcgtcttcgttgtttctctctctcatttctcagccatcacagcctcgtctcaatttctatcttcctttgcgccgctccatctaatcacagatcgcaaaaatcaaaatcaggtactgcagggttgtgaaagctagatactaattagatcgctgattcgaagaaagagaaacaaaccatagtactagtactcttttttattagagatttcatctaatataatatggtttcacgatttaattaatcgcagaagctgccttggtgtgtgagggacgaagagaagagaaaaggaaagagatcggaaa

SEQ ID NO: 32275 - DNA, 368 bp, Glycine max
  unsure (1)..(368): unsure at all n locations
  Clone ID: LIB3051-079-Q1-K1-B5
tcggctggtttggagctggtagatatgaagtggatgggtacgtgtataattctgctgacgagcctgagatactgatgactggaaaatggaatgaggctatgaattatcaagtttgtgactcagagggagaaccacttacaggcactgagttgaaagagatttggagagttagctgataccccgaagaaggacaagtttcagtacacgcattntgcacacaagattaacagctttgacactgatcccaagaagttgttggcatctgactctcgtctacgtactgatagaatggcccttgagaagggtgacctattcacatctggttatgagaagagcaatttggatgagaggcaaagagctgagaagag

SEQ ID NO: 32276 - DNA, 373 bp, Glycine max
  unsure (1)..(373): unsure at all n locations
  Clone ID: LIB3051-079-Q1-K1-B7
cccacgcgtccggccaagcgaagccgagtcaagtgaagccgagctgtatgacagataaggcgggtccactttgatgaccgtttctttctttcaccttcccaacctgaacgaacgtgtacgtgtgcatcttctttctttgtatataaagaatttcaccaccatcattcttcaacccaatcactcttctcaattctcatattccaatgtcaaatcctcaaacaaacaataaccgtcaccagcccagccgcctgcagcgccgcgccccctcctccctgcaaataaaccgcgccgtcgagtggaacgtcgccatccccctcctctccccgctcgcatcctctccgncgccgatggagctaaaaccgccgcaagagcc

SEQ ID NO: 32277 - DNA, 417 bp, Glycine max
  Clone ID: LIB3051-079-Q1-K1-C10
cttggcagcgcgaacctcggaggaccaccgcttgtcatggcggttccaccatccaaaagtgaggccgctgagaaaagaacattcctttcacaattttactctcactatctcggaaaccgaatccacgctctctatccctacttctccacaaattacttgtccaccttcgctctccgcttcagatcaacgcatcgtcgggaatgtctccctcttacgctaccttcctcttcactcgacgctcccttgttcatgaccaagagatctagaacgcatgacgtcttggaagatatattagagcgtgcttcgataaatttgcatagcgtccaagagaatccgcagtttcggcaatccagagctaaaaagtcagattccctgaacgcacgtttcatgatatttgagagggtccaaggcttttat

SEQ ID NO: 32278 - DNA, 350 bp, Glycine max
  unsure (1)..(350): unsure at all n locations
  Clone ID: LIB3051-079-Q1-K1-C6
aaaaagtaagacaacttttagcatcatctgcagcaaagtctaatgcatatgttctccctgcacgagtcaacatcaaagaaaccaaaactagctcagccccccacattagtgcaagtggatctttgcataatttgtggcattcttcccctttggatgaaaaaaagaatgagaaagatgttgatagtaaattgtcagagccgactatccctagagctcactctgttctcaaagaaagtaacagtgatactacatacacccagttaccacgcccttcagctgatggactctcacctncacaagttgatcttttcagtgctactgatacctaagaaaataaaagacaagctttt

SEQ ID NO: 32279 - DNA, 305 bp, Glycine max
  Clone ID: LIB3051-079-Q1-K1-C8
tcgggaatgcctctcttgaatggaaaggtattacggaggcatggagatgtatttgagcgtagtgcgaaaggatactatcatgcccatggtcgatcggatgatacgatgaaccttgggggaatcaaggtgagttcagctgaaattgaacgcatatgcaatggagtagatagcagcattctggaaacagctgcaatacgggtaccaccttctggtggtgggcctgagctgttgactatagctgatggattcaaggattcaaatagcacatatcaagatttacaccaattgaggatgtcttttaattc

SEQ ID NO: 32280 - DNA, 317 bp, Glycine max
  Clone ID: LIB3051-079-Q1-K1-C9
cttggcagcgcgaagcttggaggagcaccgcttgtcatggcggttccaccatcggaaagtgaagccgttgagaaaagaacattcctttcacaattttactctcactatctcggaaaccgaatccacgctctctatccctacttctccacaaatttcttgtccaccttcgttctccgcttcagatcaacgcagcgtcgggaatgtctccctcttccgctaccttcctcttcactcgacgctcccttgttcatgaccaagagatctagagtgcatgatgttttggaggatatattagagcgtgttttgataaatttgca

SEQ ID NO: 32281 - DNA, 433 bp, Glycine max
  Clone ID: LIB3051-079-Q1-K1-D1
ataaaaatgtactctttactttcattcgagtaatgttgtacattccagtcaacggagctggctagacgcttaggagccacgctattacgacataaccaacgtgtacactatatttgatcaaatctagtctatttatcctttcatttgttatttctggcttctagtttggtccaaattatttatatatcaatcgatcacaacccaacgaattagttgaaataaaattggagatagaaagcaaacaacatcatgccatcaacaaggtcatgggaaatggagcacgatgagtgcatcagttgtggcggttttattgggttcaagagaaaccaagtgatagattgcagcagcgagataggagattctgatacagaggagttgtttgagataaatctgaaagagaaggagcctttggctttggatgcaataagagaag

SEQ ID NO: 32282 - DNA, 373 bp, Glycine max
  Clone ID: LIB3051-079-Q1-K1-D10
ctcaaaataaaaactataacttttgattatctgcacgttttgcatttgtgtttctgaggggagggtacctaatcccaatccgtttcttttcaatcttctcttctaccccatttcctagatctgcttgtttcttccatcatcaactaatcatggttcttcacagagaactcgatcatctcttttcatcccctttcgttgaccctcccaaagatgatgcgaaatccagtggcatgtcaattgaaaagaagattgagttcctcgacagtttgactggaaaggtcacaaatcggacgtctcggacgtggttaaacgatcgtctcttgatggaactagtaccacgtttaaatgcagacgaaattagaggcttgtttgc

SEQ ID NO: 32283 - DNA, 379 bp, Glycine max
  Clone ID: LIB3051-079-Q1-K1-D4
atttctctctcccgagttgctttctctcatttctctctcccgaattgttatctcccccgtctctgttccttctttccatttttttcatttttcccgtttttctgcattttcttacatctaaagctgtaattttttacatcaaaattgtgatttttatctcagattccatgacaacgatatcatatttgcgttcctttccaagtttgtatttctatttgaccgtgactaactattgttcttcctttgcaacacaaaagcttcaatttttttgtgttttctatttttttgtgttataatgacttttcgtaggacaaaaggttaaattttttggtgttcctgagccttctccgacgtacccaaaggttggagcttttttgct

SEQ ID NO: 32284 - DNA, 343 bp, Glycine max
  Clone ID: LIB3051-079-Q1-K1-D8
gaggtgagttgactcagcgatggcggatgaggtgactcaggtgatggtggcagagaacgagtggagcatgataggataccctcatgcttcgatcaacagcaaacgggctttcgaatggaccatcaacaagatcgttcgcaacaacgtatgtgccttcaaccttctttttcttcacgttcaagtccacgatgaagatggatttaatgacatcgatagtatctacgcatcgtctgacgattttaagaacatgaatcagagagatagaattagaggggttcatctgatggaatacttcagcaataggtgtcatgaaattggggtggcttgtcaagcatggatcatg

SEQ ID NO: 32285 - DNA, 372 bp, Glycine max
  Clone ID: LIB3051-079-Q1-K1-E2
cccacgcgtccggttgtatcttttggagggtacaatggacgttacaacaatgagaaaggcaaaggtgatattgtatcagtcttgaaggctgagaaagaagagttggaatcatcactgatcaaggagaagcatcatgctcttcaactaaagcaagatctggcagaagctgagtcttgtaactctgacctttacaaggtagtgatcaccatggcatctcccagttaaagcagcacctatgtcaccatttttcaaaccaaagatctgctacttcttagggatagaggtgaagacataggtaagaagacataggtcatacttgagttgtgagatatttggatgcaaattgggcaggttctcccactgataggagat

SEQ ID NO: 32286 - DNA, 345 bp, Glycine max
  Clone ID: LIB3051-079-Q1-K1-E6
tttcctctctactcactccctccgggatcgatattttcaagaacagaccgaaaagctggtcagcgatctgttggatctgcgagtgaattgggcgaaagaaaatggttaccaaatcagaggaaactcaactgagcaggctagaaaatcaggtcgataacggcggctgcggcgcgtgggagtacctctgcctcgtgcgaaagctgaaagttcggcggtcggagaaagttctgaagcatggtctctctatccttaacgaccccaaacaccgatcctctctcggctccgatgaatggaccttgtatgagcaggttgcagttgctgctatggattgccaatgtctcgacg

SEQ ID NO: 32287 - DNA, 392 bp, Glycine max
  Clone ID: LIB3051-079-Q1-K1-E7
acgcccactcgttcggagagaagcaggtccccataattattgctgggacaaggatcagatacggggagtggctctattcagacactgagggaattctgatctctacaacagatctgcctgtttgattctaattcatgaatacttcatgtaaggactatattcatgggcaactcacgacctagtatagtgcaaatcgacacttgtgttcttaacccggttccttgctttcaccaaattataaccgataaaatccccttgataatgaaagtatgttggaatgtttgtccatttcataccaacattatctgagttgcaacttcgtttaatggttgactgttactaaacctggagagatataagttcaaatgcaaagtatacacatatccatattt

SEQ ID NO: 32288 - DNA, 402 bp, Glycine max
  unsure (1)..(402): unsure at all n locations
  Clone ID: LIB3051-079-Q1-K1-E8
tcgcccacgcgttcgcccacgcgttcggaataaacccatgaatcaaaatattttgttgtaagcgcaggatttaccaattgctatgacatgcattcatgagttttctagttatatttgaatgccatacaaactccaacttaatattcatgcgccatagaattgagagaactattaatgctaaaaattaataaatgacattattacacatacgaacatttttttctcgcatatgatcctgaatcgcaaaagtagcggtttttttatatctgttaatatggaattagctcaattcccattcacctagatatttttttcactggctaattcttgctttatgagaagaatagcaaaaataattttgatctcacatagttaggagtatgacccgnatcgtagataact

SEQ ID NO: 32289 - DNA, 307 bp, Glycine max
  Clone ID: LIB3051-079-Q1-K1-F11
ctgactcgtactctgactccttttcgactctgctttctaagtagacgatacacacttgcaggcaggttgcattatctcatctttatgtgtatctcagacctatcattcatcttacctatccgatcctaatattcccaatgctcctcacggacaacctatatatacaactaccgtttgcctcaccacatgccactataattctacgatcccctgatccagtctcacgcattgcttaatacggattcagatgttacagatagcatgatcataaacgccatcgacactcaagctgctgacatgacttata

SEQ ID NO: 32290 - DNA, 401 bp, Glycine max
  unsure (1)..(401): unsure at all n locations
  Clone ID: LIB3051-079-Q1-K1-F2
cccactcgtccgagcaaattgggcgttctcatggctccactgcttgtcgagttgtgagtatttggccacacggaaagatcaggctttgctttgctttgtgtgagatctgaagaagagaggtatggcaaaaagggtcttcttgtacaaggatttggttccttttggggccatggtgaccatggaatgcctcatcgtagccttgaatactctgttcaaagcagctaccttgagagggatgagttaccatgtctttgttgtctatgcttatgctgttgctgctattgatctcattcctggaccctttatctaccaaaggtgcagatcaagagtgcttactncgatcagtttcccgctactacgcaaaattggtcttatcgggctaataggatcgtgggatacac

SEQ ID NO: 32291 - DNA, 247 bp, Glycine max
  Clone ID: LIB3051-079-Q1-K1-F3
gttatgctagctcacacactaagctctgaaaaatgagctccaaaggttttcttattctacttatgttcatgggcactatacttctgatctcctctgaggttgcacccgatgatgcataccagaattttgacagatcagatgggacgcggattgcaaatggggtagatgaaagcagatattggcgtggcggctatggcgactatggtggctggcgtgggggtggctggcgtgagggctatggacgctg

SEQ ID NO: 32292 - DNA, 318 bp, Glycine max
  unsure (1)..(318): unsure at all n locations
  Clone ID: LIB3051-079-Q1-K1-F6
aaaaaaacagtagtttttcagaagttggggcatgccccaaagaagcggcatggatataacttcttatctctgatgttgatttaaatagtcatccgaagattcccccatttatagattactatattacagttgactccttcgtgattacatgcccacctaacatttgaaaagttaattttatgcaacattagttagctaactattggtntgaatattgctacagaaatatctgcaatctacaactgtaagagtggatgagatgagagtgaagagacaggacgcagaacagtggatgttccaccgtatgctacctgagaa

SEQ ID NO: 32293 - DNA, 341 bp, Glycine max
  Clone ID: LIB3051-079-Q1-K1-F9
ctcagaagcagaagcagaagcgcaagctcgtgtaaccctaattagggtttgcaagccgagttgggattcgcctttcgcgtgatcgcagcgctggatccgtaccgtgttcctccgtctacggaagcgccttttgctcgatccttcgccgatctcggaagcatgtactgtccccgaggggcaatgttgggaagcggaggggtttcggacgggtacgaggttggctcaaagagacatagaatgatggaatccaatccatacttcgcagtgagcagcggtacaggcaacttaccttatgggtatgctggtggcttacagccccctcccttatcttgtggtcgtct

SEQ ID NO: 32294 - DNA, 222 bp, Glycine max
  Clone ID: LIB3051-079-Q1-K1-G3
tcgctggtagtttagacacctctgcaagtgcaaactccttcaccaacttcaccttctgcacagaccctttcatgaccacttatttctctgaccttcttgcttcttccacagacaacaacaaaccaccacatggtggtggtggtggtttgtctgagagaactggctctggtgtacccaaatttaagtgcacaccaacaacttgtttggctattatccccctcc

SEQ ID NO: 32295 - DNA, 415 bp, Glycine max
  Clone ID: LIB3051-079-Q1-K1-G5
gtttgaatgtgcttcaaatacttgaaaccccatgatctctattcaatataactaatttgaggagttaagataacatgatggctaagaaaatggattctgactttctctgatcatctgagaagatacaaaaagttaaaagagcattctggataggtgaacttaggccggtttgagtggatgacataatttaaaataattatgcactctgttatgtttcaattcagatgtgactaaatagatatgatttatcatgtttatatattgtctcatttcaacctcaatgagtatttaccactttcacaggttcgtgtttgtgcttttccagcaagtcgattgggattgcaagggataggaaatagtccagactgcaatccttgaaacgtgtgtagcccacgacagtttttcaactgggcac

SEQ ID NO: 32296 - DNA, 382 bp, Glycine max
  Clone ID: LIB3051-079-Q1-K1-H2
ccggacctacccgctcgaaatgctcaaggtactagtaatcctattgttcaatgtaattgtctggccgatcgcatgggttgtgactgtgagcagatgaaattcctttggctttttattttatatgtaggatgtgcatctggtaccccccccctccctctcttgtgacaattagtggttattgggcctgtttgttacagtttttatttttcataaaaagtctcctttttgtttttaataatcacttttagaaggttttcatgcatttgtgtgagcttttcaaaataatcataagctgaaaaaaatctaaaatctgattaaaatcagaagctattttgaaatagcttctaataaaaaccaactcttttaaaagtgattttatgat

SEQ ID NO: 32297 - DNA, 381 bp, Glycine max
  Clone ID: LIB3051-079-Q1-K1-H3
gatctttaaccgatagtaaatatcacttcttaggagcaattttccatggggatatggtatttgttctacctgcgtaagtatgcactgtggctttgaaaccaaagcagtcccttgtcatgaacaaaaggttcaatgagttgttgtaagccaaaacgacactaaattaggggggaaagaaagatggtgtagagaagagtgaaagcaaaggaaaaaaaatggttggtaccagctgatgtatcaagaagagctagaggtagaaactatgcataaacaaccatactgactgccttgtggctctaagaatttttctctaacttataaatgtttgtgtggacattctatattataagcactatgcaatttgcttttaagaatttatct

SEQ ID NO: 32298 - DNA, 68 bp, Glycine max
  Clone ID: LIB3051-080-Q1-K1-A10
agtgatctctctatctatctttctgtctgtctttctgaacacgttgatggattccacctctgggccct

SEQ ID NO: 32299 - DNA, 437 bp, Glycine max
  Clone ID: LIB3051-080-Q1-K1-A11
tgcagtttattctatcatatccttgttcaaataattttcttttcaattacaataccccaatcgcagaaacttatgttcatgaccatcctcaaggtcccaataacatttacttgaagacaattttgagttgaccttacagcctagttccacctacaaacacccttgatccttcaaagcctctcatagttccaatactggcaacaataatactcttgggcatctaaactatctccattcttttttccccctttctttgcagtggatttgcgaggttttaaagaaattaaatgcgtttttatgtgctaaagagctaggtaattatagaattcatctcacacatacttctttttactaccttttatcttttagattttatttttgaattatccttgtttaatggagtaatttaattcgttgaagggttgtggaatttgtgt

SEQ ID NO: 32300 - DNA, 290 bp, Glycine max
  Clone ID: LIB3051-080-Q1-K1-B7
gccggccagccgacaatcacgggaggttatgtgggtccctccacttttatatacggaacaacgacaacacacatactagtcatttgttgttgtgttctcctttcattaaggttgtgttgtgtttgttgggcttcgttactgtactttggtttcattattatggcgccgtcttcttcagcttctgcttctcgtgaggtacactacatatgggttaggaagcgaccatgttgactctacgccgcataaataagagacccatggaagaagacacgtgtctggctgggcacatt

SEQ ID NO: 32301 - DNA, 307 bp, Glycine max
  Clone ID: LIB3051-080-Q1-K1-C5
aacatcatctggatccacaagaatcaggtaacttgaactagtagcagctcatcgggctttgggagaatgctaaacacaaatgctgctttcactagttaccaactgttggactatcatagatatgctgactggtttactacactaacatttaccacatgttacacatgatagacttacttatcatcttgaatatcagctgactagatacaaactatccgaaacttgtaatccgttctgacaactacgcttgtacatgaatgctgattaggaaccagaagaacatgaaacgcctcagaatactacctga

SEQ ID NO: 32302 - DNA, 365 bp, Glycine max
  Clone ID: LIB3051-080-Q1-K1-D10
aaaaatgcaatctatgtccctgacgctgagcaagaggctctccaattcaaagcctctcttcgggatctcttgcaacctcgtcgctcacgcatcctccgccacaacctctccgccgccaccttcgccgccagtcccctctccatccgccctcaacagcctcctcaccgctccgtggtccgtcactcagtcacgcggaatcacgctctctggatctgatgttcgagtcgggaatctcattggaaaccgaggacgcgctcacgaggttctcaaactgtatcgccctctttaaagaacgggcaaagccactcttgaagttccgcctcaaagtgtagctggttatgccacagttgctactacagaagatg

SEQ ID NO: 32303 - DNA, 332 bp, Glycine max
  Clone ID: LIB3051-080-Q1-K1-D12
gccacgcgtccggaagttattatcggatcaccttgggagatttcaaatgacatgatcaccagggtcaatagctgaatagttgtgcatggtactgaagctgataagacattgaattgtgaatgagatccatatgaggtccctaagagcatgggaatattccacttgctcgaaagctcaaaagatattactactgccacagtgtcccaaaggataatggctaatcatgaagcttatgtgaaacgcaatgctaagaaaactatgagtgagcatagatactactaagagaaaaaatacgtgtctggatactagagtgtatataatgatcttttaca

SEQ ID NO: 32304 - DNA, 455 bp, Glycine max
  Clone ID: LIB3051-080-Q1-K1-D2
gaaccgtacctctttcttcttcgccttcttcgttcgatccttctccctttcgatcctcgatgtgggcctgtggttatttttcctaattcttcaatcgagtccctgtttcgttcaattcccgttttcttcttccgtttgatcccaaaatcgttcccttttcataaccttcgtcgttttttagggttagggtttcgattcggtctttcagggtcataagatcgtcgtttttttgttctgttacctccaaaactcctggctttggttcttattcgcttgatatttcgtcccaatctggcaaaaatttatggcccgcttacgaatctagggtttcgttccggtccaattttatggctttatgatctttgaatatctggaggggttttctgtcaatttcttggggggtatgattccttcctatacctggcaaaattctatcgggcgtattggttttaatt

SEQ ID NO: 32305 - DNA, 148 bp, Glycine max
  Clone ID: LIB3051-080-Q1-K1-D3
gtcaaaacttgcttgcttcccatatatctcataagtcttttatagaagttaatgaagaatgcggttaaggtgcaactttcaacgctgcaactatacaatatgtgtgtgccatatttccaactgaaatagactttttatcttgccaccc

SEQ ID NO: 32306 - DNA, 122 bp, Glycine max
  Clone ID: LIB3051-080-Q1-K1-D5
ggctaaccaaccctgacactccttcttctccgcttcctcttcgatcatcgctggagaatgcggccgaagttcgacccctcccagatcgtcgacgtcttcgtacgcgtcaccggcggtgaggt

SEQ ID NO: 32307 - DNA, 178 bp, Glycine max
  Clone ID: LIB3051-080-Q1-K1-D6
acgccgaccgcaacgtccgaatagaacaaagaagtttccaagcctgaacacacaatatattctccacaaaatggggtcaaacgagatatcacatcaaaacaacacacaatactaattccttactgataatcaaggtccacaaactactatcacattcacacgatgcgattaaatagca

SEQ ID NO: 32308 - DNA, 245 bp, Glycine max
  Clone ID: LIB3051-080-Q1-K1-D9
cccacgcgtccgcccacgcgtccgggctaagaacctattggttttgttggggctgggtttagggggaatagttctcatcaccagaaagctcattaagtccgtcagagaggatttcggcgctttcattcataatcttcagctgcttccttcttcctagccttcttcttccaatgcttcttattctcttactctactcaccttcgcactttccgacctatttcacatccatggacacgtgccctcgt

SEQ ID NO: 32309 - DNA, 103 bp, Glycine max
  Clone ID: LIB3051-080-Q1-K1-E11
aaaaaaaaaaataaaaaaaataaaaaaataattttaaaaaaaaaataaaaaaaaaaaaaaaaaagtaaaaattgaaaaaaaaagaaaaaatttataataataa

SEQ ID NO: 32310 - DNA, 469 bp, Glycine max
  Clone ID: LIB3051-080-Q1-K1-E3
cgagaataggctacccaatctatccgagtaacttctaaatttaacggatcaaaataaaataggattcttaatctttatgacaaaattattttacctctcagagtactttttcacctcgagagtaaaaatcaagcgaaagacgtggtttcaaattggggaaaaggaagaaagggcaagagagtcgagaaacggcgcactccgtctgttcctcaccgtcaccggcgcgcgcaccctctgttccagcgactcctaattaagttgggaaattaaaaagacttcaaatttcccagatggctgcagcctttgcttccagatgctctcgtgtgggccgttctctgtctggtggattaagcaacagttcccctggtttatttacctcatcacatggcatgacatgcaacaatttgttttctcagcaacaacgtaccttcatacagatgaggactgttctcaaggttgtcgataactc

SEQ ID NO: 32311 - DNA, 114 bp, Glycine max
  Clone ID: LIB3051-080-Q1-K1-E4
acgaagaatataagatagaatattttagttagattttgatcttacacaataaactatcaccaagagccacccagtgccacctgcaatgggctccttcttctacctatccttctc

SEQ ID NO: 32312 - DNA, 134 bp, Glycine max
  Clone ID: LIB3051-080-Q1-K1-E5
acgatacgccacgcgtactgcctggttctctctcataacattacgcaccagacagatatcggggatcgttgaaactatgtccaagacacatacaccataataaaacctttataccatctgaatctaacatctat

SEQ ID NO: 32313 - DNA, 403 bp, Glycine max
  Clone ID: LIB3051-080-Q1-K1-E7
accacgcgtgcgaccacgcgtccggatttgtgcacatagagacaccatctccacctgctgctggtggttatggcaatactgcatatagctacggaaaaaagccccattcctcctctgagaataccccgaaatatggttcaaagaaagcattgcttggagataatggagatagaggaaattcaacaagggatgctaaggctttcaagaaatcatcaccaaagatatgtaaatactggatcaacaacaattgtgcacatggtgaacaatgcctgtatctgcattcatggcttcatggtgatgggcttttcacagtaacgaaacttcatgaacataagaaagttatcactggcatcgcactttctgctggatccgacatactttattctggcagcactgatgggac

SEQ ID NO: 32314 - DNA, 388 bp, Glycine max
  Clone ID: LIB3051-080-Q1-K1-F5
gaaacaaacaaaagaggcagaagatgttgtgggtggacaaatatcgtcccaaaacgctcgacggggttatggtccacaccgacatcgctcgcaatctcaagaaattggtaacggaacaggattgcccccatttactcttctatggcccatctggctccggcaagaaaaccctaatcatggctcttctacgccaaatgttcggacctggtgccgaaaaggtgaatgtggataatacgacctggaaagcgtatgctgcgagtagatctcttgatttagagctgacaacattatcaagtgccaatcacatcgaaacgagttcgactgatgcaggctatcacgacagatacattgtccaggaagtactccaagaaatggcttagaacagacc

SEQ ID NO: 32315 - DNA, 283 bp, Glycine max
  Clone ID: LIB3051-080-Q1-K1-F6
cccacgcgtcctcccactcgttcgtcactttcattttaaaatgggtatatctatgcgccttgggtaacctgtttgctgtatgcctctcatcttctcacaatgtctcgtttgctcaaaatttaccatacttagttgtgaatctaggaaactggctggttgtcaaacgctggattcaacatccatcactctttgatggaattgtcagcatagatctcttgcatggaactcaagtgcatcttaagactacaaagtttaacacgtatctcacttcttaaaatggaga

SEQ ID NO: 32316 - DNA, 392 bp, Glycine max
  Clone ID: LIB3051-080-Q1-K1-F8
aaatttctatcttcttcaccttgctctcaccttctgggtaatgtaagaaactgggtgttagcgtgagctgtttgacaaaaatgaatattgcacaagttacagcatggcagcctgggatttgtgtgaaaaatatgtctcagttgcaccggctttaatctaaaccatgtgttataccaaagagtttaggtcctataacttgtgttctactgagcttaatagcaagacaatcgtttagctcgaaatgttggcccattttacaatctcggaaaccttttcatatttgcttagccggtggaaaatggatgatgggaaatgatgagaattccttatggatatctattgataaagctatagtaaaatttaagggagaatcatcaatagatgatgtatta

SEQ ID NO: 32317 - DNA, 52 bp, Glycine max
  Clone ID: LIB3051-080-Q1-K1-F9
accaccttccacgcgttctccacgcttccgcccagctttcgaccaacgtccg

SEQ ID NO: 32318 - DNA, 476 bp, Glycine max
  Clone ID: LIB3051-080-Q1-K1-G3
cccacgcgtccgagcaaatcaaagagaaattgaaagaagctgatcaatatgatcttgaaggcgagtcagagctcaagattcgagctttagaggttgtagaggaacttagaactaagagagcggacaagcagtgctatgcttcttttagatgccttcaacaaagatagggcatctttgcctacacctctgccaaatccaccacctttggcacctcttcctgtagttgctcctgatgctcgaacacaggagatgataaatgaaaagctgaagaaggctgaagatcttggtgagcaaggaatggttgaagaggctcaaaaagcattggaagaggctgaagcacttaagaagctttctgccaagcatgagccactgttggattcttcaaagtatacagctgtggatgtgcggattacatgatcagaagctacgtgtgtgcgacatttgtggagcatttttgagtgtttatgacagtgatc

SEQ ID NO: 32319 - DNA, 496 bp, Glycine max
  unsure (1)..(496): unsure at all n locations
  Clone ID: LIB3051-080-Q1-K1-G5
ngtgtttactttgaattttcggcttcatggccacgtacgccaagttggatctcctttctaggaagtgatgataccttttgttcaagttttgctcgtatttttaaacggctagtacaagaatgtggcatgcctgtcgtattggctcttaaaggtgcagtagatgagtttataattgctaaggataggtctaaacaatgtgtagctgctgaagcgttggcgggtgtgctacattctgatattgatggtctatcaggaacatgggaaagttggctgatgcctcagttgaagaacatcattttagcccaatctgttgaatcagtttcagagtgggcatcttgcatacgatatgcagttactggtaaaggaaagtatggaacaagagttcctcttttaagacagaaaattctggattctttgatgacacctttaccttcaacagtagctactacagtaacagtcaaacgatatacttttctggctgctgcacttatagaaa

SEQ ID NO: 32320 - DNA, 136 bp, Glycine max
  Clone ID: LIB3051-080-Q1-K1-H1
gacgaagaatgctttccgtgtcttctgatcatgacacacaggggatttcgatgttgggaactgaaggagggtagggtcaacctattgtgggttgcactgatccatgtaatccataagctgtagcagaccttagtca

SEQ ID NO: 32321 - DNA, 363 bp, Glycine max
  unsure (1)..(363): unsure at all n locations
  Clone ID: LIB3051-080-Q1-K1-H12
gcgcccacgcgtccgttaacatatatatatccgtaattatcccttcatttttccatcttctttccgtcgcgaggacagcaatatccactgcatttcccttttgggtgcagaatgggatcccttgatctgaaatggaattcatcgggatgcatggttttgaagaaggtagagtcaactaaaactaaaggggaagatatgtcttccctgtgtggtagttcagcctatctgtacaaaaggagaggaagaagaataagatgcagagaacanagagtaaatattgttgctacggggccagccatagatcatgctcctgttattgccaagcccttgactaaagatgatctaattgactacttcgtatct

SEQ ID NO: 32322 - DNA, 391 bp, Glycine max
  unsure (1)..(391): unsure at all n locations
  Clone ID: LIB3051-080-Q1-K1-H5
cgcaactatcactgtataatcctgggaaccagttttatgcatgcatgttatcaggagtattggggcttctgctgttgtaaaacatgacagagtatgtatatcagtatctgaccatacttaaggttgtgagtgctgtgttgttttaattataactacaacatatatgtctcgcatagccagttatcagatgtcaaattttaagtctatgcctgactgacttagaccangctttaaagttggtgttgtatttctatatgtaccacttgccatacctacctacccctcatcataattcatgttatgtctatcattatatgagattcatacataaactatcgatttttaatttgaatttaagtatgttctgggtttctgcggaaaatttaacata

SEQ ID NO: 32323 - DNA, 473 bp, Glycine max
  Clone ID: LIB3051-080-Q1-K1-H6
cagaagacctccctatttttgcccttcaagatgacagggtggttgaagtagttggggatccggctggagtgcataaggcattagagttaattgcctcccacctaaggaagtttttagttgatcgcggtgtaattccaatttttgaaatgaatatgcaaacagccaatccccaccatgcagagcacatgccaccccaccaatcttggggaccatctcagggtcttccttccaaatgttggtggaggtcctggttttggacctccttctcaatacatgccacctccacgacaacttgatagttataatccatcagctgaaatgcttcttccagtggacagacagccccatcaaggtatatctgcttatggaagagatgcttcaataggtgttcatgcatcttcaaatactcaatctgcaccttccttagtcacacagatcacgcagcaaatgcaaatcctctatcttatgctgat

SEQ ID NO: 32324 - DNA, 383 bp, Glycine max
  Clone ID: LIB3051-080-Q1-K1-H9
gcggccatgacacgatctggaggagtgctaactggaaaggtcttggatggccaaaaacaacaagtgcgcctatagtaactacaaccacatttacgaactaaccaacaccaccaacccacacatcaagaatccttctttctattcttatttcgcttactattccgacgactccgcccacaacaaaccacatggccgcatcctagtcctaacccgacccactctcaaacccatcacgccctccaccccgcaaccgcaacatcaacaaccaccacctgcgaccccgatccagcacaaccacccctggtccgaaccatgatcggacgcgatcttgctcctacccctgggccgaaccggaaccggttcaccgctcttgacgctccccg

SEQ ID NO: 32325 - DNA, 450 bp, Glycine max
  Clone ID: LIB3051-081-Q1-K1-A7
cagaaccaagcgagttgttgtgactgactcagtgagcgagcgagcaaccgagttactcatggggaacgcggcgcttcggaacgtgaaggtgctcccgaactcggcaaatatggaggaagctcgtcaccgagtcttccaattcttcagaacggcttgcagatcgttaccctccgtcatggaaatctacaacctctacgacgtcgtttccgtctccgaactccgctcctctgtctcctcccagatccgtaagaacatccacgtcaccgatcccaaagtgatcgatatgctgcttttcaaggggatggaagagctgaagaacgtcgtggaccattcaaagcagaggcatcatatcattggtcagtatgtagttggtcaacaagtacaggattcagccacaaaagaccagggcacctctacttttctgaagaatttctataacaccaattactt

SEQ ID NO: 32326 - DNA, 196 bp, Glycine max
  Clone ID: LIB3051-081-Q1-K1-B2
cgctattcaaatcatgcacccatgctgagacataacagatatacactgctcgtacgactccggagtccctacggctcgccgaatcctattcacaattacatcgcctcttcacacgcacaaccttgcgtccaatacgccagctattacttcaaagatcgctaaatctgactatagtatcccggagttcataccctct

SEQ ID NO: 32327 - DNA, 324 bp, Glycine max
  Clone ID: LIB3051-081-Q1-K1-B3
ctttgcatctctctctacaataatccatccttttcctctcaagtaaattattgtaccttaacgagcttcttggggagatctaatatcaatgaaaaattttaagacagaactcgcattcacagggaaatctaatcgcatagaaacagtaaagacaacacctttttatctctacacaagtgattatcgccgctgctgtgaatagctcgtgccataaatgattctcccagccaatatatagtattcatattatcatcctccgactcgagcgaggattatataatataaacctgattctaacccatcaactaccagcttattcttaat

SEQ ID NO: 32328 - DNA, 445 bp, Glycine max
  Clone ID: LIB3051-081-Q1-K1-B5
ctaagtgtctgtccactcttgcctcattcctctctcaagtttctaactttggcccacattcgcaatcaactctccaattcccaagtgggtcccaacccaattcggatttcgtttctggatttccccaattcgaagctctgcacttccccttttgaagtggatttttcgttcctgggaagttcaattccaaattcttggaatgggtctctaacacaagcttccaatttggagagaaagtcccaaacttttgggttcaatttttcagttttcgcaactgggtctgtgatcgtgattttggcctcaacttctaaggttttgggagttaccacaacttcaattgtggttgcatccgctgtaatatcaaaggatcgtgacgaaaccacaactgcaacaaccgcaatttaaaacctttgtgtgagaataatgcgtactacagcagaatttc

SEQ ID NO: 32329 - DNA, 426 bp, Glycine max
  Clone ID: LIB3051-081-Q1-K1-B8
cgtattcaatatcgcaatacgtcagtaaccaacagctgttggatcttatgatgaggagtgtggaatcgcgtaactattctctgtatgccacgaggccatcccaacgttattactagctacaaaaggccaacttcgagcatggagcaaaaagtatatgaataaaaaacaaggaaacaataaaagaagaagcaaaacttcttcgtcctccattgccgcgtgtgaatgatgtgttgatttgtgtgggttttttagtttattttattgtttgtccgtgatcagtttggactaggtaatgcatcaagtgctttccatactcgcccattgagtttattaatttgtgctgattgaagaggtgttgattcttcattcttcaatcctatccacttgtattgtcgtatttttaataaaatttaaattaattttcct

SEQ ID NO: 32330 - DNA, 448 bp, Glycine max
  Clone ID: LIB3051-081-Q1-K1-C5
cgagtctgacaagtcaaagtctgaagtcaatgacgacaaggcacgtgtcaatgataacaatagccctttcaaagaaggaactcgatacatcgtctgtggggtatcagcctccactaccagctgaccaggtgaaggctgctacagattttgattatgaaggagagggttcacctaatggtcgtgttcgtggtcgtggtggccgaggcaggggaaggggcagaggtaatggctttatttcagctgattatgaggatggaggttgggatcgcaataggggaaatgctaggggcaggggtagaggaagaggacgtggctttcgtggtcgtggaaggggagggtacaatgggccccatgttgacatgcaagatggaggatacaaccaagatgtacctcaaggccgtggtcgtggccgtggcagggggggatatcgtggaaggggtcgtggctt

SEQ ID NO: 32331 - DNA, 418 bp, Glycine max
  Clone ID: LIB3051-081-Q1-K1-C8
gtggggttatgacaagtagtggtgtcgcttctagtggaagcatgtatccctggctgcgtggggaggtttctgcttcttgacgaagtgtagagaaaattagttgcctcaaattgctatattatgtgactgctaaacatcaaaagtagtctttgtcttgactacgataagagagagggagcttcaacctgtaaagttgacttgttgactggagaaccattggggaatatgtgggtagttaggattgatgcttttatatgccaaggcatggttaagttatctaaataatccgtgaaataggactcgttgtttccttgctctgaatgggaatcgctataatttcctgtgccaaataaaacaaaatcaacatttatagaactattccttccaaacttggaaacctgaagaaaaaaaggggcgg

SEQ ID NO: 32332 - DNA, 459 bp, Glycine max
  Clone ID: LIB3051-081-Q1-K1-D2
gaggatatccccctccccttagctttttcccttttaatttttgcaaattcattctgacttaagacttgctaagaccataattgtaactcaaattttgaaccttaattttccttaaaacaagtgtattagaagcagtaataagagaaattagatagtatcaacgcataggaactcatgctttttcctaaaagtaattagtcaatcatcaatcatataatacattttggcctaattagttgatatatcgatatagaatattggtgggaaagagaaaggaagaggggaagagagaatagtaacaggagagagagagagagagagataaagagagatcaaagagttgtgcactgcacttgttattgtttcagtctgtctaaaatgtacaacaccaatgcttatttataggcagaacccaacagcttctagttatgaaatcttaactaacaatagctgcctaac

SEQ ID NO: 32333 - DNA, 455 bp, Glycine max
  Clone ID: LIB3051-081-Q1-K1-D6
gaaagagagagaaatggctttcacgatttccagatctcaatctgctttgacagatagagagagggagaatcttgacaacttagttgacaaggagtgtgcaaccacagagggtatgatatcgagccagctcaagttgaagtcttctttgtcatccaaagcgtcttctcatcaaagcatggacaaacatgcaatccttcgacgtatcaggcaacgcaggtttaataacaaagccaaaaccgctctggaagctctcataggcacctcagaagccaacaataccggcactgcccaagaacagaagtggcttcaactgggtgactctttctcatctccttaactggaaacacaatctccccccagtttgcaacccatctataaataccctctttagtttccttcacccaacaaagtcatcttttccatacgcttgcatggctaggaaaggaaatccaacc

SEQ ID NO: 32334 - DNA, 86 bp, Glycine max
  Clone ID: LIB3051-081-Q1-K1-E1
ttttgattctttatgtaagaggcttggacatgccatcaactatgtcgctatgaggttataatgtggtcttgcagatcttgcttgct

SEQ ID NO: 32335 - DNA, 458 bp, Glycine max
  Clone ID: LIB3051-081-Q1-K1-E6
gaagaagggtaataacaataacaacaatcattgttcacctgctatactttatcactacccttgccctgatggtgcttttgctgcccttgctgcacacctttactttaaggccacttcatcattctctcctcttttctttcccaacactgtcttcaaccccctcagtgctgaagatcttcctctgaatgaaattggtgatctttatctcttagattttgtggggcccgatggttttgttcaggaaatctccaccaaagttccaagggtgattgttttggaccatcacaaaactgctcttgagaggctaggcaatgaggcttcacttggtgagaatgtggttaaggttattgacatggagaggagtggggctactattgcttttgattacttcaaagataagatttttagtcctgatgttgcggttaagcacccctcaattctcgaagaattcgagcgtg

SEQ ID NO: 32336 - DNA, 267 bp, Glycine max
  Clone ID: LIB3051-081-Q1-K1-E8
acaaaatcaccacctccaaagtcttctctatttagaatcatctaatctaactgagtattctggtccttttcgagcagaatgccgactaacaatacacaattactaaagaaccacattctcattatgaactacgctgactaccagaaccggcatcttctgttcaaggaactacacatcttattactcacaaaatactcctgatgcttatctactaccttttctaggcaatattcatcgactgcaccaaatacctatcacacatccaag

SEQ ID NO: 32337 - DNA, 250 bp, Glycine max
  Clone ID: LIB3051-081-Q1-K1-F1
ctcaatcagactttatcatcatctccaaataaaatacagttgaattcaaaagcctcgtccatgaatggtactgctcttgaatctgtggagcatttggttgcacagggacaacaaattggcagtaaaatggaattggataatcttcaatccaagggtacaggtgttgctgtaaatggaaaagctgcagtgtataccacagtggtggatggtgtggaaaagggccaatttgtacaggaggacaatcatgaaa

SEQ ID NO: 32338 - DNA, 462 bp, Glycine max
  unsure (1)..(462): unsure at all n locations
  Clone ID: LIB3051-081-Q1-K1-F2
gctgcaactcctagaccacttggaatgcaacccttaaaatctgatgccgtggatcatgctcctgcgagtgctatgcaaggttccctttacataggggtcccgttgtggttggcatatgctacggggtgaggcttgccattactgtgccaactgcctcggagttattcggcctcaaatattatggtcttatatacaacattctcattcttaaccttccccttggctctttcctctcttctggtcttcttgctggcattctgtatgatatggaggcgactaccaccgtaggaggaggcaacacttgtattggagctcattgctacagactagtattcatcatcatggctgtagcttgggttgttggcttcttcttagacatnttatngtcattcagaactaagaagggttacaacaagatctccttcagcaaaaactcccacagaaactctctgaattcaagta

SEQ ID NO: 32339 - DNA, 449 bp, Glycine max
  Clone ID: LIB3051-081-Q1-K1-F5
gagaaaagcagaaatggcggcggctacggcgatttctcagctaggctgttttggcgccgtccgccgcagctcacacctccggcgccgctcgtttctgttcccttcccctcgctccaagttatcggttgttatgagtctggagaggcatgacacggatactgctgggtctgataccaaaaatacactaagttatgcagttgatgtgtcaaagctacatgttgaagaaaagaagaactcatattcaacaaaagatggccatgatgctgaaaaaatagggtttggagaggcaacacaggaaagtgtcgatcaaccgaaaaggactgcaaagattcatgacttctgtttaggcattccctttggtggatttgttttaacaggagggattattggattccttttttcacggagtcctgcaacactaagcagtggtgtgctctttgggggtgctt

SEQ ID NO: 32340 - DNA, 164 bp, Glycine max
  Clone ID: LIB3051-081-Q1-K1-G2
cacgattacaaataagcttcgtttggctgtgtctttctctttaaccaagcccctttcgcctgtctctatcggttctagctgtagagattactatttttccaaccctctctctttctctaatcatcccccttttccttctttttcttcttcttcttcttcctcct

SEQ ID NO: 32341 - DNA, 460 bp, Glycine max
  Clone ID: LIB3051-081-Q1-K1-G4
gtctatagccttggccgacaggtccgggtaatctttgaaatttcatcgtgatggggaaagagtctatacggagtattaagctatcacctcctccagcaccactttcacctgttttcggcacgcagaagtctccaacaaactcacctacaaatctcagccttgagaaaactaatatagttgagactcctaaaacagttaaagacacagaacctgaggattctcctgaaaaacaaagcacagaggatgtactagatgatgattttggcgatttccaagcagcaggttaagctatccattgccgtgtgtctctgaatttgtgatgattagaaaacatgcaaaattgtcgattccttgaacatctggtatataccaatgacttctgattcagctgggagaatcaattatgtcattccaaaaagtgaatcctacatagccaccaacaaaatatcattaaagaatc

SEQ ID NO: 32342 - DNA, 454 bp, Glycine max
  Clone ID: LIB3051-081-Q1-K1-G5
aactttcacagcctaggtctggacagtcctcttctaggcagcatgcatcaaggccggaagcagcacctttggattttgtggtccggccccagtctaaaattgatccagaagaaattagagcacgagcaaaacaagctgcacaagatcagcagcgtatgaagatgaataagaaattgcagcaattgagggcaccaaaaaagaagcagcttcaggctacaaaactgagcgtggaaggtcgtggtatgatcaaatatttataaatgtgaccacgttgatactggatgggtttgtttgtcctgctgcaagcttttcatataatgtgctgcctgcattgatgtggattcttctaaaggtgggctattcgttcagtgatctacatggaaatttgatggagagggatgttatgaaaataccatccgtatgctgcatttgtgtattcatctagtgcagtagg

SEQ ID NO: 32343 - DNA, 453 bp, Glycine max
  unsure (1)..(453): unsure at all n locations
  Clone ID: LIB3051-081-Q1-K1-G7
aacacgtcaaaaattcatctcatctatctgtagatcggagaaaccaaaaaaaaaaaatggagtgcgacgagaagaaagcaatgatccgcgacgtggcgttacaagtcgttttcatctcgctcacgattttcagcttcctctggatgcacggcatccctcaaaacctctacgccaagctccgccaccgtcccccgaacccacgggccgtgcaagccaagcgccatttcgtcaaaggcgcgcagctcctcgcccaagccagaagatccaaaagcgcttcctccgcaacttccctcgccaaacaagccctagccgaggccgagaaggccatcgcgctcgaccccaaggacgccgnctcgcacctnctcaagtccatggcgctcgacctccagggcttccgcaccaacgcgctcgatgcgctcgacgccgcgttgtctccactcgcagcgggttcgc

SEQ ID NO: 32344 - DNA, 453 bp, Glycine max
  Clone ID: LIB3051-081-Q1-K1-G8
gtgataagtttttgatattctttcacgctttgtaggactacagcaaaaacattttatgctgcgagtatcttttttgagattcttaatcaatttggagcagttcagcctgatctggagcagaaacaaaaatatgctgtgtggaaagcagctgaaataagaaaagctttgaaagaaagaaggaagcccacagctggcccccctgatggtgatgaggatctgtcagttcctttgaggtcttcaagtgatagatatgaccttgggactactgaaaatactgttttcagtcctggaccagaatctgattcatcaagaagttatcataaccctgctaactaccagaatctgccaagcattcatcctgctgctcctaaatttcatgatactgttaacgaccaacattctgctaatattccatcatctatgccatttcatgatagagtagataataacaag

SEQ ID NO: 32345 - DNA, 462 bp, Glycine max
  Clone ID: LIB3051-081-Q1-K1-H1
aaaaatcgttgcccaattaatcgtgttctttggactccaacaggccggcgacttattaccgggtcacagactggggaattcactctttggaatggacaatcttttaattttgaaatgattcttcaggcacatgatcaagcaatcagatccatggtctggagtcataatgacaactggatggtctctggtgatgatggaggcgcaataaagtattggcagaacaacatgaacaatgttaaagccaacaaatctgctcataaagaatcagtccgtgacttaagtttctgtaggacagatttgaagttctgctcgtgctctgatgataccacagttaaagtttgggattttgcacgctgtcaagaagagtgttcattaaccggccatggttgggatgtgaagagtgttgactggcatcctacaaaatctctattagtatcaggtgggaaggacaatctagtgaag

SEQ ID NO: 32346 - DNA, 327 bp, Glycine max
  Clone ID: LIB3051-081-Q1-K1-H2
cttcattcttcttctcattctctattctaaattcttatctaagctaacgatgatgatgaaggagaaattcgtggtttccctaaaccaaactcgattcaccctctcattttctgaatttcaatgcccgatcactcacattcttttcctctcgtgcctcccattcctctcaccgacccttctgagatcgacctcgaagctggcccctccgaacatttccagtgccgaatttgcctcgaaactgacggcagagattcctttgccccttgtacgcgcaaatgtacttcatattatccgcatcgagaatgttggtacctttgtcgtgctttt

SEQ ID NO: 32347 - DNA, 327 bp, Glycine max
  Clone ID: LIB3051-081-Q1-K1-H6
tccaatctcgcttcgttttcgtgttgaacctgaaagagaatcttctccccatcaaactctaagcctaactcacagatttgagttttgatcacaagaattcaatcaatcaattaatcaatctttctcttcaccctgagaaaatgcttcaatctccagggcactcgccgctccacatctcgtcgccgtccccttcaatttcccaggaatcggcgcacaagcctaacgatccaccatcatcatcgtgtgcgaagcaccctgcggtgctggacgaggacacgtacgttgaggcgttggagaagatcatcgagcgcgactacttcccgacat

SEQ ID NO: 32348 - DNA, 383 bp, Glycine max
  Clone ID: LIB3051-081-Q1-K1-H8
gctgggttcgtggcaacctttgtcaccatggtgatgatgatggtgcccaaaaacgtgagtgcgcaaaacataggtgatgacatcgtcacacaagacttcttcaacagcataatcagtcaggctgatgatggttgtgcagggaagaacttctactcacgagatgctttccttaatgctcacaattcctacaatgagtttggtaggcttggtaatcaggatgactccaagcgtgaggttgcagctgctttcgcccatttcacccatgaaacaggacatttttgctacatagaagagattaacggtgcatcaggggactactgtgacgagagcaacaccgagtacccatgtgcccctaacaaagcgtactatgggcgtggaccaat

SEQ ID NO: 32349 - DNA, 328 bp, Glycine max
  Clone ID: LIB3051-082-Q1-K1-A1
ccgaaacatgcctcttcgaacgcattccttttgagctcgttaacaatcgcagatgctctggcttactatgccaatgatgctgcgcttgatactggtctgaagagtgccactatgatgtgcacgcttatggttatgacccttgcaatgacctttggcatggatatatgtgcaattagactgacacatatactcactcacatcagcactggcttcttaaacatcaaggttgaccacaaggcatgcccggaacctaacattgaaccttgcgagataccttttgagcattaccctgagcatcacacttacaagcaggctgaaagtgctttgc

SEQ ID NO: 32350 - DNA, 392 bp, Glycine max
  Clone ID: LIB3051-082-Q1-K1-A10
tccacgcgtccgcccacgcgtccggccacgcgtccgctttcttctggtcaatggtttgtctacaattattctattgttgccattcagtattcttcactaggtgcaagtattcctcttagcgccaatcttcagcaaatttgaatacttttcgcggattcatcatttttaattttgtttgggttctgaatactcaaggggttttaaggatatttcgttactgggtatccattttctcaaaaaaccatgtctttgttccttaaagctttgcctttgatggcctttcgcacgaggccatctctggtgtttctgcgcaaagtttccaacaccattccattgtcactttccaaaaccagaaccgtgtatttcgcttctgcttcaacacaaccaccttc

SEQ ID NO: 32351 - DNA, 358 bp, Glycine max
  Clone ID: LIB3051-082-Q1-K1-A11
ttctagttcagaatctcaatctcagtctaaaccgctccaagaccgagttgcaatcgtgaccgggtcgtcccgcggaatcggccgagaaatcgcgcttcacctcgcctcactcggcgcgcgactcgtcgtcaactacacctccaactcggcccaagccgactcagtcgcggcgcagatcaacgccggttccgccaccacgacaccgcgcgccgtcgtggtccaagccgacgtgtccgatccggctcaggagaagtcgctcttagactcggccgagcgcgccttagactcgccgatccacatccttgtcaactcggcgggcgagatcgacggcacgtatccctgcgtcggcgacaccacc

SEQ ID NO: 32352 - DNA, 55 bp, Glycine max
  Clone ID: LIB3051-082-Q1-K1-A2
taaaaaaaaaacaaaaaaatatataaaaaaattaaaaaaacaaaaataattaaaa

SEQ ID NO: 32353 - DNA, 449 bp, Glycine max
  Clone ID: LIB3051-082-Q1-K1-A5
agcaaacaacatagacccttttacatttaatagctaaaattatagtatttgttggtatatagaagaaaaattaagtaatatgatgatatataggagttgagtgatggaaggggcttattttaggatggtcctttttccttgtcatttgaattgtgttttgtgaggaattttgttctgcctagcatttgaaaaaggcagagatagtttaattagggggcaggggtggatgtttaaggtttacctaccacccgccaatttcgtttgttgtgtggttcgtggtgttatgttatgtcatccacaattggaatatgagaaaaaagtgatatttttctagcttagcgactgagaatagaataggaaagagacagaagcgtttttgcttctataggaagtcattttcttcaactttatgtaatttaatgagtgtaaaaatgagtgtatgacatgta

SEQ ID NO: 32354 - DNA, 449 bp, Glycine max
  Clone ID: LIB3051-082-Q1-K1-A6
cccacgcgtccggatatctttcatcgcctacggcaacgcttcatttgaatcaacgctcggtcctcttcctctctctggtccattttagttcaactttgaataattctccttcgtatcaagtcttcctcatcttcaccacctttttgtaagtggatatttatgtgtctaagaacataaactaaaaaaccaaggcgagtgaaagaaaaaaaatgtcaggtgtgtctctagcagtgtctggtccaccatcagcaacagtggctgaagcagcaggtacaaagcctaaactaagaacagaacaggcaccaatgggtggcatgatgggttcactgcgcgtgatagaactttagctggtggccttcatcttggtgttctcaacaagtggccctcttccacttcttgatctagtgttccctgcattcgccttttgatacatcttggcactttcacaa

SEQ ID NO: 32355 - DNA, 448 bp, Glycine max
  Clone ID: LIB3051-082-Q1-K1-A8
cccacgcgtccgcccacgcgtccgattcaatcccatcactcttttttttttttctctctgcttccacccaatggcttcaatttatacaatctccttctacccaatatttaaaattgaggcatggctgttgcacacagtgacacacttggttttaattccattgttacagtacgatttaattaaacaaaaagaagaagaaaaaaataaatgggacttactactaggtgttattaaattttgttggtgaggggttggatatttaaaaaaggggtttagctttaaatttctcttgcgctgtgttgctccgagagtcttaaaacaccgactctcctcccttaaggcaatgaatgaagaaaggtcctccttctgcattttgtaattgcgatatttactccaaatttccccttcctgcatacttcttgggatttttccaaacaattaatacatt

SEQ ID NO: 32356 - DNA, 451 bp, Glycine max
  unsure (1)..(451): unsure at all n locations
  Clone ID: LIB3051-082-Q1-K1-B11
gcagaacattctttgtttcgctctcgcttttcaggtccaacaacgccgaagaagaaggagattgtgtctccgatgattatttgaagatttctgaaacaccagagtgtttctgatcatcgtcgtcgctgatctctgtttcctccgttactgtttctgattgcagaggcgaaaagggtttccgcatcaaaatcgaattttgtttgctccatcatcaccatgggtagaatcacgaaactgggttttcttcttctacccagataagtaaaagggttttcttctttctcatttattccgacaagtgcacaaataacaacatcatcatcgtatcaatcatcggacaagtgcacagacaaacaacatttgtgtctgattagcagaaaaaggggtaaagggttgttccgtgtttgtttgatgaattatgttcaaacagatattcagtanactccctcgg

SEQ ID NO: 32357 - DNA, 436 bp, Glycine max
  Clone ID: LIB3051-082-Q1-K1-B3
ggaggtgtctgcgagcgttaacgcaaaaaaacgacaccgtttctcttccgaaacgcatggtctctgcgctcactcaccgtgcctccgtttcccaacgccaacgcttcttcccccgttttcaccgtacgcgcctctgtcttcgcgcaatggccccacctccgctatttctcttccgagaaaaaagacgaccacagcgacgaagacgatgatggcgatgaggattacgatgatgaagaagaggattatgttgatgacgacgacgatgatgacgtccctgtgtcgagagggaaaaaagtgtacactgcggaggagaaagaagcggaagccgcggcaattgggtacagagtagtgggtccccttcaaaaggacgaagatagccgttttaagccttacgagccttgttttgctgttgttcagattggttcgcaccagttta

SEQ ID NO: 32358 - DNA, 451 bp, Glycine max
  Clone ID: LIB3051-082-Q1-K1-B8
ggccaacgtctccaaagagctcaacgctaaacacaaaaagatactggaaggacttcttagactaccagagaataaggagtgcgctgactgcaaagctaaaggtccaagatgggctagtgtcaatcttggcatctttatatgcatgcagtgttccggaatacatagaagtcttggggtacacatatcaaaggttcgctctgcaactttggacacatggctcccagagcaggttgcattcattcaatcgatgggaaatgagaaggcaaatagttactgggaagcagaattacccccacattatgatagagttggaattgaaaatttcattcgtgcaaagtatgaagagaagagatgggttgcaaggaatgagaaaccaaaatcaccttctagtttccgagaagagaaaagtccttcacattggcaaaagcctgtggaaagaagtgggcatgat

SEQ ID NO: 32359 - DNA, 381 bp, Glycine max
  Clone ID: LIB3051-082-Q1-K1-B9
acgcccacgcgtacgcggacgcgtgggtggttatggaggtgggcgtggaggctatggaggtgggcgtggaggctatggagggggacgtggtggatatggcagcggacgaggtggctatggtggcagacgtggtggctatggcggcgggcgtggtggctggcgtggtggctatggtcctaatgaacataacgaggctggggttgatgctaaccctcacaactaagaaagcaactttctaaagcttatatatgggtttaagttatcgcaataaataaaacttcatgagaaagttagttgtaatagaagtggaaaactttgtaaaggaataatacctttcatgaatttccttaacaaaaaaaacaatttggacccctatatttt

SEQ ID NO: 32360 - DNA, 169 bp, Glycine max
  Clone ID: LIB3051-082-Q1-K1-C11
cccacacgttctataaaaatatactatcttattctctgttctaccttcaccatccaggtcaggtcttataatttgtctacctttcttaacatactacaaccttatacaatccctacttactttcaaaaaccctatctttttatacatcccagcttatactccctaactt

SEQ ID NO: 32361 - DNA, 433 bp, Glycine max
  Clone ID: LIB3051-082-Q1-K1-C12
ctcttccaccccatttctgcatatatacacccaccaaattccttccataaaagcttccgaaaaaaataatgggtcagccatcactttttctcgtgcagcttcttgttacctctctcctctttctctcttttgattatggattcggtagggtggaactgacggagactcatcaggattttcccattcgcacgattgtaaagtatgacattgcggattattctgatccacagccaaataccaatccaaagaatgggtatgttttgagtcctccttcatctccaactccaattcatcctccaagtccttaaatggaagctcaagattggactttcaccacttgtttatgtctttctgaacggttttgtaactggtgtagtgtgtgatcgcttccagtttgacacgggattcgtagaattaggatcatgatacttgt

SEQ ID NO: 32362 - DNA, 391 bp, Glycine max
  Clone ID: LIB3051-082-Q1-K1-C3
aagcgaggtattatatcattcttcagcattgatcttagcagatttacccaggttgatgggattcggtgtgtgccccattttgataagcactcatggggtttgtttcgccgaagaaccaagcttctttgacgcaaatgtggcaaccatattggaaatgcatacaatggttacacttcgatctttcctcttgtgacagacggagctgaatcatctcctagctccaaagtggtcagtcatacaaaatacgacattcgcattcgttgccctacaaccttcatcttctgaagaatctggaaatcctgtgtatgcttgaaatacctcggaaaaatattactttctacaccggcaaaattgatgacagggtggttagaacttataagttattaatata

SEQ ID NO: 32363 - DNA, 305 bp, Glycine max
  Clone ID: LIB3051-082-Q1-K1-C5
cagggactacgatttgtacaagggtccttcagttgatgtagacaccactgagtggtcagggcgatcattgcatgcgaggagcagtgtaacaactgatccaattgaatctggacttacggtgagtcctgatcatccagtcaaccacaataggcttccttacagtggcatcacctatacatctggcacaatattcttaaatatgcctgatataggggaacatacctttataatagatgactcaaatgggccacattggaagatgactagaactaatggtttgatcaacattagacctgctaataata

SEQ ID NO: 32364 - DNA, 440 bp, Glycine max
  Clone ID: LIB3051-082-Q1-K1-C6
cccacgcgtccgcccacgcgtccgcccacgcgtccgctttcttctggtcaatggtggctgtacaattattctatttttcccattcagtattcttcactaggtgcaagtattcctcttagcgccaatcttcagcaaatttgaatacttttcgcggattcatcatttttaattttgtttgggttctgaatactcaaggggttttaaggatatttcgttactgggtatccattttctcaaaaaaccatgtctttgttccttaaagctttgcctttgatggccttccgcacgaggccatctctggtgtttctgcgcagagtttccaacaccattccattgtcactttccagaaccagaaccgtgtattccgcttctgcttcaacacaaccacctacttctgcttgtgcttctgaaacactcactttcagtgctaaaccaccttt

SEQ ID NO: 32365 - DNA, 242 bp, Glycine max
  Clone ID: LIB3051-082-Q1-K1-C9
cccacgcgtccgggaattggcaggccttgcaagtttactttcagtcaataattgcttcgaaggatcttttatacttgatctactgccttacatttgttacatctcatctttgccttaaatttgctttgatccctatcttatgttggtcctttgaacatgttgccaagttccttagacgtaatttcagtcgttctaccttgtacagaaagtacttggaaaagccttgggtttggctggagtca

SEQ ID NO: 32366 - DNA, 324 bp, Glycine max
  Clone ID: LIB3051-082-Q1-K1-D1
gtacaacgctcgctgcaaccattaacatttccattaccttgtgggtactaaactctatggtgaacttttttcatgacgatcttcttgccgaactcattccataaacatgcccctgtaactccctattctaccatgcattatttatttcatgtcttatttgaccaatgcttatacctaattctcaatgaaactacaaagcaatctactggtcattccattgatgttcacttggacccacaattggacccctatttcacaaagtatttcccaaacaatcatcgattccactaatgaacctactaattctattggcagcaactttaa

SEQ ID NO: 32367 - DNA, 342 bp, Glycine max
  Clone ID: LIB3051-082-Q1-K1-D10
cccacacgtgcagcatgatatggaatatgcaagtgatgagacataaaatgagctctaaatatacctctgtatgggcatgagtcttaaaattatgctaaagtggctgatagatcatgagattaaccttaaagctaaatggaaagctctatcctaatatacctactaatattcaagcatagcatagactctatactaagaactaggcaaataatcatgctggatctaatttctgagcatgaggagccaatgatgataccacagatgaactatctgacgcttaatatgaccctgctagcagaatagcatacagtgaaacatagaagatgaaatatagtatgacag

SEQ ID NO: 32368 - DNA, 365 bp, Glycine max
  Clone ID: LIB3051-082-Q1-K1-D5
cacgaacttaagtctgtacccatttcaatagtaatcaaagtggcggctctctcggattgccttataaaagcggcataccactcaagccttatccaagctgcaattgaactgagcaaaggggaaattgaaggaattgaaattgagttcattgaaatttcctaactttccatcttgaacactgatcttgagatcaatagtacctacccaccaatagttgaagctattcatcaaaatattcttcaagctgatagtattctctttgcttatactgaatataattactctgtcacagctctacataagaatgcaatttattgggcctttaagcccccaaatgtttgagctggcaaaactgcttcaattgt

SEQ ID NO: 32369 - DNA, 442 bp, Glycine max
  Clone ID: LIB3051-082-Q1-K1-E10
caaaccctctcaccaaaccttcatcgatctctttgtttttttataaattataatattggtacgaagttgtttctggaaatagcaattcagagaccttaaaggtagtgagtattttcctccttacttaatctattgtgtgatcaaagtcgttattattaaattagataattgataaccatgtcgatgaagctgttattagcttccctatccatttcggtgtggcttttcatggcaacattatcccttgcccaatccaacaaccgctacgtctttgacacacatggcgaccctcttgaaactgacgatgaatattacatcaggccggccataacagacaacggagggcgtttcacattgatcaacagaaacaggtcgtgccctttgtacgtcggtctcgaaaacaccgacacgccgcaggctacccgatgaaattcaccccttt

SEQ ID NO: 32370 - DNA, 420 bp, Glycine max
  Clone ID: LIB3051-082-Q1-K1-E2
cccacgcgttcggcgaaggaaagagcgcttaaaagtaaaacagagggaagcaactggtgcgggggcagaaggagaaaggaaaggaagagaagagaagagaaggagaaggagaagggtttggtagttggttacttagtttgtttgattaacgacggcgcactacacgatccccacaattcagaggcttgttattatctccatccatttaatttaatttccacaaccacgctcacctaagtttcaatttcaatcccttttctttttcttttttatttaaaattccaatttcgcgaaccccaaattccctccctccttttccctttctctctgttctgtaacgtagcatttacagcgatcagtttatagtgagtcacttataggagttttaggtatcatcgatcatctatggcagggtacaag

SEQ ID NO: 32371 - DNA, 309 bp, Glycine max
  Clone ID: LIB3051-082-Q1-K1-E3
cccacgcgtccgcccacgcgtccgaatttgtctaggttcgtgttttgtccttgttttgtgatttgcgtttttgtttacatcttgtttcgttcttgtttgcgtcttgtgttctgttatttgcgttcttgttcttgtttcttgtgtctttcacactttgtgtaaaaaaacataaggttgcagaaatttttaaaataataaatataaaaactgatttactataaataatcatacataattaaaaataatagggcgacctttttataggattcccatcttactttccctttcattctactttatatatttttt

SEQ ID NO: 32372 - DNA, 460 bp, Glycine max
  unsure (1)..(460): unsure at all n locations
  Clone ID: LIB3051-082-Q1-K1-E4
ctctgatgtgaccattctccattcccatggcaccaccatcctctcctccgctcgtcgacgattgcgatgccgagcgccgccttcgcgaagcggaggagcgcctccgcgacgccatcgaggagctccagcgcccgcagcgccgcgccgccgctcacgcccagcagcaccgccacgtggactcgctgccttgcgatcaccgccccgacgagtactgcgtggctcacgccattggcgacctctgccagaccatcctcctcttctacggcgtgagagtcggcattggcatactcctncgcgccttcaagcttgttcgaggccaatcctactcctctctgctcgatctcaagcaacttgtttcagaaaaagatctgatagtaaggggaagaagcatgccgcattggtcttcttttggtggtttcactggatcttatcatgctcttagatgcttggtgcgaaattg

SEQ ID NO: 32373 - DNA, 391 bp, Glycine max
  unsure (1)..(391): unsure at all n locations
  Clone ID: LIB3051-082-Q1-K1-E5
cccacgccgtccgggcagtccaaagccatcatttggatgatatatgttattagtatcatgggaagtggtagctggcaatctcatcgtgtttgcttagggctttctaagcattctttcaagggtcgatagttagatagggacccanatattctaccgtttcctgtacgtctgtgcacttgatagcataaggtggtaccttagtatgaattgcacgaaataacgctagcacttctcttaatttggataacctagctttaccatatgtggaaacctcacatggctttacacacatagttgtcgagaccattcnnntccgtctaaatagcttttctgcttnntcttggaatgaattnnatgacttttcttgaaatttctgtgattnnngctggat

SEQ ID NO: 32374 - DNA, 144 bp, Glycine max
  Clone ID: LIB3051-082-Q1-K1-E9
ggaatagcttcttttacgccgcctgcgtcccaaccgttatgaacttatagtgtggatcagtgctagacttgcgctctccacgtacgttgctccctcaaacgattaccagcagtctgccatgttatcatcgaatgcaaatatcac

SEQ ID NO: 32375 - DNA, 354 bp, Glycine max
  Clone ID: LIB3051-082-Q1-K1-F1
gcccgaggcgttgtctcttctggatatttttgcataacaagacaccttcaatgacactgtgtagggtttgccggcataaaaggagattaatagcaaataatgcaacaagaatatcactcacagagacaatatataattacaggtttttgttggtttgaaagttatattaagtatggacttaataatagagttctaaagacaaaacataatgaatattatagctgatggcgcttggatattcaacaacctatatataaagtattactggtacttttgtatagaggatagtccattataagtattattcacattatatactaatataatagaattataattaactatttttgcata

SEQ ID NO: 32376 - DNA, 387 bp, Glycine max
  Clone ID: LIB3051-082-Q1-K1-F11
cacaactcaccaccttctctctatccatcaagtcccctattggctattagtctattacgaatgacaactaattctcctcgatcatctttcatttgtcttgataatttcttagttacatcaaagtattcccggttaattatattagttcattcactcatctgcaagcatggccgataagcacggaagaagctgctgttgctgcctctttggaatcttgtggaagattctggttgcactcatcgtcctcgttggcctcgtattcctcatattctggctggtggttcaaccccgctccttcaagttccaggtcacggaagcggacctaacccaatttgattactacaccaacaatcacactctccactacaacatggtgctcaacttcac

SEQ ID NO: 32377 - DNA, 435 bp, Glycine max
  unsure (1)..(435): unsure at all n locations
  Clone ID: LIB3051-082-Q1-K1-F12
aaaaactgcatttgtagaaacttcatttgaaatgaagttgctcaatcacaacagtaatgtaggaatacacttgttaaatcaagttttaatcaaattatatactcaattgatccgttttccacacttctcttcacctcttagggggtgcttggtacaaggaattttttttatgcccgggaatctttgtttcccaactttagattcccaggaaactaaaactttctcttgtgacaaacacccccttaatggttggtagttgctactggctatatattgaaagtgagataattaacaaatttaaagttaaaaccacagctatgtgcaagggtcaaacttgaacgggagatatttgcattaacatttgtntatagaactatacatgcagtttangcctgtgtttggtagtgttgaaatggattggaaaggaagggaaag

SEQ ID NO: 32378 - DNA, 426 bp, Glycine max
  Clone ID: LIB3051-082-Q1-K1-F2
cccacgcgtccgtaaaattgatgtgaagtaaatattgtggggaaaaagtatgggcttgggttaagtggcccaataatgttatgctctgaaaccaaaaattggaggcccaacaatgacctggttttgcatcgttcctgttctgttcttcaccgcgcctcggtttccattccttcttcttcctttgtgtttctttgcgttcattataccattcccatggctcaataatcgttgctttgttcgttgggttcaagaaaaacgctcaaaatttcaaccatggctgcaacccttacttcaagatgttctcttctgggccgttctttgcttggtggattaaggaataataacttgtctggttcattaacatcgcatgagataaaatccagcaatttcttatcccagcaacattacgttcatacagattatgac

SEQ ID NO: 32379 - DNA, 459 bp, Glycine max
  Clone ID: LIB3051-082-Q1-K1-F6
cccacgcgtccggttgtgtttatgcattggtgattactgattagctagcagtagcatcgtccccttctccaaagatcatattcatatgccctccaaatccaatccatcttcatctccatttccgctactttggtatcttattgtctgggtcagttctgttgaattccttggtccaagactttgcagctgaaccaacagcatggcgggtcagtcctccaatgaaggctccagtactggaaacatttcagcagaatgttcagattcaactgttcagctcaatatcaagactctagattcccgcatctacagttttcaagtggacaaaaatatgcccgtctcgttgttcaaagagaaaattgcaaatgaaattggtgttccagttaatcagcaacggctgatatttagaggaaaagtcttaaaggatgagcacgctctttctgagtattatgttgagaatgg

SEQ ID NO: 32380 - DNA, 361 bp, Glycine max
  Clone ID: LIB3051-082-Q1-K1-F8
cttcaacaagttgaatcaaacagtgaaagtaaaacattgtgcaattaatcatcagactggaagtagccagtgcataagatcaatggcgtcaagacagcaattcaaggaagacagagccgaggcagctgcaaaactcgcagcgaaagacatcggcgacatcaacagaacaaacgagcgcgacgaggggtacgacttgcacgacgaagccaacttcaagcaagcacgagctgaagcagctgcaaagctggcggccaaggatctggaggacgctaacagattaagagacaacactttcaacacatggaaagagcaacatcagcatgatgagaacaaacccggtgtgatagggtccatgtttaga

SEQ ID NO: 32381 - DNA, 284 bp, Glycine max
  Clone ID: LIB3051-082-Q1-K1-G10
atcttatatactataccattcataatattactacttcatacaacttactattcctctgagaatgcatacaacctgactgggacatgctttatataagatccaatcttacttactcttgtatattaattatttattaatctacctgatcttctatcaacaattatatattcgcttcatgacaacataagaactttgaaatcccagacattacacccattaatagactatcatgctataactctttcaacagctagcatgttctatatatatgtacatacactata

SEQ ID NO: 32382 - DNA, 179 bp, Glycine max
  Clone ID: LIB3051-082-Q1-K1-G11
cccacacgtactatttcagcatgattatataattaatatttaaataatcactaaagtgggacgtacattaattatggatgaacaattagaatataatattcatagtaactaactctaacgtacaaattttatattaatcattattgaaaggtaaaaaatatatattgactaatatttaa

SEQ ID NO: 32383 - DNA, 373 bp, Glycine max
  unsure (1)..(373): unsure at all n locations
  Clone ID: LIB3051-082-Q1-K1-G12
ttttatatgtacaatattaggattggatttgctatgattttctatgaacttattaacgaatcgaattggtcttttgcagctttgccccatatgtctgaccaattcaaaagacatggccttcggatgtggacatcagacatgttgtgaatgtggacaagatcttcagtcgtgtcccatctgtagaagccccattaacaccagaattaagctttactaggcggcctcttccgttgtgaattaattattttgttgtgtaagctaaaattctntgatttttttaaccttctctggttgtatacaaacgttagatcagctgtgtctattgatgaanaatggtacaacananaaatatccaaaccaattaaattaaaaa

SEQ ID NO: 32384 - DNA, 417 bp, Glycine max
  unsure (1)..(417): unsure at all n locations
  Clone ID: LIB3051-082-Q1-K1-G7
caaacacgctgaatcagtactggggcttcttcaatgacagatgaagctatctccacattgaatttgaaaaatccagttagtgctacaacaagattatgcaaaaccttggtgtaaaatctatgttcaatcctctgttttgttgctgacattgaagactcttaaacaattaattaaagattactctatagtgttttggttctggcagcagttgatctacaactgggaattggtaaggccttaatgtcagtatttttttttttgtactcagataagtattggggtatgcttatttcatctcatatattataattgntattctcttcaacatattaggtaaccaggatcactttctcctacaagattcaactagatntctggtactttcattttcataaaaattacattcatctatggatg

SEQ ID NO: 32385 - DNA, 386 bp, Glycine max
  unsure (1)..(386): unsure at all n locations
  Clone ID: LIB3051-082-Q1-K1-G8
cgaaacgaaaacactttctctgcgactcttagcatgcaatcagaggttccattgctcgggcttctttcgcaccgaggttccaatcgctcattactgcactatatgcttgcaactaagagaccttgcgaaggactggttgcagaagacgagatcgaccacaacatcaacaacaacagcaacagcaacagcagttctctcaagacgaaacggattgccgacggaaccgccgattcgacggtgaagaacgacgaaagcaccgtccggagcttcaacaacagcaacagcgacaacagcagcaacagcggggacgcgagtgaaggagcgtcggatatggctttgggcgaatcgaacccgccagacatcgatgaggatcttcacagncgaca

SEQ ID NO: 32386 - DNA, 64 bp, Glycine max
  Clone ID: LIB3051-082-Q1-K1-G9
gccttatatactgcgtgagttttgatatgagactccgaattaaaatatcattttccttggcttg

SEQ ID NO: 32387 - DNA, 394 bp, Glycine max
  unsure (1)..(394): unsure at all n locations
  Clone ID: LIB3051-082-Q1-K1-H11
ccgtccgtcccacgcccgtccggctcactttcgcagaaagtttggtggaatggggagtgtcaatggatcccaactctcagggctgaggtggcttcaactgtggagtttttaaataagcgccagcggatgagtaaaacagacatggtggtaaccccaagagtcacgcaggaaagactcgtccactgatacctcatatgcaaacactgcgtgtagaagcatggcaataactcaaactaaacaaatgggttttgctgcatagcaaaacctcttcttgccgaatcatagcatagcacatggttgctcctgtgaaaaagcctgaacagtaagaacaattgtttgtgtaactaagtgtcacagtnattcttctcttaagatatagaagctgtagaagtca

SEQ ID NO: 32388 - DNA, 299 bp, Glycine max
  Clone ID: LIB3051-082-Q1-K1-H12
gctaggcgctctggtgaagatggtcagctaggaatcggaagcaacgaatagaaagaatgggtctgcctcgtcaaagccctgcagccccaccgtattcgctccgtcgactcctgcagccgaaactccatcgccatcgatgacgactgcaaatcgttcactaggtgttggaaccaaagggccacacttgggcaccctgctgagaccaagtctgagaacaagactgagaacacttccagccaggtcaaggctcttttcagagttaaaattgttcaggccgctattggggggtggcactgttt

SEQ ID NO: 32389 - DNA, 424 bp, Glycine max
  Clone ID: LIB3051-082-Q1-K1-H2
ctagttccaattggatctaccagtacaaaaaaaggagtaatttgcccttttttcaagagaaaaaaaagtgagaatggggtgtgaaaattacatgggccatgatttgcaaagatgaatattctaataaatttttgggctcaattcagacaattgtgccaatcccgtccattaaaaaagcaaagaaatacaaatcgaatattaatttgctttctcctttcggtttaaaccttggaggcgaagacattcttaattgacgttcctacccttggcttggtggggtttcggaagaggaacgtgtggggctttatgtcatttgacgcaaacgcgcgagcaataactaacgaatagaaaaggatgtagctttatattggagaatatcaacgaaacatcatcttgggtcactttgtaccaaaaccacaagcgc

SEQ ID NO: 32390 - DNA, 439 bp, Glycine max
  Clone ID: LIB3051-082-Q1-K1-H5
ggaactactgcttttggagaatcaagttctcataacgtgttttcaaatatgagaggtgggtctcagtcaaacttccgttcctcgagtaccgatctacaagaacagatgagaaaccagatgaaagatccagccatgcggaagatgttctcatccatggttaaaaatatgagcccggaaatgatggctaacatgggtgaacaatttggtgttaagctttcaccaggagaagctgcaaaagctcatcaagccatgtcatccttatcaccggagagcttggataaaatgatgctttgggcggacaggattcaaagaggagttgaatccgcgagaaagacgaagaactggctgctagggaaacctggcatgatctttgcaatattcatgctcattttggctgtcattcttcaccggttaggcttcattggtggctagagtaaga

SEQ ID NO: 32391 - DNA, 365 bp, Glycine max
  Clone ID: LIB3051-082-Q1-K1-H6
cttggcagttctcttctctgattacgaaattttttcagcaaaagcaggcaatggacttgttttttaagggaatgaacagggatggatctgagtgtccctttgatgtgaaagacatccaacggtgtccgtgtttaagaaacatcaatgaacctacaaacttctctttctcctcaactaaaatctccattcctgttcatggatccaagggtcctatatttgaagatggtcctagttacggcatggcatgtaagctataccatgggaaagatggagtcattcccctatctcagaaatctgactttcacaatggcagcacaaaaagcgattctatgtcttgtttcaaccctttggcaagaaaaacttgc

SEQ ID NO: 32392 - DNA, 205 bp, Glycine max
  Clone ID: LIB3051-082-Q1-K1-H8
aaaaaaaaaaaaaaaaaaaaaaaaaaaaaaaaaaaaaaaaaaaaaaaaaaaaacaggaagggaacaataaaaagaaaaaggggcaaacatttttacaatttccaagcttacttcccctttcttacaaattcataacttttatatatatacacctaaatacaattaactttcccactttttactaactatttaacaggataaacct

SEQ ID NO: 32393 - DNA, 478 bp, Glycine max
  unsure (1)..(478): unsure at all n locations
  Clone ID: LIB3051-083-Q1-K1-A4
tcgcggacgcgtgggtttactaacctaggggtctataaaggtcaacggtcaaggtcttgaaaaatggggtcccacaaggtttngcttgggtgtaggtatgttcatagcggctatacttctgatctctgctgaggttgcacccaatgaatacgaaaattttaacaaaaaagatggaagcatgctccaaatgggttatatgatagcaaatggggttaccgtgggttgggtggtccttggtatggcggctggggtggcccttattatggtggcggctgnngtggcccttattatggcggtggttgtggcggtccctggcgtggtggtggcggtggtggctggggaggttggcgtcgacctaatggcaaccctcacaactaagaagaaaacttgctaaagcttctttacgggtttaggttttcgcaataaataaaacttcatgagaagtgtagttgtaataaaagtggaagtctctcttctc

SEQ ID NO: 32394 - DNA, 141 bp, Glycine max
  Clone ID: LIB3051-083-Q1-K1-B1
gtactttcaaaagatagtcaaagagtgcttttaatagtctttagagaagccgttttattctagttatttggatattctctatacttttgaactcctcttataattcacccaattattcataccataattttgacaaaacat

SEQ ID NO: 32395 - DNA, 484 bp, Glycine max
  unsure (1)..(484): unsure at all n locations
  Clone ID: LIB3051-083-Q1-K1-B3
tcgcttcctcaccaaacccactctagcacaacccttcagaaccaacacatatgagtacccatccaaacgcacgccattttcgagcatcaagcagagcagcgccaaaaaaatgatggttttggaggacaaaggttaccaaaacctcatcatgccttgccaccctctgcggcggtgatgactccatctttgcaatcttctctggtggaacacgcatctgtggggctgacgcagtgcgtagggacttaacttggagaagatccccgtggcacgaaggtgatggtgtggttgagcaccgcaagacacagcgacaagtttgagagcgtgcaacccttctcgctttcttcgtaaacccttatttcccccctttttctccatcactcaaaaattcggaaattcctcatatggaacagagatctgaatgtgttagagtcaaatctgctcgtaggtaaggtgccatanngtgcngtgatgagtgagagcccac

SEQ ID NO: 32396 - DNA, 451 bp, Glycine max
  Clone ID: LIB3051-083-Q1-K1-B4
gtcacgcttccgccaacgcttacgcttccagagccaaccgaaagctaccatcatgggctaagttcaaatacaatattggaagtcacttaccgtacgggtcggctggatgatactgcatcagtttgaagggatcaatgccattgttttttatgcaaactctatatgtatctcttctgggttttcagaaagcatcggaacaatagcaatcgttgccgttaagattccaatgacatactataggagtacttctaatggatcaatctggaagacgaccacttttgctggtacaaaagtatgaactattgttcctactctactattttgcagtgttttacaagttgagtctaaaaaattttgattctcatacaggtgtctgcagtgggaacatgcgtatgatgcttgctggcagcctagacattcattgtgcaggacttacataagtggataggag

SEQ ID NO: 32397 - DNA, 324 bp, Glycine max
  Clone ID: LIB3051-083-Q1-K1-C4
tcgaccaagcttacgaccatgcgtacggattcggtaaaaccgatcctatccgtttacacgtgacaggtacacatttgaggttaatacaccagctctgtgggctcaatagagacagtgccaatttgtatatagcacatgacaatcttaagccacgtcagattgtactgtctctaagcctttagcggagaaaacctcacattggctagaattattccctcactctctatatacaatacaaccactaatttcggttcggctatgatctactacaacgatttaactgtgagaaccagggtttactcaatggttcgtcgaaaagtccag

SEQ ID NO: 32398 - DNA, 342 bp, Glycine max
  Clone ID: LIB3051-083-Q1-K1-D1
gccaccgatgccccccaatcctgggatgagattagcaaaacactccaagacctcaaatcccggttcacctgaccccaacaacaacctcaacctccacaaaagaccaagtccttccacacggtggaagagctagacgccaagctcaaccccaagcccgagcccaagcccaatccagaattgaaaaagcccgctgatcagataattaacagtagcatagttaccgagccagtccgagggaacaagttgaaggaaaacatgttcatagttcgggacaagctggagagacagaaagaagagaaagagctcaccttcgagcgtcttcgtcgggacccgctgagcgcg

SEQ ID NO: 32399 - DNA, 469 bp, Glycine max
  Clone ID: LIB3051-083-Q1-K1-D7
cagggtgggagcatggtgttgcccaggacgagagaaagaagaaggtcaaatgcaattactgtgagaaaattgtcagtggaggtattaatcggtttaaacaacatttggctagaattcctggagaggtagcaccttgtaaaaatgctccagaagatgtttatctgaaaattaaagagaacatgaaatggcatcgtactgggaggagacttaggcgacctgaggctaaggaattgatgcctttctatgcaaagtcggataatgataatgatgatgacttccagcttctaatgcactgatgggggttttaggcacttgtcattattgtgtattttagtggacaagattatcatatttaatatttccactgtcgcttcaaaaggttagatgtcattagttgattagaggaacaactagtgctttttacctagtgaggtgtcttatcacatttttataatccgtagtttatgtt

SEQ ID NO: 32400 - DNA, 482 bp, Glycine max
  unsure (1)..(482): unsure at all n locations
  Clone ID: LIB3051-083-Q1-K1-E3
gtcgatgaaacccaaaagcctggaggaagggttttaacctccaaaattgcaatgccctgcaaccctgggccttcaaatccgtgggaggaccatggtccggccagctccaccatccaacatacgagaactatcgtgggtcggcgatgttggttttgttgttgatgcttggtggcatgatggatggtgggaaggcattgttgttcaaaaggactcggaatctaattgtcatgtttatttcccaggggaaaaagtggtgtcggtatttggtcctggtaacttgagagagtctcaagattgggtggggaatgagtgggtatttgtgagggaaagacctgatcttgtggcttctgttttatctagcttgaaaacaaaacataactcatgcatatccaattccaataacatccaatcaactggagcaatcaccagagatggaatacaatttgggcaatcggatacttgctnggattctgataaggata

SEQ ID NO: 32401 - DNA, 460 bp, Glycine max
  Clone ID: LIB3051-083-Q1-K1-E6
cccacgcgtccggggagaagccaatcatgggttgcacttcactgccatcttttattcagatgtcatctgctacacactccagcttcagtgaaaaactccgcaaccctcaaaagaagtctcaaattgtgatacctacaactacaagagagacacacacaacaatttcttggtctttttcttctcaatgcaaagctcttcacaaatcagttcctttggctgcttcacttgcaattcttctctggtcaacccctgcacatgctggtttcatgtcaggaatttctggaatagaggctattcctggtcctcagctacctcagattgactttctcaagcagctcaatgaagaaaaccagaagaaatatgctgagaatgatgagagaattaaatcatcccccttgatgaaggaactgcttgagaaatccaagttgaacaaagagaagaaccgtaaagaaattgagaa

SEQ ID NO: 32402 - DNA, 457 bp, Glycine max
  Clone ID: LIB3051-083-Q1-K1-E8
cccacgcgtccgctcacattcatccacttttcttcaaagtcttcatctcatatcctctttggtgtgtcctcacacgagtgtaggaacggcattattgtgatggagagccaggatctttcttcgccaccccacgtggacgcatctcgaccgtcccttgggttccccttgggcactgcccttctcttgatcatcatcttcaccttgagtggcgtcctctcttgctgctaccattgggatagggtgtgttccctccgtcaatctttctctgattccgaaccccaaatgccttcctcacccaccaaatctaagcactccaaggaattgaagcaaaacaggggacaaagcttgccagtgttgatgccaggggatgatgtgccaaagttcatagccatgccgtgtccgtgccagccttcaagaccagacagcatcgttgtcaccgtcgaaatggagaagccac

SEQ ID NO: 32403 - DNA, 476 bp, Glycine max
  unsure (1)..(476): unsure at all n locations
  Clone ID: LIB3051-083-Q1-K1-F1
gtggaattcttgtatatacactagttttgctgtgttcccctcttggagtagtgctgattggagctgcattaatcgattttgttgttgctgatttcaattggtctgcggcagtatagaagaaagcaacgatgcgttggtgtttacctggcttgatagggtgactaaatatgcctttagaagttttaggattatttctaatgtgttcctacatgcaggtccctaagcttacatcctgcttctagatagttggtaatcttatctgagggtagtagctagtaccatgggagaagtggcagtaatgcactctgagcctctgcagtttgagtgcaatgacattaatgtgaatatgactgagaaggaagtgtatcctccagaatcaaatgtggagcacttacctggagaagaatcgagtcaatcaacagaccacanaaatatcaatgacttgcaagagagaggatatatggagtatggatgtc

SEQ ID NO: 32404 - DNA, 474 bp, Glycine max
  Clone ID: LIB3051-083-Q1-K1-F2
agaatattacgcagtgaaagattcccgaaacccaaatttacgcagtgtgccttgcatgcccatcaaggctgatttgaagtggccgaaagaggcatggattctgggtcaagatgtttctgccgggttcactcctagcatgtatattattcttttccctcacttctggctcccgctgtgtgctctgcttcacactactgcctctcatccactccctatcgctgcaattttatatttgtcattttggttccggccttgcctcttaagcctcttaagagggacaggctcatgagtaaaattggcgtatcttaatgtcctgtgcttatttggagcccattatggcttgcacaagttgctcacacttccatgatctattggaaatgaacttgcctagcgtttgatgaaagtgtggtgacataacagacgagatctaagaggtccttggaaaatcaacaatttgaggagcgtaagaaagag

SEQ ID NO: 32405 - DNA, 474 bp, Glycine max
  Clone ID: LIB3051-083-Q1-K1-F6
gaaagagaataagagaaaaaaacgtaattaggtctagaggttgtgagaggtgtatgactatgggaacgtttccaccgcgaaaaccttggtcggcgcatactccttattcttctcctgcttctgcacctcactgctataccccctttcaagcaggagaaaatctctcactcctttctctttctctccacgccgccatcaccacacatccatgccttcgctctctctctctgaccctgacacccccaaacctattgccaagaataataccaatacccagtccctcaccgatcccgacctcgatggggtttcggggaagaagacgaataagcgcacggcttcagatttagaacaagaggccatgccccccgccgcttacaacaactatggggactactagaccagctccgacctcgttcaacccgaacctgctttcagagaagacgacatcatgaatacgaagatatagaagaaaac

SEQ ID NO: 32406 - DNA, 480 bp, Glycine max
  unsure (1)..(480): unsure at all n locations
  Clone ID: LIB3051-083-Q1-K1-G3
gatccttcaatttcactttcctctttctctcttcaaatcaaacacttattccccaagcacacggaccaacacaaaaccacacccgattctttttctctttttttcttctaatacaacttgggaaccggttccaatggctttttcttacaccctaccatttctgggggagcattattccacaccccgaatcaatgtcggtcttcttctaattcatcggttcccatgaaacgaagggtcccaggaatccccttaaagctcgttaggtccacctcattccagagctagacatgatcctcaaggtggtgcacactttgttgaggatgaaagcacanagatttttgctcggaaagtagcagatcattatagtgcgagatccaaccagactttggaagaacgggaggctagtccgataattcatttgaagaaactcaataattggattaaaagcgtcttaattcagctttatgctcgtcgaggaga

SEQ ID NO: 32407 - DNA, 393 bp, Glycine max
  Clone ID: LIB3051-083-Q1-K1-G6
tccacgcgttcttatcgagtatgctaccacacacagaagccatacccttccctgggtgattgacgtcttcagtgtccacagttgtgtccaaagacacgcagtactaccggtcctaaacctactatgaggctgacagatccacagtaggattcaaaggtttgatcaatacgggaatcagaaccattaaacctttcttcgtacacgcggacgaagacctagtggacattacactccgtaccataacccagatctgtgcaagagatacccatcaacgcgtgttgcagaatgtccacttgactgttagcacagcggggataatgcaaatggacaaccacagcattagggtggaacttgtccttcggacactgttagaggtgaatgtatttaacgatc

SEQ ID NO: 32408 - DNA, 442 bp, Glycine max
  Clone ID: LIB3051-083-Q1-K1-G8
cccacgcgtccgcggacgcgtgggctcgccgcaaccttgctcttgttggcatcttcggcatcgctattcccgtcctcgtctacaagggcatcgtccgtgaattcgtaagtagtcattttccaattcccaattagggcttttcattctacctatgcattcgattctttttcttccttctttatgttatacttggattttcactttcttttaacaactatatctctccttctgctgaaacatgttttattttcaaaaacaatcaatttctgattcagaatctattcagttttgaaatttgtttctacaacaaacacaccctaattctgtgtgcttaattggctgcaagtttgagatggatcatgggtgacaactaaaccgtgtacagatattgtcatcagtagccgctaattgatatttttttttggccctacatgaattatca

SEQ ID NO: 32409 - DNA, 358 bp, Glycine max
  Clone ID: LIB3051-083-Q1-K1-H3
tcgcttaaacatggcctttggaattcttcgacaggaagaacttgccggttccaaaggtccaaatgggggaggaggacctatgccccaaccaaacttgaagtttcaggaatgggcatacaggaatatggtttttgagcttcttccggttggaagcaagagcatgctatataccaatggccacaagcccattaaataccacaatgatactagcacttcattcattctgaaaccatcatctcctttcagattcaggagctttttcaagaaatacgtgtgccttgacggggtctggtttggagtgagaaagagaacatagtacattagcgcagcccacaatagacagagcgaaatggaggtc

SEQ ID NO: 32410 - DNA, 452 bp, Glycine max
  unsure (1)..(452): unsure at all n locations
  Clone ID: LIB3051-083-Q1-K1-H6
cccacgcgtccgaactttcttctttatggttaagatgtttttccatgtatcgatcaccatctccaggtgcattgaccttttgcttacactcatgatttcaagttacttcaagatttttcttattgccatgatggtctgggactttccatcttctgtgatcttcatcattgaattattttgtttatcatctaatgctgcggcattgaaagtgatgactgagtcaactatgcgtcgatgtgtttggacctgcttcagtgcatatgctataaaatttattgtcactcgaatactggagctcatattgttggggcaattaatgcaaggctggagtcaaatgccattcacattctctaaagccaccatgatttagtttagcattctcatgctaatgtattaganattagaagcagaatttcgtggcatgtgtttctgaactgtatatatgctcattg

SEQ ID NO: 32411 - DNA, 386 bp, Glycine max
  Clone ID: LIB3051-084-Q1-K1-A1
acgcagcaatcaaaagtgaaggagtcccttggcacgcttaagccttattttaaccatgaaagcccagtcactgcaattgcggcaattcaagagttggaagtactgtcaactttggaccttaaagcgccattgagggatgagacccagcaacagccaccgccactgccacagacacagacacaggtgtatgaacagcaatatccccagccacagtcacagcagctgccgcaattttttcaaccacatacatcagccccgagctaggcctgaacatgatgaaggacaacttgtacaagtgttattaacaaggcacaagaggtaaaagatctgtaaagcggttaggaagtagtggtactgatttttctgagggtgaaatgactctggct

SEQ ID NO: 32412 - DNA, 340 bp, Glycine max
  Clone ID: LIB3051-084-Q1-K1-A10
ctcccccttggcgtccaatttccattttcattcttctctctactataaattctgcttcgccttcgcttctgtctcgttctcagctccttcaccatgatgagtttctccttggattcagtttcggtgttaaaccctaaactctcccactcccatttctctctcccattcaacaggttcccccattccctcaacttccaccccttactcaaaccccgcgcagttaacgccgacgtcccccctaacggcctcgccgtctgctacctcacccttcaccgacggaaaccgttaaccgtcgctttcacagcttctccccaagactccgaacacggagagattgaag

SEQ ID NO: 32413 - DNA, 377 bp, Glycine max
  Clone ID: LIB3051-084-Q1-K1-A2
tcgcgcggcttcaaccttgtagttattctctttcttcttttttagctatccctctcttgaaaaatctagatctcgttcttccttgatctacgttacgcttttagtgaccggatctgtatggatctgaaccagatctacacgccgatggtggttttggcctggtacgataaatcttccatcggagttttgctctgtataggttcgattcatcgttattagcgtcttgatattgttattttcatttgtcatataggtctttcatagatctgatgcatggaggctcagatctactgtacagaggtgtgcgattcatgttcgtctctcttttggaatctgtttcgtagaaagtcgtttggtcttccatgtcgcatggctct

SEQ ID NO: 32414 - DNA, 370 bp, Glycine max
  Clone ID: LIB3051-084-Q1-K1-A3
gtgttctataagttcacggtcagttctgaaaaatgggttccaaggttttgcttgttgtagttatggtcatagcggctatacttctgatctctgctgaggttgcacccaatgaatacgaaaattttaacaaaaaagatgggaagcatgctccaaatgggttatatgatagcaaatggggttacggtggttggggtggtccttggtatggcggctggggtggcccttattatggtggcggctggggtggcccttattatggcggtggttggggcggtccctggcgtggtggtggcggtggtggctggggaagttggcgtcgacctaatggcaaccctcacaactaagaagaaaacttgcttaagcttcttta

SEQ ID NO: 32415 - DNA, 379 bp, Glycine max
  Clone ID: LIB3051-084-Q1-K1-B10
cggtcatccacattcacaacattactttgctaatcaacccaaccctaattctgggttggtaatcccaattgtcatcccttcggttttcctgatcagaatcttccacccatgtctcgagtcttcggtagatggaagaatgcgaaggaaatggcgttgctttcggggtccctgccacgtgggcaccatcgaaccgggttcaatttttgcccaatttcgacccacctgaacatgatcgcctgccaccgctggcgggaggctccggtgggggttcaggagcggtacaagtgggaccgcggcgggtcggacgatacctcgtcccggaagatccgggccgatgcaaattgcccacgttgcaccaaagacatgaaccttgttttct

SEQ ID NO: 32416 - DNA, 445 bp, Glycine max
  Clone ID: LIB3051-084-Q1-K1-C11
cttcctgaaaggtgttatctcagaaggtcaaaatgtgtatagcttagtgactgggacgagaaggaaaaaactagtaaggacagtaaagtctaagtgatgggaacataagcgtttcagacacttggacgaaaagtcaaaaactagcttattaggtttgaccaaatcttacccgactgcttgagctaattaagtatattgcttcaatttagaaccaacccaatgaatgaactctagtattgagcatcaagtggacgcggcagagatgggaatatagcgtttcagacacttttttctcttattaatgaagggtttcttgacctataaaaaccaacaatggtattagtagtatgtggcagagcttgatataaaaatgtaaggtggctaaaatagtttagtttataatatgtattagaatggagatatctcattttgatgtacacataat

SEQ ID NO: 32417 - DNA, 381 bp, Glycine max
  Clone ID: LIB3051-084-Q1-K1-C12
ggaaaaggccatatgaacggtgtaatatatgcattgttatccgacacaggagatttgaggtttctagaccttgtagggaaagattcatatgatggaggttctagtggttggattgatgatctaatcaagagcttagtgagggacacaatcattatgggccttatatgaattagtaaatggaggaacatgaagcaggcccatttagtttttcatcttttattataatttccaagattaaaaaaataaagagcaatagatataagctaagagatttttgttgtacctcgcatacagtaggcgggcgtggttcatttttataaagaaataggaaaaaagaaggaaagaatgggattgtgttagattaattgatgttttccaaac

SEQ ID NO: 32418 - DNA, 391 bp, Glycine max
  Clone ID: LIB3051-084-Q1-K1-C3
aaagtaacaaatttcagcattagcttagaaaatggagttcgttcctgaagaaggcaagcgccttcacgaggattgctccactttgattttgcctgctctgtcgattggcaatgtggggcagctagttgcagatcttttgatttcatcaatgggttctgagagagttgggtatttggatgatcctaacgttttgccctgtgttggcaatgatgcttatggaccctttcctcaaggagacctggctcttcctcttgaagcttatgattccccttctaatgctctcactatcatccaacagagatcaccggtggttaagggtatgatgattgagtttgcaaaaaatatggctgattttcttgctggtagtggaaagaagcatattggtggtctc

SEQ ID NO: 32419 - DNA, 154 bp, Glycine max
  unsure (1)..(154): unsure at all n locations
  Clone ID: LIB3051-084-Q1-K1-C4
tttgaatacttacattttcttcttggtatactacattatggtttccttatacttgattaatggaatatgagntagtttgctgaaaaaaaaaaaaaattatatagaaataagaaaaaattaaaaaaaaaaattaaaaaaaatatattataaaaat

SEQ ID NO: 32420 - DNA, 427 bp, Glycine max
  Clone ID: LIB3051-084-Q1-K1-C8
cccacgcgtccggtgaattagagaaaccaaacctgaatgccgcaccgttcaataatccattcttgaaacaatggctgaggaacatcttcgccctactacgctacttctttttctcgatcttcttccataatcaatcatctcatcctccgcagcattgtcatcgttgttccgctttcgcgttgttgcggttggttgcgatgggcgaggtggggaagatactgtacatagtggtggtcgaggactccgaaaagaaagagtcctttcgctactcgcgtcccgttctgcagagcacgctccagctcatgggatgcaaagcgcgtcacgccttcaagatcagccaaagagtttttgaacaaacaagggaagagaattctactgatattttgaagctggaagtagaggctttatcaagttttgatgctttcaa

SEQ ID NO: 32421 - DNA, 400 bp, Glycine max
  Clone ID: LIB3051-084-Q1-K1-C9
cttgttttctttcttcctttcaatctttacccttccaaaccaacacataaagggccagccctcttcttttctctccgtgggttgaacttgaagaacctctgaaaatcctttctttctttcatcgatcactctctctctctagatctgttcaaatctccgaacatttccgctccaattttcatttccctgaacaaaaccaaaccctaaccctttctttctgtatgatacctgattcccccccagaggcgtagtttttgtgtcgatttgtaaattctttcggtagtttaggttacaattttttgtgaagtttttacggttttgaatcggtgagatgaatcacaacatcaacaatagagcgaggtaccctcccgggatggggattggtcgcggaagtttcaat

SEQ ID NO: 32422 - DNA, 348 bp, Glycine max
  Clone ID: LIB3051-084-Q1-K1-D1
accactcgtccgaagaatgattaccagtctgtggtttgacctttatggccgtggtggcggttctggttcctcttatgcttttgaacatgtttttgttggataaaccaaacaatgtggtgaagtttctggctttcataactggctgcagttttaccttgaagaagcaaatggtagagttgattatcaaggatatatttttccccatcgactgggagaaactcctgactctgaagctcagcttctgactattcaatttgaatggaatggtgtcctaaaatctgtatccagcactttggtttgagtgagccctgaatttgaaatcgctttgtataccctgtgtttctatgt

SEQ ID NO: 32423 - DNA, 299 bp, Glycine max
  Clone ID: LIB3051-084-Q1-K1-D11
accactcttgacagaatcattgatacacttcatgaacaaacaaatgagcattgttaaagctgattcagcgggtactgttctatcatcacataataaccctgaaaatcgctgttttaccattcataatcggaattgataacaccctgttcatatttctgactcccaaactgaagtatacaatgatatatctgatatttcaactattgatctactaactgtttataaactggcactctatcatggtatatcactttataatacgaagcctacgaaatgaaaacactttatgatcaatgcca

SEQ ID NO: 32424 - DNA, 335 bp, Glycine max
  Clone ID: LIB3051-084-Q1-K1-D5
tcgtaaatattacatgcactatttactcatttttaatgtatgaaatatttaaattgagggatgaaattaagaaccaaagtaatcaagttaagaataattggagagttgctagttcatccatgtgatcaaacctcgcatggccatgttgatgttaccaatgcaatgcgcttcgctgttcatgtttcccatcacgattgataaaccctaaccccaatccctccgaccaaaatggtgaataagaaggtccccgattggctcaacagctctctctggtcctcatcatcgtcgtcgtcccctccctcatccgctgtcgacagccctttcgaacagccacc

SEQ ID NO: 32425 - DNA, 424 bp, Glycine max
  unsure (1)..(424): unsure at all n locations
  Clone ID: LIB3051-084-Q1-K1-D6
aaaaaaagaaaaactatatcagcgattctcgtgatcttcggcctcgaatcgagaggtaaaagacccaactccgcctctgtttttgtgatcgaaaaccataaaaaagttgtttccgatcactgccttaatcggattcagctgttgttcctcctcctcaatttcgaatattgaaaggctttagttgttgattttggtcaagtctctagtcaacctgtgaattttttattcaagtttaaaaatatatagagcaatgagttttgtttttcgaggaacaagagcagatattgaaaatgggtttccaggatttatacctgagaggcgagcattgcgcgttcatgcaacacgtnctagtaattccaattcactcacttttctcgtgacaagtcttctggtattcatgatactgaactcttaccagatgtcc

SEQ ID NO: 32426 - DNA, 413 bp, Glycine max
  unsure (1)..(413): unsure at all n locations
  Clone ID: LIB3051-084-Q1-K1-D7
caacatattgagttcacgagttcaaaaataaaaattattactcaatttggtatatgaacgagtttggacgaattgcattaaatttgacctaaacattcaaaatctaaatctatactcgtaattaaacaccggcccatacttttacatctgtagcttacaacaatttctttttataaatgatgatttatatgatgtcatttgtagttttttattaaggatttcatgatgtcgttttaagtatttcataatatatagacttgttatgtgtgtgtcaccacacaaacatacatttttttaaaaaaaaaaccttaaggactttgatgatgtggttttaagtattctttaacatgtatgtatccaaaaaaatattntcttataaacatgcaaacttattttttttagtggaatttaaa

SEQ ID NO: 32427 - DNA, 405 bp, Glycine max
  Clone ID: LIB3051-084-Q1-K1-D8
acggtgaactcaaagttactacctcaaggtagtggtggtattataagtgggagaagcagtgccctggtgcatggagctggtgctcctgttcgttcgccaaaccttggttttagtgctgagcccacacctcaaatcccttcacctgttaaagctgtttctgccataccctctgagaagccacaacctccagctgcaaaattgaatattgatgaacttcagcgtaaaactgtttctctactggaagaatatttcagtgtcaggcttttggacgaggcattacagtgtgtggaggaactaatagctccagcttattaccctgagtttgtcaaggaagccatttcccttgcactagataagagtccaccatgcgttgaacctgttgcaaatctttttgagtacctgcta

SEQ ID NO: 32428 - DNA, 460 bp, Glycine max
  Clone ID: LIB3051-084-Q1-K1-E3
ctccttcctctcatcctctataaagaaagtgcttaatttgtgttgttacttggttcagggtccatggattgggggcttgctatatcttctcatcctaaaccttattcagtcacaactggtggaaatctctggcggagtaaacacaccaccaagaatatttactttgcaagttcttggatatcaaaagcttcacgacacaaaagggaaactcaaatagaacataatgttttgaggttccaacaaccaagtttggatcatcattacaaatgcatcagaggagggtctacatatcaagaatgcaatagaaaatttgttgtgaaggcaatctctaaacaacctcttggttttgaagctcatgcttccaatcctaagaacattttggactctgtcaaaaatgtattggctgctttctactggtttttctatccatacaccatgaatgggataacattatgcgcat

SEQ ID NO: 32429 - DNA, 450 bp, Glycine max
  Clone ID: LIB3051-084-Q1-K1-E8
gagagttctttttttcttctggttcttggtttggtttgttgctcttgttctagagagagagagagggataagtgcctgctccttcggcatttccgtcagacaaagttaacacttccaagaccgattaatcaattcgccccttcaccattccctattacatgaactctcccaagattttaatttgaagctgaaagaagaatgggagaaaatgaagaagcgatgcagaggcttcactttctgaagcagccgttaaacatggagcaacttagcatcccgcaattcaacccctcgcaaatgcgcgcgaagcagcatcatcatcagaatcagttcgacggtggggacagtaacaagcgggctggtataccaccctccaacccgtactcgatccttccatttcccctactttcagatcccggtggtcggttaacacaccaccatttcccttaaacc

SEQ ID NO: 32430 - DNA, 435 bp, Glycine max
  unsure (1)..(435): unsure at all n locations
  Clone ID: LIB3051-084-Q1-K1-E9
acagtctttaacagatgctgtgattccaaccactcagaagaaaactgccttggataggttggttaaggataatgttgcactaatagttgttttagaagcaaaagttaacaatcagcctgttgataatccagggaaaagacagcttctttgtgtggcaaatacacatgtaaatgttcaccatgatttaaaggatgtcaaactgtggcaggtgcacactctcttgaaaggattggagaaaattgctgcaagtgcagatattccaatgttggtttgtggggactntaattcaattccaggaagtgctcctcatgcacttcttgcaatggggaaggtagatccatcgcatcctgatttagcagttgacccacttaatatattgcgttctcacagcaagtttggttcaccagttgccactggtcaatgcttattcgtctt

SEQ ID NO: 32431 - DNA, 326 bp, Glycine max
  unsure (1)..(326): unsure at all n locations
  Clone ID: LIB3051-084-Q1-K1-F5
gccaccgtcgccacgcgtcgggcatatacagatgccagttgcgcctaagaaagaaaaaaaggtttcaaggggctttgggcatttaacagaaggcggttgatctccagagtcaaatccatttgaacagaaccaccaaacgacgatggaggaaagcgtnttgcagcgctaacagatacatcgcctctcattctggcgaagctagacgacgatccacgacactgggcgcgcgcggcgtgcgtctcacccgattctcaccctcattcgcactttgctggagaccaaatgctcccaaaccttcccctcatctctcatctcctccgattccc

SEQ ID NO: 32432 - DNA, 463 bp, Glycine max
  Clone ID: LIB3051-084-Q1-K1-F7
tcgctcagtttctctccgtcatcaaatctagggttcctgcagttgtagttgccgtggccaccgcgagcgccacctccagaatagttgccgccaatttctgattcgtgatggggaaaaatgagtttctcacacctaaagcaattgccaatcgaatcaaagcaaaaggattgcagaagcttcggtggtattgccagatgtgtcagaagcagtgccgagatgagaatgggtttaaatgccattgcatgagtgaagggcaccagcgtcaaatgcagatttttggacaaaacccacaccggatagttgagggctattccgaagagtttgagagtacttttctggagcacatgaagcgcagtcaccgattcagccgtgtggcagccactgtagtttataacgaatacataaatgacagacaccacattcatatgaactctactcatgggccacgcttactgagttttgt

SEQ ID NO: 32433 - DNA, 285 bp, Glycine max
  Clone ID: LIB3051-084-Q1-K1-F9
cccacacctccgcccacgcgtcctcccactcgtccaaaaaaaaaaacaaaacggtcgagatataataaaaaactagtatacaaatataacatatcattcactactcccaagttctacaacatactattttaactatcttaattatgctatttccctctatagatcaaatatacttttacacattcacatctttattcacaataaattctttatctccgcccgatatatcatcctgcttcgactcctctattaccactactacaagtcttacatcatcctctaata

SEQ ID NO: 32434 - DNA, 416 bp, Glycine max
  Clone ID: LIB3051-084-Q1-K1-G1
cccacgcgtccggttcatagtcccccgtatatatccgttcttttttcttccttccttccgtccttccttcaacgctcagcactcaaatcctctgagagaaaaaaaaattagggttttgcatttcgggtcagacagactcagacatgggaggaggcaatgcccagaagtcaaagatggctcgcgagaagaacctcgagaagcagagggctgccgctaagggaagccagttggattcaaacaagaaagccatgtctattcagtgcaaggtgtgcatgcaaacatttatatgcaccacatcagaagtgaagtgcaaggagcatgctgaagccaaacaccccatatctgatctccatgtttggtttcctcatcttaaaaagtgaaagaatgcatgttgagacatgatatatcaatatatg

SEQ ID NO: 32435 - DNA, 450 bp, Glycine max
  Clone ID: LIB3051-084-Q1-K1-G12
atcatctcataaccaataaacaacaaaaagaacatcagcagcagccatggccgtgaagtttgcacctttctgacacacccaggttctcccaatttgggttgggcaccatggaaactggaataatccagggaccttggggatttcgctctctatccaaattcgttttatgcaccatttctggggcccttaccgtgtgttttgcccttgctggggccctgacaggagctatagctggtgctctagcagctaaggccactaagagtggtcttctccggggagtttcattgggtgccattgccggctctatactctctgtggaggtgttggaagcttcccgtgcctattggtgtatggagcaaactggctcacggagtgcatcatctatggcagatttcatagaggaacttgttcgtgggaggcttgttgaggaatcccttacacctgctattt

SEQ ID NO: 32436 - DNA, 386 bp, Glycine max
  Clone ID: LIB3051-084-Q1-K1-G4
tcggaagatggtgagaaaaccagctttgatcattgctgttactggtggcattcatagttgtgtctgcgaatgcagacaacacaaaggttcaccccccaacttctaagaatatggtgtattatcctcaaggttgtaggtgctgctggttcatatggaagccaatgatcaaatgtgggaaagtttgttgtgaagatggatgttgctcttaaacttatgcaacacaaggttgaagcagacctcctataatttctacaggtctatatatgtttctcttcatccagatgcttatataatgtagtgctaaataatcattcaggaatccagaatttgattatgtgccctgcgaagtagttgaaagggtaattgatgaggttaatgtgatcaaa

SEQ ID NO: 32437 - DNA, 429 bp, Glycine max
  Clone ID: LIB3051-084-Q1-K1-G9
tccacgcgtccgctttctctctctaaaaccctgctcgttttctctctctaatggcagagcaggccgcaccaaccgttgtggttgtggattcggttggggttcggagtcgctatggcttcagcttcgtcttcgtcctccaagctatgcttcaattccgactgcaaagagttgaagtccgaaagacctaagaaagggtggagactccgcagcggataactagccgagctttgtgatcgatgcggctctgcttttgaagaagggaggttctgtgaaatttttcactcaaatgcttctggttggaggagttgtgagacttgtcgaaagcggattcatcgtgagtgtattgtctcaagtcatgctcttatgttgttggatcccggatgaattgaatgttatgcatgtgcccgcaaaagtattattttgccatct

SEQ ID NO: 32438 - DNA, 211 bp, Glycine max
  Clone ID: LIB3051-084-Q1-K1-H11
cttatttactactctaaaatcttctacttattcattaccaatttaaaccttcagcacgatcgactacatcgtggctacaaatcatcctacaatataaacaaccacatattaacacatactcatcatctactactatcacttttcctcctaacacaccttatctatatacaccatacaatcacaactaacaatactcttgattttatttata

SEQ ID NO: 32439 - DNA, 410 bp, Glycine max
  Clone ID: LIB3051-084-Q1-K1-H2
tcggttttcatcagagtgtaacatctagtatacatatatagtataacatacttacattgtgtgaaatgagatttgtgctgaagctgaaaatttcattgatatatgaagaaattaatactgatgcaggtggaggaagctgatatgaggagagttgccttcctccctcacatgctcaaaatgcagtggcttatattcaaagcgataccaccaacaagacctgcatcaccaaatggactgtcgagcataaaatggaagctcctatttatatctattatcaactagataattactaccagaaccagttgcagaaaaatcttctttcatatttctgtttgaagttacatataagatatgttaagagtagaaacgacaagcaactgcggagtaaggcagcatatggggaaacaacg

SEQ ID NO: 32440 - DNA, 370 bp, Glycine max
  Clone ID: LIB3051-084-Q1-K1-H3
cccacgcgccgtctcaattgtgtgtgcatcagtggagaaatccgttgatttttacgtgagtgttcttgggttttctcctattaagagacctagttcattagacttcaatggggcatggttattcaattatggcattggaatacaccttcttcaatcagaagacccagaaggcatgcccaagcttgttccaattaatcctaaggacaaccacatttctttccaatgtgaaagcatagcagcggtggaaaaaagactgcagcaaatgaagatagagtacgtgaagaacagagtagaggaaagtggaatcttcgttgatcagctattctttcacgacccagatggcatgatgattgaaatctgcaactgtgac

SEQ ID NO: 32441 - DNA, 390 bp, Glycine max
  unsure (1)..(390): unsure at all n locations
  Clone ID: LIB3051-084-Q1-K1-H5
atacccttctacccttctgggtcgtgagagggccatcgtcatcaacttggagcacatcggggccatcatcaccgcccacgaggtcctcctcctcaactctcgcgacccctccgtcacccccttccttcaggagctccaggccaggatcctccgccaccaccaccagactctggccgatgccaaccccaaccctgacgacgccatcaagattctccccttcgagttcgtagcccttgaggcctgtctggaggccgcttgtagcgtcttggaaaacgaggctaagactttggagcaggaggctcatccggccttggacaagctcacctncaagatcagtactctcaatntggaacgcgttcgtcaaattaagagccgattagtcgccatcac

SEQ ID NO: 32442 - DNA, 247 bp, Glycine max
  Clone ID: LIB3051-085-Q1-K1-A1
gaaagaccggaacataaggcgggcaagagagtttgtttcttctctcttcaatggaaggcggggaccaggtcttcctttcggcaacaaccgtggccgccgccggttttccaaacttttttcttcttcggttggttattccggccgtgctttccaacttggttcttgttgctttgaccacctttgttccggacccggaatttacaccctggtttcagaccaagagcgccatcaccatcaccatcaccag

SEQ ID NO: 32443 - DNA, 433 bp, Glycine max
  Clone ID: LIB3051-085-Q1-K1-A10
gccgctgtcccgtgcaattcgaagggaatgaagaacaagggtttagaattagggtcttaaagcaactcggccaactttgtgggtaaaattagggattcaggtgtaaagtgaaaaactagggttttggtaaatctccaaaatgtcgacgggcaaacccagaggcggtgattttcagatggtcccggcgccggtaacgtcaaagcctacccttccgccggcagcagcatcgaatgcgatagtggaatatactccggtctctctcaaagatgaagaggaggatctggaagtcaagctccgacggattatcgacaatgttcctgtccgtgttagcaatactttcggtagttccgccggttcaggctccggcgactttcaccagtatcggcaaatgagacgcatggaacaagatcgtcttgccaggatggaagtcgac

SEQ ID NO: 32444 - DNA, 403 bp, Glycine max
  Clone ID: LIB3051-085-Q1-K1-A11
cttcaatctagtaaaaattttgtgaactggtgaatttttcaaaattgatattttgaagtatgatgtatggctgcattaatattttgctgatctcactgttcatgctcattcaagtgtcattctgaattgaatgcttccaggttcactcgctgttaaaggacttggttcacaaagctatcagtgagactttggtatgttccgggcagtacttatttcatgttcctattgtatatctttatgctgtatttgatgttcacaaagctattgtgaaactttggtatgttcccagcagtacttatttagtttttctgttgtatttattgttgctgtagttgtgtttggtaagttttcgtgcttcatagtctagtgacaaagtgcagtttttaatatcatttacaacaac

SEQ ID NO: 32445 - DNA, 299 bp, Glycine max
  Clone ID: LIB3051-085-Q1-K1-A12
ctcaaacgtactaacactcttgcgaactggtgaatcattcaaaatcgatattctgaagaattaggtattgctgcattaatattttgctgatctcactgttcatgctcattcaagtgtcattctgaattgaatgcttccaacttcactcgatgttaaaggacttggctcacaaagctatcaatgagactttggtatgatccggacaatactgatctaaagttcctatcgtatatcattatgctgtatattacgttcacacttctatagtaaaactatgatatgttcccagcactacttat

SEQ ID NO: 32446 - DNA, 361 bp, Glycine max
  Clone ID: LIB3051-085-Q1-K1-A3
gcgcttttacccttgacaccaccacccctgagggtttctgtactcaattgagcatctggcggcttgtcagttctggccaccatcatggctttacttggagctacctgtgctctgtgctgttctatagacatggtgtgtgtcacttcgagtttggctggcgacatactacaccctgatagtattgctcccagaatgcctggctgtgacaacaactttgacctggttaaagatcctacttggatcgatggtgtggaaagctgttagtatgttagcatttgcagcaagacttggtcctacattagaatcaaaagaaaaacatgctgaccatacttgatttgcgatagcggaccctactgattgt

SEQ ID NO: 32447 - DNA, 464 bp, Glycine max
  unsure (1)..(464): unsure at all n locations
  Clone ID: LIB3051-085-Q1-K1-A5
cccacgcgtccgcccacgcgtccgatcaaatcacaatttagtaattggttcagttaatttccatggattcggggcttgctatatcttctcctaaaccttattcagtgatcacaactggttcttatgcatcaaaagcttcgcagcacacaaaaaaaactcaaataaaatataatttgaagcgggtacaacaattaagtttgggccatcgttacaaatgcattgaaggagggtttgcatatcaagaatgcaatagaaagtatgttgtgcaagcagtccctgaatcatcttttgattctgaacctcatacttccaatcctcaaatcattttgcactctgtcaaagatttcttagctactttatgcacactttcctatccatatgcaatgattggcttagcattatgtgcactntcttcgtctctccttgcagtggaaaaactatcagacatatctctatcatttttt

SEQ ID NO: 32448 - DNA, 386 bp, Glycine max
  Clone ID: LIB3051-085-Q1-K1-A6
cacacctattctttttaagggtttatcttaaaccaggatttttggcactaattggtctatgggagaagcaccagcattgcttgttgatgacgtgcaggatggggctctgaatggccttgaattgaaaaatggaacttgcaaaacaactgctactgttggcgataagatgtatgtcattggtggagctgatgatggaactttgtccattgaagttcaaatttttgacggtagtcttggagaatgggttcgtcccactgagcgtggcaccaaacccgtgttgtgcaatggcctctcagcagtgcctttggaagaccgaatactgattcttaagaagggttctaagcctgatgatcggatatggttcctggagattgacacccaatatg

SEQ ID NO: 32449 - DNA, 252 bp, Glycine max
  unsure (1)..(252): unsure at all n locations
  Clone ID: LIB3051-085-Q1-K1-A9
cattgacggagtatactatgatagaactggtgaaataattcaaaattgatagtaccgaagtattgatgtattgggtcctttagataatgagcagttcttcactggatcatagcacatttacgtgacaatcattaatgaggatgaccttacagttcaactntctatctatgcgaacaggctcgcaacgctattaatgaaagagctgaacgtacctagctttaataatggcatcaacactactgatgggcatat

SEQ ID NO: 32450 - DNA, 407 bp, Glycine max
  Clone ID: LIB3051-085-Q1-K1-B1
gcaagcgcaagagggaggaggaatgggcgatcatctagacacgcttactattaacagccatgtagtacatactggtaactatatcacgcaattaccttagactatcatatctatcattgcaaaattcatctcatttatatcgaatggctttgctgcaattctgatcatcattgcttttctagatgagtctctgctggagggtcatatatttggtcggaacttgttctggtatgctgctgtttttggaactataactgctattagactggcttcaattacagatgagcttctagtcatataccccgaaagaacaatgtcaatggtagttgagcatacacattatatgcccaataaatggctgtgaaaagaaagtactgaaatggtcccgattgaatttgaaaccttat

SEQ ID NO: 32451 - DNA, 334 bp, Glycine max
  Clone ID: LIB3051-085-Q1-K1-B10
aacgtgctcacgatgatacagctgttcagacttttgcttatggccacttgaaatatcatgtcgctctatgttcctactctgccaggaagaagatgccgataattgacctttccaccgagccgaaagcatcttacgatcttcccaccaattatgctgctcacgatgccatcaatctgggctccagcccctaagatgctgattatgattcatctactgaacattctgtagaacaagccataactgttgcacttacgcagggtctaatttcttccatagatctactttctattactaccactgcttctcacaatgatgacgatgcgcatactatgct

SEQ ID NO: 32452 - DNA, 202 bp, Glycine max
  Clone ID: LIB3051-085-Q1-K1-B6
gtgacagttccgttctcatcatcttacgcgtctaattacatcatctccacactggtccaacaaggcttataatgccatcacattctcaccttatagtgatcaccattacttagatcgacttaacaggttatataaacctgcattttatatacttgaatacacaaatactattacacactcatatggaatatagtcttaataa

SEQ ID NO: 32453 - DNA, 184 bp, Glycine max
  Clone ID: LIB3051-085-Q1-K1-B8
gcggtggtggctggggaggttggcgtcgacctaatggcaaccctcacaactaagaagaaaacgtggctaaagcttctttacgggtttaggttttcgcaataaataaaacttcatgagaagtgtagttgtaataaaagtggaagtctctcttctcttgtgatataaaggaataatagttttatat

SEQ ID NO: 32454 - DNA, 169 bp, Glycine max
  Clone ID: LIB3051-085-Q1-K1-C1
gcgctctctctctctctctctctctctctctacaatggcctcagccggaagccccaaaacctttgggtttcttcgactcaacaacccgggcttcttcttcttcggcaacttcggcttccccttgggccttgcagttttcttcttccttcggttggggccggttgggccc

SEQ ID NO: 32455 - DNA, 320 bp, Glycine max
  Clone ID: LIB3051-085-Q1-K1-C10
accacacgtacgtccactcgtccggcagaggatacgaaataagagaaaggaaaggagtctctgtctctcgagataagactgagaggcctcaaacgcatatatctgtccctttcccacctctatctactaccacccactactcttaaggcaaagatggtgaatacaaataagacgatgatggtacagccaccgacttgtttctcaacagacacatacaccatcagttgcatatccattatattctgattactcctatggctacccatctgatctcatttactataaattttatttggcccaccctcatattgaagactccc

SEQ ID NO: 32456 - DNA, 432 bp, Glycine max
  unsure (1)..(432): unsure at all n locations
  Clone ID: LIB3051-085-Q1-K1-C12
gttagtggtatcagattgatgagaatgttcagagggagataattaaccaccgatctttaaggcatccaaatataatcaggtttagggaggtgttactgacccctacacatttagctatcgtcttggagtatgcttcaggtggtgaactttttgagaggatttgtactgctggtcgatttagcgaagatgaggcaagatatttcttccagcagctaatatctggggttagctactgtcattcaatggaaatttgtcatacagatctaaaattggaaaacactctcttggatggaaatccatctcctcggcttaaaatttgtgactatggttattccaagtctgctctactgcactctcaacctaaatcaacagttggaactcctgcatacatngctacggatgttctgtcgcgaaaggagtatgatggaaaga

SEQ ID NO: 32457 - DNA, 433 bp, Glycine max
  Clone ID: LIB3051-085-Q1-K1-C2
cttatcttagcaatagctacccctatcacaacaatactctattaggcaaaaacaccaaatgggagaggaaaaagagcagcctaagaatgaaaccgagaagaagcccgaggaggccgccgcagcccccaagaaagacgacggacccatccctgtcgtttacaaactcgacttgcattgcgagggatgcgtcaagaagatcaaacgcacatgtcgccactttcaaggtgtggaaaccgttaaggcagatctatcgtcgaacaaagtgactgttaccggcaaattggatgccgagaagctgcgagataagatcgccgagagaaccaagaagaaggtgacatcatcttagctccgccaaaaaaaagagccgtcggcacggaaattcaccggggaagagggtgaaaagaggaaaccttgagagaaaaacccgaggaaa

SEQ ID NO: 32458 - DNA, 432 bp, Glycine max
  unsure (1)..(432): unsure at all n locations
  Clone ID: LIB3051-085-Q1-K1-C4
tgcttctcatctctgttgtggcaactgagccatccaaagatgagacacaagaagaaccaaaggcacagccagatgcctggggaagaggtggaagtggggggcatgatggaagctggggacacggtggagactgggggcatggcggaggaggacacggtggaggacatggcggaggaggacacggtggaggacatggcggaagatgcagatgctgcggtcgaaagggctgcaaatgttgctgaagtaaaaatcacaaatatatgaactgaacacactcatatacttgagtgtactccatgtaataactagtatatatgtaagaaataagaaataaaagcatggactctatccgtgcttgagctggcataggttgaatgttttccgncaaccatgcatgtagttgacacatcttgttactattcagcatatata

SEQ ID NO: 32459 - DNA, 460 bp, Glycine max
  Clone ID: LIB3051-085-Q1-K1-C7
cccacgcgtccggcccgtttgacatgatgaacttaaagatgcaatcaccaaagggcctaaagagctatgaccttggtggtgttggtctaggaattgtggtggcccttgataaatcatcatccgaggaacaaggccatgtttgcacatcaaattcaaaccgatccgtaccaatcccagttactaaccaacgtgggtttcaaaagggtgtgaatgaaattcccgctggaagctccgaggattacacgtttgtgacataccatgtacctaacaacaagaccatcactaaggtttattatgatggcggtgaaggtggaattctaacacatggctactataatattaataataataacaacaacaacgttggtgttggtggtgttagaagaatcccaccaacgcaaactttaattgaagaagatgaacagtcatatcccacctcggatttctcagctcgtgtcac

SEQ ID NO: 32460 - DNA, 282 bp, Glycine max
  Clone ID: LIB3051-085-Q1-K1-C8
atcaaataaaagttcacagaacaagctggggtggggcgacgcgctgcctggaacgggacagagacagagagggttccttccggtcgctgtaattggtttggcgttcaattgaagaagaacaatgtcggtgacagcgggtgttagtgatactgtaatagccattagggataagctcagaggtaaaattggccaaactaaagttaagcgttattggcccggtaaagttcctgaatgggctgatgatgagaacgaagaagatgctgaccctgacgatattagacc

SEQ ID NO: 32461 - DNA, 421 bp, Glycine max
  Clone ID: LIB3051-085-Q1-K1-C9
cccacgcgtccggccacgcgtccggcaaaggataggaaataagagaaaggaaaggtgtctcggtgtctcggtcttggactgattcgcctcaaacgcatctatctcttactttaccacctctttctactaccacccactactcttaaggcaaagtcggtgaaaacatagcataggatgatggtggtgccggtggcttctttctcaacagacacagacaccatttgttccatttccattttcttctgattccttctctttctacccatgtgatctcatttactatatcttctttttggtccaccctcatattgaagactacgccttataagggcatctttatttctctatcattcttcttgagtgtttgtgattattgccctgtcctctgacattgctcattcctttaattcccccacccatt

SEQ ID NO: 32462 - DNA, 330 bp, Glycine max
  Clone ID: LIB3051-085-Q1-K1-D1
aaaatatccatcccaaactcctcagcggtatttcacgttcgtgttcttcgcttacagttcatgcacctgttgctttctctgaaatggtgggaaaacgtgagagttcaaaacgctgagtttcgggttccacaacactgggctcaagtgtacttaagtcgtgagttgttcaggtcctcaagatgcttgcactgacagattctcctctacttattgctaaaacatttgaagcaacttaaataccaacaagcacacgaagcacttgggtatgtgctgcaaaaggtccaagaccaagatattcccgagtttggaagacccatgaaaaaattggga

SEQ ID NO: 32463 - DNA, 415 bp, Glycine max
  Clone ID: LIB3051-085-Q1-K1-D12
catcccatggaatccgcaacatcatggagtgaccctctcccactttccagtctaccttcccggtcgcatgcacgccacccctgcgacttcaaatttatggctttttcaactcttcacactttctcactcccttccctttcttctccctcttctttccacccatttcccctttcctctctctctccaaaacccacttctttcaaccctcgccctctcttccctcgcaccatgcacgcctcgcgcatccaagatgccgttggaggggcactggccctcgtccaatcgttccccgctacgtggcagtccgcgcttctcagcaacgcgctgatctttttcttgaggtctccgattctggtcagcgggttgtctctgtccgggatcggtgctgcgtttctgctcggaacgctcacttggc

SEQ ID NO: 32464 - DNA, 360 bp, Glycine max
  Clone ID: LIB3051-085-Q1-K1-D2
gcgcaattttcttactctaacatcttttctctttcttggcgatgaagatctcgtacgcaatgagggcgaggtcagaattggggaggcttggtgagctggtcgagcagagaagggaggtcgtctgtgacggagacgacgacaggattcggaggcattatcgacgatggtgttggcattgactctcttggagtggcccgatgagagatgtgtgaagagatgagcctgtcagtatggtgaccaaaatgcatagaattcatggttgtgatgaaactcaattcgaaacatacaaattgatcgaagggaatcgaacccatgactgagactcaattatggttaaccattgagctactgtacttagtt

SEQ ID NO: 32465 - DNA, 392 bp, Glycine max
  Clone ID: LIB3051-085-Q1-K1-E11
cccacgcgtccgctttctataaaggtagagagaagagaggacccttctcttgcatagttcaagtgagtgagagtgccaaaaaatgggaaggcctccttagtgttccaaagtggggttgaccaaaggtccatggactcctaaagaaaatgcattgttaacaagtatattccaacctattgaaaaaggccattgaaattaattccccaaaaagccagttatttaaggtttaaatacctaaattttccaatataattcttaaattgaaggcccaatgtcctggtttagatcacaattttttatgtgaaacttatataatagttatataaatatggatatatgagagattgacagtatataattatatgggtataatcataaaatgcataatataa

SEQ ID NO: 32466 - DNA, 454 bp, Glycine max
  Clone ID: LIB3051-085-Q1-K1-E12
tacggcctctcgatatatatacacgatagcagttatcatactcatactcaaacttactacgagatattgggccttacaaaaacggcaaattacaaatactttacattaattcactcttaatcatccgttcaactccatctacgtagacatcaatgatcaaccactgattactaacacatacctaaccttgagcagtattaacaccgatgatacgcctctaagaataccacaactactacactgaaacactgcatttctagaaacgatgaagacttcttcttcttcagacaggaacaagatcaacatacttgtcagtgctcagaaagtcgatgtcgatatccgaatctacctgcgattctactaccgcatcgctgacaacattctacgacaggctgatatcttttctgcagagaagaatattattgacctatatgtcatgcttttaagattttct

SEQ ID NO: 32467 - DNA, 67 bp, Glycine max
  Clone ID: LIB3051-085-Q1-K1-E2
gcggcttaatcgaactattcagattctaaaaaatgagttcttggtcggctggaacaatctttgctgg

SEQ ID NO: 32468 - DNA, 71 bp, Glycine max
  Clone ID: LIB3051-085-Q1-K1-E3
aaaaacatacaaataaacataaaaaaaaaaaataaaaaaaaaataaaaataaaaaaaaaaaaaggggaaaa

SEQ ID NO: 32469 - DNA, 395 bp, Glycine max
  Clone ID: LIB3051-085-Q1-K1-E4
gtgttttgttagttcacacactaagttctgaaaaatgagttccaaagtttttcttattctacttatgttcatggccactatacttttgatctcctctgaggttgcacccgatgatgcataccagaattttgacaaaacagatgggaagcgtagtgcaaatggggtagatgaaagcaaatattggcgtggtggctatggcgactatggtggttggcgtggtggtggttggcgtggtggctatggaggctggcgtggtggctatggtggtgggcgtggtggctatggtggctggcgtggtggctatggtggtgggcgtggtggctacggagggttgggtggtggctttggccctaacgaacataatgaggctgggattgatgctagcccttacaact

SEQ ID NO: 32470 - DNA, 400 bp, Glycine max
  Clone ID: LIB3051-085-Q1-K1-E9
gatctttgctctttcgatatgatatctctgtctcttgtcctcatggctgagaacttggacgagggcgagtgctggctcccgccgcagatcctcgccgactgacgacgttttgccgacaccctttgaagcaaagttcccatctttgcccgacgacactgttttgttcccctccgagtggccatacggatccccagttgattctaccgctggtggctccagtgagaccgagagcgacgaggaggagcaactcgtcgctgagttaactcgccgcttaactcgctcctctcttcaatctgataccaagtctgcgggtcgggatgtgtctagttctacacaatccacgctttgcgcgttcagaagtgggtgtggttgcggcaaagggttgagccagggaagccct

SEQ ID NO: 32471 - DNA, 159 bp, Glycine max
  Clone ID: LIB3051-085-Q1-K1-F1
gcgacaatacttccgataaccacgaacgttacgcttttctcatacttacctttattcgatttttttagcaaatggtggctactatgatcagattctttccacagacaagctttctccccatattgcatcactgttctatctgccctaaatctctatata

SEQ ID NO: 32472 - DNA, 208 bp, Glycine max
  Clone ID: LIB3051-085-Q1-K1-F12
gcactccatcttccagcgatttcgctactagtaatatattctttttactaagtgaccctcttatggtcatagctaagttttccactatgctttcgtacatccttattgttcaaacattatgattctttcctacttaaactattactattacattacttacattgtactttgccgtatgacagactgcattatattcaacatcaacatt

SEQ ID NO: 32473 - DNA, 462 bp, Glycine max
  unsure (1)..(462): unsure at all n locations
  Clone ID: LIB3051-085-Q1-K1-F6
ctagtttgcaattgtttgacattgagttaggaaaaatgggttccaaggctttgctcgttctggttatgctcttggcttctgtcctccttctttcagcggaagttgcatccaaagatgtagataagaaacttgataaaaatgatggtaaccatgatacaaaaggagtcgatgaaatgaaatattatggtggttgggggtctggttgggatagataccgccgtggttggtattgccccaatggttgttgtcaatggagctactactatcaaacctgttggaggtgctgctattatcctggtgaacatgttgatgtgcgtactgatgctcaacctcgcaactaaacatgaacattgtgcttaaagtattaagctattgtatctatataaataaaacttcatgggacgtgtacttcatgagacgtgtacttatctagttatgcatgaaatanaagtgaaaatcttt

SEQ ID NO: 32474 - DNA, 445 bp, Glycine max
  Clone ID: LIB3051-085-Q1-K1-F7
gttgcccgccgagatggccggactgctgcagaatgtgccctcaacttgtcaaagcaacagaggtgtccaaatccggaggccttcatagaggaggtggaagagtcgtttactttttggggcaccccagaaggtgatattgttcatcctgcagagtgcatggagcaattacttgagaaagttaggcgtcatagagttaatattgatggcaatgtttgtactgttatggtgacaaccttggttcttgagggttggcagagaaagcttgatcctgggtacaatgtgatgcagacactgcagacattgctacttagagctgattgggcaaagtctctttcttacacaattgacggactcatggccccttagggaggaagttcctttctttgttgaagctcttgagaaacaaatttgactaacataaaacccaaacacaaacatatgtcct

SEQ ID NO: 32475 - DNA, 437 bp, Glycine max
  unsure (1)..(437): unsure at all n locations
  Clone ID: LIB3051-085-Q1-K1-F9
ctcgtctgcaactgagggccgagtgggtcgttgcctggttcttatccaagctgcatccgatggtcaagggcaaggatgagttcatgacagtgatcattttttgcatgctattagagacatgctaaaaatttattcatatactcaagctcaagctacactgtccacatatgtatcagctcctggcattgtccaacagatatcagctcttcattcagatttgttgagccttcagtcggaccttgagaattctcttccagaagacagaaataggtgtattaatgaactgcgcaatcttattaaaaatctgcagaaactgctctttgcatcttcaacaacagcacagccaatactgacccctccgccattaatgaaagagcttgatgaaatggaaaagattaacgcanagctgtctgttgctgatgaaaggtgacactaga

SEQ ID NO: 32476 - DNA, 410 bp, Glycine max
  Clone ID: LIB3051-085-Q1-K1-G1
gcgatttacggtttaggtgtatcaaatacaataaatgttttacaatatctaaccttgtgattgaacaaagtatagggcacgtaaccatggattcttgttaaatttacaatggctttcttggtgggcatgcattataaaatcttgagtggggaatgactctgcaagattcctaatgggtgaacaataatctcatttgcatcaatgcattttgggtcgttgattgtcgtcagtgctatattggccactacttttctagcacaaatatgaatcttttaggattcttaatgagtgaacagtaacctcgcttatatcaaggtgttatgggccattaattgtcatcggtgttattccagccactacttttctggcacataagacaaagctctacatgattcctaatgaatgaacag

SEQ ID NO: 32477 - DNA, 267 bp, Glycine max
  Clone ID: LIB3051-085-Q1-K1-G11
aacaaaaaacaaaataaaaaaaaaaacaacaaataaaaaaaaaaaaaacaaaaaaaacaactaggaaaaaagaaatacttacactaatcaacaaaacaaacaaccaatacttaaacaaccataaaaaataccattcaactctttatacattatatctcaaactcataaactcaaaccttacaaattcctctatcacacaaatacactccattacctacaatttcaactacaaaaatacacactcttacccacctcaactaattacct

SEQ ID NO: 32478 - DNA, 355 bp, Glycine max
  Clone ID: LIB3051-085-Q1-K1-G12
cgcagacacagtctggatttctccagacgcaaaccctaggaaagaagaaggaattggatgcatgcaaagccaatcacagtatcgaacatggcaaatcttccggtggaagttgtcaccgaaatcctgtcccgtctaccggtgaagtcggttatccggctgcggtccacctgcaagtggtggcggtccatcatcgacagcaggcacttcatcctcttccacctcaacaaatcccacaccagtctcattctccggcaccgttccaagctctactccttgaacctaaaatccttcttaaaccccaaccctttggaacttagccacccgctgatgtgctacagcaacagcatcaaggtcc

SEQ ID NO: 32479 - DNA, 341 bp, Glycine max
  Clone ID: LIB3051-085-Q1-K1-G2
gcggttttgagtggaaaaggactactaaaaaagaaattgatatgactgaaggaaagggacttactgtgtcaaaagaatatcccttagaagctatgtgccaagtgtgccaatcactgacagttaaagatatttataacttctagtgctgttaaaagcataaacatcttataatgtttttgaggaacttatatatgtaaaataaaatttatagtagtgctttatttattcaatgttttgagtggaaacgaactagtaaggaagaaattgatatgactgaaggaaaagggatcactgtgccaaggaaatttcctttagaagctatgtgccaagtgtgtcaatca

SEQ ID NO: 32480 - DNA, 388 bp, Glycine max
  Clone ID: LIB3051-085-Q1-K1-G3
gcgactagctagtgttctataagttcacggtcagttctgaaaaatgggttccaaggttttgcttggtgtagttatgttcatagcggctatacttctgatctctgctgaggttgcacccaatgaatacgaaaattttaacaaaaaagatgggaagcatgctccaaatgggttatatgatagcaaatggggttacggtggttggggtggtccttggtatggcggctggggtggcccttattatggtggcggctggggtggcccttattatggcggtggttggggcggtccctggcgtggtggtggcggtggtggctgtggaagttggcgtcgacctaaaggcaaccctcacaactaagaagaaaacttgctaaagcttctttaccggttt

SEQ ID NO: 32481 - DNA, 352 bp, Glycine max
  Clone ID: LIB3051-085-Q1-K1-G4
gcgaaaaaataacgaccacgcatacggaaacaaaaggacagcacatgatgaagcattacaagaaatgggccacttgtatgacattgttcgcattgacaatgaagaaaaacataaggaagtgcaacaggagtaagtatttccatcagaatgttaatggcagcaaacatcttggtctgaggaaactggcataagcatggcagcaacaataaatagaaatgtcatttgaggatcaacgacttttgtctagatacctccctttactgagagagtttattcctaatgcggctgcataggtcgaaactgattcgattgctcacttggctggtcattccaaagataaaaaatatgtgta

SEQ ID NO: 32482 - DNA, 417 bp, Glycine max
  Clone ID: LIB3051-085-Q1-K1-H1
gcggaatcacaatcacccacttctttaccacctgaactgattcctttttatgacagggaagtaatgaaagaccctgaccatttatgggtaaaatatgtcagtgattggttagagcagaatggacccaacaaccgaagcctcttggtttgggatctgcaagcttcagaagatgcaactagaggcatatttcaattgtctcgttcggatattgaaaagctgaagcaaatagtggtgtccaagaagaaagggaacaacatcaaccttcgcttgtcaacctttgtgttgtctattgcctatgctagtgttttcagggtgagagcatatgaaacaaagaacatgagagttatgttggctttgaatgttgattgcaaggcacgtttggagccacctatttcaccaacatattttggaaactgt

SEQ ID NO: 32483 - DNA, 429 bp, Glycine max
  Clone ID: LIB3051-085-Q1-K1-H10
gtcgttccatgcttgtgttgttgcattgaccctgaatttgtacttgattctgggacgtcactgagtcggagtctgtttctgcaaatttcaaaaccctctctctcgttactcgccatcactagcgagtgctccttcttcctcttcgcgaaattcgtatgcaaagaaggaggtagggattcgcgctcctgctgtctcagactgcctaattatcttttattctgcgaagtaactgagagattgaagatgggaggagatgattctggtctggagagtgacactcatgattggaacactgaagatgagcttgaaattcagaactatgactcgacgtattcatgtataacccttcctaatggagatgctgttactggctctggagaggcaagctcggctgcagctttggctaattccaacgtgcttgatcacttc

SEQ ID NO: 32484 - DNA, 376 bp, Glycine max
  Clone ID: LIB3051-085-Q1-K1-H2
ctcacgcattctgaaacaaatggacagcacattataaaccattgcaagaaatgtgccacctgggtgacattgttcgcatggacaatgaacaaaaaaataaggaagtgcaacaggagcaagtatttccatcactaatgttaatgtcctcaaacatcttggtctgggaaaactggcaaaaacatttgcacaaccattaattgctatgtcattggctgatcaacgactcatgtctatgtaccttcttatactgaaagagtttattcctaatgcggcttctgaggttgctactgactttattgctcataaagtttgacataccgaagaataaaatgatgaggtcgacctctacaccgttaaaaatgaaatggatataaac

SEQ ID NO: 32485 - DNA, 53 bp, Glycine max
  Clone ID: LIB3051-085-Q1-K1-H5
aaaaaaataaaaaaaaaaaaaatttaaaaaaaatacaaaaaaaaaaaaaaaaa

SEQ ID NO: 32486 - DNA, 473 bp, Glycine max
  Clone ID: LIB3051-085-Q1-K1-H7
gtagtattgcagtttattctatcatatccttgttcaaataattttcttttcaattacaatacgccaatcccagaaacttatgttcatgaccatcctcaaggtcccaataacatttacttgaagacaattttgagttgaccttacagcctagttccacctacaaacacccttgatccttcaaagcctctcatagttccaatactggcaacaataatactcttgggcatctaaactatctccattcttttttccccctttctttgcagtggatttgcgaggttttaaagaaattaaatgcgtttttatgtgctaaagagctaggtaattatagaattcatctcacacatacttctttttactaccttttatcttttagattttatttttgaattatccttgtttaatggagtaatttaattcgttgaggggttgtggaatttgtgtaaaagattttctataagaatttttaattc

SEQ ID NO: 32487 - DNA, 435 bp, Glycine max
  Clone ID: LIB3051-086-Q1-K1-A11
acgctcgcattattatgtgtgcagtcatactcgctaatgtcgactgcccccgcgccgacttcgccgtccgcgaataacgggaccgcgcctccgccgacagctcctgccactgccatcgtaccgtctatggtcacaccttccgtgcctgcacctgactgcgtcactactccgtcggcgactccgtcgtctgctccggcggcgacaccttcctcgccaccttcggctactcctacgtctgctcctgcggcgactacgtcttctgctacaccgtccactgcttctagttgtacttcaccggtcactccgaccacgccatcgacttctccgccgtcgtcggcgtcgacatcggcaccgtcgccacccagtggcggcagcactccgagtccaccgtctcggagctcgccctctactacgttcggatcgagcccgaccact

SEQ ID NO: 32488 - DNA, 399 bp, Glycine max
  Clone ID: LIB3051-086-Q1-K1-A2
ggtactcattcacctcaaggcttgcggaatcagatggagatagagtccgcaaagttgtcatctggtggttttgttttacttgattgcccccaatcaataacgattgagagcagcaatgcatctcttgttggttcagtaagtgattatttattatctttatctaatggttgggacctgactagttatctcaagtctctttcaaaggcacttagaggtttgaaaattggctcttgcttttctacaaaccccggcgaaggaagtaacagttcatgcttggtaatctatgtggtgtgcccatttcctgatcccactgcaattttgcaaactgtaatcgaatcttctgttgccattggatcggttgcccaacagtcagatagagagaggagatctagcttgcac

SEQ ID NO: 32489 - DNA, 366 bp, Glycine max
  Clone ID: LIB3051-086-Q1-K1-A5
cccacgcgtccgcggacgcgtggggttttccgttccgaaacgatgtcctccatgggcatcacgagccagagacagagatcgagagcttctcatccccgtcgccgacacccccgccggcgatgccgtcgtctccccttcccccaagccatcgtcgtcggcgtcgtccccgcatcattccggacgcgagactttttacaaagctgttagaagctgggcatcaaaaaagtttatgactggatgtgtcattctctttccaattgcaattaccttctatataacatggcggtttattcatctcgtggatggatttttctctgctatctatgctcagcttggaattgatatcattggtcttggattcataac

SEQ ID NO: 32490 - DNA, 400 bp, Glycine max
  Clone ID: LIB3051-086-Q1-K1-A9
ctcgaatctagtaaaaaatcagagaactggtgaaataatcaaaattgctattacagatacctcagtgccagggacttatgttcatgagcatacttaacggcccaagcacattcacttgacgacaagaatgagatgaccttacagtctatttccacctatagcgaaacaccctagatcctctattctgagacgagtggaccgtacctagctgcaatactggcaacactcatactctagggcatctgaactatctgcattcacaaagtcccccgtgatctgcagtggatttgccaggtttcaaagaaatgaaatgctgttgtatgagctaaagagctaggtgattatagaatgcatctgacacatacttctttgtactacactgcatcttttaagatcatat

SEQ ID NO: 32491 - DNA, 424 bp, Glycine max
  Clone ID: LIB3051-086-Q1-K1-B1
accttctctattttaagtaattcaatggcttacactgcaagtcttgtgttcttagcttccacggtccttatgataaactttcctcttctggcaaacgctatcggatgcaatggaccatgcagaaccctcaacgactgcgacggccaactcatttgcatcaacggaaggtgcaacgacgaccgcgacgtcggaacccacatctgcggcggcggaatgccgccaaatccgccaccaagcggcggaagctgccagtcctcgggaaccctaaattgcggcggaaaatcgtatcctcagtaccgctgctctccgccggtaacttcctcgacgccggcgatcctgacgctgaacgacttcagcgaaggcggcgacggaggggacccgtcgcaatgcgacgagaagttccataacaacacggaacgtgtgg

SEQ ID NO: 32492 - DNA, 332 bp, Glycine max
  Clone ID: LIB3051-086-Q1-K1-B11
gcgtcttcttatgttcttcttcaagattgcgacgacgatccaagtgatagacactcggtgcgatggaacttgtatctgaatccgagcgaactctgtacccatacgtgactggatcctctgtagtcgctatcaaatacaaagatgggattctaatggccgatgacatgggatgatcgtatggatctaccctgctgtataagaatgctgagcgtatcaagcctataggaaagcattcttttgatggcgctagcggggagataagtgactcacatgatatattgcgctaccttgacgagcttatactgtatgacaacatgtgataggataggaat

SEQ ID NO: 32493 - DNA, 425 bp, Glycine max
  Clone ID: LIB3051-086-Q1-K1-B3
cccacgcgtccgcctacctacaaaactgaccaagtcccatactcttccgtcatatcactactgggcaacacgctctaatttaaacaatactgccactaccgcacatggatattttcacttcctatacataaccctattccgccatctcttttttcacacttcatgtgcttcttcttctctgattttggttcatggcgtgggcgaagaagccaggtgactcaaataatgtaggctttatgagatggttagcgttggtgtcggtgttgctgtcgttatcgggcttttgacgtgattcgggtgtgaaagaaggaaaaaggaatgcgtacgcgacaatgatgtacgtaggcactccgagggactacgaattctacatagccatacgcgttgctttgaaatcgctggctacgctcgacgctcaagccgat

SEQ ID NO: 32494 - DNA, 458 bp, Glycine max
  Clone ID: LIB3051-086-Q1-K1-B4
gcgcgcatgccttgggcttgtcgtccattcctcttgtttccggtcgatgacacatatataccttcgtcccccggtgggaatgatgcgcatgctgtaacttttgccgttcattgcattcaattgtcatcttggcggagctattttgatccacggaaaataaccctagctgactagaaatagatcatgctttcatagtgctgttccgagcctgaaatcgttcatttggtgaactaatactatatagcctgaaagctctattatctagatgcgacagaggatcacggatcatcaacctgacaccttggatagtatctagacaggtcactgttaaggttttatggaatctgaatacattggacggactatggatcgtacattgctaggatcttatgatgaattgtatatagagctgtcaggcatgattggcatataaaaatctgtggtgctaagtctcatgc

SEQ ID NO: 32495 - DNA, 445 bp, Glycine max
  unsure (1)..(445): unsure at all n locations
  Clone ID: LIB3051-086-Q1-K1-B6
atttactagctagtgttctataagttcacggtcagttctgaaaaatgggttccaaggttttgcttgttgtagttatgttcatagcggctatacttctgatctctgctgaggttgcacccaatgaatacgaaaattttaacaaaaaagatgggaagcatgctccaaatgggttatatgatagcaaatggggttacggtggttggggtggtccttggtatggcggctggggtggcccttattatggtggcggctggggaggttggcgtcgacctaatggcaaccctcacaactaagaagaaaacttgctaaagcttctttacgggtttaggttttcgcaataaataaaacttcatgagaagtgtagttgtaataaaagtggaagtctctcttctcttgtgatataaaggaataatagttntatatatgtattctcttatctttatat

SEQ ID NO: 32496 - DNA, 447 bp, Glycine max
  Clone ID: LIB3051-086-Q1-K1-B7
atttcatacacctagtatcctccatggcccacttattagtctctactattattgtttaaaaggaaaacagagattggcccaagtttcccctttttgagaatgttaatgagtaaactattgaattatacgtgtttgtgcaggtgtagatggaacttgaagcaagtaatcaacccaagcaagagcgttcaaggacaagatggacagcatcccttgacaagatatttgcagacttggttgtcaagcagattcaactggggaacagaccaaacaatgtttttgacaagaaaacatggaatcacattcgtgatgagtttaataggcaaacagaccttaatttcaacaataatcaattgaggaagcatctagatgttcttcggactcgcttctataattggaaatctgcttatgatcaaaataatgactttgaaatggatgattcctgttgca

SEQ ID NO: 32497 - DNA, 448 bp, Glycine max
  Clone ID: LIB3051-086-Q1-K1-B8
ggcacgggtgacaacgtctcttgcttactgtccatgtcaactgctactcaaccttcaaagaaagtggatgatgtgaaggcaccccaattggtgctttttggccaaacaattctcaccgaacagcaaatttctttgaacacctctgctaagacagatcctactcgaaataattcatttgatggaaatgctgataaaatgtgcaagttttcagatggttttggttatgctcttcacccacaaggctcttctcttgagaggttacagtggtacaaggatcaacaaaaagaaaccatggctagtttggagacaggtcactgtaaagtttttatggaatctgaagacattggtcggactatggatctcacaatgcttggatcttatgatgaattgtatagaaagctggcagacatgtttggcatagaaaaatctgtggtgctaagtcacatgc

SEQ ID NO: 32498 - DNA, 458 bp, Glycine max
  Clone ID: LIB3051-086-Q1-K1-B9
gcgaaagccccaaatccccttaaaattttggcagtctgtgtgatctaagaaccagagggcatccgcactaacccattttgtgttgtggaataagcatgtgtgagagacctgtccgtcgtatccctcatgaattcatccctcgcattataaaacctcgccgtgtcacggtctctgagctgtggcctaacttactgcgtgatcctatcattcataacttcatccctactcatataactacacccacaagtgcctctctttttgcctccaagcctcactcattcgattcactcaccagagagtgtccatgtacccttcaaaacgacatgtcgtcgtctattcgcttcgttaagcagactcggaccgcatccgattctcattgtagaaactggaaccaagtccacccagagttcaatatgggttacagggttcaagttcagcaagaatgcagattacccgga

SEQ ID NO: 32499 - DNA, 349 bp, Glycine max
  Clone ID: LIB3051-086-Q1-K1-C12
ctgatggattcccaattacacaaagaacattttaaatatcaccaagcatgcctactatggaggcaggagtcatttggtggtcaaaagtctatgatcgagaaacagagaagaaagtatttaattatgtagtacactgtactcaaaattcaaatctggctgagtggttcatctgcaacaccacatatgaacttgaacctaaagcattatcttttgttccaaagctcctaccaggtggtccattattgagaagctatgacaatacaaataccaatgcaagttcattggggcagttctgtgaagaagatcactatcgcttaaattggctgaatcaacaacctcatggttctga

SEQ ID NO: 32500 - DNA, 340 bp, Glycine max
  Clone ID: LIB3051-086-Q1-K1-C2
gcgagaatggattaccattgtgtgtgggtagcagcatttgggagcatgggacagaagtgtgggttggtgttagacgaccaacagatattgatgcatttggtcggtcagatagtgaaagggttgaatctaagatgcatattatggatgcctctctttgtggaacgggctttactgatgatgatgattcttctgtctataccttaatggcttcgggagacttcagggcacttgatttccctgaaaatcattaggctctggcttatataccttcgagggttgatggttgagacagtgatcccgatgatttagatttatacgactgacatgatgtagattgtga

SEQ ID NO: 32501 - DNA, 150 bp, Glycine max
  Clone ID: LIB3051-086-Q1-K1-C3
cccacgcgtccgcccactcgtccgaaaaaactttaacactaataaaaaacaaaaatcacaaattggacacaaagcaaaaaacataaattattgcctttccacttttcagtttctcatctttcaaacgcttcattatatgttactcatact

SEQ ID NO: 32502 - DNA, 452 bp, Glycine max
  Clone ID: LIB3051-086-Q1-K1-C7
tcgcaaaaattactttttgttgacttgaacacttaagttgtcatctttacacaattgatacacttgggaaaaacataaaagattggtttaaaaatatgaatatatcatcatttaaatatttcattatatgttactcatacttcatttagttagaatgtctttgtttgtgtgtgtatgcagtgttcctgtgtattttagatgttaattgcattaaagtgtatgtgttgtatccgatgttcaagtcagagttcatgcttcatagatctatagtccctcctaagattttggttttttcttggagattattacaagacagactgcccacgtgttagcaactacacagaagaagggcctactatatcaacctttacaacaatcttgcagattatgtaaatctaaggtggagaccaacatctttctttatcatgttcttctccttccatatatggaat

SEQ ID NO: 32503 - DNA, 427 bp, Glycine max
  Clone ID: LIB3051-086-Q1-K1-D11
gcacgtttgtttgctttgatcgtgcacagagtaaccctagagttagggtttaattgccctcggaatttccaccacgagaaagtatctttctctaattagattgatattttgtgttttattccatcgagatttgtgttggtgaaattttgctgctatctcttcaatcggctttattgtccactatacgttcaaatccatgattgctaggatggatccctctcatcatattgaacatcaagaagactactagtgggacactgaaggatttgtgattccaagtttgggaattgaagactcacatcaagagtaacctcatgttcttgatatagaatcttctgattctgcatcaaaggctatagaggatgaacacatctatttgggtccgcatggagcgcatactttactagcaaagcagcacgagctaaat

SEQ ID NO: 32504 - DNA, 349 bp, Glycine max
  Clone ID: LIB3051-086-Q1-K1-D12
ttcttcttctctcccaataattttctctcattttccttcactttctatccattcgacatcttgcaccagatcaccatcaccgtacatatcatacgttggtaattgattgattctaaattcaattccgaaaagatctagggttctgcctgaatccgtacctcccaatccaaatatctccaccgcatctgttccctacctggtacagtatcttgcttattataggttccgattcgcccgtggcattgaaattcaacttgctccaatggctttttctaatggagaaaggatacatgaaattgacgattcgtgttgatcttcgtgcttagtgatttggtctgtgaatgataga

SEQ ID NO: 32505 - DNA, 446 bp, Glycine max
  Clone ID: LIB3051-086-Q1-K1-D2
gcgcccacgcgtccggcacgacacagacactggtccacacagccaagaatggcagatccagctactgaattggtgcgcaccaccatcttcacccaccaattcatccatttcctcctctgatcttgacaccgagaagcaccacactgggcactcttatgggtgtcagcttcccagctattaccttcagagcctccgacccccatccaaattccgccaccgccaccgccaccgctgctgccggaggccctcgtagggctgcgggctccaagaagaagagggcgatcgcggtggcggagaggctgaggaggtggtggtggctgtgcagggacggtgacacgaggccggcttcgctcggtgagtttctcgaggtggaacggcgctgcggggactgcgccttttacggcacggcggcggaactcgaaggaatggtgatggacccgcagagt

SEQ ID NO: 32506 - DNA, 458 bp, Glycine max
  Clone ID: LIB3051-086-Q1-K1-D3
gtgaaagacaaaatgtaactgaacctgccaaagctgctccgctaggattgggtgtgggtgggggagagcgcgggaggagaactagacttcaacctcctgtaagtaaaggtgctgatgatagatcatccagttcttctgccaatcaaaatcagcaaaccagaacagatggtcaacatatattgcaaactcttgcaagtcatggatctggtttgaattcaagaaatgctaatgggccatcccagcggtccttgccctccagtgatcgtccaattgatgtggctggtttaatgtctcacgctttacgtagtcctgccttgaatggtacgttggaaggagtttctcagcaaaccggagttgactcacctgatggcttgaggaatatgttgcagcagttcacacagagcccacagatgatgaacacggttaatcaaattgtccaacacgttgtcaatcaagat

SEQ ID NO: 32507 - DNA, 453 bp, Glycine max
  Clone ID: LIB3051-086-Q1-K1-D8
ctaccatgctaaactttctgcaattgtatgagcctcttcttagttttgtcaagggccgcctgggccattctataaatttgaagtatccccccatacttgatcctcagttggaagctttggcagcagatctatatgctctgtcaaggtatgccagtgccaataccagaccctctgtactgatttctgaagcttctcaagctgaatctgaacaagtggagaccaagcaaaaagaggcagagactggagataaaacatctgaactaagacttgctcaacttcagcatcaacttccttctaatgaacctggtgcactaatgcacctcgttgaggaagttactggtgaagatgaagaggaccaggatacaaaagaatgtaaaaagctctttaaaaatatgaaattcttcataagcagggaggtaccgagggaatcaatgttttttgttattcctgctt

SEQ ID NO: 32508 - DNA, 383 bp, Glycine max
  Clone ID: LIB3051-086-Q1-K1-D9
ctctctagcttgcgtgcgtaacataatcgattaagaagctgctatagtgattcgaggtcagggggttgcgaagatggagcgcagcagtcactccaatctccaaatatggatcgtatagtcatttgaatttcgtgaacgacatctcgcgccaaacctacgcctgagtcgcagcccactccaacgtatagaggacaaacctcaccggcccgtggacaacctagatgacatgtatgggtctataccctgctcgttgtcctggccccaagactaacgcctcaaacttgaagaacctgatgatcaactcatcaagcgtataatgctcaaactcatgctggattatagtaagcatagcaagtcaattcgtgtggctaatgttgtgtacc

SEQ ID NO: 32509 - DNA, 435 bp, Glycine max
  Clone ID: LIB3051-086-Q1-K1-E10
aaagatatggcgacgcgggagcagccaaacataccctgaagcaaccccacgttgcgcatatgtgccctaacaacaaccacaaattacaaatccttggcattaattaaccttttttgtccccttcaactcgatctacgccgacatccatgatcgaccaccgataacttcgccatccttcgccttgcgcagtgttgacgtcgttgttgcgttcctaggattacaacaacaacaacggtaaaccgttgcgtttcaaaaaccaataaggctttttactctttggacaagaaccagatcaacattggtgtcacagcttaaaaaggccatgtccataaccgaatacttcttcgatattactaccgcatatctgacaacatactctccgacaggctgatatctctcgcgcagagaagaatttatagacctatatgacacgct

SEQ ID NO: 32510 - DNA, 348 bp, Glycine max
  Clone ID: LIB3051-086-Q1-K1-E12
ctgatctgagattcgagagatgggtttggaagtagcttccagaaactgtatataggtcatcgtgctgttgtgacagttaaaggtagtgtggtgtggggaaggagcctagtgattagttgtttgagaccactaaggaagtgaacaagaggatgtcaaacattacgaacactcattggtgttatagttgcaagaggccagtttggctgcgacggcgagatgctgattgtcctagctgtaacgagggatttggtcatgaacttaatgatatggtgcatgtgaatccatttgacttatttgacatggacatcagttaagaactagatcaaaggctcgtactcatggaaacat

SEQ ID NO: 32511 - DNA, 270 bp, Glycine max
  Clone ID: LIB3051-086-Q1-K1-E2
cccacgcgtccgggaagtatgctaacacacctccaaaagattcaaaaatctcaacctgacgcggccaaccaagcctttggttagggaatctaccaagtcatcatgaattgagggtaacaaggctggcaaaggctaatatcaggatgctatttaaatatcaataatgtagcccttcttgatgttggacttcctagatatttggttggttaaaatttttaatttagactgtaatactattttatatgcaacagataattatgagcagtttcg

SEQ ID NO: 32512 - DNA, 440 bp, Glycine max
  Clone ID: LIB3051-086-Q1-K1-E4
gcgaatcttatagccgggcattggtttatattcttgatatctctccctttcctgtattacaatctgcgattgtggattaaaagagagcacttatcagatgttactgaaatctacaataagctaaattgggagaaaaagaagcggctgttcaaagttgcatatcttgttttggtatttgcattttgtatagtcagcttggtatggacccttaccgaggatgtgcattaattgatggcttgccttccatgcctgccatatgtttcgcttacatttttgttcgagaattgtgttattctttgtataaatgtaccagctaattaaattcttggtaatatcaaagaagttacaggctgatacattccctacattgagggcaaatccatcttatgagctgaattccattggcaagagccatggtgagagcaatccgtgatgagcca

SEQ ID NO: 32513 - DNA, 217 bp, Glycine max
  Clone ID: LIB3051-086-Q1-K1-E8
tgcatgccttgaggtgttagaacagaattgtagttgactgcattattgtcagaggtttgaagaggtgagtatgttgcttcgcggctagcaaatgtgttaatcactactttgataaattgcgccctaggcttggttgattattgtcttttataattcgctactctctctcggctacttttaagcaatgaatgaattggaaatctaatcattgttcgtc

SEQ ID NO: 32514 - DNA, 393 bp, Glycine max
  Clone ID: LIB3051-086-Q1-K1-E9
gcgcccacgcgttctgatctctctgcttctctctctcagactcaaaaccctattgcgggctttggagtcgaccccgattatggccaacagtaacctacctcgaagaatcatcacggaaacgcagcagtggctcagtgagccaacacctggaataagagcgtacccttccgaagacaatatggcgtatttcaatgtgatgatccttggcccaactcagacgccttatgaacggagagttttcaagtcggaattatatttgccagaagaatatccaatggctgctacaaaggttaagcttctgacaaaaatatatcattcaaacattgataagcttagcaagatatgtcttgacattctgaaagattaatcgagtactgccctttacattcgcac

SEQ ID NO: 32515 - DNA, 249 bp, Glycine max
  Clone ID: LIB3051-086-Q1-K1-F12
gcactcgttcgggcgatttacagcctcctcgctcaactatcgcttctacttctatgaacatctcttggactttgagtcatccttcactggtatccagccctcacagtctatactctaaaagatatcatatgacttcgaactagacttcccaatatagctgtctaaacttcacatctacccttgcaaactcatagatactgccattcactctattatcgacaacttcaacaacattgacttctacaagat

SEQ ID NO: 32516 - DNA, 437 bp, Glycine max
  Clone ID: LIB3051-086-Q1-K1-F2
gcgtgacttgtacagatgacattctttcattaattcaggagtgatttttccccttttcttttcttggttttaatgtaatttttgttgtcattgttttatttatgcatggttgaatgctcatattcaataatatcagaagcccaagttatacttttttaatatttttcttaatgattgcaagtacatgcatcatgggttttcgtgaccagatttcatgtgaaatcttcttgcagctcctgttccctccaaattccatccaataaagcaaaataaaagaacttaataaagaattattatgtcatgtctactttttcattacttggtttctgtgcttttttaatcgtcatttggaggctgatgtatgcttttaaagtacagtttttgttttcctcgcctatttggaaatcctcttatctatgcctattaaccatctggtg

SEQ ID NO: 32517 - DNA, 464 bp, Glycine max
  Clone ID: LIB3051-086-Q1-K1-F4
gcggccttgcctttctctccaacaacacaagcaacgcttcgttctctgaacacttcaacaatgccaatggaggaggaggcaacaacaacaacaacaacaacaacgagggcactaactacttcgcaacttcaagtgcaccttctctcttcagcaacagtgtcaatgccagtgccttatctcacatgtccgcaactgcactgcttcagaaagcagcacaaatgggtgcaactacgagcaacggcggcaccgcttcgctgttgaaaagcttcggaagcgcgtactccagcagcggcggcggcggctcgaaactggtgaatgctgcaaactacgtcagtggcatgttcggagggaataatcacgtgaacgaacagagtaacagtaacctacaagacctgatgaactcgttcgcttgtggtggaaactcttccattttcgaagatgggtttgaagcatatgaacatagt

SEQ ID NO: 32518 - DNA, 415 bp, Glycine max
  Clone ID: LIB3051-086-Q1-K1-F5
ttttgtttctatgtcttgtcatatgttctaagaaggcaatgttgggctactagggccactgggctgacaatgggcgtgagccgacatctgtagcttttatgtccacggaggaatcaatgcacctgtttttggtcagatcactggggcaaatcctacaattcctggaatgtttccaaatatgtttccgctggctacaagtcagatgcagcaatttagtgctctccctgtcatgccagtgcaggctatgactcaacaggctacacgacatgctaggcggttgtatgttggaggcctacatcctacagctaatgagcagtctgttgcaactttcttcagtcaagttatggctaagattggaggaaacactgctggcccaggtgatgctgtggtcaatgtttacattaatcatgacaag

SEQ ID NO: 32519 - DNA, 458 bp, Glycine max
  Clone ID: LIB3051-086-Q1-K1-G1
cccacgcgtccgccaaaaaggagattgagcaagagcccaagtgttactccaaaaaggagattgagcaaaagtccaagtgttagaagccctcctccatcacagaggagtttgagcagaagtcccgccagaagcatcagcaggagtccaagcagaagcatcagtagaagcccagtgagaggcaggaatgggagaagtgtcagtagaagccctgtgagaggcaggaatgggagaagtgtcagtagaagccctgtgagagtcaggaatgggagaagtgtcagtagaagctcagtaagagtcaggaatgggagaagtgtcagtagaagcccagtaagagtcaggaatgggagaagtgtcagtagaagcccagtgagaggcacgaattggagaagtgtcagtagaagcccagtgagaagcaggaatggtagaagtgtcaatagaagccctgcgagaactcgttc

SEQ ID NO: 32520 - DNA, 114 bp, Glycine max
  Clone ID: LIB3051-086-Q1-K1-G11
aaaaagtaaaaaaaataacaaaaattaaagcttatgataactacgacataaataatggacctggtataaataccccttgtctctttcatatgatcaaccttaatacataccctc

SEQ ID NO: 32521 - DNA, 399 bp, Glycine max
  Clone ID: LIB3051-086-Q1-K1-G12
cttttctttgccaacactccttcgattaggggtttcgatcccaaattacaaattggtcgccgtgaacgcaacctcatactctgctcttccttctacgttccgcagtctccatcatcggaatttctcagcgttttgttctgatatccaaaatcctggctatgttgattgccattcaaattgtaataagtctacatctcaagcgtctttgtttttgtgttccgactccaacagtagaagaaatggtgtttttggtagaccactttgtgtgaacccctctggcaggagaaacctagttggtccagctttttattctctggagactagtgcttatgacgtggctgctttagaatcttcttcccgtgttgcagaagaaaaagttggtgtgctgcttctcaatct

SEQ ID NO: 32522 - DNA, 409 bp, Glycine max
  Clone ID: LIB3051-086-Q1-K1-G2
gcgggttttcgtaaaatcactgatcttgccatgaaccaagatactcctggagataatctcgtttgcgaaaaaatggagatgtgagatgccatcttatgaatgttccatctacgcagggttttcaggtataaatgaagccatgtcaatgtcacctggttgtttgaagaaaaatggtggctttgtggaattttcttcataattttcatgatagatggtaacaaacatatcttgtaaaagaaaaaaaaagtcaattcacagctatagcaggcagttgttggtcagcctactgtgcttgaactctccacttattttttagtgtacaatagtcagcacttcatacatactaccaactcaattggactctccacttatatatgcggctttgaagcatgaatgattcgcttaacga

SEQ ID NO: 32523 - DNA, 416 bp, Glycine max
  Clone ID: LIB3051-086-Q1-K1-G4
cttgtgtttacatttaagatatgaggtgcagttctcataacattgtattaatgcattgaacgtgggagatctgtctgcatatgaattcctcaaggtcatagtatagtgatgcttatgcatcataataatatagtctattctaggacttatcttctatgaagaacattggctcgtcatcttccacagattgcaagctcgtttatactagcagatgaacgtattaactatcattgatcagctacattactatcctgatgaactaccgccgctcttgtaacatgcaatctgatatctactccgtaacataatgtcgaattatgtcaattctcaaaagattctatacatttaacacatacatatgtacctaccttatctgcattgtttatgtactcgtcactgcaatgtacatacttatg

SEQ ID NO: 32524 - DNA, 446 bp, Glycine max
  Clone ID: LIB3051-086-Q1-K1-G8
gttcgagatgcagaggctcgagttcctcttcccactaatgaggttcaaacagtggggcaagcgcccaatcaattcattcagtggccgagaagacttgtgaagtctatttcagttaagactattgtcgaatctagcaaagatgttcgacacaaaaggttggaacctcaacttggtccgcttgaacgcttgttgataatagttagcaaaattaggaaggatcatgtacagctaccttgggatcctgatgtactaagcaagccctctaccatgtcatttcatatctatcggagggatatttttgaattatgtatgggtagcgagatgctaaacatctcagttatacaattgtggctgatgtatctgcatagcttatgtactgataaggggaatgcacatatctatggatttatggacccgcaatccattcaaagtgttgggaataatgc

SEQ ID NO: 32525 - DNA, 453 bp, Glycine max
  Clone ID: LIB3051-086-Q1-K1-G9
gaagaataatggaattggaaactgagcttcgtgaggtaaaagaaaagctatggatgcaggaggaagaacatgtagatggatcatctaggggatcaagaagtgagaatactgaagatgtttataccaaaattaatgcatatgaacaagaactgatgactgtgaatgagaagttaagactttcagaagaagaaattactaaactgaagattgagcttgaaaaatacagactcttcaatacagaaaatttggaggctggttttgagtcatcatcaatgaaagaacacatcaatgaaggaggggaagccctggaacacaagactatagagcttgagggaagcattgatggtgtggataaggaattgtttgaccaaaatggtgagatcgagacacttgtgagggagctaagaattaccaaagaaaatctcaaagcttcagaaatgcaaattacttcac

SEQ ID NO: 32526 - DNA, 298 bp, Glycine max
  Clone ID: LIB3051-086-Q1-K1-H11
ctcaggaaaacgcaaaacccgcgcggcaccatttcatctcattgcccgctcaatatggcagagaacaaattacgccagcgcatggacttcgcactctacgagctacaactcaagaacaagttgaaaccagactcatcagtcatggaatccctaaagcagttctccaactgacttttgctcctactacgactgacaaaccctatccctacactaccattacaatccattacgataccaagaagtaccacacttctaccagttcttcatgcatgcaacatcgagtacttcatccacagga

SEQ ID NO: 32527 - DNA, 228 bp, Glycine max
  Clone ID: LIB3051-086-Q1-K1-H4
tcgactacggcaagatcattcttacagtcaaaattatcatccttatggtcatggcggatatactctagaactactatgaggttgcacccgatgatgcataccacaattttgacaaaacagatggtaagcgtactgcaaatgggctagatgaaagcaaaatattggcctcatagctattgctactatggacggtgacgacatggacgatgaccaagtggctatggatgc

SEQ ID NO: 32528 - DNA, 447 bp, Glycine max
  unsure (1)..(447): unsure at all n locations
  Clone ID: LIB3051-086-Q1-K1-H5
cggatttaaacgtgatgaacacccgaaccaatagacaccagtttttattggtttggtttgaaggtaacgtgaataggcaaaaataccatatgtatttgcagtaaaaaaattatttatttttagtataaatattttctttttgaaagggaaattttttttagtataagtatgtatttgcagtaaaaagaaaagtataaatatacatttcaaaattacttatttgtttcaatgattttaaggataaaaagtcatagtgacctttcctaatttttggcttttaccgtttagagttcgccatttgttgagaatgaaatttttgtggcagcgtataactgcatcatgtgtatgtttactaccttacttttttgggaaaattatatntatgctgaataanttatattaatggacaaataccgtatacatttcatttttttaggcaatgtacat

SEQ ID NO: 32529 - DNA, 288 bp, Glycine max
  Clone ID: LIB3051-086-Q1-K1-H6
aaaatgaaaacaaaaaaaacacaactaaaccaataaacaccaaaagaaaaaaaaacggtataaaatgaaaacttatatcagcaaaaaacccaaaaatactttacaagaataataccatctccactatcaatcaatatactcatgatgtaaatcacaaacaaatataccccttatcttctatcgctacaacgctagttgacaatatataccttgactaataacctatatacgctaatgacttgactctctcatattccaagcaacccctcctacctgacatcttatatc

SEQ ID NO: 32530 - DNA, 392 bp, Glycine max
  Clone ID: LIB3051-086-Q1-K1-H9
ctttcttcccgatcgatcgatttcttccgcctagggtttttctgcattccgattacccatccgaccgcattcacaatcacaattgcaatagggttttcgtttccttcggcttgcttctgtggtaattgcagctttctcgattgaattttggatttagggttccgattccgagtcttacttctaaaagccgtcgattcgtcctggaatttcaggctctcggagccgcagagatagggttcttccattttgtcatgttccccaaggaaaaagagagagagaggggtcaacgaattttttggtggtgagttgtgggctgagcctgcaaccgttgttataaactggagttatcgcaatgttgggtgtgaatcgtactggctttaatttctgtagcc

SEQ ID NO: 32531 - DNA, 385 bp, Glycine max
  Clone ID: LIB3051-087-Q1-K1-A1
acgcccacgcgtccgcaacatcgtattctgcaaattcaaaccgggtcttggttttctgaaagagtggatgtggcaaggacaagcgtcatgatgaatctgacaaaggaattttttcacaccttgctcatggggtagctggtgcagcacatggtggacatgggtacccacctggggcttacccaccaccacctggggcataccctccacaacaaggatatcctccagctgggtatcctccacaacaagggtatcctccagctgggtacccttcacatcaaggctatcctcctgctggttaccccccagctggttatcctggttcatcacatgcaccaggttctcatgggcacggcggtatgggagcaatgctcgctgggggtgctgc

SEQ ID NO: 32532 - DNA, 448 bp, Glycine max
  Clone ID: LIB3051-087-Q1-K1-A11
acctacgcttctacccaattcctctgtccattcttcattttctcactaaaataaacgaaaaaaaaagcattgttttctgctttctctgataacccttttgtttctctccttgaattttgcatcaagaaactcagttctcacttctcagcatggtttcacttggagctatatatagtgtggcctatgtgttcatgcttgctgctactttggtcttgggtggggatatagttcaccatgatgatgttgcccccagaagacctggttgtgagaacaactttgttttggtaaaagtccccacttggattgatggtgtggaaaacagtgagtacgttggtgttggtgcaagatttggccctacattggaatcaaaagaaaaacgggccaatctttctagagttgtcatggctgatccgcctgattgctgtacaaagcctaagaataagctcac

SEQ ID NO: 32533 - DNA, 326 bp, Glycine max
  Clone ID: LIB3051-087-Q1-K1-A3
gcagttgacatgtttggagtcttaccttccaacgaatatgagtgagagcaactcccacctgctgcttctcttgttctctacacacttgttgttcgaccattgacaacagcttgtcgatgagctcagcaactacatcagacctgaaattgggtccaacaagacctgtcagacactctgaagcagatggcaataataatgctgacaaaccagacggtgacagtgcccaatctgacagcgagggtccaagcaatgggtggatgatgagggtctcaaacaacgtggacaaccaggtggtcctggcagaggacactatgtactaccccact

SEQ ID NO: 32534 - DNA, 392 bp, Glycine max
  Clone ID: LIB3051-087-Q1-K1-A6
gctgtgggttatcttggttcgaatttgtttgtgaggaggatctacagaaacatcgggtgtgactaaggcttttgtaggagtctgagaccagagcacttccatatgtttgttgctggagacaataaatttcttagaggaagcctctggtcatgtgtggggaccaaacaatgtttacaggtagtaagtatcacagggttgaggatgaggatgtattttttctctatattagttgatgtattctttctctatactagggaggccctgagattttttccctgactgtgtttgaaagccttgatttagaatgcatggattggtctttataattagatagtcagcaaaatgtcagactcgttgctactttttcattccttttttttataatataaata

SEQ ID NO: 32535 - DNA, 363 bp, Glycine max
  Clone ID: LIB3051-087-Q1-K1-B1
cccacgcgtccgcttcctcttcctgcatttctccgcgtgtgtgtatgtgtgtatactctcgcaagtacgcacatacatacacatccattcgtacataaatacttatatctcttcttccttcgccgttaattctctgaatccctagctcttctgttctccgatccgatcatggcctcgcttgtcaacaacgctaacggcgccgtcaatggttttcctggaatatcccagaagctcattatcgataccgaccctgggatcgatgatagcatggccattcttatggcttttcaaagtccagatgtggaagttctgggtttgacaaccatttttggtaatacaactaccgaactttcaacactcaat

SEQ ID NO: 32536 - DNA, 440 bp, Glycine max
  unsure (1)..(440): unsure at all n locations
  Clone ID: LIB3051-087-Q1-K1-B11
cccacgcgtccggtttgcaattgtttgacattgagttaggaaaaatgggttccaaggctgtgctcgttcttgttatgctcttggcttctgtcctccttctttcagcggaagttgcatccaaagatgtagataagaaacttgataaaaatgatggtaaccatgatacaaaaggagtcgatgaaatgaaatattatggtggttgggggtctggttgggatagataccgccgtggttggtattgccccaatggttgttgtcaatggagctactactatcaaacctgttggaagtgctgctattatcctggtgaacatgttgatgtgcgtactgatgctcaacctcgcaactaaacatgaacattgtgcttaaagtataggctattgntatctatataaataaaacttcatgggacgtgtactttatgagacgtgtacttatct

SEQ ID NO: 32537 - DNA, 383 bp, Glycine max
  Clone ID: LIB3051-087-Q1-K1-B5
cttctgtccaagagacactgaaaaagcacgagcttactagacctcttgctactaaggagttggaatggtttgcggcctctgcccttttggctttacctattattttagtggctagagtgttttcagctgttttctgtagcaaaaaagtgaataaacctgctcgaaatggaaacaatcaccatgcacgacgtaaacataagcgagggcatctagacaagcacacaacatgaagttggttcctgctttatttttttccctggaaagtttagataatttttcctgttcgcactggcttattgagggggatgtatctttcctgtcgtgtggggttttgaatattttacttctcttttttagggtgaggtaactctaggatgtttcac

SEQ ID NO: 32538 - DNA, 451 bp, Glycine max
  Clone ID: LIB3051-087-Q1-K1-B9
gcccttcttttttttattttaacattaaacttgaccattttatatatatttttttggtggatcaaaaagtagtataaacataaatttatcacatatatcctaattcccaccatcccaattacccattttagagatgggttgttaacgatattatactactttcacaatacaagaatttttcaactactacctctacccataattcctaccctagataaaggaggtgttcactaagattccataaattcctagtatcttaaacacttgaatatatgatatttaggtgtaagacatatggaaattcaagatctcttatgtttttaaaccataaaggatcttggatttccatacatcgtatacacgaatatatcatattcaagtgtttcaagaggcttggaatttatgattccttaaacgtgtgaggaggtaaaattaaaacaaatgcttaatc

SEQ ID NO: 32539 - DNA, 324 bp, Glycine max
  Clone ID: LIB3051-087-Q1-K1-C1
cccacgcgtccgcccacgcgtccgaggctgggttggtttcttctacccttagaggtcgtggaagaggcggtgctccccgtggtcgagttggtcgaggtaggggagtagtacgccgaccacctccaccacctggcagtgatcaatgaacaacgagttcaccgtctgtgattgatggttaatgaaatgatttgacttggtattgtaaacttctcccttcgtctgaacgatggcattgtagaccagttagtaggcgtaaattggcgaccagttttcgtcaatgtaaatacaattttgcttttcactcatttctccccttacctatct

SEQ ID NO: 32540 - DNA, 219 bp, Glycine max
  Clone ID: LIB3051-087-Q1-K1-C2
gtaatggccatgggagatggctgatgcagactttttgtatgtgggaagcactcccgggagagatggacctctatgttgggaagactgtggtgaaacgtggaattgcaatggagcatgcaaccaatgccttgatcgatctaataaagaacatggaccaatggttgacccttcttgccagggagtaaagccagaacctaattttgagaatggcattcaaag

SEQ ID NO: 32541 - DNA, 265 bp, Glycine max
  Clone ID: LIB3051-087-Q1-K1-C7
gcgagatattgtgtgcttgcttagagaggttttggttccgcagaagattctgaattctcgtgctctagtgcgattccatgggagaggtggtcatcatgagtggagagaagaagtcagttagagtggagggggtggagaaggaagatagtggtggaagtgggagcgaggctggtcaatgtggagtgtgagatgccgagggagagggtcttagacagtagagtacagtgggggctggatacttgccaggagtgttggacatgacgat

SEQ ID NO: 32542 - DNA, 76 bp, Glycine max
  Clone ID: LIB3051-087-Q1-K1-C8
cttatgggaatattgtatctgattaccatcgatattgtgcatccaatattgaataaaaatgcgttatttctgtgat

SEQ ID NO: 32543 - DNA, 440 bp, Glycine max
  Clone ID: LIB3051-087-Q1-K1-D10
gttctataagttcacggtcagttctgaaaaatgggttccaaggttttgcttgttgtagtgatgttcatagcggctatacttctgatctctgctgaggttgcacccaatgaatacgaaaattttaacaaaaaagatgggaagcatgctccaaatgggttatatgatagcaaatggggttacggtggttggggtggtccttggtatggcggctggggtggcccttattatggtggcggctggggtggcccttattatggcggtggttggggcggtccctggcgtggtggtggcggtggtggctggggaggttggcgtcgacctaatggcaaccctcacaactaagaagaaaacttgctaaagcttctttacgggtttaagttttcgcaataaataaaacttcatgagaagtgtagttgtaataaaagtggaagtctctcttc

SEQ ID NO: 32544 - DNA, 449 bp, Glycine max
  Clone ID: LIB3051-087-Q1-K1-D11
aactgcttctagagtaggttaaccgctttcctttgtttttggataaaatggttttgatagctattggcattccaacaatattatattgtggaacagtctgtgatgtcattgctgacttggcaactagctttccaagtttcaaataggtgaggttgattgtttgcaatcatgtttggaaattgaaagtatgagccgagcaatatgtataatatttaagtttacttttaatgtttgtcctccatagtaaaactcacatatgtggtataagaggttgatgattccattatttttgtggttcttattgatgtgtattgatatatgatttttctcaatgtttaatgcactgatgtgtgggattttgtgttgtgaatgtatgattcagctggaaaaggcatatgacaaactcatgatggctcaattgtctaatcggaaaaagggtgtgacttttt

SEQ ID NO: 32545 - DNA, 453 bp, Glycine max
  Clone ID: LIB3051-087-Q1-K1-D5
cccacgcgtccgcttggatggaaagggtctgctgctaccagtgcatttcggccagctgaacctaggaaaaatgctgagacaccgcccactactaatgatattgcttctgttgatgtcacttctatcaaacaaggtcgcgctcccttagattttgatttaaatgtggcagatgaaagatgttttgaggatgtgggttcgtgtgcttctttagaagctgggccacatgatcgtagcactgggggatttgatttaaataaatttgatgagactcctgaaattggtactttcttgataagcaaactggatattccttctttaccaagtaagccttcgttgtccagtgggttatctaatggcggaagtgtctcaagagactttgacttaaataatggaccaggccttgatgaagttgggagtgaagtcccaacacgtagtcagccaatgaaaagtact

SEQ ID NO: 32546 - DNA, 458 bp, Glycine max
  Clone ID: LIB3051-087-Q1-K1-D7
cggacgcgtgggcggacgcgtggggcttgtgttactgctgttgtccaagagagccttatggctattcacgtttggcctatgctttgtccttgatcttcctcgttctcttcacccttgcagcaatagttggatgtgttcttctttacactgctcaggggaagtttcatgggagcaccacaaacacgctgaaatccttggtgagtcaggctgacatcaccgccgaaaacctcaggaacgtgtcagattatcttgatgcagctcataagatcggagtcgaagcggtttttttaccagccgatgttcagaagaacattgacgaagttcagatgaagattaattcttctgctgcagatctttccagcaagactaaaagaaattcagagacaattaaagatgtcattgatgcaatgagacgggatctggttattcatgctgctgttatgctctttcttgcattt

SEQ ID NO: 32547 - DNA, 125 bp, Glycine max
  Clone ID: LIB3051-087-Q1-K1-D9
ataactttatatttactattcatgtcattgtaataaagacaaatcacatgcacccctgtggcaatgttatctctgaatcggttgattttttttttaaaagagaatggttaataaatagtagattg

SEQ ID NO: 32548 - DNA, 446 bp, Glycine max
  Clone ID: LIB3051-087-Q1-K1-E12
ctaaaattgaaactactacaaaaaaatcatatgagagttcaagtaacaatcctgccagggggaccgcagtggaaaggagcacccctgcacagaatgcagacaaagaatcagatagtcatgataaagatgatgtgttttcagatggtgaggcagagcaatctgcttcttcaagaagcaagcaaacaaaagcaccttctcaagcagttgaaaaagttaaaaatgacaccagagtctacgaatcaagcagagtttcaaatgaaattgcaaatttatcacatgcaacagaacaagtttccttgggaaacaagagctctacgccaattcgtcatgctagtgagccaagaactaacgttgaaggaaaaacagtgtccagtctcgaggtgcccagcacagaaagtgagtttaaggccatggctgcagatagcttctgttttacctttggagat

SEQ ID NO: 32549 - DNA, 418 bp, Glycine max
  Clone ID: LIB3051-087-Q1-K1-E3
acgccggagaacagcccgagattgataaccatgctgatgaagtctcatcagccaaccatcctggtaccggtgtagaggaaaactttgttactgagggttcaagatctgcatcaggttatagcaacagtccacgccatgcaaccattgcaagtgcaacaaatagttacttttttgatagaatttctgcaacatggccagaggaaaaacttcttctggctacaagaacccaaagccctcgtgtcagtatggatttctctaacggggtaagtcaaaaaatgtcagcctgaggtatggtgatcgtaactgccggcctacgaggggaaattagaactttccaaaattttggactaccacttcggatataaaaggtgaaagaatatgcatgcttgtgagcatggctgagaatgagttgatgata

SEQ ID NO: 32550 - DNA, 472 bp, Glycine max
  Clone ID: LIB3051-087-Q1-K1-E4
gacaacaaacttttctgggaaggaacaaattaaagaaaacaatggagtagctgggcccaggccggaagcagcttggatgaaatctatttattcagaaaagccacctctgttagaaaggcctgcaaatatccttcctaccttcgaccagaatgataaaagaactcttgtgcaagaatttcagatgagtagtatccagaaggacttctgttttgatgaattggagagtatagtaaaaattaaaccagccgaagcttaaatggttcaatcacctgctgatgatgctagaagagaagctgaagggttgaagctcattgcccttggcaagaatgagaaaattgaagaagaatataccaatagaattgccaagttgcgattgactgagactgatgaaattcgtaaacaaaaatttgaagaagcccaagcattaaagagggcacatctggagtatttgaacatgaaaatgagaatggag

SEQ ID NO: 32551 - DNA, 364 bp, Glycine max
  Clone ID: LIB3051-087-Q1-K1-E5
accacgcgtccgcccacgcgtccgtccacgcgtccgaaatttcatttcttttcatggtatggtcattacgtcatagtcattgcaacttatatctcctagtccggggttattacaacttaacaattgtggttttgagtttgagtaccggatatgtagtagaattcaatatttaggatatatttgttgctcacaataattatatttgactagagcatgaatacctgacccatgagaaattatatgtggctgtaataatcttatacaacgaatggagcgacaaggtgattgaggtcaaaagaatcgtttgaaataacgtgattgatgttataaaacatacattatttaagagttcactctgaatttt

SEQ ID NO: 32552 - DNA, 464 bp, Glycine max
  Clone ID: LIB3051-087-Q1-K1-E6
caaaaataaatcgagccaacgcatttaattgtaagtgtcttcatattacctgtgttctgtgacatctttttgcataatattggcactaagtcttttttgatagaaattgtgaagatgtactgttatcattgtatcaactatattgtgcccttctttttttatttgatttggcaaacacggctacttttctccaaataagatggatcatttgtattgccggctttgtgcacaattatctacttgtaagaagtccaatttcgggcaacaacgtttgtaatgcagaaataggtcattagcattgtaaatctccaggcgataaatggaatatcaaatggaagacgccgcatagcttctggtgtgacaatatcattgtgttgggcaaagcattttcgaagaaattacgtggatttaagaagattctgattattcttctacatctacaattattaaggtgaagataattt

SEQ ID NO: 32553 - DNA, 451 bp, Glycine max
  Clone ID: LIB3051-087-Q1-K1-E8
cagcatatgtctcaaaggcccacggttcctcactcctcttccatagcctgcggccttcactctcatctcctggtctccagtgagatgaaccctagctccaattggtccctttaatcaattacctcttaattagtaattacttaatctcaattagcctttcactctcccacacaacaacatcatgggcgtcaaaggttttgtcgaaggaggcatcgcttccatcattgcaggatgttccacacacccacttgatctcatcaaggtccgcatgcagcttcagggcgaaaacaatttgcccaaaccggttcaaaatctccgacccgcactcgccttccaaaccggttcgaccgtccacgtggcagcggctattccgcagacccgcgtgggtcccatcgcggttggggttcgcctcgtccagcaagaaggccttgcggccttgttctccggcgtc

SEQ ID NO: 32554 - DNA, 443 bp, Glycine max
  Clone ID: LIB3051-087-Q1-K1-F12
atttgatcattcctctgactgagttagagctgcacatctccgttacattactttcccatgtcattgttcgatccccaattcctctcccacgcagaagaatcatcaccccaaaacccaaattaaaaaaaaaacccaaataatacaactgaagttattttaattttcttagtaaaaaaaaaaaagagaagaaaaatgacttcgattcatttgataaacactctcgctgctccgcttcgttctttttctcctccgtcgctttttccgcaatgccattctcctctccgttcttccgctgccccgaaacggcgtcgtttcgctaactcctctgggttccgccttgcttcaagccaaaccgtgaattcggttccgcgtgggaatggaacttacaccgttgctgatttcatgacaaagaagcaagatttgcatgttgtcaaaaccaccac

SEQ ID NO: 32555 - DNA, 150 bp, Glycine max
  Clone ID: LIB3051-087-Q1-K1-F2
acgctatctaatcaaactaatagcatatatgaataccatgccctttgtcaccttgagctaactgtgcggactgcttctcatctgtgtggtggcaactgagccatgcaaagatgcgacacatgctgaagaaccaaagacacggccagatgc

SEQ ID NO: 32556 - DNA, 456 bp, Glycine max
  Clone ID: LIB3051-087-Q1-K1-F6
ggacgcgtggggaaaatatggagatggagggtggtgttgtgattgggatgattcgctcgtgagttgtttttggtattgggtttcattattattagtggagtttggtggagaagaatctaatctgtttgtcctgtccactccattccactccaccatggctatctatctttccctttgtttgtgtttctttctaaatataattgaataaatagtaactctaatctaacacgctttctctgctgtgtctttgcagtgagtttcattgcaaagctacttttctctgtttggggataaataaaatgggttgcttttcatgtttcgattcgagttccaaggaggatcacaatctccgtcctcagcaccaacccaatcaacctctcccttctcagatttccagattgccctctggagcagacaagttacggtccagaagtaatggaggttccaaaagagaac

SEQ ID NO: 32557 - DNA, 422 bp, Glycine max
  Clone ID: LIB3051-087-Q1-K1-G10
cccacgcgtccgaccgcatgccagaatggaaattattcaagccttttgaagcagcaatcggagatagagcttatttttcgcagaagtccaaaacaacccctacagatgagtttgctataagcactgtagctgctgtccttaaggagaaaccacctgcatggttcacctatgggcattactctactgtcatggctatcatgtatcatttaccgatctctgttagagattttgttttgaagaaagcaatgaaaggctgagctatagttaggtggtgcatctatctttccacatggacaccttataaagcatttactttacctttagcaacagaagagatattttctatttagttccattttatcatattttagtgaacaaagtttttgaataaaacttgaccaaactgaggacatagtttcttg

SEQ ID NO: 32558 - DNA, 440 bp, Glycine max
  Clone ID: LIB3051-087-Q1-K1-G11
cggacgcgtgggcaagtgggtcatcgttggaatctgattcttttgaagaagtaacatccggtgcctcttcttctccctcatcatcagttgatgatcaacttgtagttgttgctgatccattgagtgacatgtcttctctctttcaacaacttcccatcaagagggggctatcaaaattctaccagggaaagtcacaatcttttacttcactaacaaatgtgaggagcttggaagatcttgtaaagccagagaaccctcacaacaaaagattgaagtcttacaagagctatgcaggagggttggcagagagccattcaacaagggttgtttctaaggggggaatgatgcattcaacaagttcaagaggttcatgttcttctttgggaaggggcagtgtcactaacttcatgggtagtaatagtaggccatcaattccttct

SEQ ID NO: 32559 - DNA, 435 bp, Glycine max
  Clone ID: LIB3051-087-Q1-K1-G12
cccacgcgtccgcggacgcgtgggtgctgatttcatcacctcgctctcctctcccaaacgcgtcaccgcccaaccatccgttgccacgtggtggaaagccaccgataaatactacaaaaactcgtcccccaaactcgctctttccctcggcaccacccaaatcctggacgagaattactccttaggcaaatcgcttacgaataaccaaatcttaaaacttgcatccaagggtccacagagaaacgctatcaacattgttctcacttctgctgacgtggcagtggaggggttctgttccagtaggtgcggaacacacggatcctccgtgggggcgcgcgtgaacggaaagagatacaagttggcgtacatttgggtgggtaattcagagacacagtgcccgggtcaatgcgcgtggccgttccaccaacccattta

SEQ ID NO: 32560 - DNA, 301 bp, Glycine max
  Clone ID: LIB3051-087-Q1-K1-G3
acgcacttttcagcttcagtattcctctgatggatccaagtctggtgtacaacaacagggtgaaagatgaaacaacaagcctttgccagcagcagctacagcacctgttgcattctcacagggtactgaagcatccaaattgatcttcatacagcataagcttcaaggtatgactttgatgctagaagaagcatcaggtggaggcaaatctgctgatatgatggcaaagttagagagcgagatgaaggctcttttggaggatgctaacaaaatcggtgaagctactgtgttttagataaag

SEQ ID NO: 32561 - DNA, 318 bp, Glycine max
  unsure (1)..(318): unsure at all n locations
  Clone ID: LIB3051-087-Q1-K1-G4
aatctctctcctctttctttccctctctctttctcagactcataacaaccaaaagcacagaagtattaagtatgctgtatgccgcanagaaagagagattgcgcatacatttcagtgatttttgggtaattatcctcgtgatctgtgcacaatcgtctgctacttcatataccttcttccttctcccncacctcttttcctcctttctttgttcaacaccattcccataggagcaacccttttaaaagttttgggatttggagggtgcaaaagggccttaattttgtgaaaataatgctttaaaagcaatggggggac

SEQ ID NO: 32562 - DNA, 451 bp, Glycine max
  unsure (1)..(451): unsure at all n locations
  Clone ID: LIB3051-087-Q1-K1-G5
caccgttctctttctctctccaaaaattatacggtgggtttgaacttcgaactatgaagggcgaaatcatgcacagtaccatgcagttacagggtttttgaaaatctcaatggacactaccgctgcacgtgattgagtagaattagcctcctgctccaacttgcattgctgtttcaaatcttcaattttccttttttattttttactttcatgtaatgggtagtgttgaaatccccaattggctgaaagggttgcccctggctccggaatttcgccctacagacactgaatttgccgacccaattgcttatatttcgaagattgagaaggaagctgccaactttgggatttgtaagattatcccaccgtttcccaaaccttcaaaaaaatacgtnttttccaatttgaataggtcactcttgaagtgccctgattttggtccagataatag

SEQ ID NO: 32563 - DNA, 465 bp, Glycine max
  Clone ID: LIB3051-087-Q1-K1-G7
cacagctgtttattttcttcctcttctcaactgtgttcgtgtgtatgcatttgagttgaaggccagactcaaggagctgaaagacaaaagaagaaacttggatttgaatcagccaaaatttgagttacacgtaattgcaaagataagatgagtgttatgtatagtcctgttctcaattactcagatgtggagcatcagctaaggaaaaaccaagacatggattcaagtattggacatccacaacaacactgtcaccaacccaattctggactattgaggtattgttctgctccaagctcattgctggcaagcctcattgacaacaccattcatggctgtgtcaacgaggaatcgttcacaagtgagaatcatcatcatcagcagcagcagcagcagcagcattatcttccatctacaagttcagaaatggagaccatgttatccaaattgctaccatccaacaat

SEQ ID NO: 32564 - DNA, 427 bp, Glycine max
  unsure (1)..(427): unsure at all n locations
  Clone ID: LIB3051-087-Q1-K1-H4
cccacgcgtccggacaataagagaattgtttgaatttattgtcgatgcatccattactgatgatgccgtggatagttacctagaagaggtgcaccaaaaaattttggcgagagatgtgtctgctgaggatgagattgcagactctgtatttgtgcagtcctatattccgaagacactagaggatgtgaagaatgctgaggaggatgtacaacggataacaagtgggaaggacaccaaagatttatactatcagaccattactggacttaaacatgctctgtcattaacacagacttcacagcanaaaacccatcagcagaaatcaagtcctacaaaggattcaccggttatttctgatgataaatctaaccttttagaggatgatgccgagggtcaatctgggcaggatgaagacgatgaaagtgat

SEQ ID NO: 32565 - DNA, 404 bp, Glycine max
  unsure (1)..(404): unsure at all n locations
  Clone ID: LIB3051-087-Q1-K1-H6
cccacgcgtccgattgtttacatttttttttcaaacttatccgatacaatcgagcaaatgcaacaaacgaaaccagagattcataattgcacgttctcttttgttgtctccagctcatagaatattacattaactctgattcattcagaatttcagattcaccttttcttcttctcttttttttttcctctgaaagctttttgcagaaagttgtgatttttccttgaaagatggcatctttgagcatgacccagatcagaactgggaattgtgcatctgggtttggcttgaattgtgctgggaaggttaaggttggtcccagcagagttgggtttaaggtgtttgcttcagagactcangctacagagcctgatcttagtgtcactgttaaatgggtgcacatg

SEQ ID NO: 32566 - DNA, 310 bp, Glycine max
  Clone ID: LIB3051-088-Q1-K1-A11
gtttgtcaagggctatacctactaaaacttttggagtctttggctttcagttggtttctgttagttatttatcattccttcttagcagtgaattcgaaggggacttagatgtgctgtattttattttttttcaacttctagcaaatgagtttgaataaattgaagctagaaagaaaggttttcttggtaaaatggaggttggggattagtaaaaacccaaatgggaaaagaacatgagaaaagaacagaagaaaaacaaagtttactgcatagttattgtttatttgcctgttcagatttcgctcttggc

SEQ ID NO: 32567 - DNA, 258 bp, Glycine max
  Clone ID: LIB3051-088-Q1-K1-A8
ctagatcgccttacaatcaaatgtatgctattagctccaatgctcatccaggtgattagctgcatttgacgcagggacaattaatattacaatcctgtgcctattcactcaaagatgctattgcaggactcttcttccgactccctttactagccgaaatgcaccttcaatctctatcacttcgacctcgtcatcaccaacaagctcatctgcttctaactcttactctcaataaacaagcggctcattgtaaacatc

SEQ ID NO: 32568 - DNA, 450 bp, Glycine max
  Clone ID: LIB3051-088-Q1-K1-A9
cccacgcgtccgcacataattttcattttgaacttgaagaaagttttagtgtatgttttgttccttaaagaaacagaacatatcctgttctttctttctctgtttgcatttttgttcacttctttctttctttctttctttcttattatctagttaagcatgacaacatttatggacatgtacaacactactagtagcatcatgacaccggatttcttagaccagtgtagtgatcaagagctgatgaaagcacttgagccttttatgaaaagtgattcatctagcactacttcctcatcaataacaacatacccttcattctcttctttttcttcttctcccaacttgtcctcaacaacatggagcacccaattttgctcctcaagctaccaccaaaagggtccaactccaacccaagctagttccttcaaactgaaccaactcacccca

SEQ ID NO: 32569 - DNA, 251 bp, Glycine max
  Clone ID: LIB3051-088-Q1-K1-B1
cccacgcgtccgcccacgcgtccggttgaatagaagtgtctggaatccaatccgaagtggtttggtgtttgcgcgttcactcctctctcctcccctcctgcaattacccaagcgatctctctctctctctctctctctctgtttcatatcatgaaacgctcaaacgacgacgtcgctgcccccgtccccgccttaaccttcaagccagtgttcctaaccaaagcccaacgcgagcaattggctcttcaacg

SEQ ID NO: 32570 - DNA, 434 bp, Glycine max
  Clone ID: LIB3051-088-Q1-K1-B10
ctccttcgacttttactctttcctatatctctctctatctctctctacactcgagtgctggggcgacgcgtgtccctatctctctctagtcgacttctacgatcacctccatggggcattgctgcagcaaaaacatcgccgtcaacaacgagacgctccccgccgatcacgcccccaagccgccgcattacgcggcggcggtggcggcttctccgctgccgccgtcggggagctcggtctccgccgcaactcccgggaggaacacgccggcgcaatcgttttccatgagcccgttcccgagtcccctcccggcgggcatggcgccgtcgccggcgaggacgcctggaaggaagttccggtggccgctgccgccgccatcgccggcgaagccgatcatggcggcgttgcttcggcggcaggggaaggcgaagccg

SEQ ID NO: 32571 - DNA, 403 bp, Glycine max
  Clone ID: LIB3051-088-Q1-K1-B5
ggaagatatgatatgagatatgagatatgagatgggagtctccattctcaccggtgtccatttctctctccctctgccacgcgccaccgccagaaagaggattttccatttctgccctccgattgcatgccgctcatccatggatcagtcttctggcctgaatctggaagatctgaaatgggaccattccttcgtcagagaattgcccggcgatccccgccgcgactcctttccccgtgaggttctgcatgcttgttacacccaagtctctccttctgttcaagtacacaatccccaacttgtagccttctcccaaccagatgccgacctacttgatctcgaccataaagaatttcagaggcccagattttccccttttcttctctggtgcccacaccttaat

SEQ ID NO: 32572 - DNA, 436 bp, Glycine max
  Clone ID: LIB3051-088-Q1-K1-B8
caccattagggtttttcatttgaaatgtggaagggcaacaatggagcccattgagtccgaatcagttagttcctccgccaaagaccagcaactgggtgaaccttcttccactgttcaccccctcgatcacgatcctcaaccttcagatctcaatcgcgttacccctgttgatgatgcacttggtgaggagtttcagaacaagttggatttgaaggatgggggtgagagtgagaataatggttcgaacttggaagatgggggtgaaaaattgagcgaggataaaggttcaaacttggaagatgcgagtgaaaaattgggtgatgaaggtgctgctgccccagaatgtggcaagggagaagggtgtgatggtgatgttggtggtgttgctaatgattatggtgcaatcggtgatgatgcagttgctgctgaggatggt

SEQ ID NO: 32573 - DNA, 445 bp, Glycine max
  Clone ID: LIB3051-088-Q1-K1-C1
gttggctaggaattatctcaacattgaatcacacaatctgtttggcagaatatgtgaattgctcaaggaaaccaaaatcaccccagctgaggttgcagaacatctgatgccaaagaatgcttttagggatgcagacctttacttgaagagtctgattcaagcacttgaattggcaaaggaagatgcaagaaagagccagcatgatcctcattggactgaaaatgattcagaagacaaagcaacagaaaagtcaacaaactacacatcaacttgatgcaaagtagagtcactaagataaagagtgtgtgaaaggagtgaatcatagtgggagggagtagacaagacaagcacactatatgctcattttgttgtttataacctcagaaaattggtaagctaacaaatatcctaaagtattggttgagtaaacagaagtatatttaat

SEQ ID NO: 32574 - DNA, 441 bp, Glycine max
  Clone ID: LIB3051-088-Q1-K1-C10
tgcagcctcaatattgaacccttttgcaatttacagattgttcaggaatccaacgtctagtaatgctgggacattgttggcattatcagatttcttgtccttgacaaaaaatcagacttctctatcaggtgttgctatcattgttgaggtgtgtgcttccatgcctattcattctttatagtattcattctaccggctgttatttgaacatataattttttttgaagaattatgacaaatttttgtgagaatggcttaaggtcgcttaagttatttaataattcctatgattgatttcaccttggaataataggtgaaatagaaatccgaaatattaagactatcatgcattatttctatcaaattgttacaagacctggttctcacttgttcatgttggccatactttacttctaaatttctttataacttggccaaaaa

SEQ ID NO: 32575 - DNA, 411 bp, Glycine max
  Clone ID: LIB3051-088-Q1-K1-C5
ggaataaacaatgccagaattgttgatcagttttttgataaatccaactggtgtattattcttgagaagacagtgtgaccaagaaaaccttgagggagtatagcaggccagagtgtagtataacaacttttacaacatttatcttgcaagttaactttgtttggcatctaatttactatcgattaaaaaaatgggcagctgcagaagttggacagaatgattatctggccatttcatcatccagaccaggctgcattcttctagaaatcctgatgtattgtttttttggggttcttttttaaatttttgcgaagcccaattttggttgtaacaatagggcacgaaggatgccactgttctgcagtgttggtattatagcttggcacactgtctgccctacaatgctgaata

SEQ ID NO: 32576 - DNA, 440 bp, Glycine max
  Clone ID: LIB3051-088-Q1-K1-C6
gagaaaagctggatattacaatgaagagacctaattttcttctacaagaaatctggattttgaactgggccagaaagtctttgttttaattgtattttaccatatgataaattttcttttgggattggcttcaagaagtagtagattaatagtcactaaagcaaagtgtcattacattgaaagttattatgttttggtatctcatgttcagactttggtaaatatacaaagtgtagtttcagcagataagattgatcgtcatagtccatttctaatcgaattagttttagttcaatgttatggaatgacaccattctagtataggtcttttagtttaaagaatctgttaatgtaggtgccattagattgagtgatgatttgatatcctagtcaaatggtcagttttgaatccaagatgatgttatattcatgtctatcgg

SEQ ID NO: 32577 - DNA, 444 bp, Glycine max
  Clone ID: LIB3051-088-Q1-K1-C9
tgcagcctcaatattgaacccttttgcaaaatacagattgttcaggaatccaagatctaagaatgctgggacattgttggcattatcagatttcttgtccttgacaaaaaatcagacttctctatcaggtgttgctatcattgttgaggtgtgtgcttccatgcctattcattctttatagtattcattctaccggctgttatttgaacatataattttttttgaagaattaggacaaatttttgtgagaatggcttagggtcgcttaagttatttaataattcctatgattgatttcaccttggaataataggggaaatagaaataagaaatattaagactatcatgcattatttctatcaaattgttacaagacctgtttctcacttgtttttgttggccatactttacttctaaatttctgtataacttggccaaaaatta

SEQ ID NO: 32578 - DNA, 443 bp, Glycine max
  Clone ID: LIB3051-088-Q1-K1-D10
cccacgcgtccgggaaaaacttggtttccttctaatgcgaacctctcttcttctgcgctcgcacaattgtcttcaaggcagccacgatgtcttgtccctcactccatcttccatcagatcacaaagaaaccctaacccaaaccctagccccaacccttaccagactcgccggcggaagctccacgacggcgaccgctccggcatggtggtgaaaggcccctgcgcgaaccttgtcatgggccaagtcaagatcctcaagagaggcgagacgctcagccccgagaacccccgccgcgccaattctttcgacgacgacgacggtggtttcgattttgtattgggatccacgaaccggttgggccccgatccgagctccgttccggtccctgggttcctcgcgttgaggcggtgatgatgaattggttgattgattatgctgttgg

SEQ ID NO: 32579 - DNA, 440 bp, Glycine max
  Clone ID: LIB3051-088-Q1-K1-D12
cacgcttaaggctttttaaggcctgaagctcttgtagcctcagcataataaaagagaggaagaattaaaaaaaaagaaaagaagaaaaaactgtggattttctttctgattctcctatgttctaaagatcaatcttacctttgattgatacaaatcttgcttcaatcgggtttcaggaagtcatatattctaggctgcaatactgagattcagagataaatggcatcattggtagccagtggtagcagtcaaatggctccttcagtttctgtccaagaaaaagggagtaggaataagagaaaattcagggctgatccacctttaggcgagccaaataagattattccttcccctcagcatgaaagcctcagcaatgaattctctgctgaaaagttcgaaataaccacaggtcatggacaagctagtacttctgacatgtg

SEQ ID NO: 32580 - DNA, 439 bp, Glycine max
  unsure (1)..(439): unsure at all n locations
  Clone ID: LIB3051-088-Q1-K1-D4
accatcttttaagtttttcttttttcgtttggttttgtcttttgtttgattcctccttgttgtgatgttctgttcttaccttttgtcaattttaaggattcggtagggtggcactgatagagactcagcaggattttcccattctcacggttgtaaagtatgacatggccgattattctgatccacagccaaataccaatcccaagaatgggtatgttttgagccctccttcgtctccaactccaactcatcctccaagtccttaaatggaagctcacgattagactttcaccacttgtttgtgtctttctgaacggttttgtaactggagtgtgtgatcgcttttagtttgacacgggattcatagaaataggattatggtaactgtgttgctgttaatttgtatccttctatagtttttcatgtgttntcagaatgc

SEQ ID NO: 32581 - DNA, 432 bp, Glycine max
  Clone ID: LIB3051-088-Q1-K1-D6
cttgtcaataccaatcccaacaacttccactgctcccaaatcaccgacttcaccggctggaacttcaaacaagtcatcaaccttctcaaccgcaccggccacgcccgcttccgccgctctccaccccaagcccaagcccaagcccaaacccaaacccaaacccaaacaagtcttcatcctcaaccagaaacccaacaagggttcagtttagatttcgtgaagcccaccattctaaactcaaaacccagcaacaaagacgagactttgaccctctccaccacctcctacttctccttcacgtcctccgtcaccaacgactccagcgtatccgacggcaagatctgccctttcctcccttcctccggcgccaagccaactctatcctgcgtccactcgaaaaagtgccgtgacgctgccgacgcactcttcacc

SEQ ID NO: 32582 - DNA, 435 bp, Glycine max
  Clone ID: LIB3051-088-Q1-K1-D7
cccacgcgtccgatttgcaaatggtggtgtaggtcttcatgaaattgattgaatgaccaaggggatgcaactgattcctgattgagaaattaagctactctttagttggaattggatgatgagtttggagttgatgctacgagaagataaacccatttgagcttgaaaacagttttttctggaactggtcatgcgttatttgagtggttgaatttgcagggttgagcgaactagttttcatctacaccaccctaagtgctttatttcaagtgaatctcttccttgatttttcttctgacttttaacctgcatcaaaatcattgttttaatcatcctattgtgtataattgcccctaggctgtttggtatccatataattctttttcctgcatacttgcttttctaggctggggatccattgcgattgatgaccca

SEQ ID NO: 32583 - DNA, 445 bp, Glycine max
  Clone ID: LIB3051-088-Q1-K1-E1
cccacgcgtccgcccacgcgtccgcgttcagcattgtgcctacaagtgcaataagcggtgaaggaattcccgatttgttattactattgattcaatggacccaaaaaacaatggttgagaaacttacatacagtgaagaagtgcagtgcactgttttagaggtgaaggtagttgaaggccatggaactactattgatgttgttttagttaatggtgttcttcatgaaggagaacaaatagttgtctgcggaatgcagggtcctatagttaccacaattcgagctttattgacacctcatccgatgaaggaacttcgtgtcaagggaacatatcttcatcacaaagaaatcaaagctgcaatgggtataaaaatcactgctcaaggccttgaacatgccatcgctggcactggtttatatgtggtgaagcctgatgatgatttgga

SEQ ID NO: 32584 - DNA, 428 bp, Glycine max
  Clone ID: LIB3051-088-Q1-K1-E4
gaaagatgaggccgattctgatgaaaggtcatgagaggccattgacgttcctgaaatacaacagggacggcgatctcctcttctcctgcgccaaggaccacaaccctaccgtctggtttgccgacaacggcgaacgcttgggcacttatcgcggccacaacggcgccgtttggacctgcgacgtctcaagagattcggctcgactcatcacgggaagtgccgatcagaccgccaagctatgggacgtgcaaagcggcctgcaattatacaccttcaacttcgattccccggccaggtccgtcgatttctctgtcggcgataagctcgccgttatcaccactgaccccttcatggagttgccctccgcaatccatgtcaaacgcatcgctaacgatccatcccaacagatcggggaatctgtgcttctc

SEQ ID NO: 32585 - DNA, 281 bp, Glycine max
  Clone ID: LIB3051-088-Q1-K1-E6
gagaatcagatccctactctatatttatgtatattaatggatcacgtgatttttgtgcagagactaatttgctaccaagcttaagatcttttatgcctagtgccctatcttaaacttcatcaactgtatcttctcctttactgatgtggggtaaatcggattttgctgcatttcctataatgctataaattttctgatcgtatcgcttatccagcctcaacagaagaatgactacttgccatgcaacgaggacgacaataattcatctttgagaaccactt

SEQ ID NO: 32586 - DNA, 303 bp, Glycine max
  Clone ID: LIB3051-088-Q1-K1-E8
acgcaatttcatcgaaccaatcaataaatcatatacacattttttggtgaattttggatgccgataaaaaatgccgtcgaagcagcagcaatcgaaagctgatttagcgatgaagcagaagattgtagaggacaaaaccttcggtctcaagaacaagaacaagagcaaaaatgttcagaagtatgtgcagaacctgaagcaatgcgtgcagcctaagcccgatgccgccaaagtcgatgccaagaaaaagaaggatgaagataatgccaatgaaaatgatctgaatgagttgctcaaaatcgc

SEQ ID NO: 32587 - DNA, 435 bp, Glycine max
  Clone ID: LIB3051-088-Q1-K1-F10
cacacacaccaaccatctcattataaattgctaagtttttcaactcatcatcaattggcactttttgcttcagaatgaatgcttgaggttgaggagaaccagaaccagaagcatgaatcaacttggtggtgttagcgttatccttctggttctctcagtcttgtgtttccatgttagagcacagacttctgcaccttcttcaggagatgctgtctccaatttccagccaagccttgctgttgtcataggaatccttggtgtcatgttcttactgacattctttcttctcatgtatgcaaaattctgtcatcgccgccatggcggcgcttcggccgttggagactcagaaaatcaacttacttttgtgagatcaaggtctagattctcaggaattgacaagactgtcatagaatcactccccttcttcagattctc

SEQ ID NO: 32588 - DNA, 251 bp, Glycine max
  Clone ID: LIB3051-088-Q1-K1-F12
cacacacacccacccaatctagtttaaatttttaccattccaacacatcattaagtgagacatcatttttcataaaacattccctaacaacaccaccaccccaatcacacatactaacctacactaagctcttataacagataccatcttcctcttacaacaatctgcacatcccttctcacatacttataatctttcatttaacgataccccttacaccatccagactatcactatcattgacaaacgaa

SEQ ID NO: 32589 - DNA, 418 bp, Glycine max
  Clone ID: LIB3051-088-Q1-K1-F2
cccacgcgtccgttcactttcattttaaaatgggttatctatacttcttgagtttcctgtttgctttatgcctctcatctcctcacaatgttttgtttgctcaaaatttaccatacaaagttgtgaatctaggaaactggctggttgtcgaagggtggatgcaagaaccatctctctttgatggaattgtcagcaaagatctcttggatggaactcaagtgcaacttaagtctacaaagtttaacaagtatctcacttctgaaaatgggggtggagctgatgttgtagccaaccgtgactcagcttctggttgggaaacattcaagctgtggaggatcagtgactcatccttcaacttgggagtgttcaacaagaaatttgttgggctggaaaatcatgggggtggaaacaaaattga

SEQ ID NO: 32590 - DNA, 325 bp, Glycine max
  Clone ID: LIB3051-088-Q1-K1-F3
gcagtactatgacaggaacatttacttaacaggacagaaaacatgcaaaatatatttaggaaagtctatgacacatttgacaaagtctaatggagatgaaaaaaaaccaaaaaaaaccacgaaatcagtggtcttccttcaaaacctcagggaagaaaattcccacgatgttctattgggataaacttcaattcgcttgacagagtagcaacaagttgccactaaccaataacagggtggtcccttcttttatgccgaactgcaccaagggattatatcaccccttatgaatttggaagggttcatactctaaaaggatttcttt

SEQ ID NO: 32591 - DNA, 300 bp, Glycine max
  Clone ID: LIB3051-088-Q1-K1-F5
ctatatgctaatgagcctgctaatgcggattatccagttagcatgcctgttggtacagcgtagcgtgaactaacaagagatgctggtagtggtggcaatactaatcatgccagacctgctagcaatattgtaaacattgtaaagccagtaggctattcagcttcagtagccagtggaatgcatgatgttttagtaacctttgaggcttcaaagtctgatggaacataagtgatggttgacaacaagtatctaaaagcatttaatccacttcttctgatcaatttctatgagcagcatttt

SEQ ID NO: 32592 - DNA, 413 bp, Glycine max
  Clone ID: LIB3051-088-Q1-K1-F9
aaccgctccacaccgcaccggatcatattctaatcctatcactcttacgctttaggtctggcgaccttgcaaattctctctttcttctaacctaaccctacatatcatgcccaattaacacaaatcgaatttaccccaaattgctaaccctaccgtagatcgatcatttatttcttcctgaattctggcatagggtggctgccatgcatcgcactcagtatggaccctacgtgcagattagggctgattatgtcgtgtctgcttgtagggctccaacgccgggagttgtgaatggaacctcagcgtcgacaataagtgtcacctgggtaagatgatcacacgcggctacttagcggagatctattgaggcactaatattcccacgaatgaagacgtcgcaaataaccttgaca

SEQ ID NO: 32593 - DNA, 443 bp, Glycine max
  Clone ID: LIB3051-088-Q1-K1-G11
ctttctttcccattttttcattccactttatctcaacctcgatttttccattttgcgatgaactcactcttttcacgatcttatctacatataatttcaaaatttttaatttctcaattgattgtttgtgacggtgatcgatcggtcggcgcgatcgtacctgcatctattctcttccaggtttggagaatgagttctgtgcaaggaccagttgtgtgcccttctgtccgtgccaaacaagtagggttctgcagcattcctatgattggggcagtgaaaatgaacgttagacgcattagaagtgaattttggggtctcaatggcgccaaggctaaacccggttttctttcttgccgtataaacacacgaaagtacaagactgtgcattgtacttttaactcaccctccaatgacagtggaagtactgctgacaatttcaatga

SEQ ID NO: 32594 - DNA, 359 bp, Glycine max
  Clone ID: LIB3051-088-Q1-K1-G12
cttcgtttaccattatgtcatttttctgtttctcaacctcgatttttccattcgcgcatgtgctaactctattcacgatcttatctacatataatctcaaaattcttaatttcccaattcattgttcgtaacagttatctatcgacctccccaatcgtacctacatctattctcttacacatttggatactgacttctgtacattgaccatttctttgcccttctcaccgagccacactatcaacattctgcacaattcctatgactagggcattgaaaatgatcgttccacgcattacaattcgaatcctattctctacaatggcgcccaggctaaacctcgattttctttcttgccg

SEQ ID NO: 32595 - DNA, 409 bp, Glycine max
  Clone ID: LIB3051-088-Q1-K1-G2
gaaagagtctcgcctagccactactcctacttcatatcatatcattcacattcatctctcttcgtccatccatcatcgaagtaataacaacattcgcgcgctcttcgtattttccttcttcaatccgcgcgacaccaaaaccctagatccggcgcaatcatcgcgaggattttgaagacggtaattgttgttggaattggaggagagggtcccagaaggtggtggtaatgggtttcatggtggatataactgaatctgtttgtgcatatattacagggagagagaaagtttttgactttgagacaatattgctagagagaggaccggtggtgggcttggcaagaaatggatcctggtcgctatgctctgcatcaaggctgggataataacagcgctcttgagggataca

SEQ ID NO: 32596 - DNA, 415 bp, Glycine max
  Clone ID: LIB3051-088-Q1-K1-G4
cccacgcgtccggaaaattcccagactctctcgcttcctcaaaatttcgccctctttcattcaattctcttctctgctcttctcttctgttcccaccttctgatccatcatccctcgttttctccgaacaatggctgctggtgtcactgtcaagtccgaggttctagaatcttctccccctgaaggagtatgttccaacacggaggaaaaccacctggttcagaccaatttgtctgatgggtcacccaacaagtctgtgccagcatctggacttaatgcagtgattcctagtgcaaatcagcttaccatcttctataatgggagtgtttgtgtctatgatggaatccctgcagagaaggtgcatgaaataatgcttattgctgctgctgctgccaagtctacttgaaatgaagaa

SEQ ID NO: 32597 - DNA, 394 bp, Glycine max
  Clone ID: LIB3051-088-Q1-K1-G6
gtagcagcgaggcagagagagcagtaatccaagtaaagcgacgtcgtgaaggcgtggaagggaaattgggaatttgatctccgtcaatgtgatggctccgaatccgatgaagcaatctgcgaattccactacaactaccatcgctaataaggagattctggtccgtgaaacgatgcgtatcagtgccaatttggcctcccaccctcagccgccgccgacgtctcccatcgtcggaattatctgctgcgaagaaatggacgggcgtcgttggaagtacttggctgagagcgatggctttggcggattcaagaagaattcatttctccctgtcagcctcaactccaaccaccctcgcgaccctcttcacgaagtcctctctttcgttacatcctat

SEQ ID NO: 32598 - DNA, 348 bp, Glycine max
  Clone ID: LIB3051-088-Q1-K1-G7
tttcatttcaagcacgactaaaaacacctttttcctctcacaccgacagtttcaagaagcaaggaggagaattcacataaatcatggtggagattcacgaagaaatcgacccctttgatcaagaagaacatgaagaggaagaaaccgactatgatcagctaaagaagcggatgcagaaggatcggatcctgctgcagcagatgaaggagaaacgccccatagaagaggcaggccaacaagaaaaacaagaagcatctaggcggaagaagatgtcaagagcacaagactctatcctcaagtacatggtgaggattatggatgtttgcaatgctcaaggttttgtgtatg

SEQ ID NO: 32599 - DNA, 409 bp, Glycine max
  unsure (1)..(409): unsure at all n locations
  Clone ID: LIB3051-088-Q1-K1-G8
cggacgcgtgggctcctaccccaagtgtccttacgttaaggaaggtgattacgacagcgcctgctcgatctgtctgtgcgagtacaaggattcggagatgctgaggatgatgccagagtgtccacactactttcacttgtgttgtctcgacccgtggctcaagcttaacgggtcatgcccagtttgccggaactctgccatgccaacgccgctgtcgacgccgttgcacgaggtcgtgccgctctcacagtacgccgatgccagggcgaggaggtgaattcgaattgtcttctacggtgcggctcgggttgctgggttcagtgggaaatgcatacaggacacaacttagatcagttatttacatgttgttgcatgctgntattatcccatcaaaattggagttgtacct

SEQ ID NO: 32600 - DNA, 293 bp, Glycine max
  Clone ID: LIB3051-088-Q1-K1-H1
tattgccccaaaaatttcagaaggattgctcccactattttattggatgttccgcaagagtcttcgataatgggtgaggagatatttggtccattgcttcccatcatcacggtatgaataaaggcacatgaagaactgtttgtatgatgcatattttcttcttcaaatttcatttatgttctttgattgcttttccaatagtctaataggtacaatgttcacatagttttgcaacatgttttcaacctgcaagagtaattgatatgtgcttcttcaagtgtgataagagtcac

SEQ ID NO: 32601 - DNA, 286 bp, Glycine max
  Clone ID: LIB3051-088-Q1-K1-H11
cccacgcgtgcgcccacacatactttcacttttcatatcttacttcactatttcgtcaaggttcattttatcctaaatcaacattacacactattacattaacgtcaagaatagttgtgtttttaactttttgcgtaatcaaaaatgactaatgaacacaacccatatccttatgtaagacgccatatcacacccacttttaataagtcacttgtctagaccaaagataaaactagctcaaccttttacaaaagctttacctatctgacagaaaatttatctctta

SEQ ID NO: 32602 - DNA, 369 bp, Glycine max
  Clone ID: LIB3051-088-Q1-K1-H3
aaggagaagatgaacgtggatctggaatcattggcagaggcaacttctggggccataggatcactgatcagcaccactattctctacccacttgacacctgcaagaccaagtaccaggctgaggctcgttcctcaggtcgaataaaatacaggaatctcactgatgtattattggaggcaatatctaaccgtcaggtgctttcactttaccagggccttggaacaaagaatcttcaatccttcatttcacaatttgtctacttctatggatacagctattttaaaaggctgtatctagaaaaaagcggttataaatccattggaacaaaagcaaacttggttattgctgctgctgctggggcttgcaca

SEQ ID NO: 32603 - DNA, 412 bp, Glycine max
  Clone ID: LIB3051-088-Q1-K1-H4
gtcacggcgtgagctcatctcatcgttgagtataataatggattcggacactgaagaagcaaaacccaagcatcccaagaaggagaagaaaaagaagaacaagaagaaagaggttgaggttgtccaacctcaatctgaacagattgaggttgaggtcgaggttgtccgtgagcaccccaataaaacacctcctgttgttggttatttcccttccggatttgatccggtcaagaatcatggcggcggtccctccaattttcaagtttaccggcacaggagcatgcccaagaggctggagcttgtggttcgccctccccggtcttcagtggaatttgttggaaccagttatgctggcgaggctgcggccagacaccgtgccaagtacgcacttggggttcttgacaaggaagcc

SEQ ID NO: 32604 - DNA, 438 bp, Glycine max
  Clone ID: LIB3051-088-Q1-K1-H6
attttagagtctcagattgaaacggctatgcgttctcgcgtctctcacttcaaggaacagtctgactccttgacgttcgagggtgttcgtcgattgctcgagaaagacttgggattggaggagtatgctttggatgtgcacaagagatttatcaagcaatgcttgctcaagtgcttagaaggggtacgagatgatgatgggccaaagatatcagggaaagaacgggaaaaaggctcaagtatacaagagtcagaagaaccaacagaagaatgtgaatcaaaagatgcgaaggatctttgccctgaagatgaggagaagatggaagactctccagtcttaggtcttcttaaagaacaaaacagggctaaacttgaaaccaaggatgataaaggcaatggaaccaaagtagttccaagtgaggctctaattaagaaagct

SEQ ID NO: 32605 - DNA, 190 bp, Glycine max
  Clone ID: LIB3051-088-Q1-K1-H7
atgacacacaatcagactcacacgtatatgacagctccaatgttgcactacagggaataggatgcatggatcacgctagcgcgtgctacaaccctgctcaagaacgagatgctatattggtagtcacctatgcgtacaccaaagccatctcccaatcggatgctgctcatgatgcatggatctgctgcta

SEQ ID NO: 32606 - DNA, 447 bp, Glycine max
  Clone ID: LIB3051-088-Q1-K1-H9
cccacgcgtccgcccacgcgtccgtgcaaggtgcatcttctttttgttgttctcgcaaactttaataatctcataaattagcagaacgaagaggaacaaaaacaagaagaagaattggattcgaaaatcgtagcgtagcgttggtgcgattgaacgatacgatgggaagaggaaaattcaagagcaagcccactggtcgccgccagttctccaccccggaagatatgcttgctggaacctctaaccgtcctcgaacttttagacagaaagaagctgagcatgaagaggaagaacccgaggaagtatctggagatgaatctggagaagaatctgaagaagaaacttctgttagtatcttgcagtaattactaatatagatggatttcatttttttgcttttaagaaaggatttgtttctttctatggtctgaccctgtcaatatgaaa

SEQ ID NO: 32607 - DNA, 258 bp, Glycine max
  Clone ID: LIB3051-090-Q1-K1-A11
ggcacgcggattttctgcccagcagtccctaaaatcacatggtatcagagcttcggctctgatcttgtggtgtcccgccatggaaaaaagtgctgcgactggagaaaattcctccaccacttctacgaattctggtggtaatgaaactgtatcatcccctatcatatctgattctctgtccataggtaccaatttacagcttgtgattcaaaagctgaatggtaaaaattatgttgaatgggctcaatctgtgaaact

SEQ ID NO: 32608 - DNA, 337 bp, Glycine max
  Clone ID: LIB3051-090-Q1-K1-A4
gctaactaacatagtattaaaagctcaatacattggtacaaacaccgttgattaatattgaacgcaaaaaaaaaagggctaaacaaaacaacaatgacgtacaaaaaacaaaaaaaaacgaaacaaaaacaacaaaaaaaaaaaaaaaacagggaactcgatcaagacaacccagaattactacaccgacatgccagtgatgcagctgatcaacaccaacaccatcatcaataaaatcaacaccaacgtacagctatctgactcatgaaacccgcggatcaccaaacctactagaactccaaaacatccgcctttggccagatcgactcttctcaaa

SEQ ID NO: 32609 - DNA, 446 bp, Glycine max
  Clone ID: LIB3051-090-Q1-K1-A5
tcgcccacgcgttcggagctctcaaaatctgcaaccctttgtgagaagattggttctatcaatggtgccattcttatattagtagggatgacaagcagcatatcagaagatcttctcactgttgagaaggctgataaaacattggagaatctggagaagtgtgagagtaatgtgcggcagatggccgaaaatggcagattacaacctcttctgacccagcttcttgaaggtccaccagaaaccaaactctccatggctacataccttggtgagctggttttaaacaatgatgttaaagtccttgttgctggaactgtgggttcatctctgatcaatataatgaaaagtggtaatatgcaatcaagagaagcagcactgatggcactaaatcagatatcatcatgttatccaagtgcgaagattttaatagaggctggaatactttc

SEQ ID NO: 32610 - DNA, 450 bp, Glycine max
  Clone ID: LIB3051-090-Q1-K1-A6
accacgcgtccgctgagatagagctccagcacctttatcattcatctgcggtacgtgcctaggggatcctcgatacctatatcacatagaagacacatcaccccagaacccaaggattctgaataatacaactgcaattatgcttatcggctcagtccaaaacacgctacgagaaatgagttcgattcattagttaaacactctggctgttccggttcgtgctgtgtctgatcaggcgatatctgcgcaatgccattctcctctccgtgattacttcgacgttccaaaacggcgtcgttagtctgactactatcggttccgtctagcttgaagtccaaccgggaatacaggctcgcgtgcgaatggaccttacacggtaactgatatcacgacaaagcatcaagatttgcatgaggtcaagaccacgaccaccgttgaaaaagcttctgt

SEQ ID NO: 32611 - DNA, 413 bp, Glycine max
  Clone ID: LIB3051-090-Q1-K1-B1
tttgtatttgacattagttggtatgagtggtgatatttggacacccatgagttacaaacacggcgaccaatacctatcatttctctctatctctctcttcacatcacatcaccaatcttatctgtcacttatctctctcaaagcgcctacatgaccacaccctagggtgtcaaaatcttctacttgtcgtatatactcgtatgttctggttaagacacttctgactattcatggttaaataataatatgaatataccttccataatttaaccaatgaaaaaaaaattcaaattatggctaatccggtttaccctaactatccatgggggattttgagcccaccggtatgtgccgctattcaggatttaaaacattgggtttgaatattttacaattgcctgactatttgggat

SEQ ID NO: 32612 - DNA, 250 bp, Glycine max
  Clone ID: LIB3051-090-Q1-K1-B12
ctcacacactccagatcatactcacattactttgattctttcctgttactccacatgcgagtgcaatttccaaacttaatgagccacctatccatcctacctctttaataactaaacatttacttattttccccaatcacccctttcttttccatttataaaatcattctatcacttcatttaaacccttctctgtataaaccttacctttattactataactccatcttcttatttcccaaaaatgcta

SEQ ID NO: 32613 - DNA, 462 bp, Glycine max
  Clone ID: LIB3051-090-Q1-K1-B4
tgaatctggtatagtgtagtagcattgcaacagcatacttgtagggtttataagctataaatggaagaagccttctgtgccataatacatttatatcttttcttttttaatttaattgcttgcacttttagtataatgttttatattgtcaaccaattagaaatcatagtgggtatgacttttaagtggtttttgttaaagtcaaaacactaaccatacacggaaattgtgattggatgatagtgtaaaacactttatagtgtcaatgcttgcactattttctcttcttttttctcctacgctgtacatactgctttgtcctggctattttttaacaagttctgaaagttcttaaacattttctcatgttttaggttgaaatagatggtcagatctttggtaaagggtttggattaacatgggaagaggctaaaatgcaggtatcctactttctttttatga

SEQ ID NO: 32614 - DNA, 352 bp, Glycine max
  Clone ID: LIB3051-090-Q1-K1-B5
gaaagtcgaaagagagagaaacatcgagctgctgttctgttctagggttacacttgtttccagtgctggtaaagagtctccaatcttccaacactgcgtcactcgctttgttcccaattcagtccacaatttactttttccactttcccctaacctcccactcggaactcgtcgttacctatcgataatgaatttggggttacctcgctcacatccatcggtgtttactctgtaattaggaaccatgtcgaggcccatgttgcttgttatcttgctgattatacttataatcacctcacagttcgagtggaagcagcagcttgtggccgatgttgactctaaccccagcgtg

SEQ ID NO: 32615 - DNA, 436 bp, Glycine max
  Clone ID: LIB3051-090-Q1-K1-B8
gtactgctctattagttcatactaagttctgaaaatgagttccaaggtgttgcttgtcctacttatgttcttggccactatacttctgatctcctctgaggttgcacccgatgatgcatacgagaattttgacaaaatagatgggaagcctagtgcagatggtgtagatgaaagcatgtattggcgtgtcggctatggtggcggatatggtggtggttatggaggtggacttggaggctatggatgtgggcgcggaggctactgagggggacgcaggtggatatggccgctgacgacgcggctatggtcacggtcgagctggctatggcgtccggcgtggtggcatgcgtcgtggctatagtcctaatgaacatcaccaggctagagttgatgctaacgatcacaactaacaaggcgactatataaagcttatcta

SEQ ID NO: 32616 - DNA, 459 bp, Glycine max
  Clone ID: LIB3051-090-Q1-K1-C2
gggatacatactcctggcaatggctatgccaggttccctttacatagggtccgttgtggttggcatatgctacggggtgaggcttgccattactgtgccaactgcctcggagttattcggcctcaaatattatggtcttatatacaacattctcattcttaaccttccccttggctctttcctcttttctggtcttcttgctggcattctgtatgatatggaggcgactaccaccgtatgaggaggcaacacttgtattggagctcattgctacagactagtattcatcatcatggctgtagctcgtgttgttggcttcttcttagacattttattgtcattcagaactaagaaggtttacaacaagatctcctacagcaaaaactccaacaaaaactctctgaattcaagtatgcgatgatccaaaatggcccatataaagagggtatgacacttgcg

SEQ ID NO: 32617 - DNA, 251 bp, Glycine max
  Clone ID: LIB3051-090-Q1-K1-C4
ccgatacatactcctggccaaggctatgcgattttgcgtatacgtatgttccgttattaaggggggatgcttctggggcagtttaacaaatactgtgccgacctcctctgaacaacgaagcctgaacaactaaggtcacagacacatcggaaccattattaaaacgtccattgactatatgatcttagatgtactattcgacaatatccaatactatatggatgcgactaccaccgaatgatgaggcacca

SEQ ID NO: 32618 - DNA, 450 bp, Glycine max
  Clone ID: LIB3051-090-Q1-K1-C6
gatctagtgaaattgttctcaaagcaatgggacgtgcaataaataagaccgtaatgattgctgaactgatcaagagaaggattgttggtctgcatcaaaacacccaaattggatcaactgatataactgacacatgggaaccactagaagaaggccttcttccgtatggatttttgtttcttctatgctaccttatcaaatactaaatttctgcgtttgggagtgattcctttggttttgcgttgtacttgcccaatttggagactactcgccatgtttcaatgatcacaattaccttgtcaaagaaagaattggatacgtcatccgcgggataccaacatactgttccagttgatcaagtaaaacctttaaatgaatatgaagaggaaggaagtgagttgataagttattcttttaatgcttcaagactggattttgtagcatgttgac

SEQ ID NO: 32619 - DNA, 187 bp, Glycine max
  Clone ID: LIB3051-090-Q1-K1-C8
cccacgcgtccgaaaaaaaaaaaacaaaagatctataaaaaaaataaaagggaaaaaccaacgagaaccgatcaaaaacacgcaaagaccaacccccaaaaaacaacccaagacggaacaacagaaagaaccagacacagagcaaccaactagaagaaggccgggtcacatgcgagacgaccagaac

SEQ ID NO: 32620 - DNA, 409 bp, Glycine max
  Clone ID: LIB3051-090-Q1-K1-D11
gtcccgtggatctacgaaacccacataaaccctctctccctcccaacgaccgaggaagccatcaggatcatcgcaacgtgaaagtgagagtgagagtgaaagagatctgattgtgttgtgaatcaatctcagacacgacgctatgagaagggtaccttccattctcttcagaaccctcacgtcccctcgcgtcgccacctctttctccgtccccaaccgccttctccaggccgcgctctaccgcagcgccgccgcccgctctcaccgccgccgcttctcctcgctcctcggtcctctcgccgccgcgtctctcggcgttgctggggctctggtctctcaggaagtcctcgccaaggagcccccgccgccagaggctctcccgaacgacgtcgttctttaccagttcgag

SEQ ID NO: 32621 - DNA, 464 bp, Glycine max
  Clone ID: LIB3051-090-Q1-K1-D2
gctacagcttctgaccagttgtcaaagtcaaaagaatttgattcagctgttccagattacattcgtaatccttcaagatacacccgttacacttttgatgattctccaagtgacatggatgacaaatcaaataaggaagcatgcatgagcttccttttgcagttgaaggggtcaaatgctgccaagagaactggacctcaagaagatgaagctttggaagatcttccatcagtaacatttatatcgaagaagaaatctggtgatgccaatatgtgcgacagcgagatggtgtcaaagccgaagcttgatgctggcacggaggccatgaataaaagagccttccctgttggcatagctgccagtgactctgaaaacagtgacgcttgtgcaatggaggaagatgaaccagaagttaaagacattaaaaagagctcacagaaggtgaaccgccagtacaggaagaa

SEQ ID NO: 32622 - DNA, 442 bp, Glycine max
  Clone ID: LIB3051-090-Q1-K1-D3
ctgtaacaccctttccttttcatttattgcctcaggagtgtgagcaaacgaggcagagaaaggcaccgcaacacaaaagcaaccaattcgctctctctctctgatttcctattcctttatatcagtttcctcaccttctcactttttgaacgagacacagtgaggaaactgaacccttttgtttgatttttcagctgaaaattcagaccaatatatattttgagtatttattttcctttgatttcgtggaaagttattatcacagaatctgagggttttgtagacagaacttcaggtttaacactgaagaatgttcccaagaacagctgcaagtctgcatcacacaggctctttaaggacaaggctaagaaccgtgtggatgacttgcatctgatgttcctggatctgcagtttgctacgaaggatagccgtacggttgatg

SEQ ID NO: 32623 - DNA, 422 bp, Glycine max
  Clone ID: LIB3051-090-Q1-K1-D6
acggctggtgcgccttggcttgccctatattggaccgcctgccgtggatggtgctcagtacttacggctgactgtcgcaatagatatgtcaggagcgttaatcggggatcaaccgtcggggacacgatgctaacctggacctactatcaatagcagagacagactactgggaagctgcacaccatacccaactggtaagcattccaaatgacacacttaggggagggccttaagaatgagcacatgttcacattatccacctgtgtgatccaagtgcttgcttagatctgattcatgaatctaagagtcatgagcgacagcatacgtgtagcgacttgggattaatacttagctttcacgtctgtggagataccgaatgacgatactcggtataagtgttccccacccattcgcgatgcata

SEQ ID NO: 32624 - DNA, 445 bp, Glycine max
  Clone ID: LIB3051-090-Q1-K1-D8
agacactttaaatttgcctgactattaaactatacagccaacataaaacgggtcaatataccgacatggatctagttttattgtcataagagggtacgtacttgctatatagaatatgttcttcaatgtctggaatggcaattttttcctctcaggttctttgcgatgtactacagtataggtttgattatcagctgatatgcttgtactactatttttaaaaaaattcttccttgttttcactttgctgtctactttaagggatttgaaaaaaaaaatggtgaaaacagcaaattctcgcttctccatatgctttacaaactcttagaaacaagaaacaaattgaaaataaagtggacactggacaatggactttataattaatagcaaacacatatcagttaaaatgatctcaaaaagctagcactgattgcatgtataaatg

SEQ ID NO: 32625 - DNA, 360 bp, Glycine max
  Clone ID: LIB3051-090-Q1-K1-D9
ctattttccctttctctgcatccctgttggcggagctctaagccatctcttgtctctctcgagaggggaaagagagagagagagagagagtgtttcggtgtcacaacgcaaacccagaaagtagcaaatgccaaatggtagtgcggtattagcattgtagcgtagtgttagagagagaaagagaagaaagaaaaaaggcactaccgtcaccacaaccaactaggcctcggtcggaaagttgctacaaaaaaggtttcgccttctgggtcactctttacttttctgggatctccatttctgaactaaagtctgaatttttgaaggaatttgatcgtggggtttctggtgcttaattctggg

SEQ ID NO: 32626 - DNA, 433 bp, Glycine max
  Clone ID: LIB3051-090-Q1-K1-E1
cgtacgacccgtacctctctctctctctgactctccctcaccgaaccctagtactaacctgagagagcgctttagggaccgatacgccgctcctgtactcgctccccttcttcttcaagcattctgtcaggcgctacctagatcaatgtcccacaccagatctagatcactggtagagcgcagaacacattaataatggcacaagctgcccttagagctgctacgccaggcgataccagataacgtcaacagaagctacagagaattctatacggctttaatatagcccacacagcatgctgaacaggcagcatccgaagcccatatctcagctgtattcaaagctatcacctttacaagaccctcagctgaacccgaacactgtattcactctcttgacaggctaataccatattcaccgaactcggcacta

SEQ ID NO: 32627 - DNA, 405 bp, Glycine max
  Clone ID: LIB3051-090-Q1-K1-E10
acgggttctggaagacggcagagctgccgccattttgcgggaagaggaggctctgtacctgcggtgctgcttttcttgcggagactctaggaactatccgagctccactccccacaacatactcaaaggaacggagagaaccgggacccccctgcggggacccggaactgatctgacaggatggcatctgatgactttgacatagtgattgaagccatgctggaaacctcctattaaaaagaagaagattaaccaccaaagaaaaaagttaaaaaggattatcctagcaataccaccagcagcaccagcaacagtggcaatgagaccagtggaagcagcaccatcggggagacaagcaagaagaagaggagtcggagccataataaaagcaaggatagaaagccc

SEQ ID NO: 32628 - DNA, 467 bp, Glycine max
  Clone ID: LIB3051-090-Q1-K1-E2
cttagcaatagctacccctatcacaacaatactctattaggcaaaaacaccaaatgggagagggaaaagagcagcctaagaatgaaaccgagaagaagcccgaggaggccgtcgcagcccccaagaaagacgacggacccatccctgtcgtttacaaactcgacttgcattgcgagggatgcgtcaagaagatcaaacgcacatgtcgccacttccaaggtgtggaaaccgttaaggcagatctatcgtcgaacaaagtgactgttaccggcaaattggatgccgagaagctgcgagataagatcgccgagagaaccaagaagaaggttgacatcatctcagctccagccaaaaaagaagccgccgccacggaaaatccaccggagaagaaggttgaagagaagaaacctgaagagaaaaaaccagaagaaaaacctaaagagagtatggtggttatgaagatcaaa

SEQ ID NO: 32629 - DNA, 320 bp, Glycine max
  Clone ID: LIB3051-090-Q1-K1-E6
acgggctgctgcaagaaaaggtatggctagtgttgtcaacaagaccaaaacgcgtgactgacaacgggcctctgatcaccagctgatacacagacatacactaacaagggctaacacgaatcgcgccacgatacacatcatgcagctactgcgcatgactatcaaaccttacttccaagtgaacaagcccatcatagtgcatttacactgtgcccattccgaaactgcactgcgctaggtatccactattaatgatatcgactcaactgctgcactcactctcaaagacaagaccgccgataaaaccaagaagtaaggcc

SEQ ID NO: 32630 - DNA, 361 bp, Glycine max
  Clone ID: LIB3051-090-Q1-K1-F1
gccagctctcagcctcacttacacactgagacaagatcatctaaaaaatgctcagatgagactgtatcaacaagaaatgtggagacatcaaccttgtcagttaaggataaggaggagaaggcaaaaagatgcgagtttgttcaagggctgttgctgtccaccatacttgatgataatttatgaaggaaattcatggaggtggctgcttcagtagtgggctaattcacacgcgatacctgctatgtatgatttgcctgatgaaattgtttatgtatttgatcagagtggaataataagtagtagaaaatgaatgtaatttatgttatatgtgaactgatgcttttagttcaagagtttcatc

SEQ ID NO: 32631 - DNA, 288 bp, Glycine max
  Clone ID: LIB3051-090-Q1-K1-F11
aaaacacctttttctttacaacggcagtttcaagaagccagggggagaattcacataaatgatggtggagattcacggagaaatcgacccctttgatcaagaagaacatgaagaggaagaaaccgactatgatcagctaaagaagcggatgcagaaagatcggatcctgctgcagcagatgaaggagaaacgccccaaagaagaggcaggccaacaagaaaaacaagaagcatctaggcggaagaagatgtcaagagcacaagactctatcctcaagtacatggggaa

SEQ ID NO: 32632 - DNA, 454 bp, Glycine max
  Clone ID: LIB3051-090-Q1-K1-F5
aatccttccgaaccaacacatataaatccagcactctcttcttcttcttgtgctctccgcggggtcaattgaacctcacaaaaccctctttctctctctctagatctggtcaaatcccgaatcatttccgctccaatttcaatttccccgaacaagagcaaaccctaaccctttctctctgtatgatacctgagtatttccctcacgcgtgtagcattcgtgccgatttgtaaattctttcggcagtttaggttagaatttgtttttgctaagattttagggtattgaatcggtgagatgaatcacaacaacaacaatagagcgaggtaccctcccgggatggggcttgagcgcggcggtttcaatccgaacccgagccagaacccgaacttgaaccagaacccgagcctgaaccagaatcatcacgcgttccaagctcggccaccgtaccatc

SEQ ID NO: 32633 - DNA, 452 bp, Glycine max
  unsure (1)..(452): unsure at all n locations
  Clone ID: LIB3051-090-Q1-K1-G2
gggcaatagtctcagaaatgcggaaagccacaggggctaacataagagtaattgggaatgatcaggttccaatgtgtgtatcagataatgaccaattggtacagatatcaggagtgttttcaaatgttcaagctgcaatacataatgcaactggtagactgcgagatcatctttttgtcagtacgcaaaacagtggtggagcaaggagcctttcctctgttctagctggaggccaaccaactcttgctatttctcatagtctcaatagacattctttgccaggattacaggcaccacagacagtggctgggataaattccagaggcaccaatggtgttagtcggggattgatttctcgaaaaggtggcttagaacttatcagtgggagtaaaactgccattgttactaatacaactgtgcaaatngtggttcctgatgatgttattggctct

SEQ ID NO: 32634 - DNA, 392 bp, Glycine max
  Clone ID: LIB3051-090-Q1-K1-G5
tgtaaaatgaagagaactagagatttcagtttggatgggtttgttgaaccgttacataattgcgtatgtattaacgattgctgtggactttcaaaaaaaaaaaaagaaaaaaaaaaaaaaaaaaaaaaaaaaaacataatactagaaaaaaaaataaagactaacaaaatgctatacaataattcatattatcagtatatctggcaagaagttaatgttaaataactcgtacaacaatgacacaaatggaaaaagaagttttttgcgtatttgaatactgcttggaaataactaagaatcaactttttgaaaaataacaaattggccctaaccgaaaagccataaaaaaaaaatgggcaaccaaaatagaaaaatgagacaacaacctaaaa

SEQ ID NO: 32635 - DNA, 429 bp, Glycine max
  unsure (1)..(429): unsure at all n locations
  Clone ID: LIB3051-090-Q1-K1-G6
gataggcggaagcaccaatcagcaacagnggcgagggaggcaangaacgggggccgaaagcagggcatggatcaacacctgatattgacggaaagaatttggcaaatccaactgctttactgctaagcggtgttacaatgttgcaccatttgaacctccatgacaaagcacaacagattcaaaaagccatactgaacacaattgcagaacggaagtaccgaacagctgacctcggtggcacttcaaagacaactgaattcacaaaggcaattattgatcatccttagactttggctttggagtcagcaagaaactctagcttatgatttcgaatatcagtcaattgtctatgtattaacccaattaatccgaaagagtgggattaccttagctcaaaagaaaacttacccatgtgtgtgacattttaca

SEQ ID NO: 32636 - DNA, 424 bp, Glycine max
  Clone ID: LIB3051-090-Q1-K1-G7
aaaaaaaaaaaaaaaaaatataaaaaaaaaaaatttaaaaaaaaaaaaaacaagaaaaaaaaaaaggaaacactaaaaatactgattttcactgatatattatgcaaggctccgatttaaaagctttctgttatatgcataatactttacttatttgtacgactcacaaatgctttgcattttttccccttctcagcatatctggctcgaagttattgttaaataacttgtacatcaatgacactcatgcatctagaagttctctgcgttcttaatttctgcttgccaatacactcctaatcaactttttgcacacccccttgacctatgcattaagcccttgaactttgcttaatactctccccatttcttgttcgctctcaaactccctatttcacttgcctttccctctttacccttcctt

SEQ ID NO: 32637 - DNA, 234 bp, Glycine max
  Clone ID: LIB3051-090-Q1-K1-G8
cccacgcgtgcgctgacgcgtccggccacacgtccgatcacgcattcgggtcgatatgccctgccgtcaccagcaagatcgcgtattcgagatggactacgaaaacccttgtctctgaaatcgacagccgaatagtgaagtgtactaagcgaagccattgcaggcttgagaacgggcatgaaagccgaagggacaaggaatggttagaaggcatggacggctgacattatctcc

SEQ ID NO: 32638 - DNA, 318 bp, Glycine max
  Clone ID: LIB3051-090-Q1-K1-H10
acgcagggactgtgatatacccacatccccggatctaggtgatcgcggtgcatgaacgaggtgtgccttcgcgggatccatgcgttgaggcccatgaacgccccgccgccagcatgccgtgggacgcgcggcggcctgggggtggcgcggacggcgggcccgaggcctcgggcgcggcgcgctcgcgagcgcagaagcagtgccgcaagtcgtcgttcgccttctaccaggcggtgcgcgacctgctacccgtgtggctgctggaggatatgcgcgccagcgaggccttccactgggacgagcgcgggcgcgcccgcg

SEQ ID NO: 32639 - DNA, 451 bp, Glycine max
  Clone ID: LIB3051-090-Q1-K1-H5
atttttcttttatgcgagggcaaggcttggtgcaatggtaaattgttgccttgtggtttggaggtcatgggctcaaatcctggaaataacctctgcttgtaggggccttgataagggttttgtggatactggttattatctcaaatcaattacaatatatccaataaaatcctgtggaggtttcagtgcaagcagttggcctcttagcaacaatggcttgacacatgatcgcgagtggattctcaaaagcctaactggtgaaatacttacacagaaaaaggttcctgaaatgggctttataagcacctttatagacctcagtcaaggaatgttgtttgtagaatctccacgttgtgaagaaagattgcaaattcggcttgagtcagatgtttatggtgttatagaggagattgaactatatggacagaggtacgaagtatatagttatgac

SEQ ID NO: 32640 - DNA, 440 bp, Glycine max
  Clone ID: LIB3051-091-Q1-K1-A12
ggaaaaatggttctgtcggatgccgttaattttgctcggaatttcgcagttatggtcagaggtcgtggccctgacccagaagggttgaagatgagaaatcacgcttttcatcaataccgttctggtgaaacaaccctttcagcttcgggggtacttgtacctgatactctttgtgattctcaagtagctacgcgtcttaatggtgataactgtgaggatagggtattggttgtaacggttgcttcagttgttgagccttttctgtcacctcaacagagagacaatattcctcagggtaggccagacttttgccggtgttcagattgatgttatgaccgaagaaaccaatgaaaaatccaatcggggaactcctttgtggcttttggcacagcttttgtcattagttgatattcctgcttcatcgaattgtctccagtcac

SEQ ID NO: 32641 - DNA, 338 bp, Glycine max
  Clone ID: LIB3051-091-Q1-K1-A4
cttagtcgaacaaggtgcgatgctgagcaccatggttggctcctatgaaaaatgctgctaggacccgggcaagttacgaagtgagaagtggatattgtctgtgtccatgtctatgacacggtgattgacacgattatagggaaatttacatggaatgaaacaggctatgaacagttgcaaacaatgggaattggactgtgtattgcagtcctgatcatatcagcatccactatagtggctaatgtacgtgtgcttgttccgaatcagcatggcattgatgatgaacctgttgatgaaccacttaatatactatggaatatatctcagcatttcttata

SEQ ID NO: 32642 - DNA, 324 bp, Glycine max
  Clone ID: LIB3051-091-Q1-K1-A8
tgtgatctccacgcgttcggcagcaccttttgtccctctcctccttgccaccacactttttaaaatgttgttgttggcagactcagtcacccagccttggcggtgggtaactttaataacacccaccacaaagaggtaattttgatgatttggaattggtcatggccaaagtcagaggtggacctctcttccccgcggcgcacgttagcccccctcccaagcggtgctcccctcctcattcacccacgtcacttattcagccgcactttaacatgatcaacaagttcaccaccacaccctaacctaaaaaccctttcttttctc

SEQ ID NO: 32643 - DNA, 341 bp, Glycine max
  Clone ID: LIB3051-091-Q1-K1-B1
acacgacacactactctaaactttacctactgcactttttatcacgcatcctgttcctaataacgaattggttcttaattacagtccagatatcgattcttccaagttgcctgaaccacctgatgcgtatctgcttctggatttgtatattccttcatatacactacgcctctgagggcccatgattcaggtgctttaattcaacatattcaagggttcctccgtgggcatgcatttcgcgtgcaatcactttcaggaatggatttagatcaatgtgtatctataaagcacgcaattcaggcggaatagattgtatggaaggttcaatcttgcatcatgcg

SEQ ID NO: 32644 - DNA, 383 bp, Glycine max
  Clone ID: LIB3051-091-Q1-K1-B10
caggaatcggttacgctctggtagcactaggaccctctctctccctcttcgtttccgtcagttgcaaaaaacccttcctcagtctcacagttctctccagtacgttgttgtggcttattagtttgattgtgctgtctggaatatggagggggattttgcctctcatcacaacagcttcgtggccttttggaatactcattttctcatctgttgcttttcaagaagccctcagacttttcttctggaaaatatataagaggttagaagacatgttagatgcctttgctgacagagtatcaaaaccacatcttcacctgacagataagatgctgattgctctggctggtgggttgggtcatggtgttgcccatgctgtgttcttc

SEQ ID NO: 32645 - DNA, 456 bp, Glycine max
  Clone ID: LIB3051-091-Q1-K1-B12
aaattctatatatagcttataagctctatgacttgtgcctgtgttagacttcaacattggaggtagaggcttacccagctttagatgaattgacctctcagcttagcacactcaatcttgaacgtgttagacagatcaagagtcgtttggttgaactctccggtcgtgtgcagaaggtatgtaatattcatcgcccaacacctgtcaccatgcacatatgattttacataagaattttggaaaataaatgaaatgaatacactctatgataatattctgtagtactcagcagtgttcaaattgatttgagcattagcaactaaccgtaccctttcattcttcttacatggatgccaacatgtagcaacactaaacaagtctttaagctgttcaatcgatcttaaagaacttaattgtaacattttgcctttcaccgtggctatgtgcaacttctgg

SEQ ID NO: 32646 - DNA, 257 bp, Glycine max
  Clone ID: LIB3051-091-Q1-K1-B8
cccacgcgtccgctccgaaggattcaagttcagatggattcaatgtgccctccccaaaaggacatgactatgttaatgatacactcttttttagtattttttaattcttttgcgacgaagcgtaagttagctttttatattccgtcatccacaggacaaatttcgatgtattagtatattgatactatacttatacgataagcgtggtaaattccaatttaccagcgaacataatatttctagcaaatgatataaat

SEQ ID NO: 32647 - DNA, 165 bp, Glycine max
  Clone ID: LIB3051-091-Q1-K1-C12
ggcagtcgtaccaagaagtccacattacgatatttcatcgtcgtgcaagtccactggcggcgaggatttaacacttcgggcaattctaacacatgtcttctcgacttctgactctactgtatcttctgaatctgcatccactaccagctgtcatattgtaagccc

SEQ ID NO: 32648 - DNA, 438 bp, Glycine max
  Clone ID: LIB3051-091-Q1-K1-C3
gaaaagaatgtagaaaatatatagttatcagttacaactttcagcttacagaaattgctggtacttgttggtgttgattttttagtgagatcagagtaaaactccaagtaattagcaaatagaaaagtacaacattataggagcaactaagattaaaccaagattaaaccagtagttgtaaaagtttacactaacagtgaatcaagattaaaccagtagttgtaaaagtttgatctatgattgtaagtatgtttattttaactaaggtttctctagcatgaaacttgaaatttagttctgatgcttccgtggtcattatcaagttttagatctaatatctgatggtgacaccccgagagctctccctcttcataaaaaaccttatattgtgcatgtataggaagatttattttatttttttcataaaaaaagaagagg

SEQ ID NO: 32649 - DNA, 430 bp, Glycine max
  Clone ID: LIB3051-091-Q1-K1-C5
caactacatcgcttttgcttcccctgaactggcgtaaaccaaagccctctggctttggggcttcgctagggttcggggattcaccatttccaatgatcttcttctctcggttctacacttctcaacttcagagggaaattcaatgcagctgtttctgaggagtttcaagtgatttctgtggttctggttcggtttattgaggatcttgagggggcttttgcagaaggctgtgactctgtgacaatgccttctacagaaaatcagggcttttcgttgtccttttcctcgtttggccgttccatatttggtgtcgggcaggagcaggttcattctgtggaagcaagtaatgaatctgattcctgtaattatatacagctcgggtcattccaaaagcgtgttaccgatcgatttcaagacctttctgtagcta

SEQ ID NO: 32650 - DNA, 350 bp, Glycine max
  Clone ID: LIB3051-091-Q1-K1-C9
gcggaagcacgactagaatcgaatataataggttagttagggtaccgtcacaattacgaagagggttgtactaagcctcgaaatttcggttgcagagttggtatcggattgtttcaagtgttgcaccgaagactccaatgatgccactaccaagattacgtactctggagctttgctggaagtctgcatgaggaaacttgttttctatcctgaagttgttggctctattgaagatgaaaaagatcaatttccatcagtaaagggttcaatatgtttttaactcttcaccaaagctaattatgctggatgaggtgggtcagcaaaaggaaacaatcagaattgataatggg

SEQ ID NO: 32651 - DNA, 198 bp, Glycine max
  Clone ID: LIB3051-091-Q1-K1-D10
acggttcacacactaagttctgaaaaatgagttccaaagtttttcttattctacttatgttcatgaccactatacttttgagctcctctgaggttgcacccgatgatgcataccagaattttgacaaaacagatgggaagcgtagtgcaaatggggtagatgaaagcaaatattggcgtggtggctatggcgactatg

SEQ ID NO: 32652 - DNA, 308 bp, Glycine max
  Clone ID: LIB3051-091-Q1-K1-D2
cccacgcgtccggttagttcacacactaagttctgaaaaatgagttccaaagttcttctggttctgctcatgttcatggccactatacttatgatctactctgaggttgcacccgatgatgcataccataattttgacaaaacagatgggaagcgtattgcaaatggggtagatgaaagcaaatattggcgtggtggctatggcgactatggtggttggcgtggtggtggtagtcctggtggctattgaggctggcatggtggctatggtggtggtcattgtggctattgtggctggcgttgtatcta

SEQ ID NO: 32653 - DNA, 429 bp, Glycine max
  Clone ID: LIB3051-091-Q1-K1-D5
attttaggttcttggatatcaaaagcttcacgacacaaaagggaaactcaaatagaacataatgttttgaggttccaacaaccaagtttggatcatcattacaaatgcatcagaggagggtctacatatcaagaatgcaatagaaaatttgttgtgaaggcaatctctaaacaacctcttggttttgaagctcatgcttccaatcctaagaacattttggactctgtcaaaaatgtattgtctgctttctactggttttcctatccatacacaatgattggcataacattatgcgcattttcttcatctcttctcgcggtggaaaaattatcagatatatctttatcatttttaattggcgtgttacaaggggtgtgctgcctcaattgtttattgaaatttatctttgtggtgtgaatcaactgtatg

SEQ ID NO: 32654 - DNA, 268 bp, Glycine max
  Clone ID: LIB3051-091-Q1-K1-E1
tcggagttctccccggcgggatacagtcccgttttcccttctttatcctgttttcctaaaagggtgatgttcctaatcgaacgggccttgagctctgacccctacgttctggaactcgtctaaaccctagacgactccttcccattctatccctccaccccactccctctccagaaccttcgcctctcctccttccaatcccttctcttcactccatggcccttcctactcgacgagcccttccgcttcacctacctatgcttcattc

SEQ ID NO: 32655 - DNA, 213 bp, Glycine max
  Clone ID: LIB3051-091-Q1-K1-E12
accacgcgtgcggccacgcgtacgctcacacctaactatgtattacggagcctcagggcagaatggtgtgaagccaatggcatatagccaccaaaacgacctaacgattcacaacctaataaaataacatcaagctactcttctggttagcaaaataagattgaaaggcttctacaaaagctcacatgagtgagtactgaagaccagagatca

SEQ ID NO: 32656 - DNA, 375 bp, Glycine max
  Clone ID: LIB3051-091-Q1-K1-E9
gcttcctactgttcaagaaggctccgaggcatgagatggcaaattcgcccgtgactttatgtaatgttggaaaccgaacatgaaagattgtttgtgacaagttgcctacaaaagaggctgcagcaacagccatagtagcttcatgaagaatgcattgattggtgatgatttgtaagctccaatatagatgcaaacttagacaagtggggtggatttgttaattcatgtttcttgttgcttacatttttaattttcctcttttgttttttgagctgcttgtagagttggctttagagatttgttacatatcgggaagccatggtgtactttgaagcaagattgtatgtatgggtagagaacctttactgatatata

SEQ ID NO: 32657 - DNA, 205 bp, Glycine max
  Clone ID: LIB3051-091-Q1-K1-F11
acggtcggccttaacgtacttccgtctttgaatgtatcttatcatgactgatcaatccacaggggtggatactatacaatagtctcccacagcattacttacacagcatgtatataaaacaacttataaaacatactcatcatcatcacaagatgatgatgaatactattaaccctagaactctaaaatccaataacattttcca

SEQ ID NO: 32658 - DNA, 368 bp, Glycine max
  unsure (1)..(368): unsure at all n locations
  Clone ID: LIB3051-091-Q1-K1-F9
cagtctagttgatgtttcgagtccaaacagacgcgtggagagcaatcctcaactttgggggaatggtgctgggaaaggtcatgtcaggtctttagttagaaatttatggtcaactatagcgggacgtggtagtttgaagagtcatattgttcactgtcaggttcttcaagcctgagatccaaactcctctgatgataatcttggttatacagttagggaaattgttggtattttgggaaaatcaaattgaaacaggtttatccactttcctgtgtgggaaagagattgtgcttcattgtaaagaagaggttaattgtatgattntggctatagaatgaggtcattcctttacaattatgaataggggg

SEQ ID NO: 32659 - DNA, 367 bp, Glycine max
  unsure (1)..(367): unsure at all n locations
  Clone ID: LIB3051-091-Q1-K1-G11
cttgctgggtttgctgggtttgccgtgtttgcgttctttggtccatcggagaagaccctggtcggttttagcttcactctgtgctctctctttatctgtcaacgatccaagtctacttctgaagcatctttttactgtcacttgacatggcatcaagacaccgtgttcacagagaacccttgaatgctcgaaggggttacccaccggaagggccatatgctcgggtggctcccatgcctcgaccactgcctnctattcctcctcatccgtctgtgttggaagaggaacttgaatttcagcatgccgagatgcgaaagctcgtggcagacaacatgagggtgattgatgaccgaatggcgttgcagcg

SEQ ID NO: 32660 - DNA, 381 bp, Glycine max
  Clone ID: LIB3051-091-Q1-K1-G2
gcggctcttgaatattctcagcttcagcaaaactactagaaaacccatgtgatcaacttttggaggtgcgaggtaccatgccatgacatttggaattatgctgattttctggtgctcctaagttaatgcaagcagggatttggagtacctcttcaaattagccatttagatgaatgaataattttgcttttagaatttattgatagtaaaacttatctaagaactgtaaaaggttgagatatattcacacaatggttagtgacaatgacgtctacaatcaggggaaactagcatggtatgaatattggtgatagtttaactgagcatttatctgtatacttttacaaaacccaattattttcaatatatagtttaaaacag

SEQ ID NO: 32661 - DNA, 333 bp, Glycine max
  Clone ID: LIB3051-091-Q1-K1-G4
gcatgcaaacactaccatttcctgatttcgttataacagctacacctctaagagtaatcttggtgcttaaggatactattggaagaccttttataattagagtgacatctctgaacttattaatctgatacatctacaccatgaaatgacacgacgatcatgagtttaattttacctgcaaactctgctatagtgtgttactcctcttgctgaacagtatatcgtgccatagcctatatagaggtctacatcagcttgggtccacataactccagctaagtttaagagctttctaataacaaaaccgatgagcactaatactaccctgatcga

SEQ ID NO: 32662 - DNA, 303 bp, Glycine max
  Clone ID: LIB3051-091-Q1-K1-G7
ctcacgcgtacacacacgctttctgtaaggttcactttatatatatgacaatagcgatgatggataatagtggaacatatatgaaaaggtcaccgtcatgtctgtactgactcaaggacttgctgatgctgattcaatcacttgcattgcatgggttatcttctacctcaatccaaagttagagcttgtatctcttgcttaacgagcaatcgtcctgggacgtgaactatataaagctctacatgaccttgagacgtcagaggatttgttatgagtatgagcttcatatccagctaacttatt

SEQ ID NO: 32663 - DNA, 360 bp, Glycine max
  Clone ID: LIB3051-091-Q1-K1-G9
aagacacttattttgcattcccctaagttggtgcattagaagtaaccagtccctagtagagcctagtcgtgtcccagacgggccagagtcagtttccaacaccaacacatcagctaccctcaaacgccacctagggttagggtttctgcaattccccaatctctatcttccaaaaattagggttttttcaagccatggcggacggctactggaaccggctacatgcgtttctgcctcactccggcatgctcaaactgtcgcgttccgactacgatatgcctgcttacggtctgtctttcaggtaatgagatgcataatcatattgctcgtgatgatgaccgtactggtcaccgaatgcta

SEQ ID NO: 32664 - DNA, 384 bp, Glycine max
  unsure (1)..(384): unsure at all n locations
  Clone ID: LIB3051-091-Q1-K1-H10
atcagcattcagcatcgcttttttctattcaacgactccgttccgttctctttcttcttcttcgaaaccctaataagcttctgcacttccttctgattccacttttggtaatataagcccctcctcttcttctcagatctgaaactacttgttttaactttttctattcaacgactccgttccgttctctttcttcttcttcgaaaccctaataagcttctgcacttccttctgattccacttttgcttcaactgggaagatactgtanggcctgggccacctaatgatgagatatccaatttctacataagttgccattgatacttttttaatcaaatggattcagtgcctgctgatgtgtctaattcacatactattaatga

SEQ ID NO: 32665 - DNA, 142 bp, Glycine max
  Clone ID: LIB3051-091-Q1-K1-H11
acgcccacgcgtccccccacacgtccgcttttttttttttattcttttttattattaacttatttgttgtttattacattgggtttttttttaccactaacctttttttacaaacccatctaattttatcttcaatcaatca

SEQ ID NO: 32666 - DNA, 380 bp, Glycine max
  Clone ID: LIB3051-091-Q1-K1-H2
acgcacgcatgaggccacccgtccaaccacgcatccgtcaagaacactttttcgcatgcctgcaactccaccgagtaacgaacgacgaatatttacgctattcactttcactcctctccaaattacgttaatcaaccatacaatgaaccacaccactgacaatggaacccccatctctgaacacaaagttcttattcaccaatccattgcccgttacttgtaactcagtgccttctccaaaactctcaaaaaatttctcttcgaagcgcatatcgagaaaaacgatttcgagggatcaccatttgatctggaacaaatgtgtctcaagtatttagaaatatgtgacaaatatggtaagtcaaatattaattatcaaaatg

SEQ ID NO: 32667 - DNA, 261 bp, Glycine max
  Clone ID: LIB3051-091-Q1-K1-H3
cgatcttctgcaccaatgtgcaatccatacaataacactggtcctgcagcaatgcaatggtgtccgacaccaatggttgcaattcctggcatgtgcccaccaagcattcctttgcaatttgtaccaccatcatactggagtggcacacaactttggaatgctggaaccgggacagtgtcaataggatccaatgcttgcctttaaaaaaaagaaaaaaacaaaaaaacaacaactaaaaaaaacacaaaataacaccaaatc

SEQ ID NO: 32668 - DNA, 441 bp, Glycine max
  unsure (1)..(441): unsure at all n locations
  Clone ID: LIB3051-092-Q1-K1-A7
gtctactcttgagaagagtagacaatattctaccatggcaatggagatggtaatttcctgggtttcgagtagaggaaggaccaagcattggaggtgggaaactttagctggagttgtaactgggttcttaacttcattgatctccataacctttattaggttccttcaactacttctgccttcgctatatcaatctttcacaacatggatattttcttggcgtgtcaatgctgttctcatcaggcgcgcttgttttcttttggcatacttatcttttgtggcctgggtagctatagaatatgggaagaggcttggtctcatggatatattcagacttnctaaatcatagcactggtttttgtgaagagcaatgcacttttccgtgaatccccatgtaatattataactgtagcaggtgatattcttgtcccgtgataaatg

SEQ ID NO: 32669 - DNA, 425 bp, Glycine max
  Clone ID: LIB3051-092-Q1-K1-A8
gactactcttgagaagagtagacaatattctaccatggcaatggaagatggacatttcctgggtttcgaggtaagtaaggaccaagcattggaggtgggaaactttagctggagttgtaactgggttcttaacttcattgatctccattgcctttattaagctccttcaactacttatgccttaagtatatgaatatttcacaacatgggtattttattggcactgtcaatgctgatctcatcacgcgcgcttgttttcttctggcatactaatattttgtggcctggatacctatacaatatgggaagaggcttggactcatggatatattcagacttgctaaatcatagcactggtttttgtgaagagcaatgcacttttcattgaatccccatgtgatattataactgtagcaggtgatatt

SEQ ID NO: 32670 - DNA, 447 bp, Glycine max
  unsure (1)..(447): unsure at all n locations
  Clone ID: LIB3051-092-Q1-K1-B1
gaggtttcgctctctcagtttcttttccccaaattgtttttcatctaacagtgttactttggagaaccctaaccctagccccttcgcctaccttgtaaccttcctttcgatccttcatctcgcagacaatgggtgaaactaaggacgaagcatacgaggaagagcttctcgattacgaggaggaagacgacaaggcccccgactccgccggagctaaagtcaacggcgaagctaccaagaagggctatgttggaattcacagttcgggatttagggacttccttctgaagccagagcttcttcgggctattgtggactcgggatttgagcatccatctgaagtgcaacatgagtgcatacctcaagcaattctcgggatggatgtaatttgtcaagcaaaatctgggatgggaaagactgctgnttttgttctgtcgactctgcagc

SEQ ID NO: 32671 - DNA, 282 bp, Glycine max
  Clone ID: LIB3051-092-Q1-K1-B2
aactactcttgaaaagagtaaaacaaatattttaccatgacaatacaaaatggtaaattcgtgaatttcgggtaaagtagggaccaagcattgcaagtgggaaactttagctggagttgtaactgggttcttaacttcattgatctccataacctttattaggttccttcaactacttctgccttcgctatatcaatctttcacaacatggatattttcttggcgtttcaatgctgttctcatcagtcgcgcttgccttctattggactacttatcttctga

SEQ ID NO: 32672 - DNA, 417 bp, Glycine max
  Clone ID: LIB3051-092-Q1-K1-C4
cccacgcgtccggatccaaatccaagtactgttgggttggagagaaaatgcgtccctgcggaaaacacgcaaaccctaaaacgcgaaaagggttctaagaatttgcgaaggaaagagctagcggagatggagattcactacagtaacagctatttcgagaggcgccccatcctcaagtccaaggctgccgctgtcaaatgggtcaaagaatgaggataccttgaagaccttgaaagaaaaggtaaaagagccttcagtgccagagccagaacctgagccaactactgaagtactttttctttgcagctatgatggctgtggaaagacattcatagatgctggtgcattgaggaaacattctcacatccattgagagaggcagtatgtttgtcactacgatggattgtgaaagaaatt

SEQ ID NO: 32673 - DNA, 414 bp, Glycine max
  Clone ID: LIB3051-092-Q1-K1-C6
cccacgcgtccgccattttggaacaagtatgtcaattatacaaatgattttggtaggaagggtcacatcttggattcatagtctgccatgagatgcactatggttagaaagaaaaagtgcatgaattcgaaagggacgagtaaatacatgtttcatctaaaattttgcggcttgagaaggaaatataaaattggttgagagggcaaagtgatcagtacatagtgggtggaaaatttgctgccaccccctaacatttttgcacacacaattgccatcctggcatggccttaagaatcaaacagtcttgtgacatacaaacacgtcctatatttttggtggtgaaaggatatactattattggtcttatgtggtgctactatatcaaaaattccttagtgaatgttcgagaataaa

SEQ ID NO: 32674 - DNA, 326 bp, Glycine max
  Clone ID: LIB3051-092-Q1-K1-C8
aggagcctatgaaaaaaaaagaagctagcattgctgcaacagtgctgaaatggccagtggtgatcaagttacttttgttctttttgatgggcttcgaaagtcacaacaagggaaagacaaaagcggtggatgggtcaaatttttacccttttgtatttggtgctttagggtaaaaataaacaaatcaatttggaaggggctggaccatatttgcagagggattacggctccttccaattgttgaatcacagtggaatcattttgggggaatacttgtcagaagtaacatctgattacaacctgtccacccgtattactttactaca

SEQ ID NO: 32675 - DNA, 410 bp, Glycine max
  Clone ID: LIB3051-092-Q1-K1-D7
cggacgcgtgggttcgcaattcaatctctttctcttcctcttcctctctctctctgtctggctttgtcgtacctttccttcatcctcagggcgttttgtctcattttgttattcaagaatcaattaaaaaaaatgactcatatcctttgatatggaacattttcattttctgtattcttctttttcattctttcttttttaatggattgtaatggaagttatatagtttaacactttgccttcattccaaacgagggatatgtaaataatttattttgccgcgttttttctcttttatttttttattctttttgggtgtgtttgtttgggttttggttctttgtgatgtggaatccgttgtttggacttaactgaagccaacgcggtaaccagagggaaacgagatcgtg

SEQ ID NO: 32676 - DNA, 397 bp, Glycine max
  Clone ID: LIB3051-092-Q1-K1-E3
gtttgtacacattcgaaaacaaatccttctttcacttaacaccatttcactgactcacgcgctcttcggatctaatcgtagagaaactatcatttctcttcaaccaccgtcgccgatggcgctatcggcttccgacgttgcagccatgtactcgctgctttcgaattccatgagtaccgatcaccgtctccgcggtccggcggaggacgcgctcgcccaatcggagtccaggcctggcttctgctcctgccttctcgaagtgattaccgcgaaggatttggggtcgcagacggatgtgcgcatgatggccaccgtgtatttcaagaacagcgtcaaccgctactggcgccaccgtcgcaattcctctggaattagcaattaagagaaaatgcacctg

SEQ ID NO: 32677 - DNA, 450 bp, Glycine max
  Clone ID: LIB3051-092-Q1-K1-E4
cccacgcgtccgctcccatggccctcaccttcgagctctgccgcgccaccggccaccacgtccgccgcatcctcagctacatctcccaaacctcaaacctcaaagcaatagtcttggacttcatgaactacagcgccgcacgtgtcaccaacacgcttcaaatccccacttacttctactacacttccggcgcctccaccctcgccgctcttctttatcaaaccatctttcacgaaacctgcaccaagtccctcaaggacctcaacacgcacgttgtaatcccagggttaccgaaaattcacactgatgacatgccagacggagcgaaagatcgtgaaaacgaagcttacggggttttttttgacatagccacgtgcatgaggggcagttacgggattatagtaaacacgtgtgaagccatcgaagagagtgttgtggaagcgttcaacg

SEQ ID NO: 32678 - DNA, 428 bp, Glycine max
  Clone ID: LIB3051-092-Q1-K1-E5
cggacgcgtgggattaactggtttcacgttcataggcgtcaatgggagtaattcgatgtggcgacataatattattggtccaactgggcctcgctatttcctctgcaccgatggaaatcactgtgaaagaggccagaagtttagtatcagcgttgagtctcatcctgattccgctgctcctactacactgtcattcagaatcttatctgcatttctctctagcttggctgtgtatttcttcactgttactagttagttactttgtcgtgtaactctacgaggattttgcattcttgatcctagcaattctttgaacatattcactatagatattataggattgctgggttgattgcttcaataaatgttgtactgctacttacaacatactattgtaactttaaatttaataaagacgttacttcaat

SEQ ID NO: 32679 - DNA, 194 bp, Glycine max
  Clone ID: LIB3051-092-Q1-K1-E6
gttgatgtgcatactgcatacctatgctcattagtacattggcgattgaaagaaaaatggggaaagatgttggatgtgcaatacagctattttaaacaagttaaccgatttcatatggatatttcaagtgaaaaaaatggagcattctattaaccaagccaataaaggttgatttggaagattatttgggtaca

SEQ ID NO: 32680 - DNA, 239 bp, Glycine max
  Clone ID: LIB3051-092-Q1-K1-E7
gggttaaaagaaccttagaaaaataggggcgcctatgattattttgataaaaaaaaattggccaccaaggaaaccccacatgctcgttgggcatggaactttgaactaaaacatttaccatgcaaacacaactgggggcccattccaaaaacacacttaacttgccagcagtagtacacaatttacaacgcatacgagggccaccaaacttgggtttttcatcatcctcactagcattt

SEQ ID NO: 32681 - DNA, 261 bp, Glycine max
  Clone ID: LIB3051-092-Q1-K1-F1
gtgcttatcaaataagcacttatgtatatgttataagccttattgaatgaaggaggaaagagggctaacttgttttcttataagttgtaagttattattaaaagctatattgaataacctattgaaataagctttcaagtttttttaaaaaaagttcatgaacatgtcaagctatttttataagctctgtcaaatatttatgcaagtgctcaggtcataaaaataactttaaacaagctctttcaagtactctaagttact

SEQ ID NO: 32682 - DNA, 174 bp, Glycine max
  Clone ID: LIB3051-092-Q1-K1-F3
ctgcttatctaatatgctcttaagtatatttaataatctctcatttaattaggtatctactgaaatcttgccaaatttcttatgaataatcagatattattaaaccccatatctaataacccattgaaacactcttacaagactttttaacattaatcataaacacgatacact

SEQ ID NO: 32683 - DNA, 436 bp, Glycine max
  unsure (1)..(436): unsure at all n locations
  Clone ID: LIB3051-092-Q1-K1-F4
ctctcacacactcaaccaaagacgaaggaagaagaagaattacaaagtaccacgaaacaggctgcgacgacgtcgttctttgcaacttccagttcttgttcttgatgaatatgacaccagtttgcccctttgtcaaagctgctcgccccgatgataacaatgcctctaagaaatctggcgaaaactctatgaaacatcaggctgagtctgagagtaaggtgaagaaagaggttaatgactcagctagtacctcaccaaagtgcccttttggatatgattcacagtcgtttaagattggtcctcttagctgtacggtgtgccaagcacttttatttgacaccagcaaatgtgtaccttgttctcatgttttctgcaaagcatgcatatcgcgctttaaagacttgccgttatgntgggctgatattgtgaagatcga

SEQ ID NO: 32684 - DNA, 281 bp, Glycine max
  Clone ID: LIB3051-092-Q1-K1-F6
ttgcacgcgtgggttgccggtgagaagctctggggggaagtggagagcggcggactgatgagctatgcgaaaattaatgtcgaaaacgggtcggattcgtgtacgaatatggcgtcagtcggcgggactgacttacctgacaaacgggtgtatgtgcttgcctgtgggctgtctctctagtactatatgacacatgtggctacgcctcagagtgccgacaccaaaagtgaccatgacatagctagtgccttagacaagtgccatgctggatatgatgtcac

SEQ ID NO: 32685 - DNA, 394 bp, Glycine max
  Clone ID: LIB3051-092-Q1-K1-F8
tccacgcgtccggatagatctaatgaagatcactaggtacaaactacctagcgactattggaaacttcctaaacctaaccatctaccatatcttgctcatgctcaaaattatatcactcaatccgattactcatacttctaacccatgatgatagcagaacctgtagtcaatgcgacgagatctctatgaaccatcaacttgagtaagtcagtaattcaatgaaagacgctaacgactcataatcgttgctcactgtagaacccgattgtatatgatacaccgataaacaagatagttgctacaacctgtaccgagagccgagctcttatatacaacaccagccaatgtgtaccatggacacacgtaatctgcaatacattcacatcgcgctct

SEQ ID NO: 32686 - DNA, 389 bp, Glycine max
  unsure (1)..(389): unsure at all n locations
  Clone ID: LIB3051-092-Q1-K1-G1
cccacgcgtccgctctgaaccatgtcatacaactgaatctgatagcaaagcggttgaatggcgtgcctctcctctttgtttaccctaccagatattgcaaatacagcaagatcatcatgagtgggatttcggaaaagaaactcatcagaatcgatgctagtgctgatactgtgtgcccatggtgctttgttggcaaaaagaatctagacaaggccatagcttcctccaaggataaatacaactctgagataatatggcatccctttcaacttaacccctgatgcccctaaagaaagcattgacangagggagttttacagaagtaaagtttggatcacaatcagaacggatggaagctcggatgtcagaggtgttcaagaatgttggtc

SEQ ID NO: 32687 - DNA, 286 bp, Glycine max
  Clone ID: LIB3051-092-Q1-K1-G5
aaaaaaaaaacaaaaaaaaaaaaaaaaaatttaaaaaaatcaaaaaaaaaaaaaaaaaaaagaaaaatttgaaaaaataaacaggcggccactttaaaagactccctcttacttccacctactttcaacttcctacctctcctttatattctcctaaattcatttcactctccttctttttacaaccccttcacttgcaaaacctttcctttccctaccttaacctcctcccaccaaatccccttttctccaactctctttataccaaatagccccataccgatca

SEQ ID NO: 32688 - DNA, 259 bp, Glycine max
  Clone ID: LIB3051-092-Q1-K1-G7
acggtgacagttgtgactcgttctttaccgacattatcttctttttctgtctgatgagtgtcggttttctgggtaacctgcgaaggtcgaactgcagctgtaacatgttagttgatgacgcgcctgtccgtgcggcaacggatcaaggagctgctagatggacgctgactagagctacaccgaatcaacacttcaccgagacactggtcatgggaatgtgtccacgataaggctcaattccatagagctgacataagtg

SEQ ID NO: 32689 - DNA, 140 bp, Glycine max
  Clone ID: LIB3051-092-Q1-K1-G8
acacgtgcgctcaacttaaataggtctatacagatcctatgatctagctagccactccggggaatggggaactcctagactgccattttcaaatagctgtacttgccatccgaaatgaaccggatattcatgtaccgtac

SEQ ID NO: 32690 - DNA, 438 bp, Glycine max
  Clone ID: LIB3051-092-Q1-K1-H1
ctgatgtaaattcaaatagtggaagccaatttacctattatttgactgctcgtttgtcagcattatgccaaatgattggtctcacccccaatgaggctgatacagatgtctacaatgaagcagagaacattatcgctaatgctttcacggagtgggaaataattctttgctcatcaactaccatggatttagtatgggcgcaagttataagtgatccatttctaaggcggattattctaagatttattttctgccgatccgtgatatctattttctgcacacctgaagaaagtgaacagtaccttccactttgtttaccctatctaccctcttctgatgcaccaacgtcttgagccgtgcgttctgctgttgtgcaacttgccatgcactttgacgttgctgactcctttcactttactgaaacataagattttggga

SEQ ID NO: 32691 - DNA, 300 bp, Glycine max
  Clone ID: LIB3051-092-Q1-K1-H5
accactcctacgactagtcggtctagactctggaggagccttatacagatccgcatgagcgctcatacgcaaatcggggatttatctggcatttactataaccctattcaaataaccctaacctcaccgataagtcccaattgcaataattgaatgctaaatatcaagcgcatcataactatgactaccacttacgctttctcacagatactctgatactacgtactcttatacctatagggatgcagaactttatgctctaggcgttagagtgtgtaagtcagacactgatgacagttt

SEQ ID NO: 32692 - DNA, 320 bp, Glycine max
  Clone ID: LIB3051-092-Q1-K1-H7
cacccacaaaactcataactcaccaacacacaatcaaagtggaaaaaaaaagaagcttcagagatttcagtgcaatttgctgagaaaatgcaacccttgaaaatggggttccgtgagtacatcgaagctttggaggaagaaaggaaaaaaatccaagttttccctaaagagcttcctttgtcattagagcttgtcacacaagcaattgaggcgtgtatacagcaattgtgttgaacggttgcagagtacaatttgaatgcccaatcggagtgttcggagcagtcatcaacggatggacctgtttttgaggagttcattat

SEQ ID NO: 32693 - DNA, 395 bp, Glycine max
  Clone ID: LIB3051-093-Q1-K1-A1
aacacgcgtacgcatccaatgtgttgcctggtgagaggacttcgtctatggaacgacagcgcaggactggtaatatcaaccaatgtcaatgcactagcgagttatctagatatatattgaacacacaggccatataagaagcgtgcaaaattttcaccgaagggttgctagccccacgatagtgctgctccaaagataggtttgggtgaagaatctcaagagacggactccacatgatgtctacgtggcgatactcatgttcataacatctgcaccattctagctaacattgtcacgctgatatgcactaatggcagaatatatgagttcacttataagctaacttgtacatatcatctttcatacatgctctaaactggagcaactaactataa

SEQ ID NO: 32694 - DNA, 372 bp, Glycine max
  Clone ID: LIB3051-093-Q1-K1-A12
catggctgccctggacgcagcagaccgcgccaagaagaagtgacgctggagccccgggtgctggctggccacctgccctgggagtcttgctgtgccacacagctccccaccccctgctaggaggtcccagtctcacgccttcctcatgtgttgttctacctgctgggatgggggtcagcctctctttggtgacgtcacgttctctgggatcctgaggacccgggcctcaaatcagggaggatacgcgggaggccccctccatccaggcggtgctcctggggtgccgggaccgggcagtgtcacaccctgcctgctcagtcctggggtccgagatgctagggacgcttgaatgaaggatgtggtgttaaggcc

SEQ ID NO: 32695 - DNA, 459 bp, Glycine max
  Clone ID: LIB3051-093-Q1-K1-A8
gtcaatttctttgactcagagagtgatgttacacaacatgagaagcccctaacaagcccagagaatcgtagggaagccttacctctgtcaatttttggtgatgagacaccagatactgatgaacatcctgtgtctcaagatttatctccctatacaccctcatccccaataaggaacagcttcactagccctggttccaacttttctatcaatgacatatggaatttatataatcaagctgaaaaccaaagttcttctaatgtgacaccaaaagcaagtgaaaatcagattcatgccccccctgaagtatcgggctccagtttggttaccggtaatgatgatttagatgatgacttctgggactataaggatgccgcaactgaaacaagatttaccaatgaatctgcacagaaaacttcttcaccacaagtcaatgagaatggggtgcagtctttccca

SEQ ID NO: 32696 - DNA, 425 bp, Glycine max
  Clone ID: LIB3051-093-Q1-K1-A9
cccacgcgtccgaaggcggtgagcacgggggttatgagggcactggtggagctgatggtggacttggggttgagtatggaggacctggggttgagtatggtgtacttggtgagcgtggtggtggcggtggcggaggcgaaagggattaatgatttccaactacaagcctttgttgccaaagttcgggatctaagggacagagagcattttgccaccgagcaacaccactttctagtccaggttttcgattcccttcaattaggtcaagtttcttcgtcgcggtaccgtagtgctttttgtattttcttgttggtttagtttgccacgtttgagagtagaagctgaagcggaacgatgaagagtgcggcaaaaggatacaagaattgcaggacgagttggcttctgcaaaagaggacaccagaaac

SEQ ID NO: 32697 - DNA, 361 bp, Glycine max
  Clone ID: LIB3051-093-Q1-K1-B10
caaggacacacatatcactttcccggcctctatcatgctgtctaccggtcgtgaacatggtcaacgtcccaacgacagttactgatgcacaaatatgagcctaccttgcatccaacttccacatacgctcacgagcaatactttatcgtaactgatccattccctgctcgaaacgctcttgctctctggcatcttgtcgagatccttgcgaattatcccactcatccagagggcactacagctgatcttgagaattcaaccgctcttccatgtgctcaagcgctaggtgctgatacaagtcacatgactcatactgatgggtaatatctatcagcgcctagatcaaagaatgtaattataa

SEQ ID NO: 32698 - DNA, 401 bp, Glycine max
  unsure (1)..(401): unsure at all n locations
  Clone ID: LIB3051-093-Q1-K1-B12
cgagaagtgtagttttagtgggagaaggaagaagattgacagagagagagaggaaggagcgcgaaaagactaaattgaccttggatcttcgtctttcctctctctccgattcgttattcgttggtcttctaaaagcttcttccaccatgaacagcaaggccaacgtttccaaagagctcaacgccaagcacaagaagatactggaaggacttcttaaattaccagagaatagggaatgtgctgactgcaaagctaaaggtccaagatgggctagtgtaaatcttggcatctttatatgcatgcagtgttcatgaatacatcgaagtttgggggtacatatatcaaaggttccttctgcaaccctggacacttggcttgcagagcangttgcattcattcaa

SEQ ID NO: 32699 - DNA, 458 bp, Glycine max
  unsure (1)..(458): unsure at all n locations
  Clone ID: LIB3051-093-Q1-K1-B3
cgaaagcaactactcacgcagtttcttcttcttcttcttctcctgcgcttcgtctcaatctcaagcgtcaattctccatcgccaatcctctctttctgctgatttcggactcgtcacttacttgtgaaatgatgctctcagcggcaataattacttttggacgctggacataaggcgtgatgggcggttgctgttgttgttgttgttctgctaaggagactgtgttgagcgctccacctgcgtactattattatccaagagcatcagaagagcatgttcctctatcatctcaccaaggtgctgcttctgctttctctgggcggctcttggttgatactaatctagatacttcatctnctgatacttatagacctnccctctgctcctatccctttcaatgttaccttgggtaccactcaaacttcaactgcggcttaagaaattcgtagtgacaggat

SEQ ID NO: 32700 - DNA, 453 bp, Glycine max
  Clone ID: LIB3051-093-Q1-K1-B7
cccacgcgtccgcccacgcgttcgcccacgcgtccgcccacgcgtccgcccacgcgtccgagatattgcagttttgtattggcaaaaagctgctagttatggccagactagaatatttgaaattttgcagtacgttgctgcacaatcaacaccttcaccacgccctgctcagcaacaaccagctgtgagggtgcgtcaacccgcatctagtaatagccaaccagcagctgcaacagaaccacaagctgagaatccatcttctcctacttctagctcatccagtcagcaccagaaggaagtagcagagaagttgggttcttcacaggtgcctaaagcaccctacactgttgcaggtttaagtagccagaagtctaatcctatacctgcagaggatgagccaatgcagattgaagcagcaccaccttcatcctcttctgcaaatgaaaatgagaa

SEQ ID NO: 32701 - DNA, 92 bp, Glycine max
  Clone ID: LIB3051-093-Q1-K1-B8
gagatgtccaaaggagagcattgacggtgcgcactaaaagatcgaataatgcggactgagatgcatatgccaccgaactgtctgaattgcca

SEQ ID NO: 32702 - DNA, 443 bp, Glycine max
  Clone ID: LIB3051-093-Q1-K1-C1
gatccctgcacactctgaggaagcaatatccaatgttgtaaccccggttgatcgccgtgctgatggatatgatgcttgtgatgcacaaaatcaaattgagttaccaactgcggaggagtttcaaccattgaactttgatatatattatgacccaagaagcgagctactggatggcaaattattctcccctgtacttgcacatattcaaccagaatttcattatcaagcaaacatcgaatcagatggtcgatatgggcttcaatatggtacaaatgagacaaacatgtcagactttttgaattcagttgttaactgggatcaagtaccctttgaggatcccaattgtcaacagcagagctaccccttgtttaatgttaaggataacatattatacagcgacttagattctgaacttgcaatatgacatgtatgcaagctggtta

SEQ ID NO: 32703 - DNA, 218 bp, Glycine max
  Clone ID: LIB3051-093-Q1-K1-C12
tttcgttcattcccaggttgttatgacaccaggaatccgatttatttaccggttattaccacctcatctaatgatctacgcggaacctcgcatcctgacattatttatacatgcactaattcagctataataataactttttttacaaaaagaaaactatgattcccgtcatggcattaaacatattttacccttctgcaactagcccacataacatg

SEQ ID NO: 32704 - DNA, 443 bp, Glycine max
  Clone ID: LIB3051-093-Q1-K1-C4
ggtgactctacttctgaggatgaagatttggatatatcccctgttgagattgatgaggcattggtgattgaagatgatgatatttctgatgatgaagatgatgaccatgatgatgtactgagggatgattctcttcctgtttgttcacctgacaaagtacatgatgtgaaattgggcgacatagtggaggagagtaatgttgctcctgcaactagtgatggtggccagactaatgctgcctcatgttctagtagcaaagctggtacagtcaggggatcagactctgctgattttaagagtggctatacctcaagctcaagacgtgcaatgtcatttgctgctgctgctatagctggacttggatctgccaatagcagaagtttcatgggtgagagagatcgactagggcgttcattgtttggtagttctaatgatccttcaaa

SEQ ID NO: 32705 - DNA, 338 bp, Glycine max
  Clone ID: LIB3051-093-Q1-K1-C6
cccacgcgtccgccacattctcatactatggaagacggtggaagcttagttggagaagagggatccaaaatagaagatacaacctcagagaaagttgagaaggtgaaagaagaagaagatattggcaaagaagagagtggtggtggccttatcaacaacttggttaccactttgatcacacccttgagtccaggcattgggaaagccactgaaaatgaaagtggtgctgatgctgatgaagatgaaggagagaatgaaggatggatcatcagcaaaatggtttctaatttcttacatcaaagtgaaggtgaaggtgtggtggaagctgaagaggacat

SEQ ID NO: 32706 - DNA, 212 bp, Glycine max
  Clone ID: LIB3051-093-Q1-K1-C8
ctcacacatcatgggtttcataaataaactttgaaatccattacagttatgagcacatgcaaaaagtttggaggagcttgaagtttactttactcaatatctcttagtgttatacagtgattatgtagataaaccgtgacaattcaacgaacaagttccaaataaaatatactaaataataattaattattatataaatatttataactaat

SEQ ID NO: 32707 - DNA, 427 bp, Glycine max
  Clone ID: LIB3051-093-Q1-K1-C9
cccacgcgtccgtcttgcttgatggttccctggtttatggaggcagtggcgcaaacagggcggttagtatgtggccagttccagctgatgaagttgatggtgttgaagaaccattcttaagagcacttgtttcctttctgtctgctttgttcaaagagaaaatatggaggccggagaaggcattgaatctgatagaacttcttgtgaataaactctttcttggtgaagctgttaatactaattgtcttaagattctacctttgcttataaatgtacttttagaaccattgtatgggtatgcagagcctggtacaggtgttcatcattgttctttagaagaaagatttgtgcaaaatactatgatagactggctggagagggccggaagtcttacacctttggtcacatggaaaacaggagaagacat

SEQ ID NO: 32708 - DNA, 413 bp, Glycine max
  Clone ID: LIB3051-093-Q1-K1-D10
cccacgcgtccggacagaggctgagaattcgccgtcctagaaaaatcttgcgaatcaaagaaggcggcaagaaacgctttttcctttctctctttctctcactacttactctctctacaacctccgatgtcccctcccttctccattgcctccttccccgtcctctctctccggttgtggtagttggaaaacgaagggtaattttggcagctatggagggtgaactcaaccagctgaagcgtgccgccattgatgcctctgctagagctatctccagtggcatatccaggacagtgacgtcacctctcgatgttcataagattaggttccaggttcaactagagcccacatcttcatggactttactacgcaaggatttgtctacaccttcatagtatactggcatgcttcaa

SEQ ID NO: 32709 - DNA, 470 bp, Glycine max
  Clone ID: LIB3051-093-Q1-K1-D4
aaaaaaatcaaattgaatatgggagaaggaattaagaaccaggtatttaaggagaaaaaaccatcaagggaaacttttgtttgtggagcatgtggtaaggctgggcacatgcgaacgaataagaactgtccaaaatatggtgaagatctagaaactcaacttgaatctgcagacatggaaaaatcatctggaaaatctagctttgtggatccctctagtctctcccagcataaagctccctccaaaaagtcaatgtctaaaagcgcaacaaaagttgctcctgttgacaattcaacaaaaattccattgaaattcaaatgcagctccacagagaaatcttctgataaacctgcagtagaaaccctgcatagttctgacaagccagtcacttctgactcagaaactgcaaagtctgctaaggttaataagataattatttccaagaaagtgataccagatgatacgctggc

SEQ ID NO: 32710 - DNA, 463 bp, Glycine max
  unsure (1)..(463): unsure at all n locations
  Clone ID: LIB3051-093-Q1-K1-D7
gaaatttgtgttaaaaaatagttgttttaaaatttgattgtatgagattaatttgaagtgagattggcacatggtgagaatagagagaggggaaaggaatccatcgaggtgaagatggtgtggaacagcatggtggtgttgagagtggcacgtgcctcagcggaagcgtggcaatgcattgcggagcctctgaacagtgagcagatattggatctggtttgctgtttccctctccatcaactcgctctctttctctattccttcttctgcactcctcaatccaatttttaccatttcccttctcactccgactctgaccatgacgattcttccgattaccaatcctcttcagactgaaaccaaaccaaactcaatagaataagatgacaccgaggactttagtagtgttcaagctatctncattgtttaaaagcatcttttacacttagatttttgtagttga

SEQ ID NO: 32711 - DNA, 384 bp, Glycine max
  Clone ID: LIB3051-093-Q1-K1-E2
tttaggtcccttgtctggtctggtgtgcaattctccccatacaataacaatacacccaggttatcagaccaatcaatcgatatacctagtagtgattagatttagtgatcgatcctctcctttcgttctcaaaccgtagatttagattttagggtttctctcttaatataatcttttgacacttccgtaacaaacaaaaaaattacataaattttcccttataattattattatttggcttttatctttggattaactaggcttgagctatcacaaataattgtttcggagaatggaaaagaaaaaggtggcagtttccctcgtgtgccacggtcattctcgccctgtggttgatctcttctacaggcccgttacgcctgatgg

SEQ ID NO: 32712 - DNA, 165 bp, Glycine max
  Clone ID: LIB3051-093-Q1-K1-E5
caagatggttctgctagagaatctctggtatgactgattggctgaccctaaaggtgagggagatcttcgcaagctgagaatactcaccattctcaaagctattgatgaaggacacatgtatcaagttgcacaagacgttgtcgataccgtctacacccacaaccc

SEQ ID NO: 32713 - DNA, 464 bp, Glycine max
  Clone ID: LIB3051-093-Q1-K1-E7
gtctaatgagaatgattcgggtgacgccacggtgagcgatgaccaggttcatgctactagtgagagttccgaaggagtttctcaggaaatggtttggggagaaatgtctgcatggttcaatgctattcctgctgcttggggtcctggtagtcccatgtgggatgatttggatgccaccaataatcttctttccaatcacacattcctttttccaattccaatcaacaagaactcaatgatgctgagagacaagaacaaaacactggaccaggttacttgtggaaggatcaggattgaaatttgaagttaattttctatataccttgcttctttctcttcctggttgcatattcatgattatcatttattcatcatccactccttcattacattttaggacactttgatggttccttaattacttaacttctcactcactggttgcggatattttcaccacacaa

SEQ ID NO: 32714 - DNA, 268 bp, Glycine max
  Clone ID: LIB3051-093-Q1-K1-E8
tcgtgctatggtacctatcttcaaccacagaatcaatctctatctaccacccattgtctcatgtctcactacgtatcccatcatccatttctcacattcttaatcttactatcaccaccattattatcattatcatctccaacctctatgctctcgtaaacccttaaaaccttgctctcaagccacatgaaatgaccctcatgtgagaacatgatttcccccttaatacaatgtcaactgctacttcttattcacaaccaacctcaca

SEQ ID NO: 32715 - DNA, 421 bp, Glycine max
  Clone ID: LIB3051-093-Q1-K1-F1
tgtggttctctttttctctattgaggttgtcattgggagcactcaacctaaccattcaggttgtgaaaccacatcggaagaaaattcacaagcgatggatccgaagctgaaagaggtttctcagctcttcgatcgcttcaaggcttcgtttctccggaacgacttcgataactgttccaatctcctttctcagctaaaggtgttacttacaggtttcagaagcctgccaccgttgtttgcagatacacctaatgcagttcatgaattaacaatagcaagggatatatatgagcatgctggtgtccttagtgtgaaaattgaggatcaagatgctttcgaaagggatttctttcagttgaagccttattatacagatgccttgcattcgtttttcaccatctactcaagagtaccctatact

SEQ ID NO: 32716 - DNA, 217 bp, Glycine max
  Clone ID: LIB3051-093-Q1-K1-F2
cccacgcgtccgcccacgcgtccgcttgatcagggtgatttcttagtacattttatgggtgttgcaccaaattgaccggcttaaaaggcctgttaaagcttaagttgaaaacctgcagcttcttttaaaccttgctttgcgtcctacagcagttgcagcaaatccttttattgaaggcttaccctgggtgggggaagaacctcttttgttaaaaagg

SEQ ID NO: 32717 - DNA, 360 bp, Glycine max
  Clone ID: LIB3051-093-Q1-K1-F7
aagccctctggctttggtccttcgctagggttcggggattcaccatttccagtgatcttgttctctcggttctacacttctgaacttcagagctgtttctgaggagtttcaagtgtattctgttgttctggttcggtttattgaggatctcgagggggcttttgcattaatgctgttactctgtgacaatgccttctacagaaaatcagggcttttcgttgtccttatcctcgtttggccgttccatatttggtgtctgtcaggagcaggttcattctgtggaagcaagtaatgaatctgattcctgtaatttagagctcgggtcattccaaaagcgtgttaccgatctatttcaatacc

SEQ ID NO: 32718 - DNA, 428 bp, Glycine max
  Clone ID: LIB3051-093-Q1-K1-G1
cttctctattttaagtaattcaatggcttacactgcaagtcttgtgttcttagcttccactttccttatcataaactttcctcttctggcaaacgctatcggatgcaatggaccatgcagaaccctcaacgactgcgacggccaactcatttgcatcaacggaaggtgcaacgacgaccgcgacgtcggaacccacatctgcggcggcggaatgccgccaaatccgccaccaagcggcggaagctgccagtcctcgggaaccctaaattgcggcggaaaatcgtatcctcagtaccgttgctctccgccggtaacttcctcgacgccggcgatcctgacgctgaacgacttcagcgaaggcggcgactgatgggacccgtcgcagtgcgacgagaagttccataacaacacggagcgtgtggtggcac

SEQ ID NO: 32719 - DNA, 410 bp, Glycine max
  Clone ID: LIB3051-093-Q1-K1-G11
gccttctatgagggaagaacatgcataggttctggtgtgattttggagttcggggatgagcagagttttccagtatgtacaaaagctttagaaattgctaggatggaagataaatcgaagattgggaatccggtaaaaataaaagttaaaccagataacccgcaagtgtgtgattctgcagagttagcaagtaaaacatcataaaggaataagaaattcaagagttgctggcactaaacaaaacaggctgatgtgtcaggggaatgcaacttccatcttccctttcaattggccacaacaaagcattcgcaaatgtgggtatacacgtagattttctgatcttttgttctgtagcgtttttatatgcatgtttagggaaataagaagtattttatagagagaaagatagc

SEQ ID NO: 32720 - DNA, 330 bp, Glycine max
  Clone ID: LIB3051-093-Q1-K1-G5
gactctctgtgagtcaaacaccgatctgaatacacaattgagcagcaagtacggatccatggtgagggaaatagtggtgatgacagtaacgataatgtgaattagatgaacgaacacgttcaagttgacgctaacggagagattgaggaggatcagagtaaagtgcatgccagcctggagcgggtgcaccggattgttacagcgttagggatcaacctggactaactggtgagctcagaggattattggagcgttttcaccacgataggagtagtggtgaacttgctgaacgctgccatggacgactgttcggagtgctacatgtactag

SEQ ID NO: 32721 - DNA, 433 bp, Glycine max
  Clone ID: LIB3051-093-Q1-K1-G7
tcgcccacgcgtccgggaaagggcaatatggtctgccaaagagaaagatgcactggtagccagagaagaacaggcaaagtgaaacaatgtgcaaattacatgattatcaacaaaattattagaagtgaggaatgaattggaatcttgtagagaagaatgcatgaccctacgtgaaagattgactattacatatgaaaatgcacatatcaaggaaaattccagggaaaaggtttcagaattggaccacctggaaaatcaccctgaaacaaccaatgctgagagcaaacaatgccaagaaatgtcaaaagccaattctgagatgcaatctttggagcatgagctgcatgacagtcccaaggaggagaaagaaaatgaacttcggaaggaaatacatgttcttgataaaagagattatctatcaagccctaacgtg

SEQ ID NO: 32722 - DNA, 436 bp, Glycine max
  Clone ID: LIB3051-093-Q1-K1-G9
acgaagttggcggcaagtttagaacttgcggcgccggcggcgggtggcaccggccaggagtgtcgtggttgtgtagcggagcttcgcgagatcagcaaaagcttctggagggagagaacaaagaatctctagtttgttaacaatggaagacgggaacaacagtggcggttccaccgcaaagaaattaaagcagcggcgaaagaggaaggattacttggtggacaaggatgggcaggtgggggagcgagagaagctggcaaaaagaatcttgttgtctctgacgagaccttcctatgttttgggattgggtcccaaacctcttacggtggagcaccgtgcgaggttgcgctacttgctccggaggctcgttaaccagcaccattgggttgcagccagtggtgttctcagtggctacttggagggaacacttgatgac

SEQ ID NO: 32723 - DNA, 462 bp, Glycine max
  unsure (1)..(462): unsure at all n locations
  Clone ID: LIB3051-093-Q1-K1-H1
gtaattggaattgatgagatgaacactggaatatacagtgtgtctgagcattatcctaaacttagggctaagcaatggggagaggaacacgaccttcagctaaggatgatattcctaaagttctttgcaacagttttaagtggctatcgcaatttcctagaaaaaagtgctactcaggtcttcaactctcaagcttttttgaagaagcggtctcgatctactaaccaaccaccagagcccatgatagctcagttcctagactctcatggtttcttggattatttggaaagaagagtaggttctgatgaaaacaacaataatctgcttgataagctacaagatgcaattggaaggggtcaaaaccctatgtcaattcttnctttatcctcagtagaacctgagattttaacagtatcagattctgatattggaatatcaggatctggtgccaaatacacttat

SEQ ID NO: 32724 - DNA, 328 bp, Glycine max
  Clone ID: LIB3051-093-Q1-K1-H5
tcggaaaaaaggctccaccgaaatcaatttcccacagaatcaaacatatcgatggagttggggaacaaaacaagagaaaatgggtggacgcaagtgtttgttaacgttggtgttgagtttggtgttgatgatgagtatggcagaggcgcaatctggtactatcgcagactgcgcccagtagctaattacatgcctggactaccttaatggcactatcatcccaccaagctactgctgcgaccctctgaaacgaacagttcaaaacgaactcgcctgcctctgtaacatctacttctcccctgggcttcttcaaagcgtcaatgtcact

SEQ ID NO: 32725 - DNA, 357 bp, Glycine max
  Clone ID: LIB3051-093-Q1-K1-H7
gccacgcgtacgtccacgcgtccgaccactcgtccggttcgaaacccctgtgatctcagagcaattccaatgcctctggatctcgtctcgatcgatcgatctcgaacatgatcactgaggagcttctcaacatcgaagcctttcgaactcaagttgccctctgagctgaataagcagatctcatgttctctccaattgtccaataagaccgatagctatgtggccttcaaggtgaaaacaaccaatccgtataagtattgtgttcgtccgaacactggtattgtcacgccacgatctacgtgcgatgttatcgttaccatgcaagcgcaaaatgaggcttctggtgatatgcaatgc

SEQ ID NO: 32726 - DNA, 422 bp, Glycine max
  Clone ID: LIB3051-093-Q1-K1-H9
tcggccgtgagtggggttccgaggacgggagagagagccaacgcgccggttttgacggcgtggggagtgggattccgtggcacaaactcttcttctcttgcgcgttcagttgcgcgaagcagcgtcaggctctgcaaatgtcaatggtggatttggagggcaaagaaggttacaggccttccacggagtacgtggaagacagcaacgaaacactcattaacttgactgactcaaccgagcttttgtttcttaagttgccttcttccaatgattttttatctgacatacatgggcagaaatcgattctcactcttcataatgatggtaaactagccagcttcaaggattcgtcaggtaaagtatatgattttgtaagctattctgctcatgagccagacgaaacagtttttggttcctttaca

SEQ ID NO: 32727 - DNA, 405 bp, Glycine max
  Clone ID: LIB3051-094-Q1-K1-A2
cgttaattcatttcagctttgcacattcataaacagaagaattcctcttcaataatttcaaatttcactacttgcttccttagaaagaggaactacaattgatagctagcctccacccaaacatattttacgtgaaactcaccaagaaaactaagggaaggtaccaaaacacttactaatgatatatatggctttgatgtcatatttcttgaattgctttactccatccacatcatgtcaagtctctgactatgccgaaggatcatctcaactgaaatctccttcttcagagaaacaaaaatcaagaggagctccacttgttgtttcctatttccccatcaaccattatccctcgcgcttatagtgctatacaaggcttcttggtgcagcctttttacccttttc

SEQ ID NO: 32728 - DNA, 417 bp, Glycine max
  unsure (1)..(417): unsure at all n locations
  Clone ID: LIB3051-094-Q1-K1-B1
caaaatatgaatttggatttgatatttcagattgttaggttaaatgatttgtattttgaattatatcgtggtagcatcagagatggaaaaattggtatcaagtatatgattatgaaggaggtaacttattagtggaaaaccttgctcatagaacttgtttactttacagtaatatggatcaggtttgggaaaagtgacattgaaggtgttgtcatataaacttcctgcgctcttccacacatttttaattttcgtatccatgaggtggaaaagccctgtgtggtggaaaccttccctttggaatgtcaatctgattatatgacagttgcataatcacaatattattggattctattgtagattgcaatgctgaattntctctcacttcctgtaagtcacttattttcaaacttcact

SEQ ID NO: 32729 - DNA, 417 bp, Glycine max
  Clone ID: LIB3051-094-Q1-K1-B2
caaaatatgaatttggatttgatatttcagattgttacgttaaatgatttgtattttgaattagatcatggtagcatcagagatggaaaaattggtatcaagtatatgattatgaaggaggtcacttattagtggaaaaccttgctcatagaacttgtttactttacactaatatggatcaggtttgggaaaagtgacattgaaggtgacgtcatataaacttactgcgctcttccacacatttttaattttcgtatccatgaggtggaaaagccctgtgtggtggaaaccttccctttggaatgtcaatctgattatatgacagttgcataatcacaatattattggattctattgtagattgcaatgctggataatatgtcactacctgtaagtcacttattttcaaacttcact

SEQ ID NO: 32730 - DNA, 422 bp, Glycine max
  Clone ID: LIB3051-094-Q1-K1-B9
aagacactggggatactctctgcatttggtaaaacatggttgcaatgtcacgtgttgtgcacactaatttcagccgaaaaccaacaaagacttctggtgctgactacctccagcattcacaagtaaagttggtgactctcgctgatggtttggaggctgaagatgacagaagtgatgtgacaaaacttctttcgtctataaaaagcaacatgcctgctttacttccaaagctcatataagatatcaatgccttggatgctgacaataagatcacctgtgttattgttacatttaatatggcttggacattgcaagctgtccacaaactatgaatcaaacgagctctattctgtccagcatttgcaacttccatggatactgatgctcgcataccacagatgatttatgattgcattattgat

SEQ ID NO: 32731 - DNA, 407 bp, Glycine max
  unsure (1)..(407): unsure at all n locations
  Clone ID: LIB3051-094-Q1-K1-C10
caccancttcgtttccttcaatcccttccttcctttgccaagctcagttttcttggctgcaagtcgtcaaagaaggggttcacagtcttctcccgctatgcgcaagcgcgtgaccttttctcctcgcgtagattccaagatagcatggagaagctgccgaacctggtggaggacattgtgcagacatccttaaacactggtccaaggggtgtcctgaggttggctcaaggtgttcaggccttccttggggttggtcaggagtggttaactgatgtctctaagtcagcaaattcatttgctgggttaccgactgaactgcagcttggtttactctcccccttttatttgaggaagttgtttgagcgcatgggtgcaacctatatcaaattgggtcagttcatagcatc

SEQ ID NO: 32732 - DNA, 431 bp, Glycine max
  Clone ID: LIB3051-094-Q1-K1-C11
aaaaaactgtttttagtttttacactaaaaaaaatccctttcttctattgagtccatgtccaagaatcacgttggaattgcggatcggagctccggtggattttgtggccgttgaagccagcaagggtggtgccgacacggtggttgccgttgtgcttccaattttttccggcaagggcacttgttagttccttcctcagattaaaaggtcaccggttcaggactcgccctcaactcggacaccaactcaaccaccttgtcctaatgtctgtggagagcgaaactgggtcgtttcgggactctgaaactcggaacaatcttcgaagaattcttgagtcatgctctaaattggcggaagctggagattttcatgaatctgaaaacacagcagtttcagagcttgtcgagttccttgattctttgttggatgc

SEQ ID NO: 32733 - DNA, 305 bp, Glycine max
  Clone ID: LIB3051-094-Q1-K1-C3
gttagttcacacactaagttctgaaaaatgagttccaaagtttttcttattctacttgtgttcatggccactatacttttgatctcctctgaggttgcacccgatgatgcataccagaattttgacaaaacagatgggaagcgtagtgcaaatggggtagatgaaagcaaatattggcgtggtggctatggcgactatggtggttggcgtggtggtggttggcgtggtggctatggaagctggcgtggtggctatggtggtgggcgtggtggctatggtggctggcgtggtggctatggtggtgg

SEQ ID NO: 32734 - DNA, 299 bp, Glycine max
  unsure (1)..(299): unsure at all n locations
  Clone ID: LIB3051-094-Q1-K1-C4
nccacgcgtncgctttcttacaaaagtttgttttcaaagtgtgttttgtttggcgaagcctactcttgtgaccacaacccttcctcctctttcttttgaaacctctttttttctattccccaaccaaacaagcaaacgctactcactcatcatcactgagatcatggctcctaatatcaccactgtcaaaaccaccatcaccgacgctcaagccaaggtcgccaccgatcatggtcgtgcctacgtcaccttcctcgccggaaacggtgactatgtgaaaggtgtcgttggcttggcaa

SEQ ID NO: 32735 - DNA, 435 bp, Glycine max
  Clone ID: LIB3051-094-Q1-K1-D1
gaggacccagagactgataaagcttttggatgggtgctagaaatgtatgcttatgctgttgcatctgctgtgcatggtgtgaggcacattctgcggaaagacttcatgttacagcccccatgggatcttgaaactaacaagaagtacattctccattacacttatggatgtgactacaatatgaagggtgaattgacttatggcaaaattggtgagtggagatttgataaaaggtcacatctacgaggacctccaccaaaaaacttgcccttgcccccaccaggggttcctgaaagtgtggtaacccttgtaaagatggtgaacgaggctagtgctaacattccaaattgggactcatcttccacctcatcatgatgatatcccaagtgcacatttcgaaaaggaaaaaaaaatagacatttgagtctttttttt

SEQ ID NO: 32736 - DNA, 429 bp, Glycine max
  Clone ID: LIB3051-094-Q1-K1-D11
cgttattctcctccatcccgatctctttattgtcttctttctctcttcctggttttcgggggagaatcctgaaaaccgcttgattttaatcaaagggtcatcaggattcgggcacccatatctcgtatcactccttctctcctctgttgtcttagaaagaagaccaagaaaagcatcaatttttgcaagcaatcttcttcttttgccctttctcttgtcttaaacacacacacacaacaacccagctgctgaagctgaagcatcacaactcacacatgattcgagtggccacaaattaagcgtgttggtgttatgagtgagagaatggaatcgagtagcattgagagcagcactgtatcatcgatgactatgatggaagaggatgagcatccccatcagttttcttcaatctcgaagcttcatagcaat

SEQ ID NO: 32737 - DNA, 408 bp, Glycine max
  Clone ID: LIB3051-094-Q1-K1-D4
actatgatcgtgtatggaaaaaactcttctctgcagcatcaagtgctggcattcgacattggtgtttgcttgacagagaaactctctgccactgccaccttcgctgctggcattcaagtttgcctcttctctttttccttacatgtatcctgatttggacacctgtttacatgatgagatggcggttacaacctttaaagtacctactagtgagtgttgtgggaataagaaaatggaaagaaagccttctgggaggagacgtgtatttgttcagttagattgtgaggatcaggatttggatttcactacaaacatagaagagaaactgactgtaatgccaccatttcaagttggagcaagaaatggaaacattagaaacacactctctagactagaggaaagcatgat

SEQ ID NO: 32738 - DNA, 101 bp, Glycine max
  Clone ID: LIB3051-094-Q1-K1-D5
tacttcatgactgtttttttaggtctgcaccattcggggggcataaggctgctcgcaagatgtcaagaaacatacgttcccttccataaactctcggtcca

SEQ ID NO: 32739 - DNA, 389 bp, Glycine max
  Clone ID: LIB3051-094-Q1-K1-E10
accgctgattctttccttatcagaattttgctgttgattaaaatcgtgcacggcaagaataggtggtggccttattaaccaaagtagtattcatgaaccaaaagggtcatgagaagaaaattgaaaaaccagatgatgagtcaaagagctatggtcggagttggaggctaacggttgaagcaaacaatgcgcgtccatggaagattgttccagacaactgctacaaccaccttcagaactacatgtctggtggacaataccagcttgaccttaacctcgacggacaacatatctagtcctatgcccatgagattcctcttgctgccgacggcatggatgcctgcattttggatgttgatgacacttgcatcttcaacattgattattac

SEQ ID NO: 32740 - DNA, 400 bp, Glycine max
  Clone ID: LIB3051-094-Q1-K1-E3
tggtaattacatctacaaaggaaccaagttcaattccagaaaggaagatgttattggcgagacatatctgggaattcaaatattcaggttctactttaaatgcactaagtgctcagctgaggttaccatgaagactgatccgcagaattcggattacatcgttgaatctggtgcgaccagaaattttgaaccttggcgtgcagaagatgaagaagctgataaaacgaaggagaagagggatgctgaagagatgggagatgctatgaaatcgttggagaatagaaccctggattctaaaagggagatggacatccttgctgcattggatgagatgaagtcaatgaagtctaggcatgcaactgtcactggtgatgaaatgctggaggctctgcagcgcaca

SEQ ID NO: 32741 - DNA, 445 bp, Glycine max
  Clone ID: LIB3051-094-Q1-K1-E4
tcacctatacttttcctcttccaacacaaacactttccgtttcgttaattttttcttcagattcaaaccaaaggagagcaaaccaaaaaaggaaaagaaaaatcccaaaatccacaacgttacttcctttccttattagcgagaggaaaaaaaattaatttaaaaggcttcttgttaatttccctggaaacttcattttattttcctcttttctcttcttcgcgctcgttcgttcgttcctctgattattattcatcgatcagaattgatgatggagtcctccttcgatccaacggtcaacggctcaccacacctatcccttttcaacggccacgattgaatcggcgagatccgtcggtcaacggtctcttctaaggcgcggttaggttaggaaagagaaagagaaagaaaatgaaggtggcaaaatcgcgtgtgtggcaaccac

SEQ ID NO: 32742 - DNA, 370 bp, Glycine max
  Clone ID: LIB3051-094-Q1-K1-F1
cccacgcgtccggccgcagccacaaaggcaacaggacagaccaagatacaatgatagagcaaggtatgttcgacgcagagaaaacacaaaatgaaggagcaagcggataataagaggagggaggagagggatgttgaagatatggaagagtggattctgcactattattgtagtgtagcctttggatgcctactatttctggtggtacttgaatatgctagtagttaaactagtagtatatgaatatgttagtagttaaaccagtgttgatgttggctttattctttatcatcttttccatgggagagtgttgaacatatagcatataatatatctctatgcagtgttactgttttgtacactgcttctt

SEQ ID NO: 32743 - DNA, 408 bp, Glycine max
  Clone ID: LIB3051-094-Q1-K1-F3
cccacgcgtccgcccacgcgtccgccgctttcatcaagaagtgacaaatcttggcatgttcctgaggcaacttcaatgatgcattcttttgagcatccatcagatcagcaagtccatctgaatgacccttttttagaaaggactcaaagtgctaattccaatgccttaatccatgatcatttaaacagcatgcatatcactgaccaatacaacaatctaggaaatactgaaagaatgcctcttcggtctagatctggttcattacttgaagaacaatcactgttatctgctaataaggatactttacatcccaattacagaattccttttcagattggtaaatcatctatggaaaaagacttacttgagttagaaacaaatcagagacatgactatatgggcacgatg

SEQ ID NO: 32744 - DNA, 407 bp, Glycine max
  unsure (1)..(407): unsure at all n locations
  Clone ID: LIB3051-094-Q1-K1-F7
aaaacatttcatccggagaattcaaagagattgtcttcctactagagctcgagtagttcaaaaaggtgtaatttgcccttcaactttcacttattgtatgtctgaatttgaaaacgcatgacacctgtttgtgaattgtccaaaagctcgagaaatatggcaccaaacctacctttgggagctagtatctgagagattcgcaaaggttgatggaataagggagttggtgtttgaattacttgcagcacaaaattcttgaatagccatgatccttttgcagcatctggatttgtcgaaatgagaaggcatgggatgacaccgagaagcctacaactttatcactgaccaacacaagtcaattcttncaagaatggctgcatgcttgttcaacaaatgctccaacaccg

SEQ ID NO: 32745 - DNA, 418 bp, Glycine max
  Clone ID: LIB3051-094-Q1-K1-F9
tttccttaagaagtgattttcctggcagctcaggtaatcaagcaagtgaagcaactgaggaatctcaaagattgaaccattcaaatacttctgccttttcttggtatagtaatagtaaattgttgcagcctcatttttcaacaccatcgattacatttcctgaagtaaacaacctcagttgggattctcatgaatcccataaattatctggaattacttctggaaattgtcagtatggtggctcaaatcagaacctggagaatatgatcggtacagtcatttgtcagtatggacaagttacaccaaaattatcaaacagtcaatgtggactcttacctgtttctggggttatctccaaccttaagtctgagggacatggtaatgttttcacttctttgttctatgcacaatctggtat

SEQ ID NO: 32746 - DNA, 373 bp, Glycine max
  Clone ID: LIB3051-094-Q1-K1-G11
gccgtgtctgtgtttgattccactttgcaaatcagtgtgtacccaggaatctcttgattgagaaagtgtgttagggtaagagttgtgtcgtgtccacgagacactgggagaaagaaagtgtgtgtgagttgttgtaaactgaattttcatttttctttagccatgagcacacttgttcgcaacaccaccctcaccttcagccgcagaaacagatacgagcttcttggtttgcagggcaaagacaagatggtcaagtccatcagctacagacgcagaagggcaaagcaaaggcaaatctttctcacaacctacaagttatcttctttgaatagtaacacttttggggagccgacacaaaagcctaagctgaagc

SEQ ID NO: 32747 - DNA, 216 bp, Glycine max
  Clone ID: LIB3051-094-Q1-K1-G12
gcagaagtggaaacatgatttgtatcaagaggttaacaacgatcctattcctaacaaggaggattaccagattgaatagttagaagcactattggcttcataatatcaaacaaaaacaagtatttgctaagcctttttatttattttaaaaaaatcaactcgtggcttgtcggacaatttccagagatgatttttgcttaatttaccaattgtgtg

SEQ ID NO: 32748 - DNA, 416 bp, Glycine max
  Clone ID: LIB3051-094-Q1-K1-G5
ctggaacacaagaatcaaaagaatgcaacgagcaggcttaccaatctaccctgaagagttgtgccaacggatacttaattgcaatcaagaaagtcaaaatattagcatcctgtcaaatgaagcctcccagcatggtgatctgtcacaaacagactttgatataccagacgtggaattcaaaattttcaaatttcgtcatggtctatcacatggacagtcaatatttgatatgcctgaaagtagcttgtttgatcaaagttcagactcatcccatagttataacttgttcccaactatgcgtcctacaaaacgccctcgggagtcagaaatgctatatgatagttttgaaagttgtacaattaatgctgccccactatttgatcagtatgacaattatacttctgaaaaaatttctg

SEQ ID NO: 32749 - DNA, 393 bp, Glycine max
  Clone ID: LIB3051-094-Q1-K1-G8
atgatttttatcaaccgctgcgttttttgcatcgagtatccgagttaagcaaggttggccgccgtcaaagcgtttccgattctccaccaccggcgtagctgccgccgtcaaccgtcgccatcgatgtcgtcttcttccgccaacgatgccgaggctctccggcgcaaccgcatcctctccagcaagctctacttcgacgtgtctccgtgcaaggttccgctaatctactccgcgtcttacgacatagagtttctcggcatagagaaactgcatccgcttgattcgacgaagtgaggacgcatttgtggattcctcgcttcgtttggtattcttgacaaaaaatgcgtcgttgagcctttggaaagcttcaaggatgatcttgtagtggtacac

SEQ ID NO: 32750 - DNA, 371 bp, Glycine max
  Clone ID: LIB3051-094-Q1-K1-H11
gaagtttccttgaatgaattgattaataaccaaagtgaaactaagactaaaatagactgacagatcaagttttgtccgaaaatcactaaaaaccgttttaaggtccaacgccttaaacggtcctctttgcttttatcggttaacatggaccgttcaaaagcataaaattaacatgtaactttaccgtttttgaaagaactacgtaggtctgagttcctcattaaggatacgtaggagcaaaagccccgcttttgtcgaccaccccaagagatcgctaatggtccaatgccttaacgtttctcttctttcaaaaaaacaaagagatcgttaatggtccaacaccttaacatttctctcctttcaaaatcaaa

SEQ ID NO: 32751 - DNA, 396 bp, Glycine max
  Clone ID: LIB3051-094-Q1-K1-H5
gcaacttggtcagctcatcaaaggcactattctatttttaattattttttgggggaacataaaattgagtaattgacgactctgtctcttctgctaactgtggcattgccgtggacattttcttcttagctaaataagataaacacttccaattttgagacttttccttcgcacccttttgcatcttttagtgttttttctttatgagttttgctggttttggtccaacaacatagtgttttcatcatgggaaacgcttgtgcaaaaggaaaaccagttgctcatgtctcttcctccaatttttctggaggtaagaagcatgcaagtaggccaaagcagtattcaaattcttctgaacaactatctgctccaataacttcagaattaaatgttccc

SEQ ID NO: 32752 - DNA, 380 bp, Glycine max
  Clone ID: LIB3051-094-Q1-K1-H6
cccacgcgtccgctctgaatccaattcttcttcttcttgttctctgtttaaggcaatgacaacatttactactcatactcaaagtagcttagtgttttgtttagcatatcatggagaataataatcagtcgttttggcaattcagtgaccagctgaggttacaggcatccaatttggcgaacctttctctaaacgattcgatttggagcaacaattacatctccaagaggcgtgatgaaaggattaattttgacatcaaagtggggggtgagatcaactttttcaagtcaaaggatccagcttgtgattacaacgataacgtgaatggatctcttcttgccatgccttacaacaacaaccaccacaacaacattattttg

SEQ ID NO: 32753 - DNA, 236 bp, Glycine max
  Clone ID: LIB3051-095-Q1-K1-A10
ccaacgcggacgtcaaattcgacgtcagaaatcatggaccatcttagattcattcatcgaggagagactatcacatatggccatgggcacttttaagactctctgaaagcactcaatttactagacgtgcagactccgactacgataacgaagagaagacagagctctacgcaaactcgaagaccacgcactccaacgagataaaagacgttgacacaaaactaaaagccttagaa

SEQ ID NO: 32754 - DNA, 309 bp, Glycine max
  unsure (1)..(309): unsure at all n locations
  Clone ID: LIB3051-095-Q1-K1-A3
cccacgcgtccgatttgcatacaccccattcattggacgatccgagagggtcttcttcgtggctgatttctgcgcacagaccttgcactgatgtcncatgagaaatagttgagatcggaccacaagtcagagatttcaaagttggcgacgaacgccttgctaaactcaaccatcaatatggaggtggactggctgagtttgatgtggctagtgagagcttaacagctgccagaccatctgacgtctcagacgctgaagctcgagcattacctatcgtctggctcacagctagtgatgccctcacttcaa

SEQ ID NO: 32755 - DNA, 189 bp, Glycine max
  Clone ID: LIB3051-095-Q1-K1-A7
cccacgcgtccgatcacgcgtacgcccactcttccgaaaaaaaaaaaaaaaaataaggatttgttttttaaaaaaggtagaaaaaaaaaaatataaaaaatttaaatatttattaaaaaaatttaaaaattttatatattataaaaaaaaggccgccccttttaaaaaatttaaatttatttacccttt

SEQ ID NO: 32756 - DNA, 185 bp, Glycine max
  Clone ID: LIB3051-095-Q1-K1-A8
atcgaacttcaatttccctacgggcttaatatctccccgcatttgtccctatcctcagtggtatcatagtagatagtcattccccttatctatctctcttctctctccccgcccaaaccctaactccctaccctattccgctttctctcatccatcatgaaacgaggaaagtccaagacccaatc

SEQ ID NO: 32757 - DNA, 192 bp, Glycine max
  unsure (1)..(192): unsure at all n locations
  Clone ID: LIB3051-095-Q1-K1-B2
gttgaattgggatttgaaagaaatgcagttatacaagctcttcaattattcaatggcaatgaggaacaggcagctgggtttctttttgggggctagaaacaacgtttattttggaaattgattgatttattacttgaaacaatttttacttttagccaattcaattacaaattctaaattatagacccaana

SEQ ID NO: 32758 - DNA, 430 bp, Glycine max
  unsure (1)..(430): unsure at all n locations
  Clone ID: LIB3051-095-Q1-K1-B6
cttgccgtttctcattctgtcagaggtctgatcgatggcgctttgtanaactgggccgagcccgattccggggagtggttcagctcaaaatttgtcgacaaaacttattgtacctgctcccctgcgttttaccagacaattctctaatttagtcaggagaaagcgcaagggagtgtgctgctcttcattaaggaatgctgcatctgcatcttctaaggagtcactggaagatgctccaactaccttgtcagtttgcttggaggaggaaacagatcatgttatacagttcaaaatgtcagactttaagattttagatactgttagtgttggccttggcgggaggccggatgaggtaatttttgaaagcatggtaaaagatagtgctctttgtgtaacacaagagttgtacttcgacagctttccagtgcac

SEQ ID NO: 32759 - DNA, 397 bp, Glycine max
  Clone ID: LIB3051-095-Q1-K1-B8
cccacgcgtccgcaaatgcatacaattactacaatgttgtatctgcttctgcgtggtgctgactcaagttcttctctttcttcccttcttcctcgatctcaatcttcccaaccggattttgctctgtggggggaggggataccgtcggacaggtcggtgactccgggagctaaaccacttcttgtttgggatttgtagtagatttggcctaatatttgaattagaccgtgtagaattgcatctggcaataggttgttgagtagtacgcataacgcattgttttgtgttacaaatattcttaagcttttctggggaatttttttagtttgggggatacaatacaatttgtagctttggttagtgattctccaagatgtcaaaatttgagggtgttatt

SEQ ID NO: 32760 - DNA, 363 bp, Glycine max
  unsure (1)..(363): unsure at all n locations
  Clone ID: LIB3051-095-Q1-K1-C10
gctttatctcattttacaaggctgtttnggcgtatcctaactgggcgttggagnctctcattgtggcgagagatgatgcttgccagagttagctgaagaannngacttattttagtggagggaacccggttagtgcattcgattgggctgatattgatttcattaaaagaagggaaggtatttgaggaatctgtttgaggggatgggactgtttcaatttttgagcattagtatctattccgccatggcttcaaaatcctgaattctttaactgtatcagcaatatcaagacatatagcatctcttgccttgtatacgaggaaaatgctcttggccatgaggcatggcaatggatctagtgtc

SEQ ID NO: 32761 - DNA, 437 bp, Glycine max
  Clone ID: LIB3051-095-Q1-K1-C12
aattgagccattctatctccgaccaaagatcgaacctgtatattgtaaagtaccataggatgaacaaagacggaggttgaaaataagaactaaaaaaattgaatcacagtcacaattgatcacaataacgtactcaatgcaaaactaacaaggcataagacacaaaaaaatgtcaatgacaatactttactaaaggacggtgagctagtggggaaaaatgaggaagtacacctataggagtaaaataaaaaaaaaaggatgaaaaaaaaatgttcttgagatgtaacatctaaaaattcagatttttgtacacgttccattttgtaattgtactttgctaaatcctaggataattatttcttcttcattgataaaaacatgaaaaagtaatatgtaacattgcaagaaatgtttaaatgaaaataataaaaacttac

SEQ ID NO: 32762 - DNA, 182 bp, Glycine max
  unsure (1)..(182): unsure at all n locations
  Clone ID: LIB3051-095-Q1-K1-C3
atagaataaagggaaaggacgtgttggttgtcatggaaccaaagtctagagttagacaacgactacctagttctggcttcaactaaaatgtagctttagagatgatactcgggttcattgttcccttttcatgtaatactttacgttgatccatgaataaaaatttgacaatttacgtngna

SEQ ID NO: 32763 - DNA, 418 bp, Glycine max
  Clone ID: LIB3051-095-Q1-K1-C6
gacaattgatgcaatagcttagttagaattactcatgatcttaattaatggctgagacgtgtgagtctaagagatgcgattgataacaataatgttatttcaatgagagaaaaaaaattatgcaataacagtataaaattttttatataatcgttcaattatataataagtttattaacttttaacataactatcttaaagtaattcaagtgatggagttggatgagtcggataagaaggaaaaatacatggccttaaccgtagaggagttcaatttaagattgaaattgaagaggaattttggaaagtagcttgaaaattggaatctcttttaagataaaagacaggaaccaagctatgagggagggtgatagtaatagaaaagactttcacttgactcttaaaaaaactagggacc

SEQ ID NO: 32764 - DNA, 317 bp, Glycine max
  unsure (1)..(317): unsure at all n locations
  Clone ID: LIB3051-095-Q1-K1-D11
accgcccacgccgtccgattcaacatattatncgataattaaggcaagttcttgtagccctggttgggtgtacattacagcgtgaggtagacatnnggcaaaatcaatagccagaagccagtgaagcgccattgatcctggtgcattcctcgcacaaccctatcttatcattattcaattttgttgtctgaatgaaagggaagaaggggtgaatccgtaggggatgggggcctcgctgtcgaacctgggaagcaacggttcggccgccgctccgggcctcggcgacatcccggagaattgcgtcgctcgcgtctttc

SEQ ID NO: 32765 - DNA, 414 bp, Glycine max
  Clone ID: LIB3051-095-Q1-K1-D4
gagggattctcgtgggaggaggagcagggagagggagtatagagagagggacggtggcggacggaggaggcatgggagtccggccagggaagggagcgaggagcgccgtgcgaggatcgagcagtggaatcgggagagggaagagaaacaatgatttcgcaatgattctgtgttcatttgcttgcgaagaatgaataaaccatcaattaagtcctcaaactattattaccctgtgtctctccttagtagtccttaaagtaatgaatgaaattagtgtttaaggaatgtatggagggctgaatgtccgtcactgtactctaatttagaaggttatgttaatatttggaagattacttggcatgctttattggacttttaggactacttaaatagtttagttttttttattagttt

SEQ ID NO: 32766 - DNA, 291 bp, Glycine max
  Clone ID: LIB3051-095-Q1-K1-D9
acggtcatgttccaagagggccaacagcaacattatttcccattggttgatgagtgcaaagagtgcacctaaagtgtgcagagtgtggcacctaacaacccagatggacatgctttagaatatcatcagtttgatttacatcaggactatgatcatggcttgtatactgtttttaatggtacacgttattgtgaggaggatgcgattcctcatatatctagctacctaccaagtatctgccctcctccttctgcttacttaggcccaaaatgtgcactttgagactgttca

SEQ ID NO: 32767 - DNA, 311 bp, Glycine max
  Clone ID: LIB3051-095-Q1-K1-E10
ctcatccctatgatatcactaactgtcagacttaacatttcaatttttaagtaaaaagtggattaatttgatttggaaagcaaggattaatactatgccatattatcaccaaacaacgcacaaatattttactgaacacacacacacacacacacacattaaccattatacattatttacattacaaagagtaattgattttatacaactatgatatttacatctccaaatcaaaagaattaatgaaccacactacagagaagttgatcacaaaacataactctatcccaaaataatctaaacgctattat

SEQ ID NO: 32768 - DNA, 475 bp, Glycine max
  unsure (1)..(475): unsure at all n locations
  Clone ID: LIB3051-095-Q1-K1-E4
taaaacagaaatggatgaaactatgaatgatgctgagttgaatgaaaacccggagaaatcggaggctgtattggaaggttaaagtcaatgtctattagacagatatttgtcgtaccgtgtaatcatagtagtctcaatcagcatttttagcacattacaagtgaagtgaattaaaaacaaaacaaaaaaggcactaccgcatatgctgtagtagttattcagtcccgtgcaactaactcgattagaaattgttcattttcatgtgttgtattagacgaatttatttttcaaggaattgaagagtatgaccaattgtatactatactacacggcatgtcacccttcattatatgagtgagcagagaactgaggaaattccgtgncccaaanaancaacgtgtagaggatctaaaccatttgttgatggctgcgaaagatcacatctggtgggatgtgccaattgaagcattaaaaa

SEQ ID NO: 32769 - DNA, 442 bp, Glycine max
  Clone ID: LIB3051-095-Q1-K1-E5
gtttttgaagagagagaaagtagagagagagagaaacacaactgctttgccaaaccttaatttcagggcacttccaagctgacaggaccagttgttgttccctttttgtgttgtttgattcagcgatttctggttttcgttttttttctttctttgttacaaggagagttcgatgtctttaagttgaataacttgttgggacatatttgactcggtgcttttcttttggtgcttgcctcatgggaaacagtgaggatgagaaatctgttaagactggaagcccttcttcttcacctgcaacaactgatcagaccaaccaacctaatattcatgtctatcctgattgggctgccatgcagtattatgggccaagagtcaacattccaccatacttcaactcagctgtggcttcaggtcatgctccacacccatacatgtgggg

SEQ ID NO: 32770 - DNA, 416 bp, Glycine max
  Clone ID: LIB3051-095-Q1-K1-F10
ctctttgtccctttctctctctatttcttttccctagatctatgctttgaaagtgagcagatggttctctgttgcagatctaatatttctccaccgctctttgatggaaagcaatctgatctatgctttcgttctcactctctaaagttggtgggctttggcttcaaattgcacaacctaggtgaagggacacaggacttgtgaatcaatggtagttcttacttttactcgaggaactttgagaatcttttaaaagtggagtggttgtgcaaacactatgatgtctcgtagataatacatagaggcaacaccattatgggatgttatattccatacatgtttgcaatttaattgcatgcacttaagtggcccttctactctatatgcactccactcttgtaaagatttttgggatc

SEQ ID NO: 32771 - DNA, 457 bp, Glycine max
  unsure (1)..(457): unsure at all n locations
  Clone ID: LIB3051-095-Q1-K1-F3
cccacgcgtncgcccacgcgtncgnccacgcgttcgcccacgcgtncgttaacctagagaggagagactccacagaatgataccaaggagacngcagaaataaataccaatgatactgagaaacaggaagaggttccagcatctcaggccaaagagaaaatagggattgaggatgacggcaaattcaatcaagaagaagcaaaagggattgaagaagcaataaaagcacagttaccagaggaagaagtcaagacagcattgcccactgctgcctttgtccaaggcgatactgatcaaataccacagcagcaaacactgcaggatgatgattcagaagtgattggtattgcgaagaacatcgacactccagaaattgaaagtggcggaaggtccactgttgttgaggaacctgaacaacccgaanacatggacaacatcggcgttgtgaaagaagaac

SEQ ID NO: 32772 - DNA, 352 bp, Glycine max
  Clone ID: LIB3051-095-Q1-K1-F7
acgctcatctttatataacctaattgcaaagattaataccaagcccgttttcttcttgttcgtcctctgtacactgcgggctgatgtctgttgtggcaactgagccatccaaagatgagacacaagcagaagaaccaaagacacagccagatgcctggggaagaggtttaagtggggggcatgattgaagctggcgacacagaagaaactgggggcatggcctaagacgacacaaagaacgacattgcggatgaggacactgttgatgacatacgcgatgatgcatattctacggacaaaagggctgcaaatggatctgaaataaaaatcacaaatatatgaactgaacaca

SEQ ID NO: 32773 - DNA, 457 bp, Glycine max
  Clone ID: LIB3051-095-Q1-K1-F8
atcctctataaagaaagtgcttaatttgtgttgttacttggttcagtttccatggatgtgggggcttgctatatgggctcatcctaaaccttattcagtcacaactggtggaaatctctggcggagtaaacacaccaccaagaatatttactttgcaagttcttggatatcaaaagcttcacgacacaaaagggaaactcaaatagaacataatgttttgaggttccaacaaccaagtttggatcatcattacaaatgcatcagaggagggtctacatatcaagaatgcaatagaaaatttgttgtgaaggcaatctctaaacaacctcttggttttgaagctcatgctttcaatcctaagaacattttggactctgtcaaaaatgtattgtctgctttctactggttttcctatccatacacaatgatttgcataacattatgcgcattttcttca

SEQ ID NO: 32774 - DNA, 285 bp, Glycine max
  Clone ID: LIB3051-095-Q1-K1-G10
aaaaaaaaaaaaaaaaaaaaaaaaaaaaaaaaaaaaaaagggcgaaaaatataaaaagattggtgattaatataaaggtggatgggacaatataaaattttatataatgttaaaataaaattaaatttaattcacttcattttacaacgtttttaaataaaaaaacacttaaaataatttaacttaaattaattgaataacattttcatttatccaactttaataatattcgaatattatcgaacagatcaactttacaaacattttcgcaaaattaataatgaa

SEQ ID NO: 32775 - DNA, 372 bp, Glycine max
  Clone ID: LIB3051-095-Q1-K1-G11
attcagggttcctacaagaatgacttgcttgggcttgagtttgatcctctcttacctggtgacccaaaattgactggagaatacgtgatcacacacatgttaggcattgaattaaaccattccaagtggtgggacttagcagctctatttgtgattctcatatgttacagacttctcttctttactgttctcaagttcaaggagagagcatccccattatttcagacactctatgccaagagaaccatccaacagcttgaaaaaagaccctctttcaggaagatgccatctttcccttcacagaggcatcaatccctccattcactttcttctcaagatggtcttgattctccactccactaaatcaatatc

SEQ ID NO: 32776 - DNA, 382 bp, Glycine max
  Clone ID: LIB3051-095-Q1-K1-G4
gcgtttctctctatagccagctatcatcaattcatcatgtcatcgccaaactccgcccgggaggcccacgcgccgctgcttgtcccgcgccccgatgccgccgcccgcctccccgtcctggcgctcctcctcggccgccgcggccactccgtcatggtccgggagacggcggcgcgtgagctggaggagcggcgcgccgactggacctactcgaagccggtggtggcgctggacatgacgtggaacatggccttcgtcgtggtctcggcggtcatgctcgcctgcaccgtcaaggagaaccccaacacgccgatccgctggtggatctgcggctacgcgctgcagtgcctcctccacgtggccctcgtgtggctcgagtacc

SEQ ID NO: 32777 - DNA, 409 bp, Glycine max
  unsure (1)..(409): unsure at all n locations
  Clone ID: LIB3051-095-Q1-K1-G8
cccacgcgtccggtcctcagcagccacagttcctcttcgaacgaccccttcnatttcgagggtgcaaggatgtgcggctatctcancgctccttcttctcccaagcgttttggccaattttattacctaagcgccccctcaagcccttctaaagattttgatcttgcggctcacgatgatgatgccttcgcctttttcgttactggggaatccaagagccctcgatccgcggcagagcttttcgacggcggcaaaatcaagccgctgagcgaggatgattcctcggagtctgctaaaagcccacttcttcctgccaaacgatcttccatagcccaaagcaagaaagccattcgcgaaaccttctcgacgagaaagaagaaagaaaagggagatttaagtgaagaagaac

SEQ ID NO: 32778 - DNA, 260 bp, Glycine max
  Clone ID: LIB3051-095-Q1-K1-H10
cccacacattcgttgacacatgggcggactcttgggttttattcaatctttcactgctgtgttgctcaacaaaggaagagagcataatactccaatcaacataccccacactgtctgattaggaattcgggttgcacacctactccttctactttccaacaccattcactctgaatttctagtcacagttaggttggttggtaccaacggttaggcataagatactcacaaagagatggcttaacacgcaaaatttattg

SEQ ID NO: 32779 - DNA, 268 bp, Glycine max
  Clone ID: LIB3051-095-Q1-K1-H12
ggaagaaagagtctcttcaaagagtgggatcttgcagattgctgctctgtctcctccttggccatttctatctagcagtcctggagccaatggtgttgattgtggggatgttatggaggagcctttgacagattcgggaagctacccacacgatttggaggaagacaaagatgtgcaaggatggacaatcacaaagtcaagatgggcttgtgatgttcgtccctcaccaagaggtgctgatgatgaacagaagcacggcaaagtgagc

SEQ ID NO: 32780 - DNA, 273 bp, Glycine max
  Clone ID: LIB3051-096-Q1-K1-A11
ctaaagacaaacctcattgaccataatcacatctcctaatgcagaaaccgacatacgaaaggagcgttctcacatgagatgacagacgaccgggtgcatgctatcccaaagctaggtatgtatgcggccaccgatcactggacctttgacgccatccacaggggacccctccgtagagtcgacctcgactccggaacgaactgctgggccttcgatatcggcgacctatgaatcctgagctcccacagatgttgcaccaaacgccagaaatga

SEQ ID NO: 32781 - DNA, 393 bp, Glycine max
  Clone ID: LIB3051-096-Q1-K1-A2
cccacgcattcagacacacgtacgctctccaacgctacagggtctgacgcgaaaacccaggtggaatacatatcgaagagcgtcgaacagcacacactctgtactgttgggcgtctctatctcaactgtaattacggatcaatctcttacaattggtctccacccagaatgaaaactaaccgagacatcatttacaccaggctagctacacaggcttgtactctgaaaacaatcatccagagctgcactagtataatattatgatcataaagcacgaaccaacgctataatcgctattttggacactgagttcaacgcatccaaagtaccatgataaattctttatctataccgcgggatcctagtactagctactaatacctgatatgatta

SEQ ID NO: 32782 - DNA, 234 bp, Glycine max
  Clone ID: LIB3051-096-Q1-K1-A5
gtaggacagctcctcatagtagctctttctttgcaacaaaactttgtctcacttttaagggaacgttcaccatcgtaccatggttactccaagacccatttatattcatactcacctctatttctggctttatatatatacatatatatattaatatacccattgtcaatcaataaaaccgaaatctactacgaaacaaacagcatatacatcacataactgctaccaataaaa

SEQ ID NO: 32783 - DNA, 439 bp, Glycine max
  Clone ID: LIB3051-096-Q1-K1-B11
gccatggtctatcttgtcgtcgttgttgtaggatacgactcagtagttgaaatcaataaatggaggccagaaccaaaatttttaatatcaattataccaaacaccgccattccaaacactttattttgtcgcatctttgtgtcggtgctgcaaataacatgaatccgcttggacagattttcccttagagaacgcatatgagctatctattaaacatatattaggagtgcccgataccagctcctttgacgagattaaagcgtcgtttcgcaaattggccaaagagactcactatgacctagctgagttaatgaatgattccactgtgtcttgacgatttgtactaattctggaagcctacgaggcagagttactccacagagtgtaacttatagttttgcaacccttttgcttgaccttttcagtggcaatcatattc

SEQ ID NO: 32784 - DNA, 427 bp, Glycine max
  Clone ID: LIB3051-096-Q1-K1-B2
gaaaaaatggcatttggcatatatgccgtgaattgcacggcaagcatcaattccactcttgtgcaataatcctttccttattcccttggtgactctcaccaacccactgtgtctgttctttctacctcgacccttctctttcaccatatggagacaactaccacttccgcacccaacactcgacgccgctctttccgctgctccttcgtcacacgctgctgtcgctgcttctgctgttgatactccttcccttaaactaaacaaatgcaccttcttttttttcaatcatcgctgctcaacacatgaaagcagaggaacaacagttacaaccttcgaagctttaccttttaggttctcggtcaaatccacgccatcaatggggagtgggaaaagcagagacatctcaaggttctctactgctgcaaag

SEQ ID NO: 32785 - DNA, 308 bp, Glycine max
  Clone ID: LIB3051-096-Q1-K1-B9
aaaaaaaaaaaaaaaaaaaaaaaaaaaaaaaaaaaaaaaaaaaaaaaaaaaaaaaaaaaaaaagagaaaaaaaaaaaaaaaaaagaaaaaaaaaaaataaaaaaaaaaaaatacaaaaaaaaaaaataaaaaaaaaaaaaaaaaaaaaaaattactataatcaaaaattaatcaattaaaaaaacttaaaaaataaaaaaagactcttcaaatcaattcatcaataatcaaataactatttatccaaaacaacctcctatagaaaaaattaaaccacaaatttcacaaattgaacaaataaaactaac

SEQ ID NO: 32786 - DNA, 433 bp, Glycine max
  Clone ID: LIB3051-096-Q1-K1-C2
cccacgcgtccgctcacgctttctgtctttgtttattcggctcgcacctactttcatgctgcgcagagctacagtctcaccgatcttgcgattatttttctaatatgttatatgtgctagagagagagacccactcttggggacactcctgttaagacccgcgaacgaaatattgctagtccagtgaccccttctgcattgtaggataccctggatcatatttagtcggatcagggtcgtgatctaggtcttgatagctcgaatgttgaatcttaataccttaacctatgaagatgctgggactcctagattgaggatgcttataatggcggtcgtacacaagcttgtactacgaatgatgatgagggggacggttagccatactatatgattgagtgcgagcttaatcgtgtaggccacttaccatctgtca

SEQ ID NO: 32787 - DNA, 400 bp, Glycine max
  Clone ID: LIB3051-096-Q1-K1-C7
cccacgcgtccgcccacgcgtacgctccgtgcgtggctatgatatagcacacatacagggcctattccttactaagggtgtgaaatctggagggagaatgctaggctctgaatacaattatgcgacactacccatttacaatggcgaacagcccctattggggccaccttcttacgccatcgctcatgctgagccgtcagaactcaatcatgcagcggaagaagagacactctatgaggagcttcagagcacgttggatatgaaggatgtggatgaaagtgatgagaaagtttcggactttaacgatggtggaggagtttgtgatgaagaaactggggacggtgattgaaaaagtcacggttgggagacccatacttgcaatgaggaagcgggtgtttat

SEQ ID NO: 32788 - DNA, 433 bp, Glycine max
  Clone ID: LIB3051-096-Q1-K1-D1
atctcacttcagaaatatggttcatttatggtatatacaaacaaagagttgatgtccaggggatgctgcgtcccacagagagcggtaccggttggtccagtagtattgagaatcacatcatccatcatgaacaagatctatgaggaccaatctcagggcataatctgctatgaagatgaaagtggagaaataattcgtgaagggtacgatgaagggcctcgttatcaccgaatttctagtccaactcaacacccaagggatgttgaaatcatgaatcttcaacaacaacaaagttggcttcagattgttaaaggagaagaaatcaatcatttagctaaaggtgctcttcatctacaagaggatttaaactaccataaatggctataactcattccaaaccaatcaggcttttgtcactctcaaaggctttaac

SEQ ID NO: 32789 - DNA, 441 bp, Glycine max
  Clone ID: LIB3051-096-Q1-K1-D12
ttttctctctttcatgtagttttgctaccctaatagacacgaggactatttaaaaacccggagggtcctatcgttccaccggcgccgtcaacctccaaggctcgaaccaccatccttccactcaaccgctcacttgcactcgtcggctcaagctaccaccgcatcacgcctcagacgccgccagttaacaagcatatgctcataaagaatgaaggaagatggtgtttgggcaagtagtggttggtcctcctggctctggataaacaacttactgcaatggcatgtctcagtttctcagtcttattggaaggaaggttgctgttatcaatttggatcccgctaatgattcgataccctatgaatgtgctcgtgaacatcgaggatctcgtgaaactaagtgatgtaatggtggaacattcgcttggaccatatggaagtctt

SEQ ID NO: 32790 - DNA, 330 bp, Glycine max
  Clone ID: LIB3051-096-Q1-K1-D2
cacggacacacgttaagtttggagaacattttttgcatgcatcttacaagggttccgatggggatatggtggtagtagaggactctggtagctagaagcagagttcgactacaggacagggacaagctagtgatttgagtaaacaatcgccacaaggtagaagacttaaagcagtttctgcttctgggaatcgctagttaacattacgctgagacattgaatatagattatatgtacaaattgacacatccatattgtcaatttagcagtgtcaaatacaacatgatcaaaatatataatttaatgatttagcataggttgtgtcaaaaa

SEQ ID NO: 32791 - DNA, 434 bp, Glycine max
  Clone ID: LIB3051-096-Q1-K1-D3
cccacgcgtccggtgcctcgcctgatgattgctattatagaaggcaccattacaggtctgggtctcgaagtgcctcacccaggccaaggagaaggtcaaggaggagctactctcggagtgccactcctgtttcaaagaggagcaactcgcgaagtgtgtcccccaggtcaaggaagagtcattcaagaagctccaagaggagtggcaaatatgagaaacactactcaagaagcccgagtgtgagtgcaagttcaagatcagtatcgaggtcaaatactccaaggtctacctctccttcaacttgaaatttgttggtcctatatggcttgacatcataagattatagtggataatattttagtgtggtatatgcagttctagattgagttttggtttggatccgttcaaggcttgtctaaaaaccacctgatcct

SEQ ID NO: 32792 - DNA, 429 bp, Glycine max
  Clone ID: LIB3051-096-Q1-K1-D5
cttttctccaaacaccgcgccttcagtgtctacggctctgtagccgcctgagccaccgcattcaccgtcatccaccgcttttgttcaaattcctctcacctcttccttccgttcactacccattgcacctgaaagcacgaggcttgctcgcaacacattcgtatacctcctccgtttacttaacgaagggtttgaaccttcggaatcataagcgcactgcgggtgaattcctttttccgtgtgtcccgttgaagttacgtttgttcggtggttttttcgaattctctgaactcatggccgcatggtcttctagaaagttactgagagacgttcttctcaaaagggtagtctcgaatcaacttcccggcgtcagatgtttttcttctgcgccaaaaagtgctcctaagatcggtcactattccaagaaag

SEQ ID NO: 32793 - DNA, 444 bp, Glycine max
  Clone ID: LIB3051-096-Q1-K1-D9
gtgagaccgaggcctctcgttctctgaccttggattcaagtcagggagcatttcgtaaaaggggtttccctggggctctgagaagttcagctatcatgacatctgagcacaaccgaacatcctctggcaggaacacatccaacataaagaatttggagacaactcttaggggtattgagagcctgcatttcaatgacgagagggtacattattagcagctaccactctcgatcacctttcttctttgtaaattctaaaaaggcttatactctttttgacgaactaaggagtggaatgttgtctatgcattgtgttgaagaaaagctgcaaacaagttgggaatatccctcataagtatacaataaaaatatatgtctaggcagcttcctaactaaactggccttgtaaaaggcttctgttcatacagtttgtgttatactgaca

SEQ ID NO: 32794 - DNA, 428 bp, Glycine max
  Clone ID: LIB3051-096-Q1-K1-E2
gcagttcattctatcatatccttgctcatataatgcacttttcaattacaataccccagggccagaaacttatgttcatgaccatcctcaaggtcccaataacatttacttgaagacaattttgagttgaccttacagcctagttccacctatacaaacacccttgatccttcattcttttttgagttgaccttacctagctccaatactggcaacaataatactcttgggcatctgaactatctccattctttttttacccctttctttgcagtggatttgcgaggttttaaagaaattaaatgcgtttttatgtgctaaagagctaggtaattatagaattcatctcacacatacttctttttactaccttttatcttttagattttattcttgaattatcgttgtttaacggagtaatttaatta

SEQ ID NO: 32795 - DNA, 180 bp, Glycine max
  Clone ID: LIB3051-096-Q1-K1-E3
gtttttaattctaagacttttactactatcttcactattgttgtattacagcttcttctgcgaaggttctttagttcaacggatatcccaaaatcccaataacaataacttcaagacaaatataacctaaacttacaacctaataatccctatacaaacacacataatccattattcttt

SEQ ID NO: 32796 - DNA, 432 bp, Glycine max
  Clone ID: LIB3051-096-Q1-K1-E4
gcgaggtgcacctgggttgcccagccggtttctccggaccctatatttcccttttctctgtctctacgaatctccaattcgaccaagatggtgaccttcttctccctcgacgacgcaccgctatgttcgaagcaaacgcacaacattcatttagtgtcagaatccagcataacatcacttcgtcaattccaaatgttggtctccaggtttggagagctgaactattattatctgattttatattgcataaagcatcttcttcctctcaacttcatcaagttattgcattagaacttggcgctggaactggcttggtgggtttattacttgcacgtgttgcaaatgcagtgttcctaacagaccatgggactgaaatacttgacaactgtgcaaagaacgttcagcttaattttggattattgaattatcaag

SEQ ID NO: 32797 - DNA, 429 bp, Glycine max
  Clone ID: LIB3051-096-Q1-K1-E6
gcggagataccactggcttgtccatccgatttttcaagaccctatatgagcctatgctatgggtctactaatctacaattcgaccaatatggtgaccttcttctgtctcgacgacacaccgctatgttcaaaacatacgcacaacattcatttagtgtcagaatgcagcataacatcacttcggcaattccaaatgttggtctccaggtttggagagctgaactattattatctgcatttatattgcataaagcatcttgttcctctcaacttcatcaagttattgcattagaacttggcgctggaactggcttggtgggtttattacttgcacatggtgcacatgcagcgttcctaacagaccatgggactgaaatacttgacaactgtgcacagaacgttcagcttaattctggattattgaattat

SEQ ID NO: 32798 - DNA, 433 bp, Glycine max
  Clone ID: LIB3051-096-Q1-K1-E7
caagtgtagaagggatcaactgtgggctacctaatgataaagttcagcatgtagatctgggtgacacaattatgcagggttctgctgtcagttgtcagaaaataccttggaatgagggaaatgccaagttagaagacagagaaagttctggcaagaagttaaagacaggtttcggtgggatttatggttctggaggtagagactcttttaatgacagttttacatctcttggaaataatcttggctactgttcttcagttgaggacaaacgatgtgaggaagcttgtgatgagaaaatcatccgggaggacttgggaaccctggaaagaaccttgtttccagttggcacacagaatattaccaactcgctatcagtgatggatagcatgtcaaccaaaggggttggtgagtatgatgaacgagttcaagatgg

SEQ ID NO: 32799 - DNA, 364 bp, Glycine max
  Clone ID: LIB3051-096-Q1-K1-F11
accacacgtactaatatatatatatctctctctctctcgcatcacaaattcatcaaatcctgggggagtctcaatagttgtgcttctctctttctttgtgaaaaaacataaagtccaaaccatggctcataaaacctataaagaagaaaccgacttcaaggttcccgaaacgattacactttgcgttaacaactgcgacatcaccggaaaccctgctacgaataacatgtgtcagaagtgcttcaccgtcttcaccacctctaccgacaccacgtccagcgccagaggtgccggaatagcttctacggctaccagatccggcatattcgcgcgtgcactgaagagatcttttcccgaagagccc

SEQ ID NO: 32800 - DNA, 432 bp, Glycine max
  Clone ID: LIB3051-096-Q1-K1-F3
agaatctgttagagagtgtgttgttggcatttctccttctaagaatacaagtggtggttggctacaatatataccttttgtgaatatcgtctgttgttaacttgttaaactgttttgcattttgcacatgacttgtgctggatgtgtgttgtgaatataataaatctaatcacctagccgagaaaattatgggaaaactctttttctgggggaattcattagaaaatcccatatggcattcagtatgcttaaatttttttaatgatctcattgatctatacttctttagtataaaaccaggaatgattttggtgaactgctttcttggtccttatatgccagtgggtctgtaccatgcaacttgacaaggagagttattatagtttatctcaagtctctcttcctagttttagtgataacttatgtctctct

SEQ ID NO: 32801 - DNA, 439 bp, Glycine max
  Clone ID: LIB3051-096-Q1-K1-F4
gcagaatgctctaagcttggaacgttaaaacacatatatgttgacaagaagagtgctgggggtgtctacttacgatttgaagatacccaatctgcaataagtgcacagcaggccttgcacggaagatggtttgctgggaagatgatcactgcaagcttcatggtgcctcaatcatatgaggataaattcccagacagcagataaattcacggtttatgcgagatgaggaatctcgtggcagaaatagtcatccttagaattatataacggcttcttttgagatagatgtagctatgcacatttgtcttgggaagttaaaaggtgcttatttgtaaaagctgcagttactactttcataaaattttcgggggtgttggtttgatttaagcgtcctattatggtattactgttgtggtttggcagtgttattgattggaac

SEQ ID NO: 32802 - DNA, 373 bp, Glycine max
  Clone ID: LIB3051-096-Q1-K1-F7
cccacgcgtccggaaacaaataaaaaactatcaaaaaaaaaaaaaaaaaatataaataatgggtgactctattatacaaggatcatagctaccaaatgtcagaatatacctttggatcagcgatattccaagtttcatgacataaaaaagcctggcattaaggtaacgacacgttactgtagtatttatcgttctacacgcaattactttgcaaatgacagacttacatcaattgaaaataatcttagctaatgtgctttacttcagttcacatgatatcatgaagctcgtgatgagaaaatcatccaaatagacttgggaactctgataagaacactacttacactttacactcccattattaccaactttc

SEQ ID NO: 32803 - DNA, 440 bp, Glycine max
  Clone ID: LIB3051-096-Q1-K1-G11
caagaaaggaggtggtagtttgttcagtgcatctgcttttgatgatggtgaggaggaggaggatgagacagtgattaggttttctggcaagaagaagtcctctagaggttcgaagaactctgcctcggcttttgatgctattgatgatgatgcggatggtaaggtggtggatgataagaatgacgatgttgatgatgatgatgagcctgttatttctttcactgggaagaagaagtcttccaaagggggtaagaagggtggttctgtgttttcggctgctgttctcggtgagattgatgacgatgaggagaataaggatgatggtggtggtgatgatgatgatgatattggaccgatcactttctctggtaagaaaaggaaatcttccaaaaaggctgctaattccgttagcaaaggtgcttctgttgaggaaggtgatg

SEQ ID NO: 32804 - DNA, 410 bp, Glycine max
  Clone ID: LIB3051-096-Q1-K1-G12
aaaaaagaaagagatttgaaagctaaaggggacgatggtgaagagaaaaaggagaaggatgggaaggagaagaagaactgagacaacacagacaagggtgacaaaactgatgtagagaacgtcaaggggaaagaaaatgatggggaggatgatgaagagaagaaggcaaagaagaaaaaggagaagaaagacaaggatggcaaaactgatgcagagaagatcaagaagaaagaagatgatgggaaggatgatgaagagaagaacgataagaagaacaagtgtgacaaaattgatgcagagaaagtcaacgggaaagaagatgatgggaaagatgaagggaataatgaaaagaatgacacagaaaaaggagacggtgatggtgaagagaatacggaaaagaaagataaaga

SEQ ID NO: 32805 - DNA, 362 bp, Glycine max
  Clone ID: LIB3051-096-Q1-K1-G6
gcgtgctggtgtttgtgctcttggtgctgtcatagctaggcataatggtgatgaaagggtacttgactattaccagaggcgttttgttttattcattttgtatccttgtgataattccaatttacacatgaaatccacttgtttaaccgcgtttcatattattgcctttgcttataacacattgtgatacctcatgatttgccctatgagctattgtatggcagagcaagttacttatgggcttgttcattcttaaactagcatattggtaacaacaaattacatactacccacattgttataaggcctatgtgctttatgatgtgtctcatggcatatttactgtgcaattcattttaaca

SEQ ID NO: 32806 - DNA, 435 bp, Glycine max
  Clone ID: LIB3051-096-Q1-K1-G7
cccacgcgtccggtacacatgaacctagaaagtcatttgacaattctagcagcaatacaggcattcaagcacagaagagtgcaccttctcccaataacttgcagaagacagcgaaagaaagagataattcagatcaagtttctgaagtgcaccatgatgcttccgatgcttttccaacagagtgggtgccaccaaatttgagtgtacccattttggatctggttgatgttatcttccaggttcatgatggtggatggattaggcggaaggctttttgggttgctaaacaaatcttacaactaggaatgggtgatgcctttgatgactggttgatagagaaaattcagcttctccgtaagggttcagtggttgcttcaggggtcaagcgagttgagcaaatactctggcctgatggaatattcataaccaagcatc

SEQ ID NO: 32807 - DNA, 423 bp, Glycine max
  unsure (1)..(423): unsure at all n locations
  Clone ID: LIB3051-096-Q1-K1-G8
cagatttttcgatttcttaacggtagcatgttctcacgccttcgtcaaccttctgcgttgggccacactcattaatctataatcttgaggcttcgattcaccacagaccctgaattttgaattgctcttaaacttcaaacttcccacttttttgtttttgtttttgtcgtttggatttggtgttttcaagatcatggggtggtacagaaggggaaagctcgctcttgatcattttcgtagattggcttcaagggttacccctcaaaatccaatttttcagcgtggtgcgaggatttgctcatctgggtatttggattcaggttctaaagtagctagctttaatgggttctcttctttttgttcaacttctcagagattaggcacacggngtgtttgtggagttaacaggaactttcacaattc

SEQ ID NO: 32808 - DNA, 433 bp, Glycine max
  Clone ID: LIB3051-096-Q1-K1-H10
ctttgattccatttctcattctcacttccaaaactcctccattcatttctcgcatttctacctgtccaaagctctttctctaagatcgagctttggaaaacttgaggaagcatttgagtaacaaccccttttcagatccctgaagggttgtgttcatttgtcgaaataataacaacttgcttggaacaagcataataagcatggcaagcgcgttgcagcttcagggggttcaagggaactacctttgtgtgagtgtgaggaggggcttgcatcattgcaagcctcaaattgggtttgcagcatttggtgctcctgtttgtgcaagaagagtttggggcaatagggtggcattcaatgtcactacttgcaaggcctcaacaacaagtgatgtgattgagaagagtgtgactgagaatagggtggtgagtattga

SEQ ID NO: 32809 - DNA, 247 bp, Glycine max
  Clone ID: LIB3051-096-Q1-K1-H11
tcgcttattatggcggtggttggggcggtccctgtcgtggtggtggcggtggtggctgtggagggtggcgtcgacctaatggcaaccctcacaactaaaaaaaaaaacttgctaaagcttctttacaggtttaggttttcgcaataaataaaacttcatgagaagtgtagttgtaataaaagtggaagtctctcttctcttgtgatataaaggaataatagatttatatatgtattttcttatcttt

SEQ ID NO: 32810 - DNA, 298 bp, Glycine max
  Clone ID: LIB3051-096-Q1-K1-H2
atcggtcttcgttatctcactaccctagttgtagcgcaagctcttcctgagataccatatggggtcctttatgaacgtggaggataaccttatctaatcttagcacgttgaatataatattcggactcttaacaacaacaactttcatatgtcatagtccctagcgatagtgaagaaacagcgaatcctcgatcaagctacctatctatagctccttgctgatgtacgcaagtacaacgttaacaatgcttgctctctcactcatcatgaactgatcaacagctaactcgtaaggaat

SEQ ID NO: 32811 - DNA, 215 bp, Glycine max
  Clone ID: LIB3051-096-Q1-K1-H4
gcgctctgacgttcgcaccagcggacattcgttgttatacatgtggaaacccacacatgtttaggggcattccttaaacaaggggtctatgcagataatcaaactacgctctcattcgcacttgcccgatcccttaatcatccacactgatctcaactgctgcactgtgtttctcaatcctaatactgccccagttaccatagttgactattgtc

SEQ ID NO: 32812 - DNA, 390 bp, Glycine max
  Clone ID: LIB3051-096-Q1-K1-H5
gttctgaaaaatgagttccaaagtttttcttattctacttatgttcatggccactatacgggtgatctcctctgaggtggcacccgatgatgcataccacaattttgacaaaacagatgggaagcgtagtgcaaatggggtagatgaaagcaaatattggcgtggtggctatggcgactatggtggttggcgtggtggtggttgacgtgctggctatggaggctggcatggcggctatggtcgtgggcgtggtggcatatggtggctggcgtggaggctctagtggctggcgtggcggctacggaggttaacgtggtgtctttggccctatcgaacataatgaggctcggattgattctagcccctacaactctcaaggaaacttgctaa

SEQ ID NO: 32813 - DNA, 358 bp, Glycine max
  Clone ID: LIB3051-096-Q1-K1-H8
attcattcaaaatctatccattctttttttaattcccccccactataaatatgtatccggtcacaccaagctcttgggggacaactctgattctatgcctacgtcttcctccaaatcacaacacacccaattacaccctctgttctctgcaaatgcggtgaatgagaacacttggctttaattcggatctggatatggcgattgaagcacagttgtatcccaacaatgctcctacgtttccttttcacgtgtcaagggtagacaaatctccagcagcatatagtcatagtcacaggcaacaacaaccagctggctggcagatgaatcagaacattcctcttgttcctcccaactcttc

SEQ ID NO: 32814 - DNA, 437 bp, Glycine max
  unsure (1)..(437): unsure at all n locations
  Clone ID: LIB3051-096-Q1-K1-H9
tcgggcaatgacaagaacgagatagagatntgctttctagagtggtggagtaactcttgggccatgcgaaaaatgtttggaatttgggggtcaaggctccttgaaagtcttccatattatcataattaagggccttgtctgctgttaattcagatccttcctttaagctggactttgaaggtcttacttaccacctgaaattatggggtggagctgtcattaatggaattgaattgagctggataaacctcttcatgactttcaatgaaattgaatcaaacaaatggagtttatagctctggtcctctggagtaaatatatatatagggtggcgttccaaagaaccgaaacgacccttttccttttggtatgtggtttggttttgcacgggataatgcacttgaaactgaccaatgccttcacatggtttacatgca

SEQ ID NO: 32815 - DNA, 449 bp, Glycine max
  Clone ID: LIB3051-100-Q1-K1-A12
tcgcgcaagaggaagtgcaagtggaaagtattacttcgagagactaatgaaagaagtgagggaggggcaagaggagctacaaaagaagttcctggaagccatagagaaacgcgaggacgacagaatagcaagagaagaagcatggagagtacaagagatgaaaagaatcaatagggaaagagaaatcttagcacacgaaagatccatagccgcagccaaagacgcagccgttatgtcattccttcaaaaaatagccgaacaacaaaacctcggtcaagtatcgaccaacatcaacctcgtacaacaaccacaacctcaattacaaccgcagccaccactacaacaacaagtgacacaacctagtattgcagcagcacaacctcccgtacaacagccaccgtccgtggttgatacacagtccgtggtgctgacagtggtgtcacaagtga

SEQ ID NO: 32816 - DNA, 438 bp, Glycine max
  unsure (1)..(438): unsure at all n locations
  Clone ID: LIB3051-100-Q1-K1-B9
tcgcccacgcgtcttcaacaacagattcaacagaaaattctctgcagcaaccttaggggcttgtgctgcactgccggtgcatcgcagaaggtgtcggtgccggtgcctgcggtgattcgctcctcggcggatagggaagggaagagtagcagaaaaaagaagcacagaaggaacagtaacagtggcaacagcacaagtgatgatgatgatgatgatgtttggtgtggccctggaattgggttctcaactgatgctgctgctgcatctgtggaatgtgttgtggctaggaagaatgtgtctgcaagaggaaaacttgatgtggtggaggacagggtaacacacagggagcgttcatcttattttggaaggcgcactgtaaagccagaaagcttctcctttctggaagatgaacctgacattnttgcagcacgccctgga

SEQ ID NO: 32817 - DNA, 265 bp, Glycine max
  unsure (1)..(265): unsure at all n locations
  Clone ID: LIB3051-100-Q1-K1-D10
tcgggaggacatgtcggaggaggacacggtggaggacatggcggaggatgcagatgctgcggtggaaagggctgcaaatgttgctgaagtaaaaatcacaaatatatgaactgaacacactcatatacttgagtgtactccatgtaataactagtatatatgtaagaaataagaaataaaagcatggactctatccgtgcttgggctggcataggttgaatngtttccgncaaccatgcantgtagtgacacatctttttactat

SEQ ID NO: 32818 - DNA, 442 bp, Glycine max
  Clone ID: LIB3051-100-Q1-K1-D9
gttctataagttcacggtcagttctgaaaaatgggttccaaggttttgcttggggtagggatgttcatagcggctatacttctgatctctgctgaagttgcacccaatgaatacgaaaattttaacaaaaaagatgggaagcatgctccaaatgggttatatgatagcaaatggggttacggtggttggggtggtccttggtatggcggctggggtggcccttattatggtggcggctggggtggcccttattatggccgtggttggggcggtccctggcgtggtggtggcggctgtggctgatgaggttggcgtcgacctaatggcaaccctcacaactaagaagaaaacttgctaaagcttctttacgggtttaggttctcgcaatagataaaacttcatgagaagtgtagttgtaataaaagtggaagtctctcttctc

SEQ ID NO: 32819 - DNA, 395 bp, Glycine max
  unsure (1)..(395): unsure at all n locations
  Clone ID: LIB3051-100-Q1-K1-E11
tcgcccacgcgtcctttttttttgtttttggtttctgtttttggtttttcgctgaagcgantgcaatacatcatttggaaacataataaacagcagcacttaaaccagagatgcaaagcacaagttcaagggagacactgaacaaacagataagacatatgagaacacttcataaaagggattccccttagcaaccaccacgaaggcgaaggacaagatgcaaagtggattccttctgaatattngaatctgccaaggtacgaccatcttccaattgcttcccagcaaaaatgagcctctgctgatctggagggataccttccttgtcctgaatcttagctttcacattgtcaatagtatcagagctttccacctccaaggtaatggtcttccct

SEQ ID NO: 32820 - DNA, 361 bp, Glycine max
  Clone ID: LIB3051-100-Q1-K1-F11
gtggacatcagacatgttgtgaatgtggacaagatcttcagtcgagtaccatctgtgcaagccccattgacaccagagttaagctttactaagcggactcttccgttgtgaattaattattttgttgtgtaagctaaaattctttgatttttttaaccttctctggttgtatacaaacgttagatcagctgtgtctattgatgaaaaatggtacaacaaaaaaatattcaaaccaattaaattatttggttttatatggtttggacttgtaaaaaaattctttaaaccccaacctaacaaatgtgaacacgaatatgaatgggatgtttcttgggttgtccaaacataaaataaacacatt

SEQ ID NO: 32821 - DNA, 426 bp, Glycine max
  Clone ID: LIB3051-100-Q1-K1-F9
tcgaagatatgaatatagaatctgaatctataaaagaaagctgttcaagcctgttagaagaggagaatgagacaccgagtcttccggataaagaggaaagtaaaacagaaatggatgaaactatgaatgatgctgagttgaatgaaaacccggagaaatctgacgctgtattggaaggttaaagtcaatgtctattagacagatatttgtcgtaccgtgtaatcatagtagtctcaatcagcatttttagcacattacaagtgaagtgaattaaaaacaaaacaaaaaaggcactacagcatatgcggtagtagttattcagtcccgtgcaactaactcgattagaaattgttcattttcatgtgttgtattagacgaatttatttttcaaggaattgaagagtatgaccaattgtatactatact

SEQ ID NO: 32822 - DNA, 446 bp, Glycine max
  Clone ID: LIB3051-100-Q1-K1-G9
attatgcaaggtttatcacctatgaaggtcttcatgagcatcatcttcatcaagtggtcggggtctttgatcacagaggaaaagaacagaatgtccttctggcatcaccaacagggtagatggcaagcaagaaatagccgagttgcaggaaacaaggatatatactagggaacatttggcaagtttttagcttctaccttgctatcttgctgttcatagccaagcgggataaatataataatgcagaagaatgtgcccttggtgtggactgcaaactgagactacaacacatactgttccgatgtgtgatgaggtatgaagactatggttcgcatcacaatcaatgtacgattacatgttaatgatgacatatctattgctgattggattaaattgtgtctagatacagttgatgatggagctttagaatggattcttgttcttgc

SEQ ID NO: 32823 - DNA, 445 bp, Glycine max
  unsure (1)..(445): unsure at all n locations
  Clone ID: LIB3051-100-Q1-K1-H12
gaagatggtggttgcaatgatgcttatatttcttctaatttctacgcaaatggggagcgttgagcccgatgctgcagattgcttggatggttgcactactgcctgtgttcaaagcgactcgaggcttcaagcacggtgtgatcgcaagtgcagcattagatgcggtccagattccacaatcaaggaggacatgggttgagtatgtaaagtcacagcgcaagcaagcagtgtctgcttgaccaacaccgtgtcttttttagtccttgcttatatatgatataacattttaaagtcttcccgatgctgtagtagcatccaaataaacatggatgatagacagctttttaagatcaaaatttgtagggtagatgctntgtaacttgaaggaatgtgatatgaatgaatgtttcattatgggcataaatacatcactgccaattgtgac

SEQ ID NO: 32824 - DNA, 361 bp, Glycine max
  Clone ID: LIB3051-101-Q1-K1-A11
aaaaactgaacataaactaataaaatgaaatgatattaacaaccaacaagcactaaaaaggttgggctatatataaaaacaaaaagataaatgaagccatgctcgttctgatggctcaatacttcattcacttattgacgacgtcaatttttaacattattgccccaaattgtcttttcacttagcatatgctttaaacacctttattcttgaaaaatgccttgtgctcataacttacacgtggtacagactgatccctttatcccagcttacgttgtttgaaaaaggctatcacaagatatactattgtcttaccttccaatgcaaagatcgaaagggttcacgctctgtactggacatt

SEQ ID NO: 32825 - DNA, 337 bp, Glycine max
  Clone ID: LIB3051-101-Q1-K1-A12
aaaccctagcagcgcgcaaacaacatgccactcgaaatcttgaaatctgtgatctctaaaaaacttcagtttttggagattaggatgtagcgacttggattctttgctgcaaatgctttgggcaagtggctgtgtgcttctgctttgtgtgctattatttattatgtggtgcctattgtcagagaggaattctacaattctcaaggacagttacttgcattgacatctgatattatcacattaagtggttacttaatctcctcatggttccctgtgtaatgattacttcaaacgagtgactatcgtgtatatgcacagagtatggagattggggacc

SEQ ID NO: 32826 - DNA, 320 bp, Glycine max
  unsure (1)..(320): unsure at all n locations
  Clone ID: LIB3051-101-Q1-K1-A2
cccacgcgtccgcccacgcgtccggcgcccgtggcccgagacacccgacgccaccaccgcggggggttggttgcttctctcctcgaggcaccctgtcaaccatgtacggcggcgacagcgacaacagcgacggcggcagcgatgacctgcgccgcggcgacacgctggacttncggaacctgaaggtggtttccgccgtggggcgcggcgcgaagggagtggtgtttctggcgcggcagtccggcgcagcggcgggtggcggggagtgggtggcgttgaaggtggtgtcaaaggcgcttcttagaaaaaggaacaaaaac

SEQ ID NO: 32827 - DNA, 277 bp, Glycine max
  Clone ID: LIB3051-101-Q1-K1-A3
caaggttagccactttgaaatcagtggtgtttaagtgcctagatggatattaaataaagtcagaaatctgtccaaattatagtggccagagctgaaatggcgtatgttatatatattggactgagattgctccttctaatggtccaattttcttatgtacatgcttatattgaaactagttttagactcaatacgcgatcttaaatatttcaaatgaattgatttttgtgctatttagattctattattaatgcttaataactgcacaattactgaa

SEQ ID NO: 32828 - DNA, 381 bp, Glycine max
  Clone ID: LIB3051-101-Q1-K1-A7
cttagtcatcctcttccttctttctccaccaaaccttaaacctttaactctaaactcgcatataacccaatcaaatttgcctttagattctcatttcccatcaaactatatatatttctctctctctctctctctgtatccttggaatccaaaatattccaactaaacgtttcttcctttcatggcatatcctacccgtctttcattcagttcaatctcatacttgtcggtgtttctctaatgcaattagttgttgatgaatgagaagaggaacccaaagcgtcaaaaatcactgcctttcaacatgcctgtgacagactcaaataatccacagaattttgatgacaacattcttttccccggtggagagattgtacaata

SEQ ID NO: 32829 - DNA, 455 bp, Glycine max
  Clone ID: LIB3051-101-Q1-K1-A9
ctaaactgtacatttactcatcactgaaatcacaattacaaccaacgtgcactcatggcttcctctatatttaaaaacaaaggatacatgaagccatgcttgtcggttttgttcagtacttcatttagttattgaagtagtaaatttttaacataattttgtcaacttgtcttttcctcagtatatgctttttcacctttatttttgaaatatgccttgtgctcattttttacaggtggaattgtctgatcctgaagccgagcttaggttgcttgaagttttctatcacaagatatacaaggtcttccctcccaatgaaaagatcgaaagcattaatgatcaatactggacattacgtgcagaggagataccagaagaagagaaaaatctgggtcctcatgatcgtctaatccatgtgtatcattttactaaagacacagctcagaatcaaatgc

SEQ ID NO: 32830 - DNA, 202 bp, Glycine max
  Clone ID: LIB3051-101-Q1-K1-B2
acaaagtaaggcaaaagatttcagaacatatggacttgtggttatctgaatgcgtcgacgcaggcagaagttttatatgattatttacataagatgtgaatgatgtacttttttttctaagttgttaatgatgtactataactccgcaaaaaaaaaattatattaataaaaaaaaaataattaataaattttgtattttatt

SEQ ID NO: 32831 - DNA, 326 bp, Glycine max
  Clone ID: LIB3051-101-Q1-K1-B5
gtggctactatggctatggctatgagaactcagatggttagaacgaactgagcggagggccataggccaaaggtgagtaagaccaaaaaggtagtgcaccgactatactggcagtcaaatggcagactttcgactgcaactttaggcacagatgaagatagagacaagactagtaccattctggaatgtaatcaatataacaaagatgattatccagaagaatatactggtgcctaaatacttgtcatcaagtcttacaacgaaggatgatatccataccagtattaagcatgatgtgtgggctagtacacaaaatggcaacaaga

SEQ ID NO: 32832 - DNA, 349 bp, Glycine max
  Clone ID: LIB3051-101-Q1-K1-B7
agcgtccgtccagcgtccgatcttgttccctgcaagagaaagaaagaagggagagaagaagttgttgggttgagttggattggatttctaatctaatctatacctttcttttatcctatgcttttaaggcacaaacccttctttcttccctcttctttcttcttcttattgttattccttgcctttaccctttatggaaggaagaaggaacaactatactactattatccttattattgttattattgtaattaatctttttattatagttattgttgatgttattattcctcaaatatggattccttgtgcctctccaacgactcagttgtttctggattcaaagaca

SEQ ID NO: 32833 - DNA, 435 bp, Glycine max
  Clone ID: LIB3051-101-Q1-K1-C10
attatagtgattgtactttatgctttttaaaacaatattcccctttgtttcctttttctgacctgatttatttttgagatgggaggggtgaaaccgtgaaagaaaagatagtactctactatttagcaagaatggtaaaatgtgtgctgagctaaatataaatatattaagtgttccaatcaaaggctgttttagcatgatctgatatatttcttctgatggaattgttcctgactacaggaattagtgtggaattggtcatgcggattccttattctctttcaatagtttttttctattcttaataaattctttgtttatgagtagaagtagatcaattgaaatggaagaagatcaagatcagcagtcaaattgtacaaccgcgccaagcaagtagcggacattggagtctcattgttaatatcgtagactaca

SEQ ID NO: 32834 - DNA, 462 bp, Glycine max
  Clone ID: LIB3051-101-Q1-K1-C11
cttatcttagcaatagctaccgctatcacaacaatactctattaggcaaaaacaccaaatgggagatgaaaaagagcagcctaagaatgaaaccgagaagaagcccgaggaggccgccgcagcccccaagaaagactacggacccatccctgtcgattacaaactcgacttgcattgcgagggatgcgtcaagaagatcaaacgcacatgtcgccacttgcaaggtgtggaaaccgctaaggcagatctatcgtcgaacaaagtgactgttaccggcaaattggatgccgagaagctgcgagataagatcgccgtgagaaccaagaagaaggttgacatcatgtcagctacgaccaaaaaagaagccgtcgccacggaaaattcaccgcataaaaaggttgaagagtagaaacctgaagagaaaaaaccagaagaaacacctaaagagagtaatggtgtttt

SEQ ID NO: 32835 - DNA, 430 bp, Glycine max
  Clone ID: LIB3051-101-Q1-K1-D3
tgaaaagggaccatggaggcaaattcaggtgccagcgaccgaatttcgagaatcgccgggcacctgcgcccccagagagaggatgatgtttgtttgaagcgtagcgattgccgtgcaaaaggtggggtctccggattcaaggtggccatattgggtgccgcaggaggcatagggcaacctctggcgatgttgatgaagatgaatccactcgtttcacttctccacctctactatgttgttaacacccctggcgtcacttctgatataagtcacatggacaccggcgctgttgttcgaagatttttggggcagcagcagcttgaggatgcacttataggcatggacttggtgatcattcctgctggtgttcctcgtaaacctggaatgactagagaagatctcttcatttaaatgctggaattgttaaaca

SEQ ID NO: 32836 - DNA, 428 bp, Glycine max
  unsure (1)..(428): unsure at all n locations
  Clone ID: LIB3051-101-Q1-K1-D6
cttcagatctggaagatggctctgcaacaagtttctaacttttctggccatcatttccggcctgatgggtacgtacccttcctcacttactttattttaaattctttaattttgacttgtctaatcacactttaatgttcaattttaaagagatcaaattataatcatgtacaaccggtacactatttaaatttataatatgttctaatgtataaattaataagctgccaacaaaattttaattcatataaaatatttgaagtggtaatattactgacaattggacttaatgttatttatttgtgatagtttatttgaactttatgatatattnntttattaatatanattatcagttacactgtaatcgattgatttattatcattttaagtttatttaaaaaataatattgtcttttggacctaga

SEQ ID NO: 32837 - DNA, 506 bp, Glycine max
  unsure (1)..(506): unsure at all n locations
  Clone ID: LIB3051-101-Q1-K1-E10
tcgtgaggggttggctgcttttgggcntttctcttaaaanntagcaaaacaaggcnnaggggttgggttcttaagcggatactgnttacgttctttaanttccaagggcttttgtacgctacnncagtatgatcctgacannaaaatgtgcaggatgcaantgatacccatatatggaangnntcacttgtggatgaattcannaagaaaaccatcgatgaaanatttagaatctcatcatntgatgatttacttagtacccaatgtggatctcaggctttggcggtcatcgtgaggcatcatgtcttggcccttacagacattattcaaggacgaaagtttcatgaggttgggaagcatttaaagagattatggtctggaacatttcgtgtaatggatgacataaaggaaactgttagaatttctggtgaaaaattatgccgtgctgtaacttccttgacaacaaggctctgtgatgtctctctaactgatatgtcagatgcgca

SEQ ID NO: 32838 - DNA, 177 bp, Glycine max
  Clone ID: LIB3051-101-Q1-K1-E8
gagaaacgtgtgattatgacacgagatgcaaaggggcttatacatgattatgtgacaaggaaccaattgtatagagtgaagactcttctaagaaatgaacagctactcaagggtattgaagctttatagatggaaatcaatgatgatcagctaaggtcaaggtgcacatattgcagt

SEQ ID NO: 32839 - DNA, 438 bp, Glycine max
  Clone ID: LIB3051-101-Q1-K1-E9
ctttctctctctttcattccgcttttctttccgtttttgctttttttaattgaaatatgagtgggcttctttccaaatgaaataaccgacagtaccatttttggtgtttcagtgattgaaaaacagtggctagttgattctcctttcatatatagtccatcacatgcttttgggttaatatttgtttcctttgatgcccctatagttttctcaacttatttaattactgtgtaaagtttatgtgaaattggaatcgtatctactggatcatggcctttacctgtgctttgtatggtttggttagacccataagttgaagggtaacgcactcagatgctatctaattcccattgatggccctgttttcatggatttgggttggttatattatatgttttagtgcccagggtattttgggttgagagtttgaaaaaaata

SEQ ID NO: 32840 - DNA, 314 bp, Glycine max
  Clone ID: LIB3051-101-Q1-K1-F10
gctagtccacacactatgttctgaaaaatgtggtccaaagattctcttattctacttaggtgcgtggacactatacgttggaactaatttgacggtggatcctgttacgcataccaaagtcctgactacacatatgggcagcgtaatgcaaatggctcaggtgaacgtaaatattggcgtaaacgctgtggtaaatggcggtccgggtaccatagttaagatcactggctttggccctagcgaacactcatgaggctctgatcgatgctcaccctctcagactaagacggatacttgttcaagctcatatagga

SEQ ID NO: 32841 - DNA, 256 bp, Glycine max
  Clone ID: LIB3051-101-Q1-K1-F11
gtctggtctcacgcgctgtgagagggcaaccaggtcgtacagtaattagaaattttttgtttaggtcaaggaaaattttaatgtggttttgccatggactatgatctttacaaaaccgaaggtttctctttcttttgtcagataaatatatttgactttcttgtgtactttacacaaataaaaaaaaaaaaaaaaaaaaaaaaaaaaaacaataaaaaaaaaaaaaaaaaaaagaaataaaaaaaataaaaaataa

SEQ ID NO: 32842 - DNA, 459 bp, Glycine max
  Clone ID: LIB3051-101-Q1-K1-F12
ctttctacttcaccattctctgtgtcacttcgttcttcaccggcttcgaacccctcagggttgtatactctacttcgcagtccacgtatctgtgcctgcaggtgctgcagactctcgcttacgtcttctacttgctgctgcttctcatgtacctcgtgctcgtgttctccacggactgtgggctgggctccaagttcttgggcctggcccaggtcttcgtgggctttgccgttgggctgcattactacgtcacggtgttccacagggtggtgctgcagcaaccgcccaagacgaattggaagatccacgcgatttacgccacgtgttttctgctcatctgtgtgcttgctagagctgatagaaggaaaaagaattacgtggaggacggtggaggagaaggcaagatatattgattcagctacctttctatttatttaatttattttcatttggatcaat

SEQ ID NO: 32843 - DNA, 418 bp, Glycine max
  Clone ID: LIB3051-101-Q1-K1-F2
gggagctctacacccttctcttcttttctctcataataatttaaatttgttatagacggtaaactttaaatgttttttttttaagtttttccatttttctcttttgccatgatcccgttcttgctgtggagtaaccttgtccgaggtatgtgcatgattagatccatacttaatttgtgtgcatcacgaaggtgaggttgaaatgaactttgcttttttgaccttttaggaaagttcttttgttgcagtaatcaattttaattagttttaattgacactattacttttattgtcatctttgttagttttattgttgaattgagtgcatatttcctaggaaattctcttacctaacattttttatacagatctatgctcttggctcttgcccttattcttggccttgtgttggttattt

SEQ ID NO: 32844 - DNA, 345 bp, Glycine max
  Clone ID: LIB3051-101-Q1-K1-F3
cccacgcgtccgcccacgcgtccgcccacgcgtccgcccacgcgtccgcccacgcgtcggcccacgcgtccgcccacgcgtccggcagaacctaaccctcacgaaagcccttttcgattccgataactctcgttgttccgaaaccctaaccctaaccgggttttttcgtttgtttggattgaattggcatcggagggaggcgatcgattggaaattggtagtagtagtttagcgttgaagaacgatgtctgctgctgtgtgcggaagcaagagatctttcttcgaagagcttcctccttctccgccactctccaagaggctccgttgttcctcttcgccgattcg

SEQ ID NO: 32845 - DNA, 463 bp, Glycine max
  Clone ID: LIB3051-101-Q1-K1-F9
ggggttgtggaatttgtgtagaagattttcctataagaatttttaattcgctaaagaaagcctcttgttgaattagattattatgagattaactacttcacaaaattccacaactcctcaacaaattaaagatctttgttgaacaaagttaatttaagagtaaaatctagaagatagaggttgtaaagagaagtggtgtgaaatgaaatccataattagctagttgtttagcgcatgaaaaaaagtgtttaatttttttaaaatctcacaaaccctgcaaggaataaaaaagaaaagaaagatcggagatagatcatatgccctaatagtatatgaagaaatctttcccgtaaaacaaatataaatgatatacatgtgtgatatttttttctgctgaaaaagttcacttcagagagattgttcaaagttcaaacgtgtacgagtggaaaaatgactttcaaaa

SEQ ID NO: 32846 - DNA, 310 bp, Glycine max
  Clone ID: LIB3051-101-Q1-K1-G12
aaaaaaaataaaaacaataaaaataaaaaaaattaaaaaaaaaaaaaacaaaaaaaaaagggagaaaaaataaaaaaaaataaaaaaaataaatctaaaatacataaaaaaaaaaaaaaaaaaataaaaaaaaatggtgaagccattttaataaaaataacttaacatacattttattccaactgaaatattttattatctgatcccataatttaatttcattgacctcatttaaaaaactcacatattggaaaacccaagcctttcccaaatttaattacttcaaagaaaatacatttttgcccaacta

SEQ ID NO: 32847 - DNA, 387 bp, Glycine max
  Clone ID: LIB3051-101-Q1-K1-G2
cggacgcgtgggtaagttcacggtcagttctgaaaaatgggttccaaggttttgcttggtgtagttatgttcatagcggctatacttctgatctctgctgaggttgcacccaatgaatacgaaaattttaacaaaaaagatgggaagcatgctccaaatgggttatatgatagcaaatggggttacggtggttggggtggtccttggtatggcggctggggtggcccttattatggtggcggctggggtggcccttattatggcggtggttggggcggtccctggcgtggtggtggcggtggtggctggggaggttggcgtcgacctaatggcaaccctcacaactaagattaaaacttgctaaaagctttttacgggtttaggttt

SEQ ID NO: 32848 - DNA, 339 bp, Glycine max
  Clone ID: LIB3051-101-Q1-K1-G6
ctgacatctatggaagtaggatcacagttacctctcaattgtatgcccagtagcatatgggagttgcaggcttgggctgctgttttgggtttctgtagaaatcaagggatggtgacagaaagcagtttattgaatcatgatctgaatgttatgggtgctgatactaggaacatgggggagatatatgtgatgtcaactgttttagatgaggcagatgaagctaatcatttttcacctgacacagatggaatttctaaactcccagaaatcagtgatgaattctgggaactgtttttaaggccaagcccagttacagaaggcacagaagaaactaaatgt

SEQ ID NO: 32849 - DNA, 428 bp, Glycine max
  Clone ID: LIB3051-101-Q1-K1-H10
cccacgcgtccgcccacgcgtccgcagaagttgtgaaggaccaacagagcacttaagagagttgaactgagagctgcagggatggctcatttggatgtttgtcatcaagtcaggttcattggtcagcttgaggaatatggaagtagactttcttccagtattcctacggtagaaggatcaaaagataaagaagaaatcgttgaagttaaacctatcttcatgccaaattttaagaaaagaaaacgccttagccttaatcgtcttagagagatcaaagcagatatgtgtgcaaggcaaagtagtggcacacctaaaacaaagtgtgaaagcatagacagatggtcagctaagaggtatgagttggctcagcaaagcatgtgggaagtcttaaagggcgaaggtgcaacttttgaaaatccaattacccg

SEQ ID NO: 32850 - DNA, 336 bp, Glycine max
  Clone ID: LIB3051-101-Q1-K1-H5
gttttcgggttcgagaaggcacttgtttgtttgtcgtacgaaatggagactagaccgagttcggtgatggttacgctcagttacggcgcgttgacgtgcgccgcgtaagttctcgcgactttgctagcttctgctgtcgtcaaagccacgcttttggccccggatctctaccgggtgctatagaccaacacgcctacaaccaaaggagagagaaaaactcagagttgagacaagctacgtgatgcagagggcgaagacggttacgatgatgaaggggacgatgatgacgatggagatggtggatttggggagggtgaaaaggagttgtcatctgaa

SEQ ID NO: 32851 - DNA, 320 bp, Glycine max
  Clone ID: LIB3051-102-Q1-K1-A12
acgctgatcttctcatacttcataatggtcaaattgtgtatctgaatttatctatcagtgtccgtcttagattatacgagcttgcaaaaataatcatagatccacaatcttgatgcataactaacaactctatattcttcttctcaattgtcattattactatatttcattctccatataatttaagaacgactaacttttcaactcaaatccatgtttcactcctcaaacacaaaattgatttactaaacactcgcctaacacctgcatttcataaacaaacattatactaagacaacataaataaaattgttgaattt

SEQ ID NO: 32852 - DNA, 332 bp, Glycine max
  Clone ID: LIB3051-102-Q1-K1-A2
acggggacacctatggtgacctcatttgacgaccttgaccaactccttgaccgtgctttctaggatggttaggactataaggagaatgctaaccttataagtgcagcagcaagtgcgaacactaggaaggacagtacttctgtgacgtcttagttgcaatgattgggcctgggattacccgtttcgagaaccaacaataaagcgaaacacaatggtgctcacaaagacagtcacatggtctacgcgctctacaagctcatggaccagaccatcgaggctgccaaagggcttgagaatatgttcacacctactgtcgatgacattgggaagga

SEQ ID NO: 32853 - DNA, 437 bp, Glycine max
  Clone ID: LIB3051-102-Q1-K1-A3
tgttcttttgttttgccctatctaattaaggttcccgcgatttcaaaccttaatttcttggattgctctctctttacatctgatgcgttcttgctctcaacaacaatcacccaccgccatcgaagtcttcgttcttttcttcttcttcactctccttttttctctcgttcgagggttctttcgtggggaaccctgcagatttcaccactcgtgcacatgtccaaagttctcggcttttccggagttgacgatttttgcccgatgggatcaatatatgccaaccccaaggaagcaagtttcttcttgcctcttggccctcaagttgatgtatactttcctcctcggaagagatcgcgtgtcaacactccattcgttttcgatggagaatggtttgagcaaaagccgaaaacctctgttgaagccttgccagatgagtg

SEQ ID NO: 32854 - DNA, 433 bp, Glycine max
  Clone ID: LIB3051-102-Q1-K1-A5
attttaagtaattcaatggcttacactgcaagtcttgtgttcttagcttccacttgcctgatcataaactttgctctgctggcaaacgctatcggatgcaatggaccatgcagaaccctcaacgactgcgacggccaactcatttgcatcaacggaaggtgcaacgacgaccgcgacgtcggaacccacatctgcggcggcggaatgccgccaaatccgccaccaagcggcggaagctgccagtcctcgggaaccctaaattgcggcggaaaatcgtatcctcagtaccgttgctctccgtcggtaacttcctcgacgccggcgatcctgacgctgaacgacttcagcgaaggcggcgacggaggggacccgtcgcagtgcgacgagaagttccataacaacacggagcgtgtggtggcactctccacggggt

SEQ ID NO: 32855 - DNA, 431 bp, Glycine max
  Clone ID: LIB3051-102-Q1-K1-A6
ctcgattgtttggaaagatcattcccaacaactgcagagttgaggtgttgtcaaccgaaagtgaaatacgtctggcagaagctgaagctattaattggacatctatggaatatggcaagaatacacttgccccaataataaataggccgatagttcaatctgaaacggctacatacccatcaccaaaaccaaggacaaaagattggtataagttggaagctcaagtgaaaaaagaggataacgaagaaaagcttgatggtgatgctgctttgaataaaatgctccgtgatatttaccaaaatgcatatgaggacatgaggagagcaatgagcaactctaccttggagtcaaatggaacagcgctatcaactgattggaaagaagtgagatcaaagatggtggcacgcagtccgtcataacgtattgagatg

SEQ ID NO: 32856 - DNA, 258 bp, Glycine max
  Clone ID: LIB3051-102-Q1-K1-A7
aaaaaaaaaaaaaaaaaaaaaaaaaaaaaataaaaaaaaaaaaaaaaaaaaaaaaaaaaacggacaaattaaaaaatacgggcaaacaaaaaaatactacaataatatctcatatataacaacacactcaacctctttttttacatacatctttaatcaacaacaccctccctttacttccctttacttccccatcacaacatcctccttactccaactaacttcaccttcaacaatcccacccctatctcccttccc

SEQ ID NO: 32857 - DNA, 435 bp, Glycine max
  Clone ID: LIB3051-102-Q1-K1-B7
gctgaaagttctgcggccggataaagttctgaatcatggtctctttatccttaacgaccgcaaacaccgatcctctggggggtccgatgaatggaccttgtctgagcaggctgcagatgctgctatggatcgtcaatgtctcgacgctgccatggactgttcaaaggttctttaaatgacatccccagcgagtaaaagagttggatggctacacgcaatgttgcttgaagcaaaccgatcctgggacttggctgactaggcttacacaggccttccagaggtcattcctattgatcaacccattcatgctaggatggaggatctgctaatggctcacagctatatacgagtgtctatagatcggctcaataaatatctggcaacatacatggaacatcatgatgcatgcagagcattgactggatgctacatctt

SEQ ID NO: 32858 - DNA, 440 bp, Glycine max
  Clone ID: LIB3051-102-Q1-K1-B8
cccacgcgtccgcccacgcgtccgattactttggtgggggtattcaacactctcctgctggatcaactccatatggaactccactaagagtggtagacttaggtgtgacacatgttcccaaggatgtctttgaaatgtatttgcaggaaatcagtccgcagtacctgcctgaaacatatagtctgcttactcataattgcaacaacttcagcaatgaggttgctcaatttctggttggtgcgtccattcctgaatatattctccagctgcccaatgaagtcatgagcagcccaatgggagctcttatattgcctatgatacagaatcttgagacaacactgaaatctggtggagttcctcaagtaccacaattcaagcctgcaactactctgaatgtttcagctaacacccaaaagaactcaagtacctacaactcatcc

SEQ ID NO: 32859 - DNA, 422 bp, Glycine max
  Clone ID: LIB3051-102-Q1-K1-C1
gccacgcatcccgtaaaacacacccactgcaaactgagaaagtggaaaaagggccgaacggctggcgaagtcatagatggctacaaaaagaagagagtgcggagaaggagcctttggatactcattacgctcaacctagaccagcgtatctatgtcaaactccgctcctacagagagcttcttggcagaacgttcacgcttatgatcagcatcttaatatgattcttgctgatgttgaagaaatcgttactacagcggaaatcgacgatgagacatacgaagaaattgtgacgactacaaagcggacagttcctttcctgtttgtcaggggagatggcgtgatattactttccccgccattgaggactgcatgactggactgctgaactatgtgatcattgtaatcacaagtgtcactgtta

SEQ ID NO: 32860 - DNA, 465 bp, Glycine max
  unsure (1)..(465): unsure at all n locations
  Clone ID: LIB3051-102-Q1-K1-C10
cccacgcgtccgcttggtgcgaaagttgaaagcacgaaaatggggtgggtttggaaggatgacaacagcgacgatgttcgacgcgataactcttcggaacgatgcgccaccaccaaggtcgtcaaatctcagtgcagaacagaggaggtcgaaactggaaagttcgtcagaaagtgcgagaaaaccgaagagattctcaggaattgcatcggaaagcccgccgaagtgttgcaatcaaacaaagagtatactgaagaggatatcacagatgaagtacttaaaggaaggtctgttccatttagctcatctgacggtgccagtggtgtggttgactttcctgggctacaaaatgatattgaagtcatggaacgtaacctgttaagtggtctcagtcatttcttcgacgcagcgaatgggttntttgatgttttttccaagtctccaagcatctttgatgcagagtca

SEQ ID NO: 32861 - DNA, 306 bp, Glycine max
  Clone ID: LIB3051-102-Q1-K1-C11
tgcattcgtatttctaactaattattgagttaattatggttacggcattgttccgcagagggatgagctaactcttgagttggttggtacgaactagggatatccgtccgtcgaaccttgcatcgatgcttccaacgattccactatcaatgttactttgcttgatcactttgctaagaatccacttgatagcactgagtatctgtgctaatttcgcagtgatcatcgtagatgtgcactatcagctaccataagttcacgcaaactatgtcctaaactttgccctaacgttactgatgatgattg

SEQ ID NO: 32862 - DNA, 339 bp, Glycine max
  Clone ID: LIB3051-102-Q1-K1-C12
acgaccacgcatacaatcatatccaaacttataaccatagataccattcatcaccaaatcgatgagtatattacttagtcgcttcgcaataactactattaaccgtccttttatcctatcatcgattctctcaccaaatcatctatctaagagtatttataaatatcaatttatgaagaccccactgtatatctattaatatcgcattaaatttcgcattaatcttattaataatgcattttatactacatcactttctcccaaactatctcctaaatttatacataccctatcatattatcattgcactaaacttataaatactcctactcctactta

SEQ ID NO: 32863 - DNA, 443 bp, Glycine max
  Clone ID: LIB3051-102-Q1-K1-C2
cccacgcgtccgtgattccagaaacatcttcaatcaatctcccctcgtctcctctcaatcgagggtgaagctgagaaataatcatggccggtggtgcgaatttcgtgcagagggttctctcttacgtggtgaatgaagtggttgtcaatggtcttgccaacagccctgcatttcagaggtttgcagtgaggacatcaaaaagaattggagatatttctaacaaagctgttcagaagaggcaggagctagctgagcagatcaaggacatctcaaaaaatatggagtcattcaagaaccagtaattttggtattcttgctacattgctgaagttaatggagtcctgattttctttagccaaagatgttgctggtgacaaggctgggtgtttgtaaatttcttttgttgtaatatattttggttcttaactcgtgatctcaaaagt

SEQ ID NO: 32864 - DNA, 361 bp, Glycine max
  Clone ID: LIB3051-102-Q1-K1-C3
agcaaatgcagtgagcagaaaatgcagattgaggcactgcccccggctctccaacgcccgggtcggcctccactttctgttggattccctttcaaaccttcttttttaactccagccacacacgccccttcgcacttcaatacatattcacgttttcagcattcagttaagtttcgtcgctcttttgcaacggttacagcgaccaccgagaaggttgttattgacgacagcgacaccaccaacgacgaaccgggcttcgttaacattggctacatatcgagtgttcatggaatttagggcgagattcgcgtcaagccagccaccgatttttcttaactgcgccttttcacttctggaaaaa

SEQ ID NO: 32865 - DNA, 434 bp, Glycine max
  Clone ID: LIB3051-102-Q1-K1-C7
gtcaagacgtgagaagggttcaagtcatttgaatgaagagtcagaacctctaataggtgaggtatatgctgactcagaatctttaaattctgctggttaatggaatgataccagtgaacatggatcaaaggaataccgatctaagtccactgtaaggctctcatcagcaaaacttacaactggagctggggttgtctattcatcatcagaagaagacgatgtctgtccaacttgtcttgaagaatacactgaagagaatccgaagatagtgacaaaatgctctcatcattttcatctttgttgcattcatgagtggatggaaagaagtgacaactgtcccgtttgtgggaaggtgatggtatttgatgaaacgactgattgaaaatgtttatgtcgtggatgataccaacaacagatgaaagcagatataagat

SEQ ID NO: 32866 - DNA, 269 bp, Glycine max
  unsure (1)..(269): unsure at all n locations
  Clone ID: LIB3051-102-Q1-K1-C9
gttgggttgagttgggtttggattggatttctaatctaatctatacctttctttgtcctatgcttttaaggcacaaatccttctcccttctctcttctttcttcttcttctcctgacccttattattattccttgcccttaccctttaggcaagggaaggaagaaagaataactatattattatctttattgtaatctatctttttattataattataattataattatntgtgntattattccttaaatatggaattcgccgtgtctc

SEQ ID NO: 32867 - DNA, 435 bp, Glycine max
  Clone ID: LIB3051-102-Q1-K1-D1
cccacgcgtccgattttaagtaattcaatggcttacactgcaagtcttgtgttcttagcggccgctttccttatcatagaactgtcctcttctggcaaacgctatcggatgcaatggaccatgcagaaccctcaacgactgcgacggccaactcatttgcatcaacggaaggtgcaacgacgaccgcgacgtcggaacccacatctgcggcggcggaatgccgccaaatccgccaccaagcggcggaagctgccagtcctcgggaaccctaaattgcggcggaaaatcgtatcctcagtaccgttgctctccgccggtaacttcctcgacgccggcgatcctgacgctgaacgacttcagcgaaggcggcgacggaagggacccgtcgcagtgcgacgagaagttccataacaacacggagcgtgtggtggcact

SEQ ID NO: 32868 - DNA, 444 bp, Glycine max
  Clone ID: LIB3051-102-Q1-K1-D11
tcggttttttttttaatagttccagttggtgtttttctaattttgggttcataagtttggtcgggtacttttaattccggtgagggtgtgttttttaaattttagttctttaagattctaatttttttatttattaaatttgcacttgtagggcccaaatttaaaaaatgcgaacttaccagatttaaaattagccaaatatcttacaggacccaacttggaaaaccacaaatttgcccggacttaaattagaaaaaagtgcttacttggcccaaaaccttttttagcttttaagaaaattgttattccttgtaccggtttattattggtcaaaccttgtttaatttggcaattaaaaaggtggtatttttttaattttgggttccgaaggtttttttggttaactttaagttccggtaaggtggggtttttttttttaggtcc

SEQ ID NO: 32869 - DNA, 409 bp, Glycine max
  Clone ID: LIB3051-102-Q1-K1-D12
cccacgcgtccggctgttcaccattttcaattttctaagtggtttggcttggtttgagaggcataaacctttcaagatctcagaggggcagaagatcaaagccaagacatcctctcgtatataaagagtgtctctgattcgatctgtgtgtcttctctttctctcgttcgagatttctcagtactccaccaaggttttgtcagacaagctcgaatttttcgcctaccctatacaatgatctcttcgttgagacagcctgctgcagggatcagtggttctgatcttcttttgaggcatagacatgcatctccaagttaggcaaggtcgaagctacactctttgtcaagagaaaagggtcaaggatctcttgattcaggtcaaaagccactccacattggagcttctcttg

SEQ ID NO: 32870 - DNA, 434 bp, Glycine max
  Clone ID: LIB3051-102-Q1-K1-D6
gcgcatgttagcattgctgacaaataaacaaagcgcgtgggactcacgcgcctgaggccggctcgtcctcttgcgaaccgttgtcgacactctttctttctctctctaccttagttacgttcgtatctcggatccgtcgacgtctctgtcccttctttcggatccaccttcgatgcttcgatcgaatcttgttactatgatgagaagagatcaaatacgtgcacgtgagatgcgaaccccatgcctggttgacctttgcgttcagaaagcaatagatcatgtaaggtaccttggaaatgtcggatctcttgaccagcatctgctcgaacacattttgcacgactgcacagctgaccagttgatgcatgtggagaagtccaccaagggaagaaatctcagccctgtaactgataagttgtggaaaaagttctatg

SEQ ID NO: 32871 - DNA, 434 bp, Glycine max
  Clone ID: LIB3051-102-Q1-K1-D7
ttatactcaaaattatcttattttttacgtttttttttcttcagctatttttttaggtgagcaacactctatggctgggtcttcatattaatcaaagttattttttaatgtattttgttattataaatcataaaaattgaatttgattttcaatatgaaattcctttatcatttttgtgtgtcaaaatcccttaatctacactctttgtgctaatttcaatttgaaatcattttttttcacaaaaaatacatatgtctttttctatctttattttgcttattgaagtacctgaaatacgctagaaaatggttgaatagtgtgaaagataaaaacttagtctttcaaaaattattaaaagtttttttgaaacacgtatcaatgaatgaatgattttgtctaaagggtttgaaattactttgtgcttaaaaaatca

SEQ ID NO: 32872 - DNA, 436 bp, Glycine max
  Clone ID: LIB3051-102-Q1-K1-E1
gcagtttattctatcatatccttgttcaaataattttcttttcaattacaataccccagggccagaaacttatgttcatgagcatcctcaaggtcccaataacatttacttgaagacaattttgagttgaccttacagcctagttccacctacaaacacccttgatccttcaaagcctctcatagttccaatactggcaacaataatactcttgggcatctaaactatctccattcttttttccccctttctttgcagtggatttgcgaggttttaaagaaattaaatgcgtttttatgtgctaaagagctaggtaattatagaattcatctcacacatacttctttttactaccttttatcttttagattttatttttgaattatccttgtttaatggagtaatttaattcgttgaggggttgtggaatttgtgt

SEQ ID NO: 32873 - DNA, 438 bp, Glycine max
  Clone ID: LIB3051-102-Q1-K1-E8
tgtagatacaaattctcaaaatgggcatctagatggtgattcacaagattgcatgggatggatggaaacgctactctacttcatcatctcatcattgaagtctgggagatcctcatatctactcgacgtgcttgtggggcttctatatcctgtgatttgcttgcaggaaacatcaaataaggatttgtcaacattagccaaggtagcatttgaattgctcaagtggatgatcgtttgggaacctcaccttcagaaggctgtatctgtgattctttctgctgccaatgattccaactggcgaactagatctgctacattgacttatctgcgcacattcatgtacaggcacacttttactgtctcaagttcaaagaagcaagagatttggagaactgttgagaagatactagtagacaatcaaattgaggtaagagaaca

SEQ ID NO: 32874 - DNA, 432 bp, Glycine max
  unsure (1)..(432): unsure at all n locations
  Clone ID: LIB3051-102-Q1-K1-F11
taagctttgccatacccattaagcaagacccttcagattactggtccatcctggggtaccgtaattctccccttgacaacactggcatcaggaacactactagtgttactgcaacttcttttccatcctccaacaatggcactactagtagtttgacacccttccacatggaattctcaaatgcccccacaagtaccggcagtgataacgatgccgcgtttttcagtggaggaggcatctttgttcagcaacaaagtggtcatggtaatggtcatggaagtggaagcagtggttcctcctcttcttctttaagctgttcaatcccattcgccacgcccatnctttctctaaatagcaatactagttatgaaaacagtgcntgntatggaaactggattggacctaccctgcacacattccaatcccatgcaa

SEQ ID NO: 32875 - DNA, 223 bp, Glycine max
  Clone ID: LIB3051-102-Q1-K1-F8
ctcacgcctccgaccacgcgtcctactagacacatccattctttacttctcattgggtgggcctaatctttacggtggtgctgctataattttccattgcctgcaataaattctcaacctttattcgcaagatcaaacatctaaccttaagttaagtgatcatgtctggtactcctatcatctacgacttcataccgtcttatacccccatctttacgctact

SEQ ID NO: 32876 - DNA, 443 bp, Glycine max
  Clone ID: LIB3051-102-Q1-K1-G10
tgtctcagtgagagaaactctctctctagaaaccctattgcacgttttgcaatcgaactcgacaatggccaacagcaacctgcctcgaagaatcatcaaggaaacgcagcgtttgctcagtgagccagcaccaggaattagtgcctccccttctgaagagaatatgcgatatttcaatgtgatgatccttgggccaacccagtcgccttatgaaggaggagttttcaagttagaactatttttgccagaagaatatccaatggctgctccaaaggttaggtttctaacaaaaatatatcatccaaacattgataagcttggcaggatttgtcttgatattctgaaagataagtggagtcctgcccttcagatccgcactgttctactaagcattcaagctctattaagtgcaccaaacccagatgatccactttctgagaaca

SEQ ID NO: 32877 - DNA, 300 bp, Glycine max
  Clone ID: LIB3051-102-Q1-K1-G12
gtctagtttacaagaacggagcacagacatcaacggaaatattataaggaaaacgcatcggtgagctcatgaatacaaagtgggacatacaatgcacttgcgctcttcaaggagaagggctatatgagaactgggaccggatgtccacagctgtgaaggatatactatatactagatcccactcaatacagactaagaactctattcttgtaacttacaagagagtactgattgcaatggacgaatagtgatgaacataaggccagttctaagatgatgtgatcgataatgacaatgctg

SEQ ID NO: 32878 - DNA, 368 bp, Glycine max
  Clone ID: LIB3051-102-Q1-K1-G6
cacaatctttctaatttgcttatcttagatactaacacatagtataacaaatagacggaaggttaacaactcgctgacctgatgacaaaaacatcactagaaagatgaaacaccaaccatggttctgcattactacaacatctttcatgttgataatagcgccaaagactatgacttgaatatatcttatactaaacttcctattatatggcactctgatttgatccccatcaacaagatctaagctgacactcattttcaacaaatttccgaatcatatcatgtacttactagatcctcataatatagctatctatgatcattatgtgcaacatttgttaaacgttcaatttactgcttctgattct

SEQ ID NO: 32879 - DNA, 342 bp, Glycine max
  Clone ID: LIB3051-102-Q1-K1-G8
gcttcattctctatagcatctcagtttaattccatcgacagactcacaccgatacagatgggctctaaaccgagggctggcaaactccgtccacaaatcacaagatcagcccaccacctccgacgtcagcttcaatcccctgctaacgctgcagcaccagaacacgacaggaacaactacaactttcagggaatgacattgaagggccttcgaataccccgaagaccactttacccatacgtgcagacaacatcatcggagtacccctgcatacttaacacgatgctacctttatacatctatcccttcaggaaccctgactatggcacccacttcaacggc

SEQ ID NO: 32880 - DNA, 137 bp, Glycine max
  Clone ID: LIB3051-102-Q1-K1-G9
acgcactctctaccatacccattcaccattcaactttaacaaactgatccatcctcctgtgccgtattttttcccataccagctctttcataagtccacatactatcacttctacaacattccaactatcctacaac

SEQ ID NO: 32881 - DNA, 439 bp, Glycine max
  Clone ID: LIB3051-102-Q1-K1-H1
atttcgtggagccaagaaggccctcattgatttgcacatcgggatgcttgatgatcaggaggccaacgcatcaattgcacatggaaaccggtcctttggccgtagcactggtagcagagacagtcatagtcatggtaacaatcatagcaataataatacctatcaccatcggtcattggggcattttcgatcactttcgcggagtgtctctcggacttggtctgctgctaggcagctccaagcaattgggaacaacatttatccacctaacgcaaatgagcttatggcttctggtggccttgcaatgcctgtgttcatcatgaattcgatcctgttgattgtgatgctggcacttgtggctgcaattacgtgccaggaccgtggattacatgttcattctaccattcccaggaattactcctgggctgctgcaatcctc

SEQ ID NO: 32882 - DNA, 379 bp, Glycine max
  Clone ID: LIB3051-102-Q1-K1-H10
gtttcttcctaggtatgaatctgctacaatttctctgattctgaaataacaataactcatgggagtacccccaaacaacagaatgggagataacaaacgtaagagaggacgcaaagccaaaacccccgcctccgaaaccctagaccaccccgcccccgtcaccaccaccgctccaaattccacctccaccgccatggacgatgtcttctccgtcggcaacgtcgagctcatcgacaccacggactcttcgcaccaccgccgcctacgcgcccgtcccaaccactccgagaagccccacgctctgcccacggggcgccgtcacgctccgcccctcgacaacggaagcggtgacttctcggtccccagcgacgtcgtcggg

SEQ ID NO: 32883 - DNA, 416 bp, Glycine max
  Clone ID: LIB3051-102-Q1-K1-H12
cccacgcgtgcgcccacgcgtccgcccacgcgttcggaatctgcaccataacaaaatcaggaacggatatccataaaaaagggaaaaataaagaaggagaaggagaaggagaaggagatttctgttgaatgatgaggaacctaccctcttgtgctgattgagaataagaaccagaacaggttgcagttaaaaaaatataacttgatgcaaagaggagtagcagaaccatataacacaccgaaagtaaaggaaaagaaaagaagtgtttgaatttgatcgctaaactgacggagaagaagatgaatcacactcgcttggagtcttgtcatgaatctccccttacagtatacaaattctcgttttgcccaaaaaaacttggtgatattggtatactcttaataagggctggccttctt

SEQ ID NO: 32884 - DNA, 331 bp, Glycine max
  Clone ID: LIB3051-102-Q1-K1-H4
acgcggacgcgtgggcagacacgtgggcggactcgtgggctcgctgttgatatgccgtaattgatgcggtatgacataggaggccgggatcaacatgagtatgaggaaacgcagcagacaaagtactctgtcgagttctgggctgagaagttagaaactgaccacttactccatgtatcttctgagattgaagaggacccgcagagagagacagttgaggctggccatgctgcctaagacatgtctgtggataggcgaactggagcttgacggtgcaactggtgggaaagcgtgcagttctgatatgactgaacaggtttctgcaatggtg

SEQ ID NO: 32885 - DNA, 171 bp, Glycine max
  Clone ID: LIB3051-102-Q1-K1-H5
tcatacgataaaaaaaaaataaaaaaaaaaattttattcaaaataaaacaaaaaaatataatggtaagatataataaaaaaggggtgaggaaataccatatatctttctctattttttaaatttatatctattatactttttatttaatttccctctattctaaattattt

SEQ ID NO: 32886 - DNA, 436 bp, Glycine max
  Clone ID: LIB3051-102-Q1-K1-H7
gcttctggtccaaatactggtggtccttcaattgggcctcccccagtaattgcaagcaaggctcctgctcctgagcctgccaccaacgaagtctacttggtttgggatgatgaggcaatgtccatggaggaaagaagaatgtctttgccaaaatatcaggtgcatgatgaaagtagccagatgagctccattgatgcagccatagataagaggatacttgagagcaggctggctggtcgtatggcattttagatcaatctcatccacacattcttgtgaaatttcttcagtgatatgggctcaaaatggcattttaataaggctttgacagcgtgtggtcaagattcctttatttaaggtccagaaagtaacattgttattggtgcaattctttgccaaaatgggcaatgggccctacggtcatagtggaatcgaa

SEQ ID NO: 32887 - DNA, 382 bp, Glycine max
  Clone ID: LIB3051-102-Q1-K1-H8
gccacgcgtccgctctaatcttgtaattttctgtgtcgcttcgtggttcattctggtggggcttgtgatctggggtgtgttggagtacttacaacactcctttgcaagtataattaattaaagaggctaatcaattttcaattggactgcagcatatggctgatgagggttgcagggttactctaaatgtttatgacttgatccatggactagcactgcagctttcaatgtcctttttggtgaaagctattgacagcatattgcacacatgagttggggtttatggcaatgagtattactctgggtggggcatataacatgctcctgctggattaacaccatatggaacttcacttagagcggtagactcatgtgtgacaca

SEQ ID NO: 32888 - DNA, 459 bp, Glycine max
  unsure (1)..(459): unsure at all n locations
  Clone ID: LIB3051-102-Q1-K1-H9
gatcagctcgcatttctggtgtttcactgacatcaaattttaatgaaaaagtgctcaatgagatgtgaagaaaattccaatggagactttggcatcgatcccatgtgtacaaattgtccaaatttggcacccaaaggatatgatagtgatgaagaaggtctgtggctacattgtattcgttactctggacctggatggacgtatgagtgtccatatcctgattgggcaaaacttggctagacaacttgatatatttttcatacgacatttcaaacaaatatacaacggcatgttatcttgagattaaaatttgagttttgatggttagtgaaagttatttaatcttttgctattattcagggacactggattgtaatgatcaatgataactattattgctattattatttggttcacttangggggaaagacgtagaataaacaacagatgtattctat

SEQ ID NO: 32889 - DNA, 98 bp, Glycine max
  Clone ID: LIB3051-103-Q1-K1-A1
tgattctagaaaaaaaaaaaaaaaaaattaaaaaaaaaaaaaaaaaaaaaaaaataatggaaaaaataaatcaaacaaaataaaaaaaaaaaatacaa

SEQ ID NO: 32890 - DNA, 456 bp, Glycine max
  Clone ID: LIB3051-103-Q1-K1-A10
gtttcttaccgtctgtttgcaattccacgcttttcatttcccccaaattccgttccgtggggtaatcaatcacaatctcctcattttactccaatttgatgttattgcttttatctcatgaaaattggatgcacatgtttctttctctgcttcaattatttttcctattttgcattttattcgatttatacaagcaagataattgtgaattaatccaggaccatgcaattcatttcaattggaatagaatattatagtatacaatacacaaagaggggttgttgttgatttgttggttaaggccttaaaggggatagagataccactactagttctgtctgtagctttagtttccttgcaaattgcaactgtgacctgtttcttaatggatggcattgaggatgatgcaaggtatccccataacccatatggttattgttatcagaattctccata

SEQ ID NO: 32891 - DNA, 349 bp, Glycine max
  Clone ID: LIB3051-103-Q1-K1-A11
gctggctacagtatgtctgaatgacaactttgttcattaaggccaatatccggtagctaaggagttacaacacaatcttatcatcgtactctaactcgaagacattgctatgatctgatgaaaatggtatgcacatcacttatttctatgtttcaatcactccacctattttgcatgttattccctttatacaagcaagatatttgccaattaatccagcaccatgcaattcatttcaattggaatagaatattatactatacaattcacaaagaggggttgttgttgatctgttggttaacgccttaattgtcatagacataccactactagttctgtcagtagcttt

SEQ ID NO: 32892 - DNA, 454 bp, Glycine max
  Clone ID: LIB3051-103-Q1-K1-A12
atttgcagaggttcggtacccttctctcggctccctctgccactgccactgccactggcactgcccgtaagtgggtcgctgatgacctcgctgtcatttctgagtccaaggaggtcgctaatgatttgatcaccgatgccgtcattgatcaggtttttggtgagaaagcttttgagaaatttggaaaaggtttaatttcattgcatttctccgaccagcaccctggtatacacaaaaagatattgttgttcaagtttgtgcttccagctgctaaggacatggctgatatgactcgactggtggctcttgttccgtattatattgacttgatcggacgatacaaattaagttctcaggctcggtctaaaacagaggctgcacgacaaaaggctgctctagaagcacagaaagaactccgaaatgcgcagcaagaagccatgcagagaagaaaagc

SEQ ID NO: 32893 - DNA, 414 bp, Glycine max
  Clone ID: LIB3051-103-Q1-K1-A3
gagactctgataaattcctgcaacgcctcagacagaggcggagaattcgccgccctagaaaaatcttcccaatcaaataaggcggcaagaaacgctttttcctttttctctttctctcactactttctctctctacaacctccgatgtcccctcccttctccattgcctccttccccgtcctctctctccggttgtggtagttggaaaaggaagggtttttttggcggcaatggagggggaaccgagccagctgaagcgtgccgcgattgatgcctctgctggagctatctccggtggcatatccaggacagtgacgtcacctctcgatgttattaagattaggttccaggtttcagttttactctctccatcgcacttcactttctaattcagcttcactcgtactcgcattt

SEQ ID NO: 32894 - DNA, 139 bp, Glycine max
  Clone ID: LIB3051-103-Q1-K1-A5
tcgtcgcgtaagatatcgaactatagctaatctgatatctatacaaatgaaagactgattcatagcctgttgagaagagtaagaatcgaaacacacgactactatccggatgaaagagtgtaaagtaataacgagaaat

SEQ ID NO: 32895 - DNA, 435 bp, Glycine max
  Clone ID: LIB3051-103-Q1-K1-A6
gatatctcccctagaaactctagatttaactttgtgcgaggtagaggaagactgaatgagtcgattagactcagttcgtagtgaatgggaatctgaccgtgaattttctggtgagttttacaatggtccaagtcagtttcgtgggcccaggcctaagtatgcacctgcttttgccgataccgatatggagtacaataatgttgcacctgatgggtcatatgttggtaatggtcgattaggcagaaagccattgaatgatggttcttacattgcaccgaggaggcgttcaccaggaggaagagatggcatccaaattggtcatagaaatccaagaaacattagtccaaatagatgtattggagatggttcagacttggttggagtgaggcataatgataaatttatgagaggctagcctgaggataatatggatgc

SEQ ID NO: 32896 - DNA, 429 bp, Glycine max
  Clone ID: LIB3051-103-Q1-K1-A7
cagatacacacttggctgaggaaggtcggaaaagaaaatggagttgttcttctgcacggtgttcggtggtttggccgcggttgtggcagttatggagctgagcaagaacaacaaggatcgaatcaacacctcttccgcattcaattccttcaagaacaactaccttctcgtctattccctcatgatggctggagattggctacaaggtccatatgtctactacctttacagtacatatggatacgggaaaggggacataggacaactcttcattgctggttttggatcttccatgctctttggaacaattgtcggatctctagctgacaaacaaggccggaagagggcttgtgtgacttactgcataacctacattttgagttgcatcaccaagcattctcctcaatacaaagtcctgatgttgggccg

SEQ ID NO: 32897 - DNA, 297 bp, Glycine max
  Clone ID: LIB3051-103-Q1-K1-A9
gagcgaacccactaccgttcagcaaaatgatcgctcactctagcaacatcgacattcgatgactactctagctctagcctgtagccctagctagtagctaagccactcggtcgtgtagtcatcaaccttctgatcgtcacccatggccactgccgaggtccagaccccgaccgacgtggcgaccgaggaagcgccggtggtggagaccccggctccgcccgccgtcgtgcccgaggaggctgcccccgccaccgaggccaaggtggaagagccagctgccccggcggagaccgatcc

SEQ ID NO: 32898 - DNA, 212 bp, Glycine max
  Clone ID: LIB3051-103-Q1-K1-B2
ttttcgttctctacaatgtctcgaaactcaatttgactaatgaccggttttgcaatgggacagtttaccagaagaggagcagcaagaattccaactggatcttaatgcatttgaccggtaaaaccttaaccctcaaatgacccattcctttctttaaggcaggtaccattaaggatggccttttcaaattaattggaatccaggtcaacaac

SEQ ID NO: 32899 - DNA, 433 bp, Glycine max
  Clone ID: LIB3051-103-Q1-K1-B3
aaagaagagaagcaacaaatcaatctcacacttagtgttgttacgatggaatcaccgtgcagaccagagattctgaaggggaaggttgctctaatcactggtggagcctccggaatcggattcgaaatttccacccaattcggtaaacatggagcctctgttgcgctcatgggtcgccgcaaacaagtccttcagtccgctgtctccgttctccaatccctcgtcattcccgctgttgggtttgagggggatgtacggaagcaagaggatgccgcaagggtggtggaatccacgttcaagcattttggaaggattgatatactcgtcaatgctgcagctgggaactttctcgtttctgcagaggatttgtcctcaaatggctttcgaacagttctggacatcgattctgttggcacattcacaatgtgccatg

SEQ ID NO: 32900 - DNA, 428 bp, Glycine max
  Clone ID: LIB3051-103-Q1-K1-B7
atcgctttcacctctctctctctctctctctctctctctctctctctcttcgggttggattttgggtttattttttcccccttttcaattttgttcatggtgttgagcgtgtcacggtaattggcgggaagtaaccgtcaattccgataaccctttggtgaaaagcttgaaacttgaggagtttgaagaaaagggggtttatcgtttcgtcgtggatgatggcgaacccatctggcaaccatcaagagcacacgcacgtggtgtcgtcttatgctccagagacttcaggtgcggctctcgcgatgaagcacaatcctggcatatccctcgattggaccgcataagaacaagccattctcgaagatggactctccaagtatgcctcagaatccaacatagtacgctatgcaaagatagccctacagctt

SEQ ID NO: 32901 - DNA, 115 bp, Glycine max
  Clone ID: LIB3051-103-Q1-K1-C10
aaaaaactttccatctactcattctctgttacaacatataataattaattactattcatgaagatctaaatatagaaacttcacaaaacaaaaaaatatacaaattaaacactaa

SEQ ID NO: 32902 - DNA, 455 bp, Glycine max
  Clone ID: LIB3051-103-Q1-K1-C11
gtcagcagcttgttatggaagcaaatggctttgaacctcttatttctaattttagttcggatcctgacgtgactgttagaactaaagcactgggtgcaatatcttcactaattcggcacaacaaaccaggcattactgcatttcgtttggcaaatgggtatgcagctttgaaagatgctctagcctctgaaaatgtgagatttcaaaggaaagctctcaacttgatccattacctgttgcatgagaataattcagactgcaacatcgtgaacgagcttgggtttcctcgaatgttgatgcaccttgcctcaagtgaagattcagatgtgagagaagctgcccttcgtggccttctccagcttgctcacaatgcgaaagatggcaaggatggcaatgagaaagacagtgcgaaaataaagcaacttcttcaagaacgaataaacaacatcagttta

SEQ ID NO: 32903 - DNA, 409 bp, Glycine max
  Clone ID: LIB3051-103-Q1-K1-C2
cccacgcgtccggttgcgatcaaattcaacccgtgtcgaaattacaggactaccacacagcctcttaataagcctataccacactgcctcttctataagatctcaacatatatagaaaaaattatgtttcactcaatcaaaacggttttaacctgtccacaagtttcattccctgcacggtctctctcttccaaccttggtcgggaaacttgcgcagttagattctgcactgacagtgctcgtaagatggacaagactcagaagcctagtactgaggaaaataaacaaggagatacgatgtctcattcatttggggaagggtacgctacgaggtctgatgaagaagggtttggtggagtttatggtggaaaccaatcgaagcctgagatggacccagcttatgacaaga

SEQ ID NO: 32904 - DNA, 385 bp, Glycine max
  unsure (1)..(385): unsure at all n locations
  Clone ID: LIB3051-103-Q1-K1-C3
gaaggaagaaaaatcacagcaacgatgagaatcacgttggagccgagctcggagccaagcccaagcccaagcccaagccgttcccaaactccgaaagaagaagtcgaatgggtcccactttccaagcaccctctcttcaccgcacacggcggagccaccaccgncgccgcttcccggaacctcctggcctgggacggagcctcgcgcctctacttctgggactcaaacaaacgctgcctncaccgactctctcttcgtctcggcgaccccgatccctcttccgttctcgccgcttccccctctaaggtgttgcaatcggacgcggtgctcgatttcgatgtccgcaaaatctncatcaacaggaaaggaacagcgatactccttt

SEQ ID NO: 32905 - DNA, 434 bp, Glycine max
  Clone ID: LIB3051-103-Q1-K1-C6
aacaagttctggtcactaacatcatcagctgtgaactgaaattcatttccatgtgccgctgagtccacttctatcggaattgctgtcataggatgatctctagagtgtggtggaggaagacgatctgcatctggtacttcatagcaagcctcacacaagtcaaaatcaggacaaacagtacaatgccatctccgcctttgtataggtactgtagagcaaccatcacaacaatattggacagatgaagtaatagtatcgtcctcaatcatgatttggttatttccagtacttgggtcagcagggccaggaactgacaccacactctcaacagcatcatctgtagccaacatggtttgctttggaaaagggacctgaagcaatcttgaagatatggccaaactggggaggaaatgtgtgaaaacgtgaatatcaaa

SEQ ID NO: 32906 - DNA, 54 bp, Glycine max
  Clone ID: LIB3051-103-Q1-K1-D12
gaatttcgacaacatatacgacaattttatttcaaataatgaacattaaatcaa

SEQ ID NO: 32907 - DNA, 167 bp, Glycine max
  unsure (1)..(167): unsure at all n locations
  Clone ID: LIB3051-103-Q1-K1-D4
tccacgcgtccgnccacgcgtccgcttaatgattgttcgaaaaaatgcttatttttgggcccgactttattccctctgctggcctttaaccttaatggttagaaaaacctccaaaaaatggcctttttgggtggcctttaggccatggtggaaccacctgtaatggt

SEQ ID NO: 32908 - DNA, 425 bp, Glycine max
  Clone ID: LIB3051-103-Q1-K1-E10
ggagaattaatgaaccagagtttgtatttttctctgtaattctataattttttctcaaggatttgtgttaataccgaagctttctgtgttctctgtaatggtgcagatttgagctcacatcactgcgattttctcggtggccaacctcaaactgatccaatttcatttctggggtttcatcttttcaccatttcagacaaaaaaattgtgttaataaagattcctgtaagattgtaaaattttcctgcgcccaaatctgtctcttaaataaacttagcatttaccccctttaaaaaattcaattttctgtgtgatatctttggttgactgggtgtagaagtatctgaatcttcaatgggtagggtttaagcgaagttctgaggctatggagcatcttactgctctctatgacttgcataataatg

SEQ ID NO: 32909 - DNA, 326 bp, Glycine max
  Clone ID: LIB3051-103-Q1-K1-E11
atcaagtgcaatttcaatccccagaatctttttaatcgtcatctttcaagcaactgccgggtctcctttccaactaccaacccatatgctatcattcccattgcctcagacgagcccactgacactgatgaacacattccactacctaccaccgccaagccttctctcaaacacaaggatgagcacactcctgacgccaaggctaatactaccaacgaaccagtacctaacacggtctccataccacctcatccgcttgcactcattcttcctacgaacacactattcacgacactactacctaactgtatgttacatcagcttcg

SEQ ID NO: 32910 - DNA, 292 bp, Glycine max
  Clone ID: LIB3051-103-Q1-K1-E7
cccacgcgtccggaaagcctccctcttctccaatcttccctgttagatcgattggaagattgaagcaatggctgatttaagagttaagaaaggaagcaacatgaagcatggatctgtgtctgtcaccaccatcaaatctctttcgaaggagttgcaagtggagattgttgccaaggtggtcactcgctccatatttgaccactgcatgataaaactatgttgcaaagaattttttcacgccttcgaagatgattacgtgtaccgtcacgcctccatggagaattttgcgttg

SEQ ID NO: 32911 - DNA, 354 bp, Glycine max
  Clone ID: LIB3051-103-Q1-K1-E8
gtcaaacatccgtacatgaactactcgtagaattatacttgaatgcatgacggggggggaaccattgtcggcttagagtacttccactgaaactgctagatctatgttacacaccgcctagtacaaatgcacgctcaactataacaacctgctctcgctcccttaaacactgatcaaaaccttgacggaaaaggtatcccactacctatcactaatatgaatctacttgaagattgcgagtccatgcaagctcagcctagactacatacccttgataaggccaactcactatacatttacagaagcgcttcaagctcatcaatatggcgaaccgaagcagaatctgacatgaca

SEQ ID NO: 32912 - DNA, 456 bp, Glycine max
  Clone ID: LIB3051-103-Q1-K1-F10
cccacgcgtccgtggaattggaagaagcataagatgaagaatggtatactactagtagtgaatactcgttcaaaaataatgctggaaatggttgtaaggtgaggaggtggttgctcaaaaggggactctgtctgggaaggaagatcttagtggctggcttcttagcttctgctgccccggtggttgttccacctcttgtggttgcttctgctgttggcattgttgtttctatgccttgtgctattttcttggctagccatgcttgcactcagagtttaatgagtaagttgctccctaggcctactcctcaggatactttgttgcgtgaagagatgtgttttcagccaggcaatgatgttatacacacatatgaagaggaacaagtccttgtatatgaaataaagagagacattgaaatggttggtgttcaatgtttgaagaatggggaaaatatga

SEQ ID NO: 32913 - DNA, 398 bp, Glycine max
  unsure (1)..(398): unsure at all n locations
  Clone ID: LIB3051-103-Q1-K1-F2
ttcatagaacatttgtccataaaagagaaagttgttcagctaacaagttcgtggagaacccaaaagcgtgtatttatgggttagcgttgcnantttgattttgggtgaagaattggttttgcttaaatatcgatttttattgaagtttttggtttgaaaatttgtttcttaaatgtaagtttgtaatcagacttatatgaaattttcagcccaatgcaaagagtttttttaagttgaacaatttttggtaaagtacatttctctttagcaaacgggaatttttgagctatgcaatcatagatcaaatatgttagatgtttgattttgttcttgctatgttggattgctcttgctgtgctggattgcaggtatttcatcttcagatgccgaacattgaa

SEQ ID NO: 32914 - DNA, 381 bp, Glycine max
  Clone ID: LIB3051-103-Q1-K1-F4
cccactcgttcggcacgtggcttctgcagactttcctgatcattttgctaccaactgggagggcgctttcttcattggagtaatttgctcaccaatttgctatctttgcttccatactttcttgttcattttagtgtcctcttcactttcagttttttgttgagttttagggcgagtgataaagctgatgatggctctcatctttactatattgtttacgattttggtttggatcttttattcttcctaatatcttatcaactaatctatcaccgctgttctgcgtactgggggcagtgtgacgttaattggtacatatgtctttacaagtgtccatccgagaaccatctggaaaatttgctgctttagcttcaaaattca

SEQ ID NO: 32915 - DNA, 423 bp, Glycine max
  Clone ID: LIB3051-103-Q1-K1-F7
ctttcttcttttttagctatccctctcttgaaaaatctagatctcgttcttccttgggctacgttacgcttttagtgaccggatctgtatggatctgaaccagatctacacgccgatggtggttttggcctggtctttcatagatctgatgcatggaggctcagatctactgtacagaggtgtgcgattcatatactgtagataatcgatgagaagaacgcagatccagccgcttccgcttgttcgatcgctacagacgcttgtatcggattattcatgattgattcataagcagcatgtcttcctccggctatagttgttgcagatctcggatgttgtaaaattagtgtatgatgtgaagctatgggctggaaaatgtggatgtaggagatttcgggacgaaaggcctcaaaacgcttcgtc

SEQ ID NO: 32916 - DNA, 342 bp, Glycine max
  Clone ID: LIB3051-103-Q1-K1-G1
cccacgcgtccggttagttcacacactaagttctgaaaaatgagttccaaagtttttcttaggctacttatgttcatggccactatacttttgatctcctctgaggttgcacccgatgatgcataccagaattttgacaaaacagatgggaagcgtagtgcaaatggggtagatgaaagcaaatattggcgtggtggctatggcgactatggtggttggcgtggtggtggttggcgtggtggctatggaagctggcgttgtggctatggtggtgggcgtggtggctatggtggcttgcgtggtggctatggtggagggcgttgtggctactgaagtttgggt

SEQ ID NO: 32917 - DNA, 391 bp, Glycine max
  Clone ID: LIB3051-103-Q1-K1-G11
cggaaatatcgaaagagacagacagagcgacgtcggagaaagaaagaaaggaatgaatgagagagggatggtaggagaaaaatgagaatggcgtgaatgtgaggagagaagagcctgaatattagaatcggatacccttaaagaagcggagataggagtgtgcgccttcaaacccaaggggcttctgaggggctctatatcggaggcggtgctatattactctccggatttcctcaccatgaagagcctgttcatgcccaagcccatgactcattccgatgtcgacatacatacgcgagatctacttttgcggcttaccttacgagatgactatgacatgcccgacttgaccaattacctcttgtacttaaagtcaattctttatggtaac

SEQ ID NO: 32918 - DNA, 299 bp, Glycine max
  Clone ID: LIB3051-103-Q1-K1-G12
aaaaggcagtaatagcagctgacacatcttaagaatatcacactccattttagggggcgggttgtatttgtaataccatttcctcgcgcggcactgcttcccgccgccgccgccgccgtcagcgtcagcaccaatggcagacgcatcttctctgccgacggatcaactcgccgccatcaccctctactaggttcccaaagctaatgcctccgaccgcgtccctatgctatccatcatctcccgcaccgacagcggctcgggcctcgtcgacacgtaggctcgcgttggcagattcgtga

SEQ ID NO: 32919 - DNA, 419 bp, Glycine max
  Clone ID: LIB3051-103-Q1-K1-G8
ctcaacggcgttctccaagtgactctcctcgtcgctcccctagctattctccgtatggaagaagctatagccggtctccctattcttcagaccgaagtaggagtcgttcttactctcctgactataggaggaggaagtcaaactatccatatcactctaggcgaaggtcatactctccatactacagccggtacaggtcttattctcgatatgatcgacacaggtcatattctcgctcttgctctccttatagcaggtcacctgtcagcatccacgacagatcatactctccttatgactcacgatatgactcaccggatgatcactcctacagaaggcaccattacagatctgtttcacgaggtgcctcgcctgatgatcgctattatagaaggcaccattacaggtctgtttctcga

SEQ ID NO: 32920 - DNA, 442 bp, Glycine max
  Clone ID: LIB3051-103-Q1-K1-G9
gggatacccatctttgtcatctcttaactcatggtacatgtctccacacattccaagtcgaagcaatgcttcagtaagctatatgggttcatccagtcatcaacaacatcctctccgttatagtgagtcggctgcaagcttctccccatttgcatcgacacactcacttccagaatgttaaattgttcaattgattatatcatatgattgagacgtccacgcagttgaactagtaattgccaagtcttgaactaaaaggtggccatgtgatgaccggtggtctagatgaatagtcctatgtgatgctcggggcattccctacctctgtcatttgacttccgtcttggcacctggtgtacattgtagcttctctctggtgctagattcgcttacatgtgctggctgaggttcttacatgtataggttggagagcttgcataca

SEQ ID NO: 32921 - DNA, 396 bp, Glycine max
  Clone ID: LIB3051-103-Q1-K1-H1
cccaactttcctcaaattttaactttctaatgcaaaaccaaagctaacccacttggcgtagtagtaactgccgcttccatactcctttcctcgaatcttcctctcttcatatttgtcattggcttggtcctcttcttcttcttctttctctctttcatcttccaccgcaaccagtttcagtgttttcagtttccaagattagggagtttgtggtgcatgaaggaagcattcagtgagatttaagaggctggttttttctgcattgtgtttgaattgaagggtacaagtatgagtactacaccacaagagaagtttgttaggtttcaggattggaattcagagaaaggttctgagagtaattatcctgcaattaaaataacacactctgagagattt

SEQ ID NO: 32922 - DNA, 397 bp, Glycine max
  Clone ID: LIB3051-103-Q1-K1-H10
ctttgtaaacagaaagagaaaggcagagaggaaagactttaccgagtccttacgcgttgggtgtgtttgcgtcggaaggaagagaagatgagtgagaatttgatggagaaagtgagcgcactgggagagcgcctgaaaatcggaggcgtggaagtggggagaaagatgagcgaggggatgagctccatgagtttcaagctcaaggagttcttccagcctgggcccaatcaggccgacaagcttgtggaggacgctacttccgaggccctggacgagcccgaatgggccctcaatctcgatctctgcgacctcgtcaacaccgacaagctcaactgcgtcgaactcgtccgcggaatcaagaagcggatcattctcaagagccctagggttcagtacc

SEQ ID NO: 32923 - DNA, 334 bp, Glycine max
  Clone ID: LIB3051-103-Q1-K1-H11
atgcgtcctcagatgttgataggcacagattaaagactttaccgagtccttacacggtgggtgtgttatcctcgtaaggaacacatcactagtgacaatccgatatcaactgtgaccgcactgataaagctcctgactatgccatagcatctagactctatacagatgatccagtggatcagcaccatgagtctcaagctaaaactattcttccagtctccacacaatctgccctacaagctagtgtatgacgcttctctcaaggaccactacgagcacacatgatccctcaatcgcattctctgctacctacacaacaccctcaagctcaact

SEQ ID NO: 32924 - DNA, 175 bp, Glycine max
  Clone ID: LIB3051-103-Q1-K1-H4
cccacgcgtccgcccacgcgtccgcttacacttgcgtttacgcttggacggactcagagtggatcacttcaactgctgctaatacccatccataattaataaatatacaaaacaattacctcacgattatacttcacatattcacatatctaaacccttatcgattctactatat

SEQ ID NO: 32925 - DNA, 430 bp, Glycine max
  unsure (1)..(430): unsure at all n locations
  Clone ID: LIB3051-104-Q1-K1-A6
tttttaaatttctctgtctcccatgtaagaaatgtttgattggaacgacgaagagcttgctgacatagtatggggtgaggtgggtgagggtgatgatcatattgtgccttatccggaggcaagtgaagatcttaatgacaagaaagaatggagtcaggaagcttctgctactaaactgattgaccagaagagaatagaggctaaaactgatttttatcaaggaaagctcggaagcagttccaaacttgatataattgaaggacaatctgcctcagaatctggcacaaactcatggcctgatttatctttatccactgcggctaaaactgatcagggttccctgggtgctgctgatgtatctaaaactttagagactacacagcttgaaaaggatgtagaaaagcaaggtgattntgtcaactatgcctgg

SEQ ID NO: 32926 - DNA, 444 bp, Glycine max
  Clone ID: LIB3051-104-Q1-K1-A7
gtttgattgcttcaggattaccatccaaactgcgattagaagagtctacgcttaggtctagcatttggtaattggtgtcatcacctatggccgaaacagtgtcgtgaaaaagcaggctcatctagaaaaggtgtaaataaggaagaaatgaaaccaagacccattctttcaaaagttacaatggttggtctctctacagaagaagcaggccaaacgagcaaagctaatttaaagaagacaatggacgatttgacaagagagttggagaagacagaactagatattatgacagatggtggcagtaaagagtgcacagtagaagatagggatccactatttgtggcaaatgggggaaattactattctagtatgaggagaaaaccaggatctggtcgctagtttagagtaggatccaactaaaaccttcttgtcacagaatttttc

SEQ ID NO: 32927 - DNA, 53 bp, Glycine max
  Clone ID: LIB3051-104-Q1-K1-B12
tcggaccctcctattgcgtctgggggatctggaaaggactttggcaattctgt

SEQ ID NO: 32928 - DNA, 395 bp, Glycine max
  Clone ID: LIB3051-104-Q1-K1-B4
gcgttccttaacacacactctgcctctatatgtctttctctttgggtcataatccttgaccatggattgtattcctctgcggggcggccaatcaaccaaccatcacactatacatattatgcaaatgtcgtatagttgtagtgttatgcatatgacatctacatccttatccttcacacccaactacattgactccaaccaacacctacccacatactatcctctattccacttttcccatagagacctctatcatctcatatcaactcataacgccctacatcttatccctcttctcaatcttctctgcgactacatactctggttcttctctgctaccacttctatacccaacaaccactcttcataaataaatcaagattacatggactatt

SEQ ID NO: 32929 - DNA, 425 bp, Glycine max
  Clone ID: LIB3051-104-Q1-K1-B6
cttttctccaaacaccgcgccttcactgacgacggctctgtcgccgccggagcagggcatgcaccgtcatccatcggcgtcgttcaaattcctctcatctctgccttccgttcactacccattgcacctgaaagcacgaggctcgcaacacattcgtatacctcctccgtttacttaacgaagggtttgaaccttcggaatcataagccctctgcgagtgaattccttttttccgagtgtcgcgttgaggttacgtttgttcggtggcttttgcgaattctctgaactcatggccgcatggtcttctagaaagttactgagagacgttcttctcaaaagtgtagtctcgaatcagcttcctggcattagatgcttttcttctgcgccaaaaattgctcctaagatcggtcattattccaagaaag

SEQ ID NO: 32930 - DNA, 340 bp, Glycine max
  Clone ID: LIB3051-104-Q1-K1-C10
aaaagatggccatgatgctgaaaatatagggtttggagaggcaacacaggaaagggtcgatcaaccgtaaaggactgcatagattcatgacttctgtttaggcattccctttgctggatatgttttaacaggagggattattggattccttatttcacatattactgcaacactaatctactgtgtgctctttggccgtgctatactatttctcatcacctttagcatgaaggtctgtaggcaaggaaactcaagtttaccatttattctaggacaatcagctttggcagcggttcttatctggaagaacttccatagctactcattggcaaataaaatt

SEQ ID NO: 32931 - DNA, 385 bp, Glycine max
  Clone ID: LIB3051-104-Q1-K1-C3
gcactcgtgcgaaaaaaaagaaacctaatcgccgatcgcgtcaaaagttcggtgttgctctgtgaaattgccgtttgggttttttgcggtcggggataatcctgtgaataataacaataattgggtatgttttctgttttaggtaacctagctgtagctccttttttttttataattgatttgccgttcgaagatagtcgttccaggtactgctactctttgtgttttctggcgttttaattctgcgcaattatttaattctacatgtcagattgttgattattggtcgtatgattcgttagaactctatgactcctgagctctggagttgaaatgttgacttactaggctaaaagccgtagcttttgtggtacgtatcctaaca

SEQ ID NO: 32932 - DNA, 436 bp, Glycine max
  unsure (1)..(436): unsure at all n locations
  Clone ID: LIB3051-104-Q1-K1-C4
attgtattgtgttcaaactttgtttcttgcataccctcttcttctttggccttaaccgtcgattgggctttgaaatggagttcgaggaccgcttcagacaccaggttcagagaccaaaatatgattgccttctttttgatttagatgacactttgtatcctctcaaatctggtctggcaaaatcatgtctccaaaatattaaacactacatggttgagaagcttggcatagaccctagcaaaattgatgacctgtccaacctcctttacaagaattatggaactactatggctggtctaagggcaattggatatgactttgactatgatgaatatcatagctntggtcatgggagattaccttatgagaacctaaaaccagacccagttctgaggaacctgttgctgagcctaccctataggaaacttatcttcac

SEQ ID NO: 32933 - DNA, 437 bp, Glycine max
  Clone ID: LIB3051-104-Q1-K1-C6
gtttttatttttatttttattttttcacctattgttatttcttcggttgatttcttgcattggttgggttcatgtggtttcatttctcttaaaaagctttgattttcaggatcatggggagagaagttacaggaatgcaagttgtggacaagaagccaaatggcgtaataccagcttcaaatggtagttctaatgataaagtgtgcatttctcctaaaaggacagcagctaaggttcatgcgaaggatcacgaggtaaatgaatgtaccaaagctaactcttttgttgaaaaaagccaagagaagatggatggtttgagtgccaaagcaacaaactgtaatactggcttgcctgaggaggagattgagatatctgaagtgcagaaaatgggtgacagtaaaaagttaagcccgcctgctgcaagaaaagagcatact

SEQ ID NO: 32934 - DNA, 235 bp, Glycine max
  Clone ID: LIB3051-104-Q1-K1-D10
caaaattcatgtctccctctttccttcacgcgctcctcatcattctcttcctgggttccggacacgcgctcaaggtcccctttcgagtcaacgatgttcttcccgttcttccccacggaatcttctggccggttcttaacaaccttcacagcgccgtcgacttggctcctttctttgtcggcggcggcccttccgataacgatttccgtcagtggaaaaccggatgcttttacga

SEQ ID NO: 32935 - DNA, 127 bp, Glycine max
  unsure (1)..(127): unsure at all n locations
  Clone ID: LIB3051-104-Q1-K1-D12
ctctgatccaaacgaagtaacgaaccaaccaatcaccctgtctttctgaccganaaacatagtcccaaatcgaacaaaatcaatcaactaactccttcaacgttgttgttattatgcagacaacaag

SEQ ID NO: 32936 - DNA, 374 bp, Glycine max
  Clone ID: LIB3051-104-Q1-K1-D5
cccacgcgtccgaagttcacggtcagttctgaaaaatgggttccaaggttttgcttgttggagttatgttcatagcggctatacttctgatctctgctgaggttgcacccaatgaatacgaaaattttaacaaaaaagatgggaagcatgctccaaatgggttatatgatagcaaatggggttacggtggttggggtggtccttggtatggcggctggggtggcccttattatggtggcggctggggtggcccttattatggcggtggttggggcggtccctggcgtggtggtggcggtggtggctggggaggttggcgtcgacctaatggcaaccctcacaactaagaagaaaacttgctaaagcttctttac

SEQ ID NO: 32937 - DNA, 190 bp, Glycine max
  Clone ID: LIB3051-104-Q1-K1-E3
cccactcgtccgcccttgctaccaacagcatagtttccatcctctatatttcttcaatcggctctgccttctacttctagggtttcgcttctgcaacggacgaccttcttcaactcatcaaagttgactttgtgagccaattcaatcatgcttgataaggtatcctagtgttgtttgttcaccttcatct

SEQ ID NO: 32938 - DNA, 429 bp, Glycine max
  Clone ID: LIB3051-104-Q1-K1-E6
atcatgtgggaggatgacatcgtaggggtgaagagaagagatggtgaaaggcacaggcgcgggacataaatgacttgagggcgacctccgacttcttcacagctctaacgccgttggaagatctacaggatagactgctcagatcacccgaacagagactctctaatacaatcatatatgggtgcacgtggacactacttaaacctatggcatatattctcctacattatgcataatcatatcatcgtacttgttaacactgtatctggatctgcgccgatcatatctgctctgtctgtagctctctcagggatatcaaagtcatgggacgacttggaccctgattatcttaggctagatgcgtactgtgaagacactactcctgctgattgtacaggtacaacagatccagctgatctgaagtgactt

SEQ ID NO: 32939 - DNA, 374 bp, Glycine max
  Clone ID: LIB3051-104-Q1-K1-E7
gccactcgtgccttaatgtatcttcactgggaggagagagagagaaagaaagacagaagaggtgacagactggcagatctgacgacgaccctataggagctagatcttaaagaaacagagacacatctgattgagctaccataagacgctctcgacgcagaggcaactcccaagaaacatttcgaacacaaggaagagcttgattcggaagatatgatgactatctacatcaacacatcgctgccacatgtctgtcagtgatgtacttgaacgcacttgataaactggcttccggataatagataaacgaatggctatatgtagacaccactgacttgaagaagcacatgagataccctgttggatactcttac

SEQ ID NO: 32940 - DNA, 459 bp, Glycine max
  Clone ID: LIB3051-104-Q1-K1-E8
gtcttctaaattctatatataaggtccagcctttgtagaggagccaatctcactcctcgtctgcgtgaccacgcacctagaaactcctatcaaagcccctatcccatcagggagactgacaagaacatatcaccaaacacgcacacttcacaaaccacctagcctcgactctcattccgattccagttcgactagcatttcggaaacaatcatattgactactatagagcaggacgtcactgacaaaacttctgcacatgataacgttgccaatgcttaagttgatcaatactaccatatgttcgcatgaaagccctgagctggtgcatacgtctcaccaagacctctacacactcgagcgtcctgagcacaatggcataatgggtattacataccacaatgctcgatatcaacaagaaaacactatcatcgctatatggggaactcactgcagagatc

SEQ ID NO: 32941 - DNA, 440 bp, Glycine max
  Clone ID: LIB3051-104-Q1-K1-F4
tgcagtttattctatcatatccttgttcaaataattttcttttcaattacaataccccaagcccagaaacttatgttcatgaccatcctcaaggtcccaataacatttgcttgaagacaattttgagttgaccttacagcctagttccacctatacaaacacccttgatccttcaaagcctctcatagctccaatactggcaacaataatactcttgggcatctgaactatctccattctttttttccccctttctttgcagtggatttgcgaggttttaaagaaattaaatgcgtttttatgtgctaaagagctaggtaattatagaattcatctcacacatacttctttttactacctttcatcttttagattttattcttgaattattgttgtttaacggagtaatttaattagttgaggggttgtggaatttgtgt

SEQ ID NO: 32942 - DNA, 435 bp, Glycine max
  Clone ID: LIB3051-104-Q1-K1-F5
accacgcgtccgtgcttctcagtttctgattttcccaatcgcagctaaaaaatcctttggggcctttaacctattgtgaataagcagaaattagggaacgcaacaatggctcaagcggttgaagaatggtataagcagatgcctgtcatcacgcgctcttatctcaccgctgctgttgtcaccaccatcggatgttcccttgatataagtaatccgtatcattagcacttgaaccctagattggtggtgaagcaatatcaggtcaggcgtctggttactaatgactcgtactttcgtaacatggacttggatttcctgtgacatatgttgcctcttgcacgttactgcatgcttctcgaggagaactcgttcacggggaggactgctgatttgttttacatgctcttattaggtgccactgtattgactggaatt

SEQ ID NO: 32943 - DNA, 436 bp, Glycine max
  Clone ID: LIB3051-104-Q1-K1-F6
gaagcttcgttaccgaatcaaggatatcaaggaggctgcggctaaggctctcgctcaacagggttcctccaccaccaacatctccaatttggctctcaagtggacccacatattcaactagtagcttcttcctttcaattatctgcacttaacttatcaaatgtcacttggcatacatgacattaataaaataattgggtaagtgtacgtaaatctcaaatccacatcccgacgatgttcaatggctagacctctaacttgtagtatatgtttcaaaatgcctttcaaccttaaattactaagttctatggctgcctggctaattaattaacgtcaatttcttcagtttggtaaatgccttcaaccagaaaaggagtacggtatatcctttgatcaatcatcaaggattaagcactagtttttagaatctgcttta

SEQ ID NO: 32944 - DNA, 426 bp, Glycine max
  Clone ID: LIB3051-104-Q1-K1-F8
cccacgcgtgcggcgagcctcgtgcaggagaaaaatgccagaagatcagttgaacggacggacgatcagatcacatggagctaaagtggcaaggacacatatgcatgactggttgattcttttgcttcttgttatcattgatgggatcttgaatgtgatagaaccatttcaccgttttgttggagaggggatgatgtccgacttgagatacccgttgaaagataatactatacccttttgggctgatccaattgtagcaatattggtgccaatagcaatcattcttgttgactatctcatccgaaaggatgtgtatgacttccaccatgctatcttgggccttttattctctgtactcattactgcggtgataacggatgctatcaaagatggtgttggacggtcacgcccagatttcttctggcg

SEQ ID NO: 32945 - DNA, 424 bp, Glycine max
  Clone ID: LIB3051-104-Q1-K1-G10
gcttcctctctctttctctttctttttctcaattgctgcgaaagaaaaaagaagcggaagctcattaccaaagacgaaaacgaaagaaagaaacgatgatgcagctgcagcaacaccatcaagaggtggaagaagcagaagaagaggcttcgaattcttcttctcatcatcacaacaaggcatcgccttctcccagtttcagcagctactcatcggagacactcgccgagatcgccgccagggtaatcgaggagctccgccgcgaccctagttcactctccgtcgacgacgacgacgacgcacttttcccgccatgggaaaaccaaaacgacagcttcgtccctcaaaacgacaagccggcagaacaaaacgacgactacgacgatgatttcgaattcgcgttcgtttcgcgagacttcacttc

SEQ ID NO: 32946 - DNA, 441 bp, Glycine max
  Clone ID: LIB3051-104-Q1-K1-G2
gcgatcgacgcagtttgaaatcatctgctcctgctcgtttttctgttctgcacgttggaacatgctcttgagaaaaagggtgaatttgtgtttctgttataccctattaagtgaggaatcattttttggctttttgcccctaaaaaaatggtgcaagttgtgtcattgagcactctggcaacctgtggaaatagcaggttatgtggatcctcaccatcttggatggcaccctttgagccatacaagagatcccaaattacctcttccaatggcagacacttggtttggaacaattctgtgcagagcttgttcttaacaaggcacagtgattttagggctgaagcagcatggatgtttagagggggagaacaagggttggatgcgagttcggagcacagcgagagcgctaatgaggatatcttgatgttcttctttcagctc

SEQ ID NO: 32947 - DNA, 435 bp, Glycine max
  unsure (1)..(435): unsure at all n locations
  Clone ID: LIB3051-104-Q1-K1-G4
aagagagctcgttcgtcatttttcgtgcctcaaatctttacaatcgataaccacacccatggccttgattcagaatgtcggaatcaccattcagaccacgagaaaagcttgctgagaagcaaaaatattttcagagtatccacaggcatacctacttgaagggacccatggataagattacatccgtggccataccactggctttggctgcaacgtcaatttacatgattggacgagggatctataatatgtcgcatggaattggaaagaaagaataacctgggaatttctgattgaggagggtttcccacacaaacctaccttagcttcgttaatatgggccagtggttttctttgcatttatgtctgttctcttaataaattgcttagttgcagattttgactgccattgngggtttataactngaatgaaag

SEQ ID NO: 32948 - DNA, 436 bp, Glycine max
  Clone ID: LIB3051-104-Q1-K1-G5
tggcaaagctatttttgaaacaggcaaagcaatacgcagatgcaagaccaagctagcctccgcaactcttccaaggcattgcttccaagactccctctcactacctcgcttgggacgtcggcactgggagcggccaagctgccaaatctttagctgcaatatacaagaatgtgatagccacagatgctagtgacaaacaacttgaatttgcagccaagctcccaaatgtgagataccaacacaccccttcaaccatgtcgacggccgagcttgaacaaatggtggcatctgagggaaccatagaccttgtgaccatagcacaagccctgcattggtttgaccgcccaaccttctacgaacaagtgaagtgggttctcaggaaacctcatggaatcattgctgcttggtgttactatttgccaagagttagtgatgc

SEQ ID NO: 32949 - DNA, 425 bp, Glycine max
  unsure (1)..(425): unsure at all n locations
  Clone ID: LIB3051-104-Q1-K1-G7
cggaggtagaaagaggcgaatgctgttgcaaccgtttttggttttgtgtgcgacggcgacgggtttgggattgtggatgttggcgctgatgccgctggatcctgcgatcactgttgattttccgaaaaaaatctagcttgtagattcgaacagctcgagtttgaacggcggcggatagaatccttgcgcggagttggaggacatggggacggatttcgtaactggtgttgtctggaaggagacgctgagtgtgaggagaattatcgaggaccacttcgatctgaacggtgcttcaagattcagggattagccctcagatcagatctgcagtcatggatgtgttcttggaaagactgattatgcttgctntggcaatgaaatgtacaaggtcttaactgctgcatcactgaatgtaatgctaaacc

SEQ ID NO: 32950 - DNA, 439 bp, Glycine max
  Clone ID: LIB3051-104-Q1-K1-G8
gaaaggtacttagaggctaatgcttccgctaacatggtaggaatatagtgctaaggtgagaggtatctgatagtgtacgatgacactgcatccgaacaatactacgatcactgatgttattgcataaataatctaaactagtagattcgaacagctagagtttgaacggcggcggagagaagccttgcgcggagttggaagacatgggaaaggatttcgaagctggtgtagtctggaaggagacgctgagagtgaggagaattatcgaggaccacttcgatctgaacagtgcttcaagaatcagggattagccatcagatcagatctgtagtcatggatttggtcttagaaagactgatgatgcttgcttagggaatgaaatgtacaaggccttaactgctgcagcactgaatataatgctaaaccggtccttgatcat

SEQ ID NO: 32951 - DNA, 217 bp, Glycine max
  Clone ID: LIB3051-104-Q1-K1-H4
gcggacaagatgacaacacgctacaagaagaaccggaggacgaggggcctcgacatcactgagggcagcggaatccaattgcacaggaagcaccctatacgacacactaacaccggaagcatgcaccaccacaggatcctcttagacaaataccaccctgagttcttctgtcttgtacgaatgcactatattcacaagcttcttatcatatcactac

SEQ ID NO: 32952 - DNA, 300 bp, Glycine max
  Clone ID: LIB3051-104-Q1-K1-H8
accacgcgtacgaacagacgaccgacacatacatatagtggtagctacaatcagagataggggatgtcacctatgagtacacatctacttggctactaacatacagcctgatctttgttgaaaacctaccctcctccatggatcaggagccgtatcctgacacatggtcggcacagccactatctgaatcatccttgttagcctctctgacagctacaccgcctggaattcaatcataacatttatctaacacgacactatcgatatcaactttgccggcactcaacacatcttgtacat

SEQ ID NO: 32953 - DNA, 324 bp, Glycine max
  Clone ID: LIB3051-105-Q1-K1-A1
cccacgcgtccggggaaactaacaagtgtgacagaaaagtgaagaacataccaagtaccagctgggtgtttcaacaactgttctgtaatatgtatatataatttcaagactagaaggtaaagtttacctccgtactcgttgggttttgatcgttgaatctgatagcggtttatgtagagataagatatatatagcatgtattgtctaataacctagtaactgcaatatgctatagcattattacgtccatgctagattcagagctgttgaatttatggattgtccataactacttgtacataatccttatagggttagtagctt

SEQ ID NO: 32954 - DNA, 349 bp, Glycine max
  Clone ID: LIB3051-105-Q1-K1-A2
cgaaaatcataaagtttaatcttgacaatatttaattttacatttaatttaaccaaatcagaggggttaacaccctataggtgattacacatatttcatacaatttattaaccaaaattcatatacacaatcatatcaacattctgacaaaaatttacaacaactatcacatctatatactcctatcctataattcactcatctaatattaatccacaataacccagatacctatatcgatcatatgttaaacatttcatactcatcaaccactatacaaaatgcacaaatattactagccttttacaattttacatctagaaaattcatatgtatatatataattcac

SEQ ID NO: 32955 - DNA, 446 bp, Glycine max
  unsure (1)..(446): unsure at all n locations
  Clone ID: LIB3051-105-Q1-K1-A4
gttttgccagttggctcccgtactcttgccaagccttacaagttggagcttgccatatatgctaggttgcangacgcacaaccacgtaccgttattggactgtggaatgccaatttacaagatccaaagcttcaccagtctgatccgtcagtgacagttgttgatcgcattactaaaacacgcgttaaacttgggcctgcaagtgagaatgacaagcaacaacttacatggttttctaatgcttgcaaaggaattccacaggtaagtccagcattcttgcaaaataacgtgcctacaggtccacccacagcactaccagttgcagaagacacagagttggctatggccatcagtgcatcccttcagtctgccatgcaagagaggccacccttttctgatacacagccaagctttgaagcaagctcttcaagcagtgcaatgaatac

SEQ ID NO: 32956 - DNA, 310 bp, Glycine max
  Clone ID: LIB3051-105-Q1-K1-A6
cccacgcgtccgcccacgcgtcctaaaaaaaaaacattaaaaaaaacaaaaaaaatagagaagaaaaacaaaaaagagaaataaaaaatgtcaaccattctaaatgatccaaattatctatcccatccatgcaacttttctgactctacacttgggccacctataatcaatttatactcctgtcttatactacacttatcctagcaaaacccttacataacccacctaattacatttgcaatatattcaacttttctcatcttgaaccactacaaaaatggcttcacttttagccctttcaaacatcttc

SEQ ID NO: 32957 - DNA, 227 bp, Glycine max
  Clone ID: LIB3051-105-Q1-K1-B1
caatggaagcaaacgagaaatgtgatgtgtatagttttgggatcttggcactggaaatagtgtttggagagcaccctggtggtgatgttacatcttcttgtgctgcgacctcaacacttgatcatatggcattgatggataggttggaccaacgtcttcctcatccaacaagccctactgttgttgagctgatatcaattgtgaagatagcagtttcctgtttgacc

SEQ ID NO: 32958 - DNA, 428 bp, Glycine max
  Clone ID: LIB3051-105-Q1-K1-B3
gttagttcacacactaagttctgaaaaatgagttccaaaggttttcttattctacttatgggcatggccactatactggtgatctcctctgaggttgcacccgatgatgcataccagaattttgacaatacagatgggaagcgtagtgcaaatggggtagatgaaagcaaatattggcgtggtggctatggcgactatggtggttggcgtggtggtggttggcgtggtggctatggaggctggcgtggtggctatggtggagggcgtggtggctatggtggctggcgtggtggctatggtggtgggcgtggtggctacagaagttggggtggtggctatggccctaacgaacataatgaagctgggattgatgctagccctcacaactaagaaggaaacttgctaaagcttatataggatttaagtta

SEQ ID NO: 32959 - DNA, 438 bp, Glycine max
  Clone ID: LIB3051-105-Q1-K1-B4
cttatatgctaagaactcgacacacacaattgctgttcgcacctaaccagaaagaaaccagtgtgtttgaattcgatggttgctgcttcagtctcagtgtggtaattcatctatgaatactacgccgtttatggacaagcacattatggatctcactcacagtcacggatcttcttcttcttccactactcagactcagagcatggacttcatcgaccttatgaaagaacctatacaacatcatcaccatcatcatctcgaatattattacatctattaattataaaatgcccgttgcaattgtatcagttttgtctacatcgtttttagttactattttctaccctatctaccttttttacagtttcaattttttctaattctccccattctttatgtacatgttactttcgattacaacttcctttactttttttt

SEQ ID NO: 32960 - DNA, 434 bp, Glycine max
  unsure (1)..(434): unsure at all n locations
  Clone ID: LIB3051-105-Q1-K1-B5
tgcagtttattctatcatatccttgttcaaataattttcttttcaattacaatacgccaagcccagaaacttatgttcatgtttatcctcaaggtcccaataacatttacttgaagacaattttgagttgaccttacagcctagttccacctatacaaacacccttgatccttcattcttttttgagttgaccttacctagctccaatactggcaacaataatactcttgggcatctgaactatctccattctttttttccccctttctttgcagtggatttgcgaggttttaaagaaattaaatgcgtttttatgtgctaaagagctaggtaattatagaattcatctcacacatacttctttttactaccttttatcttttagaatttattcttgaattatncgtgtttaacggagtaatttaattagttga

SEQ ID NO: 32961 - DNA, 436 bp, Glycine max
  Clone ID: LIB3051-105-Q1-K1-B6
tttctttgcagtggatttgcgaggttttaaagaaattaaatgcgtttttatgtgctaaagagctaggtaattatagaattcatctcacacatacttctttttactacctttcatcttttagattttattcttgaattattgttgtttaacggagtaatttaattagttgaggggttgtggaatttgtgtagaagatttttctataagaatttttaattcgctaaagaaattctcttgttaaattagattattatgagattaattacttcacaaaattccacaactcctcaacaaattaaagtactttgttgaacaaaagttaatttaagagtaaaatctagaggatggaggttgtaaagagaagtggtgtgagatgaaatccataattagctagttgtttagcgcatgaaaaagtgtttaatttttttaaaatctc

SEQ ID NO: 32962 - DNA, 425 bp, Glycine max
  Clone ID: LIB3051-105-Q1-K1-B9
aaaaaacctttcataacttcttttctgcctccttcttcttcgggttgtgagtgtatacggagtcacgcatggcaggtttccttcgacgctggattccacgatggaagattttatcttatccaccctgacgggatagcaaatctttcatgaaattgagaattgctgctgctaataaacaagcttccattgagatgggggagttcaccgggagtggtgagtatgtgactatcggcgaatttccttcctccaggacaaatcactcaaggaaagtttcagttcttgctcttgtgtttctcatcttctatgaggttacaggggggccttttgctgtggaggatactgtgcacgcagcgggtccttttttagccctccttggattcttgctattccctcagatatggagtgttcctgaagctatgatcact

SEQ ID NO: 32963 - DNA, 346 bp, Glycine max
  Clone ID: LIB3051-105-Q1-K1-C10
gcgtagtgttgcgtcgacgtcgtgcgctgatactctgactctcgactttgtgaccatacggtaccctagctacggattgcaaccatgttgaccaagcacggtggaaaagctaagcctttgaagaaacccaagtctgataagaaggattacgactagattgatagggctaacattcagaagaaaaaggatgaggagaaggcgctaaaggagttgatagccaaagagcaacagaagggaagctttggatgctctgggctcatgataagtggatagaactaacggctctatatcatgattgcctgcattcaatattgagccctgcaatacagttgctaccatgataact

SEQ ID NO: 32964 - DNA, 308 bp, Glycine max
  Clone ID: LIB3051-105-Q1-K1-C2
cccacacttccactcactcttccactgacatattctctatcatacttctatatcatataagcattgtcattaacgcatgacaggatacacacactaccctatcttttattctttttgaaatatccttatccaatatatcatctaataactatagtatttatatacaaatttttgcaatctttcaagctataaactcatccttatcatacactctctaaaatcttattcctaaaatcaaaatcactacctcacacttttcttcgattactttatctttaaaatcactttattaaatctacatttacata

SEQ ID NO: 32965 - DNA, 233 bp, Glycine max
  Clone ID: LIB3051-105-Q1-K1-C3
cacacaacaaagatgcattatgatactagaaatatctcattgattaatatctaatctaatagtgtgtgtttctcaagtcggtgggtcgtacacattatacacacgcttatagctattggcaattgcaattgtcttatctcgattctcatatctcgatattctagtcttgataacttattagtaattgtccaatcgccgtccttaactggactcatcttctccgtagtcatttc

SEQ ID NO: 32966 - DNA, 446 bp, Glycine max
  Clone ID: LIB3051-105-Q1-K1-C4
agactctccatttttatggagtttgtctgatggagaagcatgtatgaagcgttctgaccggctacaaagacaagctgtttacctcttattagcttgttctttcagtctgatctgtaaaagaggagaaaatgcaaaccactgtaataattcaactctgtgctccagttttaccactaacccagattcagagcatgattacttctgcagaaaaaagggatcactagaacttttcaagtggattctaggacatcttccaactgcaatctctatcaaacatgaaaagtacatgcagatgtgtatgaacttcatatcatctttccttcagctatatcttcgtgaggatgatctattgtttgaagtgcttttgctattggttagcatatcatcttctctccaagaacagtctgaaaagtaggatgctgcgtatcatgatgtaatgaaagatt

SEQ ID NO: 32967 - DNA, 429 bp, Glycine max
  Clone ID: LIB3051-105-Q1-K1-C6
ctttgatgaagatggtgtcaatttggggttcttgatttctgaagatgactttttaattagttcttcatattagggtatagtatacttccctctcttgatagatatttacctctaagagatgaaatgtgctatacttttgtccattttaatatttttttattagtattgtccagtttaatataaatgaatcttttactagttgcaaacatttatagatgggcatttcctttttctataactttcaatgtcaccaactactaattttaacgccttattattgagttttggattctagatgtaatgaagttttagacatgactgttatcagctttggaacctttttttttttttacctataatcttcatttcatcttctgaacttcccaagttgatagtagggttcagaactgattacagatgatgctggat

SEQ ID NO: 32968 - DNA, 401 bp, Glycine max
  Clone ID: LIB3051-105-Q1-K1-C7
tgtgaattgggtgtcccatttggaagctgtggtggccgaagggctcagcaaaaagcccgtggatgtcatttcagatggaataaagtccatgggcttcaactgtgtcaggctcacttggcctatagttttggtcactaatgactctcttgcttctctcaccgttagaagctcctttcagaaccttgccctccttgaatccattgctggggtccaaaccaacaacccctccattatcgatcttcccctcatacaagcttttcaagcagtggtgaaaagtctcggtgacaacgatgtgatggtgatattggacaaccacataacccagccagggtggtgctgcagtaacttcgacggcaatggcttcttcggtgacaaattttttgacccaaaccagtggatat

SEQ ID NO: 32969 - DNA, 374 bp, Glycine max
  Clone ID: LIB3051-105-Q1-K1-C8
taaaaatataatgtcccataaggaagctgtgaatgtcatagggctctccatcaaggcagtggatgtcataataggtggggctgaatccacagactatatctgtgtcaaactcacttgatctatcgttccctccactaataactctcatacttacttcactagcaccaacagattttataaccttgacattcttatattcatcattagcgtacagactaacaaccgattcattatagatcttactcatattcaaacttgtaacaccatcttattaactgtcagcaacatcatagtcatcaatataattaacaaccacataccacatacaatgaggtgctcaactaactctgactatattgtcttcttcggtgaca

SEQ ID NO: 32970 - DNA, 346 bp, Glycine max
  Clone ID: LIB3051-105-Q1-K1-C9
cccacgcgtccgcccacgcgtccgaccagttcctggcaatgaaatgagtttgacttggggccacttcatgtctgactatagatcaaattataccattgattgtcatatttcataaagcaatatctagaaatgttgatgtttcagcaaatgtgtaattatttcacttgagaaaggattttccttcgaagagtaaaaaaacaaaaaaaaaaaatacaaaaaaaaaagaaaaaaaaaaaaaaaaaaaataaaaaaaaaataaaatgaaaataaaaaaagtatgcctgcaccaaaggacaaagaattatcaaatgcggcaagaacgaaaaaaaaaaaagggggcgccttt

SEQ ID NO: 32971 - DNA, 424 bp, Glycine max
  unsure (1)..(424): unsure at all n locations
  Clone ID: LIB3051-105-Q1-K1-D10
cttagtttaataaataagtttaaagaaattgacccattgacttgtggcacactggctggatggatagtgttatatgatcctcagctggtttaattggtttctagagcaaaactcaatctggtcctttggtcgctgaaaaattgcgcattggttttgaaaaaagtcacccaataatatttcaacattacaacggtagaacgattaagcgacttattctttcaattatttttcttttatttttagtacttaaattagtctttaaaaaagtaaatcatatatgaatttagtgcctgatggaatactattctaaattttcccttgttgaaaatattaactgaagcggatggaaaaagttagtgtcttcactgtcttgcgtttgtaattntgaacaattatttgttgattctttcttttaagattaaat

SEQ ID NO: 32972 - DNA, 437 bp, Glycine max
  unsure (1)..(437): unsure at all n locations
  Clone ID: LIB3051-105-Q1-K1-D12
cccacgcgtccgaatttatctgagagctgaagagagggaacgagtttgtgaagtaaaggggactcagtggaaactcggttgaactcgaaatggcgaaacttgaagcgaagctaggaatgatcgtggactcggtggggcagttcttctccggcaaagaccatcttccttattgtgactctgacgtcgtcgctggatgtgaaagagaggtattggaggctgaaaaacaatcatctgaagagcatatgcaggactgtctcctgcgtttatcatgggctcttgttcactccaaacacccacaagatgtgcaccgtgggatagccatgcttgaagcatctttgcctgctacaaaggacccactgcagcaaagggagaagctntatcttctggctgttggatactatagaaacgctgattattcaaggagtanggatctcgtc

SEQ ID NO: 32973 - DNA, 386 bp, Glycine max
  Clone ID: LIB3051-105-Q1-K1-D7
gagagatcccctttttttgttctttctctgctcattcgatcttctcgatcaggttctgcgagattatcgcgcgcaagtctttaactttctttgaccctcttcgcgtgtctctacacgaaattcggtctagcgctctcgcttcttcattcgctctgttgttctcggaatttcaattcaggattagggtatatggggcgtctcgcgcgtttggactcgtcgagtgtaattttgctttctggggttctacgagttaccattttaacatcattcgcggcttcaatgtaatgcgggtatcgtgatttggaccccgcagcgcgaaccatgattatcaaacggaatttgaaatcccaaatgccgagtctgaaacgggtcatactcggcgactc

SEQ ID NO: 32974 - DNA, 357 bp, Glycine max
  Clone ID: LIB3051-105-Q1-K1-E12
aatcgatcagaatgccggcactctcattagattaatagaggatattctgagcagaatgagagatcccttcgtgagactttcaccaggatctttagattacactccaattatttgtcttttttaagttgggggtgaggtagagtatattaaagtttgatgcgttgttaaaccattagttatttcaggggacgccgtttgtcgcggaagttttgaaaatgatgtatcttgtggtgggattatacaattaatgggtagaataatttggtgtctacttagtaaacattgataggctttgctggaaagatatatattattcaggtggatatgtcagactgtccatcctgctggacatttttc

SEQ ID NO: 32975 - DNA, 278 bp, Glycine max
  Clone ID: LIB3051-105-Q1-K1-E6
cagaattgtgcccgatggtgtgaatgcaaagcttcttgggtgccatggaccattggccagtcgtgaacctggaagagcctttttggatactgctactagttcttagtctgtcttttaatttggaaatactagacttttggataacattagttttgcaagagtgaatttgagttattttgtcagcacattccatttacttaaattttgtttgcgaacctcttcgatttggttattttaatgttatattctggtatgatgcacaatttctccttattact

SEQ ID NO: 32976 - DNA, 271 bp, Glycine max
  Clone ID: LIB3051-105-Q1-K1-E8
gaattttataggaaaaaaaaaaaaaaagatttaaaaaaaaaaaaaaaaaaaaaaaagaagtgaaaaaaaaaaaaggaaaaaaaaataaaaaagtcaaactttttatggttttaaaggttccatccttttatagtgccacattcttaactacattatattgcaacgtaattgcttttctttggccgactgtaaataactttaaatgtgggaaattttaaaaagtttgcactttaaaaactttgtcgtttttcactttaaccccatttggcca

SEQ ID NO: 32977 - DNA, 352 bp, Glycine max
  Clone ID: LIB3051-105-Q1-K1-F12
agctatgcactactgaggccatctaggtgacccacattgacagaatcctgattaactggggtcactatataacggcctatgagactgctctgatcagtggctcctgctcatgataagttgtcgctttgaactgtgggatatgaatgctgttgctattcatgattcggtataaaacacttacctactaattactatctgatatgactcccatggtattaatgtaactaatatccatccattggttagattgagcattctacttcattctatggactctgttatagtctctcacgttatccgtatggagattgagagccatcatctagttcacgatatgagcggtcttatcctc

SEQ ID NO: 32978 - DNA, 439 bp, Glycine max
  Clone ID: LIB3051-105-Q1-K1-F2
cccacgcgtccgggcagcttctagaactatctcttttccagtaccaaccttagcccaactgggtggcacaacacaacacttgttttcttaaaagttcaaactgtctgagttttgcagaatccacggagctaagaatgaaattgtagaagaagaagcactttcacagaaaacatgaaagggttaggtcctcatgcccctttggtttcaaggggaaagcttcctccttcgttggcagtagtggatgccttgccaacatgctcttcttatttctctagaaccaccgtcctatacccattaagatgcagacaaaaatcaaggttgagcttggcccgtggcacaattcgagcccaagcatccaatattagtggtgttgaacctggagattatggaagcaatactgagaaagatggtcaaaatgtatttgaagggaatgttatcg

SEQ ID NO: 32979 - DNA, 277 bp, Glycine max
  Clone ID: LIB3051-105-Q1-K1-F3
acgcccacgcgtccgaataattcgtgctcttttcggatggtcctaagctcaatttgctttgaaagctagcagttgttgatgcatgtttcgttctttctttttattgtactttatcatgctgtgtacctttattattattttgtgttctagaagaaaactaataagcgatagtattgcgcattaaaaaagcaaaatgatcaatgctacttttcttcgtgatcgtgttacatgtcttgtggttgtaaattgtaatgtggctaatgccttttaaaggcta

SEQ ID NO: 32980 - DNA, 55 bp, Glycine max
  Clone ID: LIB3051-105-Q1-K1-F5
aaaaaaaaaaaaataataaaaaaaataagtaaaaaaataaaaaaaaataaaaaac

SEQ ID NO: 32981 - DNA, 375 bp, Glycine max
  Clone ID: LIB3051-105-Q1-K1-F6
cggacgcgtccgcccacgcgtccgatttgccagaatggtaggcatggattctttccttcaggatttgcacggtctgatgcagatggtgaggacccatttggtgattcaaggcgaattgcctgcaaaaggtgtggtggctttcatgtctggatacacaccaagaaacaaaagtctcgggcaagatggtgccaggttttttcttaatctttgttgttctcaatgaagcctaggtagcatgcttaactgacagttggctaagtatattaataattgcaaaatatttgccagtattctgtctctcccagcatgaagagagtatttttcatacatatcatggcactagtgttttatggtgggtttttttgttttaaagga

SEQ ID NO: 32982 - DNA, 429 bp, Glycine max
  Clone ID: LIB3051-105-Q1-K1-G11
agaaaacgtgccaagaggggaattaaatattaatcttgtttttcttcagttttcttccatgtatcatgcttggagatgttcatgcacgtacgttaagattttacaagaattttttttgccttgctcttttccgaaccatcatccatgtcacgagtgcttgacaagaagcaggaaggtggaagggaagaatatgcaggattgtgtaagagttgtcaaatctgtttcaatactgttatagtcgttttctttgaataagagacacatcaaaggatgcttcactatcattatggcaattgaaacattatttttaaagttttacatataatcacaaggttgaagcctaacaaggagcagcagaagtcagcagcaagcttctttggctatagaacatagctactatccccagtatatagtgaagagattcattaa

SEQ ID NO: 32983 - DNA, 422 bp, Glycine max
  Clone ID: LIB3051-105-Q1-K1-G5
gtttttgggtgcttttggattgggttgttgaaaggaaggtcaaaatacgggtagtttaagggtattgcaagggagtgtggccataggaagtgaattggtggtggaaaattctggatcatcaatagtgggaacttgtgactttggtctaaggattttgggctttttactaacccttgtggatgtgagttattggacagataacaaactgcttgttccatcagcttgtggattctatgccaactttgtacgttcctgttgcagctaagtggcattacttgtctgcctttgtctattatgtgggggcaaatgcaatagcatgtgcatatgcaatactgtctctcttgctcactcttgcaaataggcgtaaaggcaaaggaacgatggagacattgatcactgtgctggacacagtaatggtagct

SEQ ID NO: 32984 - DNA, 209 bp, Glycine max
  Clone ID: LIB3051-105-Q1-K1-G6
caagcgtgtacttactgagagagcaattgaagaaccagatcccaggaggtctgctgagatgaaaagaatgataaatgctctttgatgacttaaaattgacctgttcttgtgatgacattactgggtatgttgttagaataggacatctacatttgcggatgtaaggttcgctaacttgaagcattgtccaaaaatattgtttatgaagg

SEQ ID NO: 32985 - DNA, 230 bp, Glycine max
  Clone ID: LIB3051-105-Q1-K1-G7
aaaaaaaaaaaaaaaaaaataaaaaaaaaaaaaaaaaaaaaaaataaaaaaaaaaaataaaagttaattaccaaccggtcttaattttccaaattaacttaaccttacttgctacataatcacaaatactataaagtttctataaattaatttcaatgaactgcgttttacaatctctttactgtgaaaaccttgtttttaaataccttaataaactttcattgcatccc

SEQ ID NO: 32986 - DNA, 432 bp, Glycine max
  Clone ID: LIB3051-105-Q1-K1-G8
acgtaacagaaagacacatccaaaggaagtctctggttatttcaattaattaagagaaaggactcgaatagttggttattcatggaagacaccgcacaacaaatcaagcgtccttttggtgttcctgaaggaccagaattcactgttgggttggatgtacctttgagcgagttgaaggtggagcttcttaaagaaggtgtgtccatcattatgctgactggtttaggtggatcaggaaaaaccactttggctacaaagctttgttgggatgaacaagtcataggtaaattcaaggaaaatattttatttgtcaccttctcaaaaaagcctaagttgaagattattgtagaaagactatttgaacattgtggatatcaagtgcctgaagttcaaagcgatgaagatgcagtcaatcaattgggacttttgctg

SEQ ID NO: 32987 - DNA, 440 bp, Glycine max
  unsure (1)..(440): unsure at all n locations
  Clone ID: LIB3051-105-Q1-K1-G9
ggatacttatctatgggaagatgatgatgacaggtaattttaaattttcctgttttgtgatgcattcatctctaaacaacagctttcattttctctgttaggaatctggccaccaatgtaataagcaacatcaaagattttatgctaattatatataaacatataaatatacacaacatttgtagctttgaatgtaattagcatctatagctgtatttttagcttttacttaggtagctctgatcagatttctctactttctttaatacatgtgtgtgaaacctagaaaattaaaaaatgacaaattatatgcattgcacttgtattctgttaagggcaaaccagcaaaggaaagatttgtacctgtttttttctccttggataaaatttttcttctttcattntaaaattgccatcatcattcaatgatatagttagat

SEQ ID NO: 32988 - DNA, 424 bp, Glycine max
  unsure (1)..(424): unsure at all n locations
  Clone ID: LIB3051-105-Q1-K1-H10
cccacgcgtccgattatctgtcaatttacattcgaaagggttaggctattgaattttaaagaattacagataaaataatcgatagctttgattttaaaaattaatcataatcatcggttaggttgcaacataatacttaattcgcttaattttttaactgcgcctcagagtattcataacatattctattaaattaataagctggtgatgtaattaatattaatatgtagttttggcaatcttattggcagaagatgctaggtggagttcatcaatattctggtaggtataatatcttcatgaatctaatataacgttattcatagtgaaaataaatcgagccaaggaatttattaataattgtcttcatttcatattagctgcctgctgcgacttccttatgcataattntactggttataga

SEQ ID NO: 32989 - DNA, 413 bp, Glycine max
  Clone ID: LIB3051-105-Q1-K1-H11
attattcttcatcttatgtttgtttttatttttcaaattctaaataaaattttcaatctggtaagatctgtacccaagcctaaaaaaacttcgtaccccattgcccggaggctcttcgctatgcgaaggtatgggggagggatgttgtaagcagccttacccttacatatgctaagaggctgattccagattcgaacccatgaccaacaagtcaccaaggcacaactttaccgcaagatgaagaaaaaaattatgaaaaagctcactagtctccactatgtattcttgttgatacagaggcggcacatttttgcttgcctttcaagtgtctcccatctatccacatgaagcaccattggttaaatgctagacataggtaggatggtcttgagtatctgatttactctaattcg

SEQ ID NO: 32990 - DNA, 349 bp, Glycine max
  Clone ID: LIB3051-105-Q1-K1-H2
gcacaacaagtactgcgctttgccttgggcagcttagacttacaactatcgcacaaaaaggaccgtttgctgccaaaggacgctcactttcaccaattcattattcccattttctccataaccacaagaagaataagcttgtaacaataatgggaatgaatggtgctcccgtcactctctccgacgacgacgtcgttctcaagtccccaaacgaccgtcgtttgtaccgactcatccacctccccaacggtcttcgcgccctgctcgttcacgatcccgagatttaccctgatgggccttcgaatcatgtttcatacgaggactaagttgaagaacatgatgatgatga

SEQ ID NO: 32991 - DNA, 307 bp, Glycine max
  Clone ID: LIB3051-105-Q1-K1-H3
acggaaaattataaaccgtaatcttgccaacattgaataatacattgaattttaccacctcagggggtggagcaccctttggtgtcttaatgatcttaattatctgattaaccaaaatcatttacacaagctagactattattctgataaaacacttgaaagctactagtgagatgctcgatactcatgtgcccaccatgtgacttatctaaaccttatagcctaatataccttgcaaaatttacattcgtcatatcttcaacaattctaatcactgaaccactagaggtattgtaccacttttagg

SEQ ID NO: 32992 - DNA, 164 bp, Glycine max
  Clone ID: LIB3051-105-Q1-K1-H6
atctgattttgttaagttatgtagaaaattttcatatagatactattctttatatggcatgaattgtatcagctaccactctcctctatctattttttgttgttgttgttgttgtgtaatatctaagtgaattcatgtgaagaaatgaaagttttaattccgac

SEQ ID NO: 32993 - DNA, 426 bp, Glycine max
  Clone ID: LIB3051-105-Q1-K1-H9
gctacactatagtttatcgataactatatgatcctatcatgtgtttatcaaatctatgctgatagctatgaagaactacggatgagttccaatcgtacgaaactgtctctctaactgattcgtattctgcaatcgtaattatgcgcctgatgattgcgactgcagcactgacttctgcatcagaaggaacaacatttcgtctgatgattcctgcaagatataagacatcgacggattgaagtacaaaaggtcttaaatggtattggggatacctgcaacgatgtagtggaagatttacccgtccgataaggaatctctagggtctatagacgtatatcctagttctacacatagcgtatcatatgctgcatctgcagctatcactaagagatagtgaaatcagatgatccttatgctaagaaacgc

SEQ ID NO: 32994 - DNA, 422 bp, Glycine max
  Clone ID: LIB3051-106-Q1-K1-A10
gcgggagaaggttattgattcatgtggaattagacaaaatcattccggtcaaagtgcatggggtagtttcctgccggggatgaggtttatgcagcatcgtctgactactacagcaccctactttacaattaagaggatggctgctgatggaacctggatgcctgctgttgtcaatgatgccacagtattgagctttgccatatgtctagtcctgaatgtttaccttactggtggctcaatcctctctatatctcacctggctcctattctactgctgcttaatcaagaatcggattttgtgactggttttggagacaaacatatatattatcctgttactgacgtcatctatgactacttcgatataactgccctctacataacatggctagatgtttggcaaggaaatagtggatggggtc

SEQ ID NO: 32995 - DNA, 373 bp, Glycine max
  Clone ID: LIB3051-106-Q1-K1-A11
atttacaccaaggaggcctaccctgttagtgtaaatgattcagttctgaaggatgagaaaaaggggtaggcctccttggtgtccctccatggcggatcaactctgaacccattggccacttcatacaaacttaggtccaacagtttcggtggtggtggcgagagagtggactccgtataacttgaatcatcatgactgcctctatacatcccttctgccttggctccattgttgagctttcatgcatagacataacaaagtcaaatgctaaaggctcacccagcaagcgagacatatattgaaaaggctttgatggaggaagaagttgatccatcaataaaggagaaacacatggaaaattgagtgacgaatg

SEQ ID NO: 32996 - DNA, 442 bp, Glycine max
  unsure (1)..(442): unsure at all n locations
  Clone ID: LIB3051-106-Q1-K1-A12
aacaaactgaaattatagctcctctctcgcgttctcgttctctcacaccacaccacatcggagtcttcacccgcacaaacaacaaaaccctattttttctatttccacactctctctgtctgtctctctccatcaacgccattccgtttttctccaaaatcacactcccctatttgcccctaaactcttcgtcttccgttttctctctgctccgcattcgcacaattgcctataccgctgctacgttgaggcggttattgaaacggttgcgtctcggtatcctcgtcaatcacttgccaataccgcttctagggttagtttcttcccctctctttctttcgctttctaattccccgaaaatttcccctctatctgtaaccctagcttcgggaggattttttcccctcacgtgcgtgtctttntagggcttcttttctctcga

SEQ ID NO: 32997 - DNA, 463 bp, Glycine max
  Clone ID: LIB3051-106-Q1-K1-A7
cccacgcgtccgaagaaagaagcatcataaagcaatacacttttttcccctcattctaccttccttcaccttcttcttcgttgcggtggtgccctagattttctctatccctttgatcgttcctgaattaccagcccccggccctcgctctagggtttcccatggattccgaggacgatatgcacgacgccaacgatgtggagtccctcgacgacgatttctacagtggcgagaccgaggaccctcccatggattactacagtgactacgacgacaacgccgacgattacttcgacgacgccgacgattctgaccggattgagtctcgccgccccgagcaaaactttaccatattgagggaactggatatccggcaaaggcaggaagacgacatagctagagtagcggcagttctttccattacctcggtttctgcgagcatcctacttcgtcactacaactg

SEQ ID NO: 32998 - DNA, 462 bp, Glycine max
  Clone ID: LIB3051-106-Q1-K1-A8
ctcgcaccttgcaaacattgaatcatcatcttacagtacacaatatctccataagtgctaccgtactataccttattctgtcgttacaatgaataccctaaataatctctatccctattgatcattcctgaattaccagccccctgtcctctctctatccattcccatgtattccgaagacaatctgcactactccaacgatgtagagtccctccatcacgatttctacagtagcgacaccgacgaccctcccattgattactacattgactacgacgacaactccgacgattacttctacgacgccgacgattctgaccggattgagtctagccgacccgagcaaaactttaccatattgacggaactcgatatccggcaaatgcaggaagactacatagctagagtagcggcagttctttccatacctcaagtttctgcgagcatcctacttcgtcacta

SEQ ID NO: 32999 - DNA, 434 bp, Glycine max
  Clone ID: LIB3051-106-Q1-K1-B11
cccacgcgtccgatgaaaatgaagatgtctcgtactcttggatacgcgagtatcattgggatgttcggggtgatgatgcagatgatcccgcaacattcttagttgcatttgatgagtcagaagcacgctacttgcctcttccaactaaacttgttttaagaaaaaagagggcaaaagagggaagatcaggtgatgaggttgagcaatgtccagtacctgcaagagtgactgtaaggcgaaggtctagtgttgctgcaattgagcggaaggattctggggtatatacaagttcaaagggaaattcctcgaaaagaggtggcttagaaatggatgatggtctcgaagaccaacatagaggtgcaccacaccaggacaactatcagtctagtggagcagaagattacatgtctgattgattatttcatgcaaatgct

SEQ ID NO: 33000 - DNA, 434 bp, Glycine max
  Clone ID: LIB3051-106-Q1-K1-B12
gccaagtttaccttcagcgaatgctgatgcacagacatttgctactccctttagaacagatgtatctgccctgggttcatatacaccatctgcgactgttggaagtggtcgaagaaggttttcggaaatgcctcaatctgcttcaactcacaaggaacaacctcaaacaacttacagggaccgtgcagctgagaggaggagtttgtatggctcatcatcttcagttggaaatgatttagctgaccttgaaattggggattcaagtaagactacttaatttatattgggtttcattgcttgagttaaagtacttttggaaaaccgctgaggtgaaagaaagtgtttgcttgacagtaattaattactaatttcaaaacacttgtctgtatctgatgaaaaagctctttgagtagaggaaagcttagtttttggta

SEQ ID NO: 33001 - DNA, 452 bp, Glycine max
  Clone ID: LIB3051-106-Q1-K1-B4
gggttcgggtcgtaacaatatgacaagctttcgggtcggattcaaacccgggaaatctgggtgcgacgcgtgatgctaaacaaagagcgattcagatttgagacataactcttcagatccggcataacaggaagcttagcttagctcaataattgaagttgataacttcaaaaaaataaaaataaaaacagaaattgaagtgagagagagatagagataaagttaaagagaatgagatatggcggaggtagaaagaggcgaatgctgttgcaaccgtttttggttttgtgtgcgacggtgacaggtttgggattggttattgtggcgctgagggccgtggatcctccgatcacggttgattttccgaaaaaaatcgagcttcgagattcgaacaggctcgagtttgaacggcggcggagagaagccgtgcgcggcggtggaggagatgggga

SEQ ID NO: 33002 - DNA, 438 bp, Glycine max
  Clone ID: LIB3051-106-Q1-K1-B6
gcgaattcagacgcacaataatcgaattccctctttctccgcaattcatcctctcttccgacgaatcaaaaacaaatccctaactaaccgattcgatccacttcaatggcgggacccaacatggatcagttcgaagcgtttttcaggagagcagatttggacggagatggcagaatcagtggagccgaagccgtctcattctttcagggatccaatttgcccaaacaagtcctcgctcaggtgtgggcgtatgctgatcaggccaaaacgggtttccttgggcgcgcggagttttttaatgctctaaggttagtcactgtggctcagagtaagcgagatttaacgcctgatattgtgaaggcagctttgtatggtcctgctgctgctaaaatccctgccccacagattaatcttgctgctgtgcctcaaccacgcccg

SEQ ID NO: 33003 - DNA, 276 bp, Glycine max
  Clone ID: LIB3051-106-Q1-K1-C1
aaaaaataaattaatataaaaaaaaaaattaaaaaaaaacatatataaaaaaaaactaacgacctgcaaaaacaaaactgtatacctataattaactatatctttcaatcaaatctataaacaaaaaaaaaaattcaaaccactataataataaaaactctgtgctccacttataccactaacccttattcacatcatgattacttctacagaataattatatcactccaaatttttaattctattcccagatttttcccaactgcaatctctaaa

SEQ ID NO: 33004 - DNA, 431 bp, Glycine max
  Clone ID: LIB3051-106-Q1-K1-C10
gttgaattctgaagttcttaataatttgtacgcatacttcagaacctgaatttgcttctgggttctcttaccaggtttgtgagctggatttaatttttaattttcataaggtaattcattttttctcatactgtattctctccaattattagtaaatttgaatatgaaatccccacactaatagtgcacacagttcatctatagtctatgtggtaaatgagactaggatcccgtgcagtctactttgtgataaatcatattgtctgttttttaatataaatttcaaagtcctatataagtaagaatgctaatgatttaagggaagaaaaataatctaccatttactcttcagagttaatcttaatctgtggctaaaaatgagcttgatcttggcaggcatattttatattggatgaaaatttgttggctgg

SEQ ID NO: 33005 - DNA, 435 bp, Glycine max
  unsure (1)..(435): unsure at all n locations
  Clone ID: LIB3051-106-Q1-K1-C11
cccacgcgtccgctttttttgcagctgcgatactggctatgcgacacccaagacgcctagggttatcaggttgcttatcggctttgattgtgatgaccattctctctgttcttgttggctgggctgctccaaatctgatctctcgtacatggactcatcacattacaacatttttattcttgggatttggactttggtccttaaaagacgctatatttgaagaaggggatgcggaagaattggctgaagttgaagctaaattggataaagattggaaggctagcaatggagctacaaaaaatagcaataaggatgatgatgccacaaaaaagcataaacggtcatttttatctcagtttttttctcctatctttttacaggcattttctatcaccttttttggtgaatggngtgacaagagccagttggctacca

SEQ ID NO: 33006 - DNA, 331 bp, Glycine max
  unsure (1)..(331): unsure at all n locations
  Clone ID: LIB3051-106-Q1-K1-C2
gaggaggaggaggaggaggaggaggagaaggaggaacccaccaacccacctcgtaattcgttccgttttccttgatccttccttcctcctcgtaatttctcttcacttccctctctctaaaacctctgcaatttgtcaatgatcttgagtcctcgctttcccattcgtttttgaattattcctcttttccgtactctcctctttggtcttttaccttaacacgcgcacacacacacacacacgaaaaaaaaaaatacataacataattgtntgtagtagtttgtaccttgtgaattactattagatcacgcacttcgcaccanaaaccaca

SEQ ID NO: 33007 - DNA, 303 bp, Glycine max
  unsure (1)..(303): unsure at all n locations
  Clone ID: LIB3051-106-Q1-K1-C3
atttaggcttagttcatggacaggatctagctgaccacatacgtgctgattctgaaatgcttcatcaagacaatgtagattctccagattcagattatcaaatggcttctgaaaagtcacatctatcagataatgaatctgtggaggaatctgcactgcccaatgcagaatcaagatttgataatgcanatatgtctacgccagtccaagatgcagatgaaatgtttgattctgcagcttctgatgcccaccatatttcttctaatggttcatctatgcctgcaccacgggattttcagcttt

SEQ ID NO: 33008 - DNA, 440 bp, Glycine max
  Clone ID: LIB3051-106-Q1-K1-D10
gtttccgtctatctacctccctctctgccctcacttcttcccctttcccccacgccacggtggcgagtaagaggacttgctacttcaattcaagggttccacaaacaacaacaagccttttttttttttttcatgtttaaacaatgaaaagcaagcttagacgatattattcactctgactccgagctatacaccaccgagaccgagcagtgtttcactctcatttcacttttctcctccctattcccaaactcgcgcttaatcacgtcgagggcaaacaaacctcgaatttgaataaaaaaaatgaggtttgacgagaacgctatgaattggattggcgctaccgttggtgacctcgtgggcacagtgggtgcaatattatcactaaaagataccaaagtggcgattccgtttaccttcgctgcaaacaatagtagctt

SEQ ID NO: 33009 - DNA, 431 bp, Glycine max
  Clone ID: LIB3051-106-Q1-K1-D12
aaagagagagaaagtgtgagagaaagagagaaagagagaaagagagaaagtgtgagagagagagagaaagtggagtcttttgactgagcctagcctgcaaaagccgtctaaggttgttgtctggttgatgataatgtttctttttaatgtctgaatacgcgttgaactttcaaacgtaccaccaccacactatttttttagttagccttctgatccattttcacccttaaccttaatcccaattcaaaggtccaattagtctttttccttttatttttttaaatgatggtttataaattgcattagtctccgagtgtttttattgcttgaatttcctctcctttatggagcaatgattcctttatgacagtttgcgatttttgtcggagggttatgaaatgtgggtttgattcaagtttgcttctttggaa

SEQ ID NO: 33010 - DNA, 445 bp, Glycine max
  Clone ID: LIB3051-106-Q1-K1-D2
ctggtctcagcaccaagccaagcaacatggcaagcatcaagctggaccaggaaccttgaggattacagaagcctcagctgaaagaccttgtgtgtgttgaaggtgagaaggtgtccacttgtgatatgatgatggtgtagaaaggagtggtggtgttgacaggaaaagaggaagacaaaaacttgtacattttgatttgattcaatttcatgtaatattctcacaccaaattctttgccggccattaattgcatgcagggttggcatttgtaaatgatttgatgcaataagattgttctaacaggaacttatgatgttctttgattcttttttcttgatttcttttgcttttatgaatgttggagaaaatgaaaaagaaccttagacctgacgacccaaaagaaaaggtgaaaatgttcttggtattatctttcatttcatttat

SEQ ID NO: 33011 - DNA, 276 bp, Glycine max
  Clone ID: LIB3051-106-Q1-K1-D4
attgaattcatccttctgtgttctgtttctttccttttcttcttgggcgaaaccctaagctccgcccttcacccttcgtacaccgcgtcgcatctacttccatcttctctcagatccaatctccgattcttgcttcactatcacaagcaaacatgtctgcggctttggatatgaccctcgaagatataattaagaacaacaagaaatcttccctcgccaacaccaggggccgaggccgagcctcgggacccggacccgctcgccgtctgcccaacc

SEQ ID NO: 33012 - DNA, 238 bp, Glycine max
  Clone ID: LIB3051-106-Q1-K1-D5
taccaaacaaacaaacataaataacttactttaaacttaaataaatataataatgggctggttcattactaagcgatattatctcactatctttatcctataaatacctatattttacttatactatcttattatttctactcttaaattatcccttcatcctcttatattatcatccaatcatttaactaattctttatatatctcacctttcatttcatccaattatttcataaaa

SEQ ID NO: 33013 - DNA, 357 bp, Glycine max
  Clone ID: LIB3051-106-Q1-K1-D8
tccactcgtactttcacctttacttgctttttactttcatcgattcccacatgggtcggatacaaagtccggggaacataacaacattgtgcatcatttcatagaacactattttggattcaaacatgacttcattgcaatttgtgctgctgtggatgctatcatagccgctgcctttgcattaatctttggtgctgcaatcaagacctttaacttccaaaagagatatatggatacatagaactctttctccaacgtcaaagattctttatattttctccctctttctcttattattctagattctgtgttccctctaagcttataatatattgatctatgctttaaacatttgtg

SEQ ID NO: 33014 - DNA, 416 bp, Glycine max
  Clone ID: LIB3051-106-Q1-K1-E2
tgggcatgtcctgtggcttggaccttgtatggattgattgcatctcagtttggagatataactgaaagaaatgccggtgaagaataacaagatggtgaaaggaattcatagaaagactattttgggttcaaacatgacttcgttggaatttgtgctgttgtggttgctggcatcgccgttgcctttgcattaatctttggtgctgcaatccaaaacctttaacttccaaaagagatagatggatagattgaactctttctccaacgtcaaagattctttatattttctccctttttctttttttcttcttgtttttgttttccctttaagcttataatatttgtatctatcatttaatcatttgtgcaaaaccagcccgtttgaaggctgtcctttataaatgtatgatgaatttc

SEQ ID NO: 33015 - DNA, 460 bp, Glycine max
  unsure (1)..(460): unsure at all n locations
  Clone ID: LIB3051-106-Q1-K1-E3
gatggacaaagccaatatgcattggaagacatgcttttggagaccaatatcgggcaactgatacagttataaaaggcccaggaaagctaaaattggtttttgcacccagtggaaatgaaggcattaaagagctagaggtctataactttactggtgctggaggcatagctttgtccatgtataatactgatgagtccattcgagcttttgctgaggcttcaatgaactatgcttaccagaagaaatggcctctctatcttagcactaaaaataccattttaaagaaatatgatggaagattcaaggacattttccaggaagtttttgacacccaatggaatcacaagttcaaagctgcagggatatggtatgaacaccgtcttatagatgatatggttgcttatgctctcaaaagtgatggangttatgtatgggcctgcangaatttatgatgtgatgt

SEQ ID NO: 33016 - DNA, 302 bp, Glycine max
  Clone ID: LIB3051-106-Q1-K1-E4
acgcatgcacatactcaatctccatcggaagatacgctcgttgagaccaatatagcgcaaatgattgcgttctaaaaggcccatgcaagctcaaattggctcttgcacgacactgaaaatcaacgcattgaagagctagacgtctatgactttactggcgctggatgcatagctttgtccatgcataatactgatgagttcatactagcttttgctgaatcatcgatgaactctgcttaccagagaaaacgacctatatatcttagcactaaaaataccattttaaagaactattattgaag

SEQ ID NO: 33017 - DNA, 169 bp, Glycine max
  Clone ID: LIB3051-106-Q1-K1-E8
cccacgcgtccgaaaaaaataaaatcaaataaaaaaaaaaaaaacataaaaaaaggtaaaggtaaaaaaaaaaagaaaactaaaaaaaaaagctaattcctatctttattccatcctttctttctcttccttacttcgctattgattttttttttattgctcttcattc

SEQ ID NO: 33018 - DNA, 359 bp, Glycine max
  unsure (1)..(359): unsure at all n locations
  Clone ID: LIB3051-106-Q1-K1-F3
cccacgcgtccgctttttccttgaagcaaagtgaacttgtggtgtatctttccaattgaagtgaaagagtaaggatgtcaagtgggacaacatactggtgttacacatgcaggcagccaatctggcttgaagggagggaagccatttgcccctactgtgacggaggctttgtgcaagaacttaatgagctgcgaggagttgcgcgccaacacggcttctcatcgcggatggaagatgctcatcaaatgcctgacattatggatgctgtaagagctgttatggagcaaagaggttctgaaccgagaattcgggttagagatgctgntgataactntatgaggcagagaatggctggaaga

SEQ ID NO: 33019 - DNA, 269 bp, Glycine max
  Clone ID: LIB3051-106-Q1-K1-G11
atgagatttctaccgagcgttctcctttattgcttgcttatacggacatctttatcctgcgggcgttatgtttgggaatcgcttgcggctgaaacaacgatcaaatatactgatcccaaatcaccggacatattcggctcttaagacgcctagctctctcgttatattgcgcttgacagatacgatcacgctgaccacagactcgatatccacctctacttccactgatgaccacttgtcacgtcgaatgagccttatactaccactcc

SEQ ID NO: 33020 - DNA, 459 bp, Glycine max
  unsure (1)..(459): unsure at all n locations
  Clone ID: LIB3051-106-Q1-K1-G2
cttcacatgaaccccctcactctttcagctgacaataccaagaaaacttacaggtttggactgaactcagaagcagatgagcacaacgtcttacagaaagatctgggaagtgtgaggtatcaaggttatgactttacctcagatgccatgtggtctcaaatgtctcacattccatcaaatactgtttcggaatcaagaatcggttctactatgctgggcaactgcttccagcatcaaacaatgcgagatgctgagctgttgaatctggaaacggcgaggaccaaagaccttgtctttagtggccagctaagttctgcagggggtatgaaacaggaattatcagtctccccagtctctcttcagtgactgggactggaagaaggatttaagttcctctgcccttgagtataggcccaacaaggattntaactgcaacccagatgtcaatgttgattaaaa

SEQ ID NO: 33021 - DNA, 298 bp, Glycine max
  Clone ID: LIB3051-106-Q1-K1-G3
aaaaaaaaaaaccaaaatactataaacaaaatgacaataccaagaaaactaacaaaataagggctgggctcaaaaacaaatgaagcacaaaagaattacaaaaagatctagagaagagacaagaatcaaggctatgactttacctaatatgccatgtggtctcaaatgtctcacattccatcaaatactgtttcggaatcaagaataggttctactatactgcgcaactgcttccagcatgaaacaatgcgagatgctcaactgctaaatctctaaacggagaggaccatttaccttg

SEQ ID NO: 33022 - DNA, 466 bp, Glycine max
  unsure (1)..(466): unsure at all n locations
  Clone ID: LIB3051-106-Q1-K1-G4
gaggacctaggttaaggttgcggtgctggtggtcgagttcacaggaagaggaagagatggaatttgaaagaaggaaagttgaattgaaagggtattaatgngcgaaggccgagaaggctttcaaagcaccgttgaaagaacttaaagttcatgcaaagggcagctctgagggaggagagaaccaagaaagaagaagaagttaagcctgatgtcagtgttggcacatccactgcggttactagaaagtgtgtggttataatggaaggtgatccccatcctggagcagctaaaggtcgaatgtcatttcaaagtttcaatcctttagttgataaattaaatgaggaagaagcaagactacatcagccagcagctgaaactaccatgtctagaaatcaaaatgcanatgccaatatcagagaaaataggtctccagtagaaggtccagaatgtggcaacatggacaaaa

SEQ ID NO: 33023 - DNA, 367 bp, Glycine max
  Clone ID: LIB3051-106-Q1-K1-G5
gaaagactgagagagtaaagaaaaccctaaaaccctagaaattcagaattcaggtgaagaagaaggaggaaccaatggacttcgacgagtacgaatacctggagaagacagtggaggaagacatagattcctccaagaagaagaaggacgtcaccgacaagagcgagaggagttaccgaaagccccgcgacgtcgacgacgatctcgacgccgatgacagaaagagcaagaggtctagggtcgacgacgagaacggcggttccaagagagatcgcgacagagacagagagagagaccgtgaccgcgaacgttcctctggtcgtcacaggagcgagagggagagagacggagagaggaaggacaggga

SEQ ID NO: 33024 - DNA, 146 bp, Glycine max
  Clone ID: LIB3051-106-Q1-K1-G6
aaaaaacaaaaaaaaaaaaaaaataaaaataaaaaaaaaaaataaaaaaaaaagggaaagggaaaaaaaaaaacgagttcactacaataaaaaccaatcattaaaaatatactctattataatacatatatttatctcaaattcaa

SEQ ID NO: 33025 - DNA, 439 bp, Glycine max
  Clone ID: LIB3051-106-Q1-K1-H12
ggttaagttgaagtctccctccataagatgtatttaaagaatatacttattgcatatacttaggaagtgtggttctgttggtagataacaaaattaaaattgcattaatttgaagttttaataaagaaaagttggaaaatcttactggttaggtaattggatttttagttatctagacaagctaactattgataacacgatcaacaattgtacttactagtgaaatggacctaacctgccctcattttattttgaaatgaatattggcaaaagtatctccgaacttaatgatttggatagaagtatggtacttgatagaacattatggcggaagttgatccatgtagccgaccccacctagtgggataaggcgttgttgttgttgttgttgtatttgcaaaagtatctctggaatggtaacctattgtgttatgaaaat

SEQ ID NO: 33026 - DNA, 439 bp, Glycine max
  Clone ID: LIB3051-106-Q1-K1-H2
aacaacttttctttctttctaatattattatgccacaggtggatttggaaacgttggtttccgcgtgcgccggcggttgctccgaccagaaaatcgcctacgagcctcacgtcgacgacggagaccaccatccggactctccgccggcgtcgatctggctctctggcgacgccgagtacgactggtgggaccgcaacgccgtctaccagcggaacgaatcgacgaaaggaaactcgattgtgtcctcaacgaacctgaacgctaactcgaacaacaattctcagcgattctcgaagaatttgaagtccaaagcagcgataatcggcttgccgaagccgcagaaggcatccttcgctgacgccagcagccgccgaaaccaccggcctccgggaaacgccaggctgttcccgaagcggagcgcgtcagtcggcggaaaatt

SEQ ID NO: 33027 - DNA, 453 bp, Glycine max
  Clone ID: LIB3051-106-Q1-K1-H4
cccacgcgtccgctcaaccctttcttcatccttttatctcgtctctgccaaaacgatgccgtttgctctggagaataacggaggagttacgatcggacggtcctccttcgcttactgcgtcgcgatctgcgatcgtgattttccggaggatgattccgactccagctacgactcctccatcggaaggaacagcatctcgtcggaagattcctccgaccgggaagacgccgtcgaagttgaagttcagagttccttcaaaggccctttggataccatcaatgatctagaggaagatttacccgtcaagaaaggcatatctaagttctatagcggcaaatccaagtccttcacaagcttagcagatgctgcagctgcaagttctatggaagagatagtgaagccagaggatccttatgctaagaaacgcatgaacttaatagctcgtaactcctc

SEQ ID NO: 33028 - DNA, 458 bp, Glycine max
  unsure (1)..(458): unsure at all n locations
  Clone ID: LIB3051-106-Q1-K1-H6
gttaaaaatttagtcttgaagacagaggtaatgccagattgaaatttgaaacaggagacactggtttgtgtcatatacttagattagattagatatctttggattaaatggaagatgatacaacaatgcctcaagatgatcaaagaaattctgatggtactagaggcattgggggtcttaatagatcttctaagaagtcaaagcagacaaaagtgccacaaaggggacttggtgtggcacagcttgaaaagataagactagaagaacaacaaaagagagatgtaggtgcaattttaccatctcctagtactttatcatcaaccaaaccaccctatctgcctctcccagttaagaattttcatgactccaacctatccccttccacaccacttttaccttgtgagccatcatctgaatntaggtcccctttgtcactgcaacagcaacaacaacaacaa

SEQ ID NO: 33029 - DNA, 437 bp, Glycine max
  Clone ID: LIB3051-106-Q1-K1-H9
gtcgactgcatcacggttgagtctcttctcactcaccttgtttgttttcaattttcttacatgtatcattcttggagatgttcatacacttaccttaatattttacaaaaatttttttttcctttctcttttccgaaccatcatccatgtcacaaattcttcacaagaatcatcaatgtttaaaggaataatatgcacgattgtttataagattccaaatctgtttcaatactcttataatcatgctcttttaatatcagacacatttaaagatgcttcactatcattataacaatttaaacattatttttaaaattttacatataatcacaaagtttatgcctaacaatgaacatcatatgtcatcaacaaactttttttgctatagaacatatcttctatccccaatatatatttaaaagattcattaacttttc

SEQ ID NO: 33030 - DNA, 131 bp, Glycine max
  Clone ID: LIB3051-107-Q1-K1-A1
cgccgatcttcaatctctgagccaatcgctttccgatccatcttaccatgatttgctccgggggattcaatctgcgtgtgggagggaccttgccgaaaccttggaaaaggctgcactctgttcgtgcgctc

SEQ ID NO: 33031 - DNA, 443 bp, Glycine max
  Clone ID: LIB3051-107-Q1-K1-A10
cccacgcgtccggtgacattggtgtcaatcttccaacattattgaatgccttagtagcagaactaccagctgatgcaagcacaatgttgcgtattggaatgactaatccaccatatatacttgaacacttgaaggagattgctgagattttgcgccatccatgtgtttactcttttctgcatgtaccggttcaatctggaagtgataccattttgagtgcaatgaatcgagaatatactgtgagcgagttcaggactgttgtagatactctaactgagcttgtgccagagatgcagattgccactgatataatatgtggatttcctggtgaaactgatgaagattttttgcaaactatcaaccttattaaagagtacaagttacctcaagttcatatttcacaattttatcctcgaccagggacacctgctgcaaggatgaaa

SEQ ID NO: 33032 - DNA, 465 bp, Glycine max
  unsure (1)..(465): unsure at all n locations
  Clone ID: LIB3051-107-Q1-K1-A2
cgtctcggcanagagatgatattnaccatagcccgtnntttcttcttggtgcccttcctctgggtgcatctgcttctcatcgtgctgtgtgtggcaacctgagcgcatgccannaagatgagacacnaagcagatagaaccataagacacatgccagatgtncctggggaagaggggtggaagtggggggncatgaatggaagctggggacactggtggagaactgggggcatnggcggaagaggacancggtggaggacattggcggaggaggacactggtggaggacatgtgcggaggatgcagatgctgcggtcgaaagggctgcaaatgttgctgaagtaaaaatcacaaatatatgaactgaacacactcatatacttgagtgtactccatgtaataactagtatatatgtaagaaataagaaataaaagcatggactctatccgtgcttgggctggcat

SEQ ID NO: 33033 - DNA, 436 bp, Glycine max
  Clone ID: LIB3051-107-Q1-K1-B11
tcgagcataccgtgtttcattttctctcacacacaaacctccttcgttttcatttacttctcaggaggtataactactatttttcgctttttttttaaaaaaaaaattgattaaatcttttgccatgggaacccagattttgcgacctcaggactgcttggtagaacgaatcagggctcctccggctgacttttcccggcggaggagttccggtaattactgtaattattattactacaacaacaacaacaaccatgtcgccacttccaggtcgtgccggaagcctgttagccgacccgaccaaaggaaacgggctgctcccggttctgcccagccggtggtggcggaagccgcggcggcggtgttgaagagaccgagccgtgatgattcaagggtggccaagagccaaaagtttgagatgactacgattctacgt

SEQ ID NO: 33034 - DNA, 424 bp, Glycine max
  Clone ID: LIB3051-107-Q1-K1-B4
ataaaagatagtcttcccatacttccgctaattctcctctgacaccgcctccttccgtcgtcgtgttttgtcgcaccatgggcggaggcctcagccgcgaagtctgccagtggtgtcacaccatggaggcgcggagtgcgcgatatgtccagaggaattgcaagatggcgaaagatgaagatgattccatactgcaagcacgtgttccacccgcttctcttacccaaaccaaactttcaaccttgtggttcgaatcgcgatttgtgctatcgtggagttattcactgaaggaacaaatttgtgttgttcttctttgactcaattcgattgcgctattttgctctaattgttgctatggcttttctttggattttttatttgagagggctttgcttcgcctgattcggatttatttgatttgcat

SEQ ID NO: 33035 - DNA, 348 bp, Glycine max
  Clone ID: LIB3051-107-Q1-K1-B6
gacagtcattatctggatcgcaactagctctttactgcaggtggtgctcatcccacattggtcaacacctttggcttcatgctgaaacattcattcttctctgatctgatcatcatttgtttgctcgacatatcacttgtcagttaacaactaactccgatcactatcacattttctatctggtatgctacacaatttaccttcttaggtctagttatactctacaaaactgatagtggcttgtctacgtgtaaatgtttcaatacagtgatcagtgaatcatgaatcgtacttaatgattagtatatataagcatacgatctttggataaattggtaaactcgtgtt

SEQ ID NO: 33036 - DNA, 339 bp, Glycine max
  Clone ID: LIB3051-107-Q1-K1-B7
ggttttcggttatttcattcacaacttcaacccttcctttcaatttttttcctacctgacggaccaatcaacacctcggtggttcttgcagtggcgttacacatggatcggattccgatctacacgccgatggtgctaatcggaggattcgaagcctggtgccacggatctacctactgtacagaggtgtggcgatcgtgttcgtgttgctcttaaggtcgctttcggaagatcgtttgctcaacgatcggagattgcagcacagatcgagtgaagaaagcgtggctgtgttcttcgcattccgatgtcggttcatgttgtggtattgaaattatgatg

SEQ ID NO: 33037 - DNA, 386 bp, Glycine max
  Clone ID: LIB3051-107-Q1-K1-C2
tctctgtcctcctcgatcccaattccactagggattcaattccgatgcgattccgagcttggtagatccacgacaacgtttcgtttcccagattcttttgtaaaaaaaataatcttcctttgcccaacaggtaagttggaaaaaaatggaccatgacaagactgggtgccaagctcctcctgaaggtcctatattgtgcatcaacaactgtggattttttggaagtgcatctaccatgaatatgtgttctaaatgccacaaagacatgttgctgaaacaggagcatgccaagcttgcagcatcatccattgtgaatattatgaatgggtcttcaagcagcactgaaaaggaacctgttgttgccgctgctgctgctaatgttgata

SEQ ID NO: 33038 - DNA, 416 bp, Glycine max
  Clone ID: LIB3051-107-Q1-K1-C7
cccacgcgtccgcccacgcgtccggtatgctgcttatgtacagtggccaagtgctggaggagtgtatgcacattcatatgaccaatttagacatgctgatttccaggctccatttggtcaacgcccattgagtttcgattattcgcagaattactagatgacgtttgggaagcagatatacatttggctgcataagttattttagctattaaggatttcacagttagatataattttactgtactgttatagatccttgcttgctattctgggattgaaggcctgatggtgagagcaagtattatgcgcttatggtatatcctggcgacatttttatacaggactgtactgaaagtacttggatttcaactatatgaagagttatatgtgattaccttgtctaatgtctaataaaa

SEQ ID NO: 33039 - DNA, 314 bp, Glycine max
  Clone ID: LIB3051-107-Q1-K1-C9
ttcatatgcatcgtatatattccacaagggtttattccattataagagatacatcaaaattggaagatcaatctttaaaatctgagagacaaatatatgacggaacttctattaaaccagaagcaaagtctgaatatgcctctcctgtaaaaaaggcttaatcataaacattaatttcaatgggaaagacaaattgtgaaaaatcatttactgcacccaaaacccttgaagtttctcctgataatgaatttgagaagcgaataatgcccgaagtaatactatcaaatgatattgatgtcacattctctgatatt

SEQ ID NO: 33040 - DNA, 426 bp, Glycine max
  unsure (1)..(426): unsure at all n locations
  Clone ID: LIB3051-107-Q1-K1-D11
cccacgcgtccgccctaatttaaccctgctggatttatcgtacacttttttggtcaattggcggcctatttttgagtcttgttcacagctaaaggtattaaagttacaggcatgcaaatatctcactgactcatcacttgagcctctttacaaaggtgctttaccagtacttcaggagttggacttgtcttatggaacactgtgtcagtcggccatagaggagcttctttcttgctgcacacaccttacacgtgtgagcttgaatggctgtgccaatatgcatgatttaaactgcggatgcagtcgtgcgcatactgctgaattgcctggtgtaaatgtcctacccattgcaagttcccctgaaaatgtcctcgagttaagtgagcaacccatccggttactgcagaacctanactgtgtgggatg

SEQ ID NO: 33041 - DNA, 407 bp, Glycine max
  Clone ID: LIB3051-107-Q1-K1-D5
cgacggcgaaacttgttttccttgcgcgaagctttggcattcccccaatcgcttcatccgggtctacttaaccctaaccccacactctcacatactacatatataaaaccgccgtcacgatgatgctcagaattcgtagccgcgatggcctggagcgagtgagcgtcgaaaaccccctcgccacaacagtctcggacctaaaacggattatccaaacccaattgggaatcccggttcacaaccaaaccctctccaccaaccagaacctcctcttggccaaatccctcgaagatctcctccgattcaccgacatgtccaacctcgatgcgtctctctcgtctcttaacctcggccacggctccatcgtcttcttggcctacgagggcgagcggcgcgtggcgggcccc

SEQ ID NO: 33042 - DNA, 420 bp, Glycine max
  Clone ID: LIB3051-107-Q1-K1-D6
ataagttccaaatcacgaattcgaagttgcagagttgtcctgaaattgatcagtggatggtgtttcctttcgaggaatgatatcaaggagttggttatggaattgggagaaggggagttttttagaataccttcaagccttttcaattgtgggaagttgacccggttggacctatcgcggtgcgagttcgatccgccacatagttttaaggggtttgtgtgcttaaggagcctcaacctccatcaagttttgatatcccctgatgcaattgagagcctcatttctagatgtcctctcttggagagtttgtcactttcttactttgataatttggctcttactatctgtgccccgaatcttaagtacttgtatcttgaaggtgaattcaaggatatatgtcttgaagataccccacttttg

SEQ ID NO: 33043 - DNA, 422 bp, Glycine max
  Clone ID: LIB3051-107-Q1-K1-D7
atatcttctcatcctaaaccttattcagtcacaactggtggaaatctctggcggagtgaagacaccaccaagaatatttactttgcaagttcttggatatcaaaagcttcacgacacaaaagggaaactcaaatagaacataatgttttgaggttccaacaaccaagtttggatcatcattacaaatgcatcagaggagggtctacatatcaagaatgcaatagaaaatttgctgtgaaggcaatctctaaacaacctcttggttttgaagctcatgcttccaatcctaagaacattttggactctgtcaaaaatgtattgtctgctttctactggttttcctatccatacacaatgattggcataacattatgcgcattatcttcatctcttctcgccgtggtaaaaattatcagatatat

SEQ ID NO: 33044 - DNA, 424 bp, Glycine max
  unsure (1)..(424): unsure at all n locations
  Clone ID: LIB3051-107-Q1-K1-E1
gtagtattgcagtttattctatcatatccttgttcaaataattttcttttcaattacaatgccgcaatcccagaaacttatgttcatgaccatcctcaaggtcccaataacatttacttgaagacaattttgagttgaccttacagcctagttccacctatacaaacacccttgatccttcattcttttttgagttgaccttacctagctccaatactggcaacaataatactcttgggcatctgaactatctccattctttttttcctcctttctttgcagtggatttgcgaggttttaaagaaattaaatgcgtttttatgtgctaaagagctaggtaattatagaattcatctcacacatacttctttttactaccttttatcttttagattttattcttgaattatcgntgtttaacgga

SEQ ID NO: 33045 - DNA, 412 bp, Glycine max
  Clone ID: LIB3051-107-Q1-K1-E4
cccacgcgtccgtgcagctcgagacatcagagagtcagataagggaagcagagttgaagggagcagagtttcaaactcagttagctcttgcaaaaaaatcaaatcaagaagcatgtgaagaactgaaagcaacaaaagcaaagaaggagatagttgagtctacactcaaacatactgaaactgaggttgaagaactgatttcaaaaattcgttctttggaggaagagattcataaggagcgagctttgtccactgagaattcaatcaaatgcggaaatttggaggttgagctttcaaaaatgaagcacaaagttcaagttcagcaagacactgagataaaacatacggaaagtgttaatctcgatttgaagttaaaacaggatctagcactggctgctagtagaattgctga

SEQ ID NO: 33046 - DNA, 312 bp, Glycine max
  Clone ID: LIB3051-107-Q1-K1-E6
gttgtaactaaggaacaagagattgcttcttcttcccttttgttttcaaatttcaattgggcatcgggttctctgaaatggagagagatttcatgggtctcaactcaaaagaacctcttgctgtggtgaaggaagagatgcacgtttatggcttcgaagactctggcttcacaaagggtcggattgcacagtggccattctcgaacaaagtatctgcccttccacatttgatgtctttcaaggcttctcaagatgattagacttagaagatagtgtctgatcccttaacatctgcagggtttatggctatct

SEQ ID NO: 33047 - DNA, 411 bp, Glycine max
  Clone ID: LIB3051-107-Q1-K1-E7
aacaacttcactgaggctgttgctgatgctttcaaagcaattgaattgaattcttctgtagcaaaatcatatttgcggaaaggtactgcatgcatgaagcttgacgaatatgagactgctaaggctgctctagaggtgggtgcatcattgtctccagacaactcaaggtttgctactttgatcaaagaatgtgataagctcattgcagaacaatcttataccatacctattatagaggaaaagaccacaacacaagatgctactacaaaagatgtttactatcaaaatgatcttctataaaaaccaacagttgcaatgactaaacctaaatacaagcatgaattctaccataaaccttgatcaattggttgtgaccatatttgcaaagaaaatcccaaaggaaaacattac

SEQ ID NO: 33048 - DNA, 349 bp, Glycine max
  Clone ID: LIB3051-107-Q1-K1-F10
tcttcctaaaaaaaaaaaaaaaaaaaaaaaaaaaaaattataaaaaaaaaaaaaaaaaaaaaaaaaaagaaaaaaaaaaaaaaaaaaaaaaaaaaaaaaaacaaacaaaaaaaaaaaaaaaaaaaacaccaccctaactaaaaaactcctacattacaaaccactccatccaatcttaaaaccctattatctttcccccaaaataaaatccactaatccccttttatacaaccctcaaaatcaaaaaaaccctgcctttccccaacttaaaccctttgaaacaactccccttttcccaactttttcatatcacaaaaaacccccttccaaacacccttcccaacatttt

SEQ ID NO: 33049 - DNA, 413 bp, Glycine max
  Clone ID: LIB3051-107-Q1-K1-F11
tcgtcaccgtcgtatccaaggatatcatctgcatgatatgaccatgaacacgggagtatgaatgtggatccatctagtataaatgaagacctgattaaaatattgggggcttatggacaggtcaaagagatcaggcaaacttctgacaagatgcatcacatggctacagaattctatgatgttagagcggccgaagcagcacttatatcattatacaggagtgacatagatggcatacgcataaagcttgaaccatgtaagcctataggagctcgtagaaagttgatgctgcaattaaatcatgagcttgaccaacatgaatctcagagtttgcgataccaagtgggttctgctgtagctaactatgctgcaggtgactggttacagttgatcaggcctgttgagcataattc

SEQ ID NO: 33050 - DNA, 446 bp, Glycine max
  unsure (1)..(446): unsure at all n locations
  Clone ID: LIB3051-107-Q1-K1-F12
tcgtcaaattgaagacaccagtgaaagttggggaagtgcttaaggatcaccctggtcttgttgggcgagattctgaggcggttaaacactatggcgtgagagcaaagccattggaagcacacaaggatttgcagcctaagaggctgtattttcttgtggagcttccgaaggagacgacgccgcgaagggttcgttccggcatcaacatgagtgccaaggatcgcctagagagccttgtgctcactagaaggtctgcctctgatctttcaatcatgaaacaaagcagcaacaccgataataaggagaatagtaataatggtggtggtgtgaggttgaaaatgaggcttccaaaagcagaagtggagaaattgattcaaggttgcaaggatgaggctgangctgctgagaggatcatgaacctttataaggccaatggaagcagagaa

SEQ ID NO: 33051 - DNA, 114 bp, Glycine max
  Clone ID: LIB3051-107-Q1-K1-F8
ctttaagaaaatagctgttaaatcaaatgtatactgttttaaagaaaattagccaaagggtctaagttgtgatgctgaaaggttaaaagggcacatttattgtgtcttcttacc

SEQ ID NO: 33052 - DNA, 426 bp, Glycine max
  Clone ID: LIB3051-107-Q1-K1-G1
gtggagggaatgcaccttcagttgctaatcgaacatcttactcacagaagaacgtgcatgggcaaaactttacaattccagtgcaaccagtgaacttttcttttaagccatctgcaacatcggatattgttggcaatggtggatgttttggtgacaaacaacagcagcaacaggctttaaagggaggagtagagaatataccatctcaagcatttgcaatatcatttgctgcatttaatgggaccagtgttccttcaaaccttaacttctcatccatggcacagaatcctgtgatacttcaaagcctgcctgatatggcatggcaaggatatcaagctgcaagcattcctcagactactcagcaaaagacttgttcaataactgaagcaaagagtggaagaaattcttcacaccaagatgatgaaa

SEQ ID NO: 33053 - DNA, 420 bp, Glycine max
  Clone ID: LIB3051-107-Q1-K1-G5
cccacgcgtccgctcttcattctctctctctctctctctctaacactttccaccgcctgcgggactaaattagcttcttcttaagcttattattaaaataacacttccacaaactcacgctgcctccacggtccctccaggggtcaaaatcgatcgtcatcgagtttggaccaacgttcattcaatctgcaactctcggtagtactacagtgctatatagaagaaacgaaacgaaactctatggtgcttaatagtgttgtttgagtttttaggttgagaaagaaagaaagacacggcgacaaagacacggccagatgcctggagaagtggtggaagtggaggacatggtggaagtgggggacatggtggaagcggtggacacggtggaggctggggacatggtggaggctggggacatgg

SEQ ID NO: 33054 - DNA, 419 bp, Glycine max
  Clone ID: LIB3051-107-Q1-K1-H10
gcttcgcctcaatgttatgggggaaaaagtgattaaaggaaggttctgttttctttgggtaaagggtagttgcggaatcgaaatgacggcggcggaggcagcgatgttaaagaggaagggggtttaactttttctagagaagtcagctacagcaatggaaaatttgattgcttaaagaacatttttttcctgttgagatggtttttggcacaaaagataatactgaaatagaaacgtttgtgtggatcgatgcttacctgttatctatctgcacgttgttgaaactttaaagttctgtttgtctcttcttagtattgctattctgaagagctgaacttgccttgttgtcttggtttagttattagtaactaggaaattggaacttactatctcagtagctcgtgatgctgacatgtttt

SEQ ID NO: 33055 - DNA, 283 bp, Glycine max
  unsure (1)..(283): unsure at all n locations
  Clone ID: LIB3051-107-Q1-K1-H2
acccgtccgcccacgcgtccgctcactgaaacttcctcaaccgaaccccacgccacgctacgattcgtcgttgcgctttcttcctttatattttatttaatttcgtagtcttcttttgcatgcgccaccaacaccatcatcaattgattcaattcaattacgataagaatgggtaatatctgcgctcgtttgaagttgaagccggcgccgcaaccctctacgaagaagcgttcctcttcccgccgagagaggaggctcgacgacgacgccgncattcgtgagc

SEQ ID NO: 33056 - DNA, 393 bp, Glycine max
  Clone ID: LIB3051-107-Q1-K1-H4
gacgacgcgtccgcttcttctaactttctgcataacacaccatcaacaccccttaagccggctagcgccattacccaaaacttttctttttctttcttcaacactcttattggatcatacattcaatttattctcttcaaaaattccccttaaaaaaatttaaaattaaaaaaaagtgctcttttttgaattttgagccttttcaccgacagatttgatctttccgtgccaagttgtatcttttcgattttgggacgtgggtcgatctgatttgctcgaataattgcgggttcgattttgatctgaaaaaggaaaagagaaaaaaagattgggttatttctgattcaagattttgtccttttttgaaatggtctatttccatagctcaatctc

SEQ ID NO: 33057 - DNA, 433 bp, Glycine max
  Clone ID: LIB3051-107-Q1-K1-H8
agtgaatgtgcttatctggaataacatcaccatcaacaaccccttcaagccggcctagaggccattacccaaaactgtgtcttttttctttccttcaacactctctattggatcatcacatattcaatttcattctcttcaaaaattccccttcaaaaaaatttaaaattaaaaaaaagtgctctttttgtgaattttgagccatttgccaccgacagatttcgatcttctccgtgccaaagttgtaatcttttcgaattttggcgacgtgggtcgaactgattttgctcgaataattgccggttcgattttgatctgaaaaaggaaaagagaaaaaaagattgggttatttctgattcaagattttgtccttttttgaaatggtctatttccatagctcaatctctctctgcaagttcgttgatcaatcatc

SEQ ID NO: 33058 - DNA, 313 bp, Glycine max
  unsure (1)..(313): unsure at all n locations
  Clone ID: LIB3051-107-Q1-K1-H9
gagattgttgatgatttggcggcggacgaagtggctatggtggcggcggtgtggctatggcggcgtcgtggtggcggcggtgtggctatggcctaatgaacataacgaggctggggttgatgctaaccctcacaactaagaaggcaactttctaaagcttatatatgggtttaagttatcgcaatacataaaacttcatgagaaggttagttgtaatagaagtggaaaactttgtaaaggaataatacctntcatgaatttccttaaaaaaaaacaagtggtgtcatccaagatcgtggcagtggacttgggc

SEQ ID NO: 33059 - DNA, 457 bp, Glycine max
  unsure (1)..(457): unsure at all n locations
  Clone ID: LIB3051-108-Q1-K1-A11
gctacacaaacccgccatcaatcctaaattcctctagtgcggttggccatgttatcaatgtcggtggtgttaattcttacgtcactggttcccctctctccatcctcgccataattctagtctctgatatttttggatttaaaccaccacttttaaggaacattgcagacaaggttgcagctactgggtattatgtcgtggttcctgacttcttcaatggggaaccctatgatcctgagaatgtgaaaaggccgaaagatgtttggttaaaagatcataatccggaaaaaggtattgaagttgcaaaacctgttattgaagccttaaaaagtaaaggtgtctctgctattggagctgctggtttttggtggggtgctaagaccgttaccaacctcgggaaatccaaacatatccaagtttctgtgctattacatncatcatatatcatagtggatga

SEQ ID NO: 33060 - DNA, 437 bp, Glycine max
  Clone ID: LIB3051-108-Q1-K1-A8
agattaactacttcacaaaattccacaactcctcaacaaattaaagtactttgttggacagagtttatttaagagtaaaatctagaagatagaggttgtaaagagaagtggtgtgagatgatatccataattagctagttgtttagcgcatgaaaaaagtgtctaatttttttaaaatctcacaaaccctgcaaggaataaaatagaagagaaagatcggagatagatcatatgccctaatagtatatgaagaaatctttcccgtagaacaaatataaattatatacatgtatacatacaacattgtcaaaactcctgatgtgtgatattcttttcttgtgaaaaagttcacttcatagagattgttcaaagttgaaacgtgtacgagtggaagaatgacttccaaaacaccatggtcgaactactctttataaaag

SEQ ID NO: 33061 - DNA, 379 bp, Glycine max
  Clone ID: LIB3051-108-Q1-K1-B1
aatttctcttcttatcttatcaataacgacaatactctttcgttttttcttctccgtgggctactgttaccactcaagtttctgctttatgatttttcttcttctttaacgatagcgctgttgcgttgtgaatttgtcatatcctgattccatcttaggccactaaactatccaataattttgttgctcctttcactttagtttggtttcttaaccaagttattgattaaggactcgactataatgcagaccctcgtgcgtaattggccggtggatattaataatatcatgttgttgttgcgataaaagatattcctcactctcagcgaaacccttgaagcgtgttgcaaatatttcaattaaattatcttctcaaaga

SEQ ID NO: 33062 - DNA, 257 bp, Glycine max
  Clone ID: LIB3051-108-Q1-K1-C4
cggactcgcgacgcagcacatgacgtgagcgaaagactggcacgaccatgaacatgcggattcggacccgataacacgtctgtagggctcggcgtgtgacagctacaccctctcttaattacttacaccggatctactaactatgaattggctaaaaaaggaattgatgctccaactgtaacaggcgcgtctgaatacatgaactcttagacgcttgtaatctggcagctgaactactatatcgcacagagaagcac

SEQ ID NO: 33063 - DNA, 453 bp, Glycine max
  Clone ID: LIB3051-108-Q1-K1-C5
tgagaatttgccaaagaagaagaagaagatacatggtggaaggttagagagtgagagagggtgaagcatggaagtgggtatgcttccaatctcagcttcaaagagaggaaaactcttggctgctggttacaccactctcgatgccattgctcgtgcctcccccacccaccttgttcgaggttttcctttccagtttcaattctcaacccttctttcattttccaattgggtatgcatatatgttaaaaagttcctctttttttcacctacccattatctcactttgacagatattgatgtttctgagagtgaagccacggaaattctgaatcttgcaagcaaacctagtgctttggagagaccgaatgggtctcacactgctgttgttggtggtggtcagactgcctgggatatgctcaatgatgaaaagttttcttcttacattaccacatc

SEQ ID NO: 33064 - DNA, 450 bp, Glycine max
  Clone ID: LIB3051-108-Q1-K1-C7
caaacatccatcatcattattattttactccgaacgagttgacaccgattccactcactgaaccatgagccgattcaggcgttttgagctcatagaacaaccacctttcttccactcctgctactctttcccttccttcgtcctccaagactcactctctctcgacctcgacctcttgccacttcccagccacttcgacgctttcgcagatctggtgcacgcgccgtcgttcgcttaccggcgcgtggagaggcatctcgagaatgagttgcgtttgcagagcctctctgaccgtgtggcggagctggagtcgcggttcgaccgtgtgctcggcggagatcggaagtacacgtggacagcggagatcaagggagcggagaagaacgggttcgataggaagtacaagtgggttgcggaggtcgctgaggaggaaggatagaagaagaagaa

SEQ ID NO: 33065 - DNA, 455 bp, Glycine max
  Clone ID: LIB3051-108-Q1-K1-D1
gctcgacatcctcgaagacctcgcccctgtctctgacgcgcaacgccgcgcgtactgcgcgggcgccgtggagtgcaccgtcaagtacctcgctgcgtgccccgacgttatcgatggtgagtacgccggcgctgtacggcggatctggcgcggacgcgtggcggcgctgcaggcgcgccggagcgggctggtctctggggagttggtgcggtggcgcgatgagatagagaacgcgcttggggaggattccagggcggctcgcgagaggctggcggggttgaatagtcggagggacgcgatgaatgaggtgagggtgtatttgaaggaagcgtgggaaatgatggggccttcgtttttggaaacggttgcggcaacggagaagaagaacgatgaaggtgcctgtgataatggtagtggtaatggtaatgatgatgatcatgatgatggtgcatgca

SEQ ID NO: 33066 - DNA, 455 bp, Glycine max
  unsure (1)..(455): unsure at all n locations
  Clone ID: LIB3051-108-Q1-K1-D2
gtgttactccaaacaagcctgctgcggcggcgtctcaggatgatccgtttttgatattggaaactgcttcaagctcggcatcttcagaatcattcctgaacgcgctggagcagattagtaggtcgaataattctaaggggacaaaaggagggtccccatcattgaagtctccacccaagccaatgagtaaagttaataggccgagtgtatcaacaatagatgagcttgaggactttgccatgggtggggcacagactaatgctagtagtagaaaggccaatgttaacgccgctgagactaaacaaaacttggcggctaggatgaacaatggtaaaagagttccagctgcgagagtgaatcangcaaatggcgtggatgatcttgaatcctttttcagcatgggctctcgatcaagcagcgtgccaaagtcaaggactccaactatggatcatatg

SEQ ID NO: 33067 - DNA, 345 bp, Glycine max
  Clone ID: LIB3051-108-Q1-K1-D3
tatgttattaatggtctggagtgtcagatagctggcagttcatctaaggtctcatatgtgctggataccgaagactttctgattccgataagaaggagaagaagatccttgcgtgtgaagagttcaagtgctcacgaacaggcacagtcttgaaacatttgttcaagcagagtacaacgattccgcagtttgttctccattacatgaaagtgtccattttgagctgggcatgtaacatgagtcaaatgtggacattggtagatgcgcctgacgaagacaccatcctatacagtaagatgaggatcaatgcatggcgatctgagatcattcatgcacattttcttt

SEQ ID NO: 33068 - DNA, 342 bp, Glycine max
  Clone ID: LIB3051-108-Q1-K1-D4
gagctctgacaaggttttgggttaaatatgctgatgatgacatgttttctgcacttattgcattctttcttaccactgatgacgaatactcgacataatacatagataagaactgcaccatctcatgctagtcaagaatcatatccttgatgatccaaagactttccctgatacaaaccttactcacatcaaagacattatgcttcaattgccctattctacattctactcattcccctatatctctctgacacaaagactcaccaagattacctatacattcgaatgcattcttagaaacttgaaatgctggctattgcatttactaaagataacctccca

SEQ ID NO: 33069 - DNA, 404 bp, Glycine max
  Clone ID: LIB3051-108-Q1-K1-D5
accgctcgtacgctcaaccacacagtttgcgcatcagtgggtacggctatcaatctgtggggatggctctgaatccaattatccgctcacgatcttattcaccatcctagtaaccgacctgacatagtctatcctcaacagttgcttgagacattgcgtgcatattgtagcaataagtgtgttaaatgctatggatcgcctacactgagtagctactgcagatgcactcatctaagtgcgtagaccgcactatggaacccactgacgtaaccagcatcatgatatgaagttcacaccgctatcgcccatgatatggacatcagcgctggctaatcactgggaatcctaatttatagccatctaacattccgtgctgtggctcttcatgctggctcattcaatat

SEQ ID NO: 33070 - DNA, 454 bp, Glycine max
  Clone ID: LIB3051-108-Q1-K1-D6
acttattccagcatggagaactatatagaagctacagtcaaggttcagatattgctgctgtagaggtagcaacacctattctaattcctagaagtgacggtcataggcatcggaagggaagccatggtgatgttatcttcttgacaaatcgtggagagattacatcatactcccctggcttgcatggtcatgatgctatttggcagtggcaacaatcaactggtgttacatggtcaaatctaccttccccatcaggagtgatggaaggtggtggtctggtgattcccacactaaagcctctttccttgcggttgcatgataatcaggaaatgatccttgcagccggggaacaagaagcggtgataatatcacctggaggtagtttattggccacaattgaactacctggtccaccaacacacgtcttaattgctgaggacttttcaaatgatgg

SEQ ID NO: 33071 - DNA, 463 bp, Glycine max
  unsure (1)..(463): unsure at all n locations
  Clone ID: LIB3051-108-Q1-K1-D8
ggagatccaccagctgtcacagaaaaagggctggtcgcaatatcaatgggctgccctaagcttcactcgttgctgtacttctgccaccagatgacaaatgctgcactcataacagtggctaacaactgcccaaattctattcgattcacgttgtgtatccttgatgcaacaaaacctgaccctgatacaatgcagccactggacgaaggatttggctcaattgtgcagtcttgcaagcgactcatgcgcctatctctctcggggaaattgactgaccaagttttcctttacataggaatgtatgctgagaaacttgaaatgctgtctattgcatttgctggggatggtgacaagggaatgctgtatgtgttgaatggatgcaacaagcttangaagcttgagataatagactgcccttttggcgacatggcacttctgacggacgtaaggaagtatgaaacaa

SEQ ID NO: 33072 - DNA, 391 bp, Glycine max
  Clone ID: LIB3051-108-Q1-K1-E12
ctaggatcatggatcgtgagtactgcttttttttctctgtttcagatcatgcctactaaggcaaattgtacatagcggtctggaaactactccaaaaaagacaggcatacactggacatactcattagttatgattctcccaaatcctagactcctgaacgctaaaagcttatcaatgagatactcgagtacattcttttctcagcactaactgttactcaaactagtgccacagacgcttctgatcagaaccccataaatgaataagcccagacacatgtcaattcaccaaatcccgagtccttacctgcattacagagtattacaaatcaagaaattaatggaattataaaaaaacaccaaatcatccttgaaaaccatgcttgaattg

SEQ ID NO: 33073 - DNA, 440 bp, Glycine max
  Clone ID: LIB3051-108-Q1-K1-E4
cccacgcgtccggtggtcgaagaagcgaatgaggttcaagacgccgtttccgctcacatgtctaaggcttccagcgacgaggaacctctccggcaacgtgtccgtcgcgtcgattcccgaatccattcgctccgttcctctctcgattctcttgtctccaccaaacaaatccctccctccttagccgataagttggatgaagatttgcagagagcgagatgcatcatcgttgacggtgactcctcttcgcttctccctggccatgcacaaggaagctttctgaggatgtttctgggtcctatcaatgttcgtgcctccaggaaggacgttcagctcaaggtcaaagaggaatacaacagttacagggatagaactgccctgctattcctgctttttccggcaacactgcttattctaagatcttgggtttggtctggatg

SEQ ID NO: 33074 - DNA, 337 bp, Glycine max
  Clone ID: LIB3051-108-Q1-K1-E5
cacagtataaaaataatgtggaagcactgctgccagagattggggatatgtgttatgtcgagcaaaagtctgctgaaaagctgatggcatataggtatagctctgaggcaagaatggatagctaatcatgttagcaaaatgccccagaggaagagtacgttgcgagtagggatgcacagcaaggtgctgacgaagtgcaggtccactggcaacacctctgacacggttatggtggaactaccaatgctactatattttgtacgcatcgattgttttccccggaatggtaagtatacaatatctcgtctagctgttataactgacaataacaacctat

SEQ ID NO: 33075 - DNA, 452 bp, Glycine max
  Clone ID: LIB3051-108-Q1-K1-E6
ggatcctaacatagttgacactgcaatgacttcaagaaaacgtaaaagagaagagtgtaggaagataatcttattagctgctgcttgtgttgttcatatgatcattggtgtagtgacatgatatcataataattattttgttaaggaaccaacccgtaattgggaactagaacgtcacaacttccttaatcgtctttatagaggaacaaataaagattgcattgaacaattgaggcttagtaaaaatgcattttttaacctttgtagaattttacaagaaaagggtggattagtaagaacaagaaatgttccaacaactgaagcagtagcaatgtttttacatatccttgctcacaacctaaagtatagggtagtgcaatttagttattgtagatctaaagaaaccataagtaggaaattcaatgatgtcttgagagcggtaatgaaagtga

SEQ ID NO: 33076 - DNA, 456 bp, Glycine max
  Clone ID: LIB3051-108-Q1-K1-E8
aacaacttcactgaggctgttgctgatgctaacaaagcaattgaattgaattcttgtcgaccaaaagcatatttgcggaaaggtactgcgtgcatgaagcttgaggaatatgagactgctaaggctgctctagaggtgggtgcatcattgtctccagacaactcaaggtttgctactttgatcaaagaatgtgataagctcattgcagaagaatcttataccatacctattatagaggaaaagaccacaacacaggatgctactccaaaagatgttcagcaacaagatgatcttctagagaagccaacagttgcagtgactaaacctaaatacaggcatgaattctaccagaaacctgatcagttggttgtgaccatatttgcaaagaaaatcccaaaggaaagcattactgttgacttcggtgaacaaatactaagtgttagtattaatgtccct

SEQ ID NO: 33077 - DNA, 196 bp, Glycine max
  Clone ID: LIB3051-108-Q1-K1-F10
ggacagttgtagaactttaatttggagaattctatgcagaacctggggaacatgtccctgtgtgtctgcaccatgggaaaacagtgttgtacattattatgtatggctgaactagatgctgatccatattttgggtaactgtatcactttctgtacaatagtgtggatggttgcctaatagattatttacatagct

SEQ ID NO: 33078 - DNA, 431 bp, Glycine max
  Clone ID: LIB3051-108-Q1-K1-F11
ttcttttgtccccgaagagaaagagagatcttatctcctcttcctacaatgcccattccggtaactctctctttcaatctcacccctgccccttttcatcgattcctattcttattatttattattcttgcttaggtaccccaaaaagtttttattcgctcgattggaattagggttttctttctctctctggctattcccgtttcccgctatctactcagcttctttcttttacttgattttctagggtttccttggatcgtaccctctcgggggattgcatgaaatgagcatgagctctgatctcttcataccttccaattttgtgcttcagcatttctacttggagatttctcattcttaagtttcacatgagcatggaagaggattgtctatattaattcattctttactcagtcgcaggctggctc

SEQ ID NO: 33079 - DNA, 432 bp, Glycine max
  Clone ID: LIB3051-108-Q1-K1-F5
acgaaatcgaagccaaaaaagaacaatcataatgagcatcggaacaacactttcaacggcaccaaaccactctttccactccaacacccgaaccagtttactcaacaccgtttccccaatccaattcctctccttccgcaatcacactcacaatctcagagtcctctgtttctcttcgaatccgtcgcatcagctgccgccggttgtggtggttggctccgcgaacgccgacatctacgtggagatcgaccgtctcccacgcgaaggcgagactctcgcggcgaagtccggccagaccctcgccggcggcaagggcgccaaccaagccacgtgctccgtcatgctctcctacccgacctacttcgtcgggcaggtcggcgacgacgcctacggcacccttctctccgacgcgctccgtggcgggggtgttcg

SEQ ID NO: 33080 - DNA, 457 bp, Glycine max
  Clone ID: LIB3051-108-Q1-K1-F6
gaaaccagcaattgcaggattgataaacttgcatgatctcaatacgagctctctacatgcttactatgatcctatgaagttatgattttaggtgcaatccagattgggacaatgtagcaagattgaaagtttggcaaaagcttgaagaagaaaatgaagaattcttcaaggcttattatgcaaggttggttttgaagcagcaaataatgcaattcaacaaattgctggatcagcaagtgcaattaatgcagttacactcaagtgctgttgcatcactacctatgtctaacgggtcacatatccctgcagtgacatcactacctaactctaatgggtcacatatccctgcaagattaatggccctgctagcgtgctttctgctcaaagcgcaaacatgggtctgatacatggaatgaatggtggcggaatgatcaaatctgagcctggatattctggt

SEQ ID NO: 33081 - DNA, 445 bp, Glycine max
  Clone ID: LIB3051-108-Q1-K1-F9
aacattctcatcttctccgtgggcgctctctgtatcacctccgtcggcactgttcttcgagctaaagttgttcaaccacagtggcagattgacagtgcaaccctcctattgtttcttcttttgagtaagttaagttcactggttcaagtattttggcacccccaaggtgggacctaaaggattaggatttccatggagactgacagacctgacggccggactcctaatcaactgagacccctggcctactcgtgttccatcctgcatcgcgcccatggttcggccagttgggctcaaggagaaaccaaagtgcttgctgctgtttatggacccaaagccggaaccaagaagaatgaaaaccccgaaaaagcatccattgaagttatttggaaaccgaagactggacaaattggttggagcaatactatactgtactcaactcaac

SEQ ID NO: 33082 - DNA, 438 bp, Glycine max
  Clone ID: LIB3051-108-Q1-K1-G10
gctacactacttacattccccagcacagttgtatttatcaatcaaacaatagcgctcacggagaaatgaacaagataaaaagagaaggcactattgtaaaataaaatacattgagatgggaaaaaaattactgatcatgaatatcacacaaccttgacagtaaaatttctgtaaacatacatctaatagtgcaagttatgaataaaatttataaactaaactcaatttcagaaactaatgtgagaaaaataagcagattgccatctgagtcaacaagtctgtaagtactttcttcaagcgtcacctttaaatttggtttcatacatctgaggtagcatatagatagcagatatcattctgcctgcaaaccaccttgtgtgcattgcacgttgagcagcacttgctgcttccactgtttcaaactgcaaatacacaaaa

SEQ ID NO: 33083 - DNA, 149 bp, Glycine max
  Clone ID: LIB3051-108-Q1-K1-G11
cacacactgaataaaagatgttattcacttttttcccagttgaaagcaatcaccatccaagaataatttctatgactgcggatatttctcatatcaccttgcatacccatgcatccgacgcaacatctaatccatatactcatctaaat

SEQ ID NO: 33084 - DNA, 446 bp, Glycine max
  Clone ID: LIB3051-108-Q1-K1-G12
ctcggtctgttttttttctcttctttttctctctctctctcacaaatttctttcccttgggttcactcaaaagagcagaaagggacaagatcccggaaaggcgtgccagcgtcagagagactcatcagttctcactcgtacggcgcttttgctttgctttgcttcatttctttcatcgtcatcataaagttcgttcctttctcagttttcacccatacccagatgagtaacagcaccatctcggatctgtgtccctcctttgagtgaaaaaggttcaatctttggtctctggggctgttggggttccgtcattgaagaagaagaagaagaagggtattattgttattataatcatgtacccgaggctcatacacccccacgatgggattgtgacgcatgatgagttgcatggtggtgctgcttccaacctctctcacgctcacaag

SEQ ID NO: 33085 - DNA, 300 bp, Glycine max
  Clone ID: LIB3051-108-Q1-K1-G4
ggatgatagacatattccaatcacaaaggacatatacatggcattgctccgttctttttgtcaacttggtgatgctgtaggagctgaacgaatttcaaacactatgcaatttgcaggaatccagcaaggtatggatatggagacattcaccctgcttattgaggcaagtgcacttgctgttccttgtaaccctgatcaggcaagaagccattttgactacatgataaaattggggcataagcctgatgataggtgcaccgctagcatgatttcagcttatgagaagaaaactacttggac

SEQ ID NO: 33086 - DNA, 344 bp, Glycine max
  unsure (1)..(344): unsure at all n locations
  Clone ID: LIB3051-108-Q1-K1-G7
cccacgcgtccggatttttggacgaacttggattgattcatcaggagagatgatcctggcgaatctgactacaggggacaaagtggtgctgtattttcaaccatgcggctggtttggagctggtagatatgaagtggatggatttgtgtataattctgctgacgagcctaagatactgatgactggaaaatggaacgaggcaatgaattatcaactntgtgactcagagggagaaccacttncaggcacagagctgaaagagaattggagagttgctgatgcccncaagaaggacanattncagtacacgcattttgcacacatgattaacagctttgacaact

SEQ ID NO: 33087 - DNA, 434 bp, Glycine max
  Clone ID: LIB3051-108-Q1-K1-H12
gcgcagcggaagccatggctgattcttcttcgaacttgaaatccgacgcgataatggagcagatgaagcagcacctcgccaccgactcaggcaaacaagtcaccaaaaaaattggactcgtttatcagattcaaattgctcctaagaaacttggaatcgacgaggtcgtctacaccgttgatctcaggaaaggagaggtcaccaaagggccatatgaaggaggaaagcctgatgcatctttttcatttaaggacgaggactttgttaaggttgccttggggaagatgaatccacagattgctttcatgaggggtgcgatgaagattaagggaagcttgagtgctgctcagaaatttactccagatatcttcccaaagccttccaagctgtgagctgagatgtctgaaactacttgcacaaggttgctagaatta

SEQ ID NO: 33088 - DNA, 375 bp, Glycine max
  Clone ID: LIB3051-108-Q1-K1-H2
tcgcccctttctctctctctacactttctctctctctccaacaccaccttttatttttttttgccgttgagacaaaaacagaagtaaagaaagaggtttatttttatttgggtctttttttattagcgaaaaaagggataaaagaaaaagaatacgggaatttccgaagccaaaaaacccgggaacaaactcttcgggaagacgatcccggtgccggagattctgccgggatccaacggagctccggcttcgtcttccggtgatgttgatgttgatgacagtgttgacgcttctttcaccaactcttcaagggagtcttataccaacacagatgcacaagagaaagattttgataaggacacatttggagaaaaa

SEQ ID NO: 33089 - DNA, 450 bp, Glycine max
  Clone ID: LIB3051-108-Q1-K1-H6
cccacgcgtccggaaagagtagtgaacatgaggaaactggcccccccaaaacatgaagagcatcattcttctcgtgacaattcttatggaaaatcttcttctggtagctctggatttggaactacactttcaaagaagtctttggatatggcaatgagacatatggacataaggcgaagcatccaaggtaatctgcggcctcttgtgacaagcattccagcttcctctatgtacagtgtgagatcaggtagttcctcaaagagcaggacagtgagtgcttctgattctccacttgccacaagcagcactaccagctctgaaccaagtgttaataccaactccatgtcttatgatggaagtggggttgaagaaaatgattttgcatgtgagaggggaaactcttgatgggagtcatcaatccatgatgggcaaagcatgatcatcatcact

SEQ ID NO: 33090 - DNA, 401 bp, Glycine max
  Clone ID: LIB3051-109-Q1-K1-A10
tggaaactggattggacctaccctgcacacattccaatcccatgcaaaaccgagtctgtttcaaacgccggtatggggaatggaatgagctcatgcacgagctgggatgagaatctgtgcatataatgatgaaaggggaagaaggacaatagtggtgatggtgttttagcatgcaaagaagcaaaggacggactagtacctttagctgatgcagtatttgaatgagttggactgacagtcataatttcatgagaatcgtagctatacctagcagctgacactggactaactcaaacttactttgatatgttttgaatgaattttcctttttctttttcgcccctttattagctttttggtcctgttaatatactgacattatatcaaatgaggataatggg

SEQ ID NO: 33091 - DNA, 216 bp, Glycine max
  unsure (1)..(216): unsure at all n locations
  Clone ID: LIB3051-109-Q1-K1-A12
cctcaaacttcaacaaccaaacctctgcacctatacaatttgaccctctcaacagtaacagttanataagcagtgtctccaaatatcctaaccatattattctttactaacaacctatctaaacaacgcgttttccttccttcacaactatacctatcatatccattacacctacacctacttatcagcgctactaatgtgccgatctatacttaa

SEQ ID NO: 33092 - DNA, 283 bp, Glycine max
  unsure (1)..(283): unsure at all n locations
  Clone ID: LIB3051-109-Q1-K1-A3
gtgaaccgngccactcctttttttctcttcttctcgngcttcagtggaaatcggcgtagctccgggaccgacataagagctcaatggcaccaacaaggaaatctaaaagtgtaaataagcggatgtcaagttcaaatgacaattcccctgagaaagatggagtttattcaaataaaagcaagccacggaagagaaagatgactgataaattgggatctcagtggagcaaggaggaacttgagcgattttatgaagcatatatgaagtatgggaaagattggaa

SEQ ID NO: 33093 - DNA, 319 bp, Glycine max
  Clone ID: LIB3051-109-Q1-K1-A5
tcggccacgcgttcggttgaaatggctcttgtcttaatcaccaccgcaaatttctcgaaggggattgtcttacgcactgtttgttggtctcacgctttcttctttttttttcaacggcaatttcaaccactcttctttttcttcggcggggttcggcggctttcccgggggcacgccggcttccccgggtccccacttccacctttcgaaaacgaattcagcaggcaccttaaaggtttggggcttttagaactctggtgcacaacaacaacaacaacgccttattccactaggtgggcttttaagacctttgtgcacc

SEQ ID NO: 33094 - DNA, 341 bp, Glycine max
  Clone ID: LIB3051-109-Q1-K1-A6
tcggccacgcgttcggccacgcgttcgggacaacttggctattcttggtgaccgaagagaagcaaaaatttgcccccaaaagggttccaactttttggacattggcgcttttatttggaccggccgggcccatggggtggccctggtttacaattattaacacccttttaaatacaccgagcctacctattaacgctttattggtcggaacggttttattggccccggttatgccgtggaggcaatcctggcacttggtctaacccaagggtcaatctattttaaatcaatccggggaatctatgaagcctggggtaattataaattcctatcgctatgtc

SEQ ID NO: 33095 - DNA, 173 bp, Glycine max
  Clone ID: LIB3051-109-Q1-K1-A8
acccgaaaaactaactaacataatatggggtgaaagaggtgagaatgtttatcatattggggcatattcaaagggaagtgaagatgttaacaacataaaataatgggatcaaaaagctgctgggacttaactcacccaacttcaaaagccaaaagcttaaacttatttttatt

SEQ ID NO: 33096 - DNA, 343 bp, Glycine max
  Clone ID: LIB3051-109-Q1-K1-B1
acgcgatattatacttctaatccatttcattatatataatggggattctcacaattgaggatgaagccaccttccctgtggctcctgctaccctttacaaagctctagttacagatgccgacaacgtcatcccaaaggctgtcgaagccttcaggagtgttgaaaaccttgaggggaacagtggtcctggaaccatcaagaagatcactttcgttgaggatggagaaagcaagtttgtgttgcacaaaatagaatcagttgatgaggcaaacttgggatacagctataacgtatttggtggagttgggttgccagacacaaaggagaagatcacattcgaatg

SEQ ID NO: 33097 - DNA, 381 bp, Glycine max
  Clone ID: LIB3051-109-Q1-K1-B10
ccctaggaaatttccccttcagacgaaaccctagatttcctctcacaaatctggctcagcttccccattctcgggattcggcgtccaaatcacagatcccgttcaattttttttccgcatcccccgatcgggtttggattctgaagaaagttcaattccgcacaaattcgagacaattgctgctgtcgaggctcgcgttgcgcatgggtaagattctgagagaaaccgcgaggccgttctcgaattgttcgtcgtcgtcggcgtctccgttgtcggcgccgccggcaacgacgtcgtcgacgtcgttgacggacacggtgagggggtcgcaccggttcaagatcacggggtattcgctgtcgaaggggattgggattggga

SEQ ID NO: 33098 - DNA, 186 bp, Glycine max
  Clone ID: LIB3051-109-Q1-K1-B11
cactaagttctgaaaaatgagttccaaagtttttcttattctacttatgttcatggcggctatacttttgatctggtgtgaggttgcacccgatgatgcataccataatattgacaaaacaaattggaagcgtattgcaaatggggtaaatgaaagcatatattggcgtgcgtgctatcgcgacta

SEQ ID NO: 33099 - DNA, 285 bp, Glycine max
  Clone ID: LIB3051-109-Q1-K1-B12
gccacccgtacatactgaacctgacattgtcagtcgcattttataagcttgttctatggcaatggctccatttgcatgacagtctgttcattcaaactcaacttgggaagactttacaggacctcaatgcccttgactgtctgaaacatcatatagaatctatttatggtagctatacagatacacaccgctaacttgtatttccatggtgcaccaatcgtagatctacgcttagatactactctccctggttatactaaatacaccttgcacccactacaaccc

SEQ ID NO: 33100 - DNA, 236 bp, Glycine max
  unsure (1)..(236): unsure at all n locations
  Clone ID: LIB3051-109-Q1-K1-B2
ccgacncatccaatttactagctagtgttctataagttcacggtcaactctgaaaaaggagttcgaacgctttgcgttgttgtagttatgttcatagcgactatacttctgatctctgctgaagctgcacccaatgaatactaaaattttaacaaaaaagatgggaagcatgctccaaatgggttatatgatagcaaatggggttactgtggttgggcatgataccaccaatgcct

SEQ ID NO: 33101 - DNA, 201 bp, Glycine max
  unsure (1)..(201): unsure at all n locations
  Clone ID: LIB3051-109-Q1-K1-B8
cccgacncttncaatttactaactagctttctatatcaacacgcgcagctctaaaaaaggggcaagaatgattagcgcgtggtaattataaccatagcttctctacttctgatctcttcttaaagtgcacccaatgaatactaaaattttaacaaaaaagatgcgaaccatgctccaaatgggctatatgatagcaaatgg

SEQ ID NO: 33102 - DNA, 400 bp, Glycine max
  Clone ID: LIB3051-109-Q1-K1-C1
aaaaagtacccactttcccttcatcttcttcttcttcaattcggcgttttctgaaaagggaaaatcgaaatccgtctctgccaccatcaccacttagatcagtgatatacacacccatctcaaaaaccccacaataacaaaaactcagaactattgagtgatctacttccaatgaaatcctgtattttcattattgagattcaattgaagtgaagtgattattcactggaaaacttatttttcatacaactgaagctgctacatgcgttttaactacacatgtttgttggatctatgagcatggctgggaatcaagatcagctcaagaacaagcttcagttgactgatggctacgatattggccccaaacgtttacctgcagctactaatattgcaacat

SEQ ID NO: 33103 - DNA, 413 bp, Glycine max
  Clone ID: LIB3051-109-Q1-K1-C10
tcgcccacgcgttcgccagcgttcgttttcttgtttcactctttaaaaaggaacggccctctttgagtgtcttaccttaccaccacccacctgaacaatttcccttcacccaacacgggttcaaatatcactcccctataaaacattcttaaaaaccggtaaacacccaaaaggggttttcaatttcacgcaatttctttcattcccacacccaccaaaaaaaaaaaaaaaaccatcacacatattactacattataattgctttagattatgaagaaattggagaattactaaattgccctgccggaccaacacaccggggaacccaaagtggtggttccaactggcaatgggttccttcctttcctttttcttccttttcctcgctaccctaacctccccggagggcaccc

SEQ ID NO: 33104 - DNA, 348 bp, Glycine max
  Clone ID: LIB3051-109-Q1-K1-C6
gttatatctcaccactaagtttattattatcaaaaccaaaagctagcaagctaccttgggaaggaacacatggcttctacagacaagcatggcgacactgaatacagaacatcatcttcaactccagctcctgcgggtgttgattactttaaatttgatgttatcctaaagtttgtgttatttgcagcatcactggtagcttgtgtggtgatcgtcactggtaatcaaacagaagttattcttgtgccacagcctgtgccatggccagccaagttcaaatacacaccagcctttgtgtattttgtagctgcaattgcccgtactggcctctacagtatcattacaaca

SEQ ID NO: 33105 - DNA, 389 bp, Glycine max
  Clone ID: LIB3051-109-Q1-K1-C7
aaaaagtacccactttcccttcttcttcttcttcttcaatttgggttttctgaaaagggaaaagcgaagtccgtcactgccacaatcaccacttacatcagtgatatacacacccatctcaaaaaccccacaagaacaaaaactcagaactcttgagtgatagacttcgaatgaaatcctgtttttcattagtgagattcaattgaagtgaagtgattattcactggaaaacttatttttcatacaactgaagctgctagatttgttttaactacacaagtttgttggatctttgagcatggctgggaatcaagatcagttcgagatcaagtttcagttgactgatggctctgatattggccccaaacagtttcctgcagctactaata

SEQ ID NO: 33106 - DNA, 357 bp, Glycine max
  Clone ID: LIB3051-109-Q1-K1-C9
caaagatcagatgatgttactgtggacagttcagtttctgctaagcgccgtggcagagtcgccatatctatggacacagactcaaaattggacgatgactgctcaacctctcaaagtcgatacaaccacaggattccagatagattgcaattttctggcaagaaggtttctcatagaactgctgcgtcacgtaatatttcaaatgaaggtggatggatatccaaatctagaaatcattccgatagattcagaaaagagcttggtatgacatcagatgaaacatctatgaagaattcaatgctacctaaaggatatgcatatgtttctgctgattgcttgtcaaatgagaagcacttt

SEQ ID NO: 33107 - DNA, 255 bp, Glycine max
  Clone ID: LIB3051-109-Q1-K1-D1
aaaaaaatcagatcatgttactttggtcatttcacactctgctaagcaccagggcagaggaccatatatatggacacatactaaaaattggaccatcactcttgaatctcctcaaagacgatccaaccccatgattcctaaaagattgcaatcttctcactacaagattcctaacaaaactgtttcctaacacaatattacaaattaaggtcgatacatatccaaatatacaaatcattccgctctattcataaa

SEQ ID NO: 33108 - DNA, 112 bp, Glycine max
  Clone ID: LIB3051-109-Q1-K1-D10
ccccaccccttcccccaccccttccggggacttaaggcccaggttattaattgggcttggtccaccttttccaaggttatttcttcccccgcttccaagaaaatcccccaaa

SEQ ID NO: 33109 - DNA, 317 bp, Glycine max
  Clone ID: LIB3051-109-Q1-K1-D2
gcacaaaccggcacgacacatacggcaactaacctgcacgcgccgttctttctcgctaggagcccggccccaaaatccctgctattaccctaccattgacccattcaacttcgatctcatcatcgtcagcaccgccctatctgaatccgtcatcgccgctggcgactcctgcgaatgcaaaaccatcctccacctcgaccccaactccttatacggcagccactgctcttctctctccctccacgaactcacttgctacctgtgtatcccgcactccctccccttcgccgccaacacaaccactgactgcgacgacg

SEQ ID NO: 33110 - DNA, 404 bp, Glycine max
  unsure (1)..(404): unsure at all n locations
  Clone ID: LIB3051-109-Q1-K1-D3
tgctgaacgtacctcatctgnagttgtttttcacggtgacaaaataagaaaaaaaggattggacgaaatggatcatgctctgtgctcacgttcctaatgttagaggttctcaaaccgttggacagctggctgaacgagttcaaaacattactctggagagaactaacaataacgatgctggagtattagatgtttcacagaatagacctttttggggatttgaatagtcaatatctccattccactagcgagggtactgctcaagtcggtattcaagtttcagatcattctatttctgcaagaaattacagctgcagatgttctttaaaacattcttttgaagaatattcttcagacggaagcacgaaacacgagggatcatggtctcaatttttacatattgc

SEQ ID NO: 33111 - DNA, 243 bp, Glycine max
  Clone ID: LIB3051-109-Q1-K1-D5
gatcggttcaagcgacagtttgcacatcttgaggagcattatggcaaaggtgaacgaagcactgcaccattgcaaagacagcatgccttcttacctagaaagcgagtttgtgctcccaaggatgaaagtaaacaaaacaacgattcttaaaagccaaagggatcaaatcttcagcagagtcctccaagttctgatgagacaagtgctcaaaatggaacctccaaaccaaactacagtgcacgt

SEQ ID NO: 33112 - DNA, 345 bp, Glycine max
  Clone ID: LIB3051-109-Q1-K1-D8
gcacaaacctgcacgacacatacggttactaacctgcacgcaccgtccacttcactaggacccagccccaatatcccttctcttaccctcccattgacccagtcaacttcgatctcatcatcgtccacaccgccctatcagaatccatcatcaccgttgacagctccaacgataacaaaaccatactacaacttgacccacactacttatactgcagccacttcaattctctatatctccacgacatcacttactacctttcttacccgcactacctacccttcgacgacgccacaaccactgactactacgaccgtcttatcatcgacttacatcaacaacccc

SEQ ID NO: 33113 - DNA, 404 bp, Glycine max
  unsure (1)..(404): unsure at all n locations
  Clone ID: LIB3051-109-Q1-K1-E10
cttttcaaagaaaaatcatttttttcaaatacaaacaatagtattttcatatgtgagagtggacaaaatggatgaactgacccaaccgtgtccactagattagacctaatggcctaccaatactctacctggatcatattttttaaagtcgagttagatttaatgaccgtcatgttaattcattttagcccattttatttttttgtctaaatgactagcaaaatgaacggaccaatccaacccaatccatcagatcaagtgtgaaaaatgggttaggtcgagcctacccatactttatgttgatcttatattttaaagttcaattaggtctagaggaccatcagctngattcatattaactcattttatttttttgtatgaatttatataaattccaaaagaaa

SEQ ID NO: 33114 - DNA, 124 bp, Glycine max
  Clone ID: LIB3051-109-Q1-K1-E3
cggacgcgtgggcttttatgctttctttcttcttctgtttatcccaatcccgtttcggtggtcgctcaacacacagtgtgcgttgtctcagctggcttgccttttcacttttcttcatcttttt

SEQ ID NO: 33115 - DNA, 341 bp, Glycine max
  unsure (1)..(341): unsure at all n locations
  Clone ID: LIB3051-109-Q1-K1-E4
cccacgcgtncgctctcttctttctctttcaaacatttaaacggtttcttttgcaaatgtcaaggcttaacgtggggttgggtctttctcggcatcgcgttacccacatagttttctgggcaaaaacagagtcttttggtggggaaaatggcgaacgggttaaagagagaaagtgggttgacgacgttgttcagcgaagaagagcttaaaaaagtgagtggggttaagcgtgttggggactgtgtcgaagtcacgtgcgggtgcacgagccatagatacggtgacgctgtgggaagactttaggttttcgttaatgggtaccttgaaatcacttgcgaatg

SEQ ID NO: 33116 - DNA, 224 bp, Glycine max
  Clone ID: LIB3051-109-Q1-K1-E7
cgtgaagtgtctcatctctaggctcaacctcttcatcaccaccaactgcatcgacaaggcgtaacaacgagggaggcattcatacgacgttgggactttggtgggctcaagtattgtaggttcgatgatgttgaaactggcaaatggtgaatagggagatgatcactcccaagatgatcatgacccacaggatcatttgaactatgactaagatcatatgctat

SEQ ID NO: 33117 - DNA, 377 bp, Glycine max
  Clone ID: LIB3051-109-Q1-K1-F10
cccacgcgtccgcccacgcgtccgcaactcttttaatctaatttcccccaaagtcttgtattattttgctcataaccccaattttcaatttcctctttcttcccttacgttatggacccaccaattcaccatccacttgggaaacgccctgccgccgaggacgattccgtaatttccgattgcgagagcggggtttccgggggcgacacggcggctggctttgtgccggccgacgaaaacgccgacctcgtccggaccagattcgttcgtggcctggccgcgcacgggttgaaacccgaggttttggcggttggcagaaacgcgtgttcctccgttatggcgcaagcgcgtcaacattcctttcacgtttttgcacg

SEQ ID NO: 33118 - DNA, 404 bp, Glycine max
  Clone ID: LIB3051-109-Q1-K1-F11
attgcactttattctatcatatccttgttcaaataattttcttttcaattacgatacgccaatcccagaaacttatgttcatgaccatcctcaaggtcccaataacatttacttgaagacaattttgagttgaccttacagcctagttccacctatacaaacacccttgatccttcattcttttttgagttgaccttacctagctccaatactggcaacaataatactcttgggcatctgaactatctccattctttttttccccctttctttgcagtggatttgcgaggttttaaagaaattaaatgcgtttttatgtgctaaagagctaggtaattatagaattcatctcacacatacttctttttactaccttttatcttttagattttattcttgaatta

SEQ ID NO: 33119 - DNA, 431 bp, Glycine max
  unsure (1)..(431): unsure at all n locations
  Clone ID: LIB3051-109-Q1-K1-F12
cccacgcgtncgaaagacccaagtgagataggacttaacttcactgtcaatgggactgagatcttaaccaaaatgttccccaatgaaaacagcgacgggagatgcttgaagctcctacctttccctccaagactcgaggatcatgttcgagcctcgttcgcgctcacaggagcagatttggagaagctaaggaaaagggtgttgtccaaatgggacatcgttgatagaggagcagaatcagagccacctaggttgtcatctttcgttctcacatgtgcttatgcgctagcttgcattgctaaggccattcatggagttgaaaaggagaaagagaaatttgcttttgcgttcacagtggattgcaaggcgaggttggagcctccaatccatgataattattttggcaaattgggtgtggggcatgttgtgga

SEQ ID NO: 33120 - DNA, 400 bp, Glycine max
  Clone ID: LIB3051-109-Q1-K1-G3
cgcagcgtacgccacgcgtactattcgattgaatcaaaaattaaaaggaaaaaatgaaaagtgaagacctctcaacacatggcttcttcaatcccatttacaagtatcaactcctcaagggtgcttcccattcctagagaaccacaccacccattttcccatttgctctcaaacatgtcaaagtttgcatctttgagaaccccttcttcttcttctgcttcttcttcttcttcttctgggtcttgctctctcaccaaagacccttactctgttgtgccattggaggaacatatcaaaatggataatgggtcggttctgcttcagagacccgattcgtttgggaggtttggcaagtttggagggaagtatgtccctgagactctgatgcatgctctcactg

SEQ ID NO: 33121 - DNA, 305 bp, Glycine max
  Clone ID: LIB3051-109-Q1-K1-G5
gccacccctcccggaaaaggacccacttggtttcttggacctaaatggttaaaggcagggggcccaaaatgattgtgaaggttcatcaaaagatgccagacattcagatagtagtgctgaacaatatttaaagggccttaaaactcttgcagggccaagtctgcaaagaaaaatcaacttcattgaaaccattaaacttgagattgaacgccttaagttaaatctttctgctgctgaaagggatagaaccctgctatctgttggaatggatccagcaaccttaaatcctaatacactgctcgatg

SEQ ID NO: 33122 - DNA, 115 bp, Glycine max
  unsure (1)..(115): unsure at all n locations
  Clone ID: LIB3051-109-Q1-K1-G8
ccacgcgtncggaatttattcacaaaaaccttctctgttctcaattgggtgggcatggtgtgatttgatttcattgccatggcttccaaaagatcccaagcnagtagctgatgct

SEQ ID NO: 33123 - DNA, 242 bp, Glycine max
  unsure (1)..(242): unsure at all n locations
  Clone ID: LIB3051-109-Q1-K1-H12
ntccgccaaacttacggccttagacatcacctcaacctacgaattcaccactcccggcagcggttttaaagatggattgaagctagccctcacaccttataaggaaacttgctaaggcttatataagagggccggcctcgctataaataaaactttattgaaagggtacatataacaaaaattgggatcaaactgggctcaaggcatataacgcgagtggtactttcctattaatcaccttt

SEQ ID NO: 33124 - DNA, 51 bp, Glycine max
  Clone ID: LIB3051-109-Q1-K1-H8
tcgcccacgcgtccggcaattcgtaattgctatctgtcttctatcatcact

SEQ ID NO: 33125 - DNA, 397 bp, Glycine max
  Clone ID: LIB3051-110-Q1-K1-A11
cccacgcgtacgcccacgcgttctcacactcgtgcgtccacgcgttctcatctccaaaagggcccagcgccaacctcgatctgctcacgccgcatctggagcactttacgatggtaattcgaacgtattaattgcttctgatgtggactatgaagactatcacaaaggctatggagtgtcgatgcattgagtacttatcttcattgccgagaagtttttccttttgctctgactgtatctccgattgtcgtcactctcaatttcgcattgataatcggaatcattctgaccccaaagaccttgtcagcgaggattacatatttgaacaagccgctgatggtttatgtcagcaaaagcgcgtcaaggaatcgggtgaaatgctccatcgtactgatca

SEQ ID NO: 33126 - DNA, 377 bp, Glycine max
  Clone ID: LIB3051-110-Q1-K1-A12
gtgggctgtattcggtctctcctaatgggatgcacactgtaattgtcttgattgctatctgtgtagcttcaatacacataggactgaacttcatatataacacattgatatttgctgtgcaacataaaaaatgatagcactgcgaacgatctatactttaacatgggctggctataatgaatactgtgacatttcaactcaactgtggagctcaaattacactaacgagctcaattggtacaaatgagccaatgtgaaccaatttagctactggacagttcattttgatcagattgacctaatcaacgatggtcacatacattcatacactaatgacactgcacagcaatatcactatcactgggatccaccattat

SEQ ID NO: 33127 - DNA, 464 bp, Glycine max
  Clone ID: LIB3051-110-Q1-K1-A2
gttgtctatttgaaatctccttcatcctttcctttcttgttgaaaagtttttgttgttggggtaattaaccagcagttcttcagttttagaaagacgcaggttgaattatcatggcagctatgatggatttttacagcagcagcacagagtttcaatttcactcagatccattcaggggtgaactaatggaagttcttgaaccttttatgaaaagtcctttctcaaccccttctgcttcaaattcttggcatgtttctacctcttactctccttcccccaacaactactctaccttcctatactcaaacgggttatcatccatacccaacaccatccaaaacttaattggtttcgggcaagggcagcccacatctcttgtgggcctgaaacacctaaccccatctcagatctctgagatccaggcccaaatccagatccagaatcacagcaacacgctgagctt

SEQ ID NO: 33128 - DNA, 424 bp, Glycine max
  unsure (1)..(424): unsure at all n locations
  Clone ID: LIB3051-110-Q1-K1-A5
aatttgtacaactagtcaattgttgtatagtttggtaaaaagttgtgcagcttgtgactatcaattttttaaatgtatgaacaataaaaaaatgtaactgggcaattccatgtactctgtctagttgatgccaatgctggatgttatgagtttgattacagaattcaatgatcctaaacgcagagcagcagaggtatttgataacttagagagattaacatagctatagggaattggggatgagtataaaagaaagctatatgttgctaggtgcatggttgcaactttcaagtaaatcatggatcagtcaaaaatctatttttcttgcaattagtgtgctactgggcctcaattgtcaaattcctaggatggaaaatgttntttttttttttcagaataagacaaccactgatgcccgatggat

SEQ ID NO: 33129 - DNA, 92 bp, Glycine max
  Clone ID: LIB3051-110-Q1-K1-A7
tccatcgccgtccgtggatcacttcccaagtggctcactcttttttagtttcttggctgaagctgggtccgtctgttgaaggacgtgggttt

SEQ ID NO: 33130 - DNA, 341 bp, Glycine max
  Clone ID: LIB3051-110-Q1-K1-A8
ggatgccatgtttggtttgtagcgcatcctaggcagctgcataattgggttgggggtcctgccaatctctatgatataagtggaagtgcacacttcataaataagtgtgacaatggaattgttattcaccgtaatcgggatccggaagctgggcctattgatcaagtacaggtttgtgttcgaaaggtacggaataaggttgcagggacaataggtgaagccatattgttgtataatagggttactggtgagtacacgccatctgataacaacagaccagctgatagaaagagatagcagtgagacaaataattttttggtaggcttggatagtggtcact

SEQ ID NO: 33131 - DNA, 368 bp, Glycine max
  Clone ID: LIB3051-110-Q1-K1-A9
gcccggtgtaggtatttgttttatgacttatgagacgttgaagatgcttttagcagatatgggtacgtgcataactacacccatcaaccttggagtctgatatacaagaagtaaatgtatgaggttatttacccatacaaaaaatgttaagttacatttacgatttaacaattgtaagttcaatttatttctcgagcctcacctgggcaattttttaatgttcccgtggggattgcatttttgcatgtacagagacttgcataacatttaatattaagctgttatcgcaaaaaaaaaattataactaaaccaacataagtaatttaggaaaaacgtcataggtaaaatacaccatttacaacatacta

SEQ ID NO: 33132 - DNA, 339 bp, Glycine max
  Clone ID: LIB3051-110-Q1-K1-B2
tacaaatccacttgttaagcaggcctatggttggttagccagcatccctgctgcgcctgcgcatgctatggagtttcctgctaaggagattgctcttgggcttcatcctgtagctcagtcttcccatccagctcatataactacaggtatgatcagcataacagacattactttaagaggcaatgcgatggattggacgatgggcaaaaatggagggtttagcactataatatccactgggttttgtcaaccggatgttaattcggatgctttgatacgtgtttctggcaagactgcatttgtgttgtcgcatggcttgattttcctgactggtttctc

SEQ ID NO: 33133 - DNA, 70 bp, Glycine max
  Clone ID: LIB3051-110-Q1-K1-B3
aacaaatccacttgtcaagcaggcctatcgttgtttagccagcatccctgctgctcctgcgcaggctatg

SEQ ID NO: 33134 - DNA, 453 bp, Glycine max
  unsure (1)..(453): unsure at all n locations
  Clone ID: LIB3051-110-Q1-K1-B5
cccacgcgtccgctgcaattcatctctctcatttcctttttctttatctgtttcttgttgctcaggctaagttgctggaagctgggccacgtttttctctctctctctctctctctcaagtatggtttatttagacactgtttggaataagcttctctataagtattagtaggagaagtaaataagaaaagaatacatgaagtaagtttatttttataagctaaaattagcttatgtaaaaattaagatcagttcttgaaagagtttattaatatcattaagcttctagaaaaagctgatgcataaactaattttatgtttatggaagaactttatttcatctaaagagaccctagtgaagccagctatttatgactaaagtactattntgttcttgaatttgtaacgctctaatcggttagtccttcaaattagggtaaattgaaaagaaaa

SEQ ID NO: 33135 - DNA, 239 bp, Glycine max
  Clone ID: LIB3051-110-Q1-K1-C1
gaagtttgaaaggtccttgccaggatccaggagttttttggccaaattcccaatggtttggggggaaggctttgaaggccgtggttccaatgggatttgggggaagctttttaggtccactgttgtgcacacactgcatcttaaacagaccccgaacctgttgaatctgcaaggggtcgagagctgcgcttttttgcatatgtagatcctatagacgtgtctagaaatctcacgagatt

SEQ ID NO: 33136 - DNA, 365 bp, Glycine max
  Clone ID: LIB3051-110-Q1-K1-C11
atttgcttaattattaaataaaaagattttgaagtttttattctgatctttcctagtgaaaataggtcatcctcagactcaaacttcttgatttcacatgaaattcggttttaacttttcctttgtctttaatagtagtatacttattttatatacgctgtggattttcattaaattacaaaatttcagtttatgaactagtaggagaccggacctgagaagatgtaccatagttaagcaaaagaccactaatcgactaagaaaaaatctaacggactaaactctataggttcactttagtgtttgattgttatttttctttcaatttattcgttcaatttggggtatataggttaaaaaggtga

SEQ ID NO: 33137 - DNA, 320 bp, Glycine max
  Clone ID: LIB3051-110-Q1-K1-C2
cagacgcgtgggatctctgtctctatgtctctaatccaattcagttagcttctcgttcacgtgcaaagggacttgagaagatgttggagaaagttgaagaatttaacatagagagggtgatggaggaatctgagagggtgacaaacgatgctgagaggattcaaatggaaaccctgaagaggattttggtagataatgcttgtgctgagtacttgctgaatttggggttgaatgggatgactgattctgacagctttaaggcctttggtccacttgatactcacaaagatttagagccttatatcaattgaatacttgat

SEQ ID NO: 33138 - DNA, 99 bp, Glycine max
  Clone ID: LIB3051-110-Q1-K1-C6
aaaaaaaaaaaaaaaaaaaaaaaaatataattaaaaaaaaacaaaaatataataaaaagaaaggaaaaaaaaaaactacaattaaacataatataaaaa

SEQ ID NO: 33139 - DNA, 405 bp, Glycine max
  Clone ID: LIB3051-110-Q1-K1-D5
gaaaaaaaaacttgtatgactttggcatactatactagtctcatttgccattcacattcaggggaacatagcagaagcatagagatataccataccatattatatataacaccgaattgaattcttgctttgtttctctacctttgatcatgatcatggattctcttctctccatcctcttctttcttctcactctatcttctctcaacccttcctttgcttcacaaccctcttaccaagaccactgtggctccatagttccagagtcaactcccaatgaaaacactcacaattcttccccttttgatgatcatcagagaagttacttcacaggtggtgatagcatcatcgatggtggaacttgcttaaaccaatactttgacctccaaccaatgtacatacgtg

SEQ ID NO: 33140 - DNA, 389 bp, Glycine max
  Clone ID: LIB3051-110-Q1-K1-D6
cccacgcgtccggaaaagaacagaataggtgttgtggtggagtaagaatcgaattcgaaggaagagaggtggtagggtttgtgatatagcgatgagtgagagtaacgggaacagcaggaggcgaaatgttgaagatcaagatctgggactgtacttcttggaggcgtgcaggggtagggagatgaaagaggaagaggaagaggaagaggcacccagggagctcaacaccattaacagctctggtggtttcgtcgtggtttccacggacaagttgtcggtaaagtacaccagcgtcaaccttcacggccacgacgtcggtgtcattcaggccaacaagcctgctcctaccaagcgcctcatgtactatttcgagattcatgtcaaggatg

SEQ ID NO: 33141 - DNA, 454 bp, Glycine max
  Clone ID: LIB3051-110-Q1-K1-D7
cccacgcgtccgatccgtgatctcccaatttctcacttgaaagtatgaagaaagaatagagaagtaatggcaggagcagaagcaagggctctgtggcagagaactgctaatcgttgctttgtccaagaagatgcaaaaagagctcccaagttggcttgttgccaatcttcatgtgcaacatcaaaatcagttgatactggacctgccagtacagcagatgaatctgatcataatacagttaatgttacccattttaacaggaaatcgtcaatttctaatctatcatcagactgtaggtggtggttgcattcacaacctaattatgggtatcaaaagggtttaacatatgaacagttaaatgcattagaggatgaggtagaaactttgttagctagtgatttaagtaagaattctgaagaattcatgaattaatggatgtgatggaaaaacatga

SEQ ID NO: 33142 - DNA, 431 bp, Glycine max
  unsure (1)..(431): unsure at all n locations
  Clone ID: LIB3051-110-Q1-K1-D8
gcgcaacgctcggggaaaggcgcgtggggtggtttaatagtatcgaacggccatgcatgcggaatcctgctacactcactcacacacacaccaccctctctctctctctctctctcaaataaaatcgtatcacacactttctttctttcttccttctctcacactgacatcaccaaagttttcctttcgttatcgatttcattctctcgccagcgagaagaagaagaatcccctgcagccgagctctctctctctctctctctctctctactcctactccgatgatcatcatcatcatccatggcggatcctccgtcggtcgccgccgctccggcgtcgctctacgtcagcgacctncagcccaacgtctacgacaaccacctcgtcgacgcattctccgacttcgagagcctcgcgtctgttcgcgtctg

SEQ ID NO: 33143 - DNA, 441 bp, Glycine max
  Clone ID: LIB3051-110-Q1-K1-E3
cccacgcgtccggcggtgagttggagctttgaccagtttgagcacacgagaattcagtgggcatgtcaatggcaaaaaaacctgtgaaatactctctggttgacgcgtttactgagtcagtgttcaaaggaaaccctgcagcagtgtgtttcttagaagagaagagggacaaaaagtggttgcaaggagtagctgcagagttcaatctatctgtgacatgttacttaactcgcatcaccgagtcccatggaacaacctcttatcctcgttttgatctcagatggttcactcctgttagtgagattaacctttgtggacatgcgaccttagctgctgcgcacacaatattttcatctggtttggtggacaccgatgttgtcgaatatgtggctatatctggaaattaactgccaaaaagatcccaacgatcaatatcactag

SEQ ID NO: 33144 - DNA, 378 bp, Glycine max
  unsure (1)..(378): unsure at all n locations
  Clone ID: LIB3051-110-Q1-K1-E4
gngaataatanaaaattgaggaaaacaaatagacatgctaagaagggaaagaaaagaaactgagcagaagaggctagtgggttggcctaaaaggctgccggagtactgacggtaggtcagaaacacataagagagctgtgggttatacagtttgtgtcgaataaaagagctgtggggaaattgcggaattatctcaaaaagattggatgaacaacagacaatcaggtggcacagaaggttctttaacccccttgttaccaatcaaggtcactaatactatagctgctaattggtatgatttggggtatgaggtgctccacaaaatcacaacgtgatgtctttcgtatagtggacccaagccatgatgcacaatgatgc

SEQ ID NO: 33145 - DNA, 398 bp, Glycine max
  Clone ID: LIB3051-110-Q1-K1-E5
cggcccagagcgacccgtccgctcatctattctggtcgctccctatctctctctcttcacgagataattgactcgtgatgtggcggtgatgatgacactatcagggtgaagaagttccatattctgacgtctattacaaagcttagagctcaaaaagcgcgttctggatacctcgctggtcactgatttttgggttatcataggaactcaatctcatactccattagataacaagtatcttatgaccgctactgaagacgaattacggacgcataacgcaatacatgattgatttccatgtacttgttcaaggactgcaaaatggcggtcctctgccttgcacaatgtcactgacatggtagctgctggtgccattagattcccatatgccatgtctg

SEQ ID NO: 33146 - DNA, 453 bp, Glycine max
  unsure (1)..(453): unsure at all n locations
  Clone ID: LIB3051-110-Q1-K1-E6
cccacgcgtccggatccaagtcctcattttttttctccgcattcatctggcatttttattgattgtataaagtataaactttcccgtgcagagactggatatgttattggatcatttaattggctggaacctcctaagagtatatagttgaaatgtttgataaccttggctgtgcacttgtgttgttcttcagttgatggaattatatatggtattttttttaatcttgtattgtccatagaattttgtgttgatgaccgcatatgtgctcagtttaagtttaggtttcttaatgtacgacagttattgtcagatcgattgttctatnntgcattatttagtgtcaaatagaaggtgaaaatattgatgttgtagcttgtntattttatttccgattagaattattctataacgttctcgtaacagtgtgccagcaatggttcaaagtctaca

SEQ ID NO: 33147 - DNA, 422 bp, Glycine max
  Clone ID: LIB3051-110-Q1-K1-F1
attctctcacgtaatggcgtcttcagctcaagtgccaaacctcttcggcagtgccacctcagctgcgccgccaaccccggcggcgcaccacgacaacatcatgtcctcctccgacgccgccgacgcgctctcctgcctcctccaccgcctcccgcccacgctctcccttcccacgcgcctcccctcgccttcctccgcagccgccacgtctcccccctccctctccctaaacgacgtattctcctgcgtttcaaaactcggttacgcgcaactcaccgatcactcagtcccctccgaactcgccaactcggccgagtcggaagcgcttgccctctttgacctttccaaagaacagaagaactctctctttcccaaaaactggcctctcggatacggcggcgacgacgaagacgaagacgagc

SEQ ID NO: 33148 - DNA, 459 bp, Glycine max
  unsure (1)..(459): unsure at all n locations
  Clone ID: LIB3051-110-Q1-K1-F11
ttatcattcaagctgcagactcggctgaaccaacctccaaaacaatgataaaatcacagaaaacagtgtctagtgttctctatggaatatggaaaagggagggcttactgggatatttcaaaggattgcatgctcagatcttaaaaactgttttgagctcagcactgctcttaatgatcaaggaaaagatctctgctactacctgggtgcttatccttgcacttaaaaggtacctattacttccaaggggtaggattaagaacttgtaatttataatagcagttactggaggaagaagcttcaattcgttgcggataatgaatgcggttggagtgcaaagtgtgcactttaacagatacatncatctattcaaaagtgagacgagattgttttggtggcttcccttctgtcctcttccctggcttaatgatatagaacaattagtccatgaatttatgc

SEQ ID NO: 33149 - DNA, 416 bp, Glycine max
  Clone ID: LIB3051-110-Q1-K1-F2
attctctcacgtaatggcgtcttcagctcaagtgccaaacctcttcggcagtgccacctcgtctgcgccgtcaaccccggcggcgcaccacgacaacatcatgtcctcctccgacgccgccgacgcgctctcctgcctcctccaccgcctcccgcccacgctctcccttcccacgcgcctcccctcgccttcctccgcagccgccacgtctcccccctccctctccctaaacgacgtattctcctgcgtttcaaaactcggttacgcgcaactcaccgatcactcagtcccctccgaactcgccaactcggccgagtcggaagcgcttgccctctttgacctttccaaagaacagaagaactctctctttcccaaaaactggcctctcggatacggcggcgacgacgaagacgaag

SEQ ID NO: 33150 - DNA, 409 bp, Glycine max
  Clone ID: LIB3051-110-Q1-K1-G10
gcttgcagctttgttcatgggagattaccttatgagaacctataaccagacccagttctgaggagcctgttgctgagcctaccctataggaaacttatcttcacaaacgcagacaaagtccacgcggctaaggcgcttagcaggcttggattagaagactgctttgaaggaatcatatgctttgagacccttaatgctatccacaagagcactgtttctgatgatgaagatgatattgagtttgtgggttcaaggaccaccaatcctaccacttgtaatggatcatgcacctctcaaatctttgacattatatggcattttgctcagcccaatcccggtgcagtcctgtcaaagacaccaattgtttgcaagccatcagaaaatgccattgaatcggccatcaagatag

SEQ ID NO: 33151 - DNA, 238 bp, Glycine max
  Clone ID: LIB3051-110-Q1-K1-G11
atgccttcaattttcttctggagatatttataaggatttgattcttctgcctgttttgttgtgttggcttctctagatatatgatttattggcagataagaagcatggaacacatgatcgagcatgaaactttacctctaaataaagaaaagcaattgatacgcgagatcaaacaattgaagcagaatcgtgaggagttgtcttctaatatgaaaaggccagatccatcacaacaatc

SEQ ID NO: 33152 - DNA, 352 bp, Glycine max
  Clone ID: LIB3051-110-Q1-K1-G12
tctcccactcgtcctatccaaaaacaaggggattaattatccatccaatatgactcattctgggtatgtgatcttctaaattgttaacctattatcttgatatgtatcattcatacccatgattattcataattcactaactctattcataaaatagcacctaatacactatactaatcaactgactcataatctagaatagttaactcataaattgaatttcctatatccaacacaatctacttctatattcatttatgatcctctttaatgaccactctaaacattactctatctaatggaccattatgcagaacttactaataccgtaaatgaattacctactgattct

SEQ ID NO: 33153 - DNA, 397 bp, Glycine max
  Clone ID: LIB3051-110-Q1-K1-G4
aagaaggtcaccatagtgcataaaggaacgaggttgcttgaatacattgggacaaaagctgcaagcaagactttaaagtggctcaaatcaaagaaaattgatgtgaaactagaacaatcggtcgatttgagctcctcttctgaagaaaataagacatatcaaacttcaaatggagagactataaaagcagatcttcattttctatgcacagggaaaccacttggttcaacatggattagagaaactcttctaaagaatgacttggatgctgatggaaggatcaaggtcgatgagcacttgagagtgaagggcaagagcaacatttttgcaattggagatattacagatgttcaagtaagtgttactaaccaaaaccaagtcaattttggcttttaac

SEQ ID NO: 33154 - DNA, 91 bp, Glycine max
  Clone ID: LIB3051-110-Q1-K1-G6
ctcactctcgagctcgcaactcacgttaactccgttcgaaccgtggcttcctcaagggcggattacctctctcgaggagaaccttcttcta

SEQ ID NO: 33155 - DNA, 330 bp, Glycine max
  unsure (1)..(330): unsure at all n locations
  Clone ID: LIB3051-110-Q1-K1-H1
ctactgctctctctctccctctccctctccctccaaattttccttcattctcacgcgnccgggtggtttccgccggcggctactccctatccaccgcgcatccatcccgtttccttttcttgcttttcttaacaaaccaaaaaaaattaaaaattcttccgaaaacggggaataatcgtaatggtcaactgagtaaggtttggctgtccttcctagggtttaatggtgtccaataccaggaggagggggaagagaaccaaaccaaaaaaaaaaaggattaaagggcaaaaattagggaattttttttgggaaaaaaaagagaaatttaag

SEQ ID NO: 33156 - DNA, 283 bp, Glycine max
  Clone ID: LIB3051-110-Q1-K1-H10
aacactccttctagcacggaacatttaactctacctactgcacactatcctaacacattagaagggttatatagccattacagctggtgattgatcaaataatcatagacagagccttctaggacgaatgtatggagaccattgcaatagtaccttaactattaccatctcttgataaactccatgaccatgtatgatgtaactctatgtatccacataaacatgctatgaatgtaacatactattacctaattcaatatctcacatcttgaacgttataaca

SEQ ID NO: 33157 - DNA, 443 bp, Glycine max
  Clone ID: LIB3051-110-Q1-K1-H6
cttcactaaatctgagtgatgtattagagatagccttctaaaggctgctcgtgcacatttgaagaattttgcacatctactgttatattgtttcaattgttataacctttttgttagcttatcttacaatgttgtgtactgaccaatttacctttttttttcctggggctttattctgaagccgaatgcaacgctagggatggttcttgattctgcagaaaaggttatttcagaagttgtgcaagagccggtgataaggagattgagactatcatcgacagtgtgagatatcagtagcaatatctggaagtggcaatctttcagtggagaaagaagagagccagcaatttgggtaagtacttaattaaatggctggccttcatttctctatgtttttcaggcttgcttgatcattcaagcttgcaaattgggactgatccgaa

SEQ ID NO: 33158 - DNA, 443 bp, Glycine max
  Clone ID: LIB3051-110-Q1-K1-H7
cttcactaaatctgagtgatgtattagagatagccttctaaaggctgctcgtgcacattggaagaattttgcacatctactgttatattgtttcaattgttataacctttttgttagcttatcttacaatgttgtgtactgaccaatttacctttttttttcctggggctttattctgaagccgaatgcaacgctagggatggttcttgattctgcagaaaaggttatttcagaagttgtgcaagagccggtgataaggagattgagactatcatcgacagtgtgagatatcagtagcaatatctggaagtggcaatctttcagtggagaaagaagagagccagcatattgggtaagtactaatataaatggctggtcttcatttctctatttttttcaagcttgcttgatcattcaagcttgcaaattgtgactgatccgaa

SEQ ID NO: 33159 - DNA, 418 bp, Glycine max
  Clone ID: LIB3051-110-Q1-K1-H8
cccacgcgtccgcccacgcgtccgacagaggtctcctcaagatgaacagagttctcaatgtccaatacggtgtgtatctccatctccaattaggaaaaattctccaagacaccaaaaaagtcccttgcattcttctatggggagagtcagaacagaatccgtgactcgtcaaccctctagtcctctggggtcggcaataagagataaatgtggcaaagcttcacactataaatcacaagattcaatgtccacacctgagaagtctccaattcaatctgtatctcaagaagcaaggagtgagaccagcagtgaaggtcgaagtcctcatgagagccctatgaaacatagaagagataagttgtccaatgaaataaacacgaatcctctgaagaaacaagaacccaaagacctaaccgtg

SEQ ID NO: 33160 - DNA, 236 bp, Glycine max
  Clone ID: LIB3051-110-Q1-K1-H9
atgtgtcttgatagaagggtacataggaatgtacgtactggttacactcataactcactagggcggatatgtagtgattgcagtctggtgattgatcaaatgctcatgacgatgtctgtaggacacatgattggagatcattgcgctagtaccatagataggacgagctcttgagcactacgatgatcttgtaggatgttctgctacgtctcctcattaaacatgatcttatgttt

SEQ ID NO: 33161 - DNA, 287 bp, Glycine max
  unsure (1)..(287): unsure at all n locations
  Clone ID: LIB3051-111-Q1-K1-A1
caagaacacaacatnagttactttttctcttcagctctttcttcgcttttctacacttctgctttgggctgaatttgtagataatgctgtgcaaatgtgtggataaacattcttttggtgaatgcaactgtctcggcacaggtgtaaaaaaaaaaaacaaacaaaaaaaaaaataataaaaaaagatacacaaaaaaaaaaaaattactgaaaggacgcataaccatataacaaggtaccaaatcaaagaaacgataccataaacaaaaaagatggcggcaatttta

SEQ ID NO: 33162 - DNA, 409 bp, Glycine max
  Clone ID: LIB3051-111-Q1-K1-A10
ccactggcaacctcaagcgcaggagcgactctgccggttcccaacgtgaggactttcgctgcttaagatcgagaaagaatttagaacagggtaatgataaggcaaatgaagatgactcagtgaagataaatgatgacgtggctgcggcggttgttgattgcgatgtgataacaccggaatccaaagcggaaaactcaggattcaatttaaaccttatagcagttaactctgactccgactccgcttttagggtttccaccggcaaccggaagcgcaagattcactcaaccggttccggatgcgagggttttctcaacaaaagaccggggaagaaggctgtcaagagagcaatgacaaacgattcagaagaacaaagtaataataacgcaaatgatgatgatgataatga

SEQ ID NO: 33163 - DNA, 378 bp, Glycine max
  Clone ID: LIB3051-111-Q1-K1-A6
ggggaattcatgcgatcaatgatgggatactactaccctttaggtatctgcgctttgaacgggggaggatgcgctgagtatcaagtttgctaggatggaattgaccgcgcggcacgatgctttagttggctgtcacaattgttaatggattgtattatgaatctttgatatgctatacatgattgacctgatcgaacatttacgtgcttatgattggatcgacaagctaggaacgcacctgataggtgtaagaatcaaggatcctgcattgggatctacatctacagatgatgagttcaggcataagagcatcatgtggagataccatcgtggacaatgttctgggatcacaaagtgatcatatgatgggtatgaata

SEQ ID NO: 33164 - DNA, 448 bp, Glycine max
  Clone ID: LIB3051-111-Q1-K1-A7
gtctgtgtttgtttccactttgcaaatgagtgtgtacccaggaatctcttgattgagaaagtgtgttagggtaagagttgtgtcgtgtccacgagacactgggagaaagaaagtgtgtgtgagttgttgtaaactgaattttcatttttctttagccatgagcacacttgttcgcaacaccaccctcaccttcagccgcagaaacagatacgagcttcttggtttgcagggcaaagacaagatggtcaagtccatcagctacagacgcagaagggcaaagcaaaggcaaatctttctcacaacctacaagttatcttctttgaatagtaacacttttggggagccgacacaaaagcctaagctgaagctgaagaaggttgctgttaaggttaagaagattgtggcctcggttttgatgttcatgcgagttggttcttttaggtcatgc

SEQ ID NO: 33165 - DNA, 331 bp, Glycine max
  Clone ID: LIB3051-111-Q1-K1-A8
gtattgtctgtgaactattaatgagttatgttttgttgatcggactcgtcttccctctcttgatcaagaaactactcattatcttggtcataggcttattcatgcttgcaataccatgctcaactattatcctatacctacgaatccttagttggggcatacaacgctcactgcagtactcatgacttatgtcatcatcaccaaccacctgatcatcatgcttcgcaacgacggtggatgcgatgaggaagatgttaacaaggcatgcaaacgttcacaggattagcgttctccttgcgtgaaggatatcatggattaggcacacacacat

SEQ ID NO: 33166 - DNA, 383 bp, Glycine max
  Clone ID: LIB3051-111-Q1-K1-A9
cccacgcgtccgcccacgcgtccggtggggcttgctcaaagctattgaccgatagatgaacatggagcaaccagaagtttattgccaacagtgacctctcagttgttgctgtactagtctgtggtcattcatatcatgcagaatgtttagaggctatgacatcagaggcagataggtatgatccagcatgtccaatttgtatggttggagataagaacttgtcaaagttgttgtccagaaaaggtcttcgggctgaatcagagatgaaggccaagaaccacaagatatccagaaaccgtgtagttgatagctaccttgatggtggttttgatgtttttgatcgtcaaaaagatatagatttgagaggaaaagtgtcaaaaatg

SEQ ID NO: 33167 - DNA, 441 bp, Glycine max
  Clone ID: LIB3051-111-Q1-K1-B3
gccacgcgttcgcattgatctatctaggtgctctctctaaatctaacgatttcgtcatccgacagcgatctctgcgtctacatgatcgacatgaacgctcccattttctaaacctcagagagggatccagctaacagttgcttacggctgaaaagttgcttgcccacagatctgatgcgcatacgtgcgaaagccattataacgcatttaatggcagttcacggtgacgatgaccctgcggagatggatgcatccaacctatggacgatcaacacctacgaagctgtcggcaacggtggcaccttggaccgaatgcacaatggccaccgcctattgctcactggttcagcggagctagctaagtgccggattgtgataggagactgcgacggacctatgctggctatggaaacagtaacgagcatggagattaaactctat

SEQ ID NO: 33168 - DNA, 439 bp, Glycine max
  Clone ID: LIB3051-111-Q1-K1-B4
ggaaaagttacggtctaagaaagggctgcgttaataactatttaagagtctcttaactagagaaaggcaaactcatatatgagtaaattcatttcatttgacagaacaatcaaactcaccctgatcctatcataccttattacaatcctcactgaagacacatggacacatatatcgcctttcacggtttccagacaatcaatcatagccattagcaaccatcccatcataaaagataaaacattattttctgaagatgaaaaagacatatgtacgtattaataattatatgtaataattaattattgtgtatcacaagtttataaactgatatttcattatcttaaaagaaatatcaatcatcatatacgtgactttgtgcggataagtatgagaaactgatcgaaacgtgtcacatgatgatagatggattaacaca

SEQ ID NO: 33169 - DNA, 434 bp, Glycine max
  Clone ID: LIB3051-111-Q1-K1-B5
cccacgcgtccggaagtccaaaagaatattgaggggcttgaagactctcttcttcttgatgactatggttatatcgcttcttcttttctccgccccggttctccttgttattgccgatgcacttgttccttctgctctgctctcctcgctttctcaatcttctttctccatggaaactctcgcttcccatttccacaactacgattttcgatactctctcattgatattccccttgtgtcaataatacgatccttcatcatcttctgtaagtacatatactcaaattcacagtagtaaattgaaatcagtagcggaacatgtaattatatgaaaagttcgtcaccaaaatttggtgattctagaattagtgaaggaaattaagtttccgtcgctaaatttggtcgcctaattcattatttttctagtattaagt

SEQ ID NO: 33170 - DNA, 433 bp, Glycine max
  Clone ID: LIB3051-111-Q1-K1-B6
ccccaccaaaactcaacacaacaacatcactcttacagcttccgaaccctccatcatggccgtgtcaagtccacacatacaaagattcctcttatgcaagcttcatagccgctccaccggcaagaacagacacagaaacagcttcaccggcacaaccaccaccaggagcagttgctgctctgccatagccattgatgctccgtcgtctttgaccgaagtgcccggcataagatgggggtccatagccttgcaaggtcttcgtgaagagatggaagatgatattattggtcgacctgagggccttcaaggcttcacttttgcagctgtgtttgatggccatggagggttttcttctgtcgagttcctcagtgccaactacagggatgagctgtacaaggagtgtgttgaagctttacaaggtgggttactatta

SEQ ID NO: 33171 - DNA, 444 bp, Glycine max
  Clone ID: LIB3051-111-Q1-K1-B7
aaggttaaaacgttacgtttaaacctctctgcattgcattcgcatatgatccgttaacgtgagcaacaacgatggatgattcgaagcagcagcagcaacgaaaaaaaaactaccgaaagagaagcgctccaacagacgaagatgaacttcctcaatctcaaagtaacaatgaatccgacgacgaacgagaaagaagaatggcattggaggaaattaagctccttcagaagcagcgggaaaggaaatcgggaattccagcaaaccctagtttgcaggtgcagagtggaaccggcggcggtttagctgctaaagccgccgaaaagaacgatggcgatggcggcgacaaggacgagctcgttcttcaagacaccttcgctcaagagaccgctgttatggatgaagaccccaatatggtgaattatatcgagcacgagttagcgaaga

SEQ ID NO: 33172 - DNA, 331 bp, Glycine max
  Clone ID: LIB3051-111-Q1-K1-B9
cccacgcgtgcgcccacgcgtccgatataatactagaaattaagttagtagtaacttgaggttagttgctataatgccccctgataaattttacctcaaaacgcaactttctccgtgcagtttcacccgtcacaacacactcgagctttttgctgtaaaaggccggtgctggaattgtgttcccttctctgttccttgttaatagcgtttgtctatataggaaaaatccaatagaagtgaaaaaaaggttgagaaagtagaaaaaaaataagacatgtgatctgtgaaatagtttgagagaaaaagaatggtgcagcaaaataagcaaatg

SEQ ID NO: 33173 - DNA, 440 bp, Glycine max
  Clone ID: LIB3051-111-Q1-K1-C5
aaaactgttcatgtgctttttttacccaatggcttaagctttcgtgatggttggttgatagtagactttattattgacccaagggaatttgtttttcaattaatagcttccatatcatgtatagaagttctctttcttgtatagtatctgatgtttttgtaaaaaatggtttccttggagcacaggtgtgacgatcgaattcataagattcaaacaattaaaatgatggaaggaatcctcatttgtgtggctcctcattgtctcaagtctttcttgaagaaagctgattttgaatctcatatccaagacagccacggcagccttcttcgacccaatgcagataaagaagatggaaatgagtcggaggcacagagtgttaggcaatcaacggcttcagattccactgctcgcggtccccaaagaccagttttttctcctgg

SEQ ID NO: 33174 - DNA, 385 bp, Glycine max
  Clone ID: LIB3051-111-Q1-K1-D11
gcaggttttgatcaatgggttacaccattttgtgtcgctgaatgtgaagcccaagctgcaaatggttgagactttcatcaaggcttactaccttcccgagacagaatatgtgcactgggcacgagcacacccggaatacagtaaaagccaggttgttggactggtcaaccttgttgccactatgaaaggttggaagaggaaaaccaggttggacatactagaaaagattgaatgagcatgtcttttgttgtgtatcaagtcaggcaaatagaatcttctgctctttttcccctttgtctttcttttttggcagagcttcgtgtaaaggtagtgtatattgcttggcatttgatcccctattaattatggagtattttccaaatct

SEQ ID NO: 33175 - DNA, 371 bp, Glycine max
  unsure (1)..(371): unsure at all n locations
  Clone ID: LIB3051-111-Q1-K1-D12
cttctttgtttggcttttgaagtttgaacagtatttgcctatttggtttgccgctccgaatccggatacactcactgttggtgactcataaaggcaccgtctttggattctcttccacttcgtctctgcgacgcanaaatgggtcgaaaacgagcttccaaaaacagcgacagggttcaagcgttgcctactgttgtggaaccacagccttccaatggaaacatacaactgccaagggcactagaatctcagcttgaaatcccactccctgggcttacctcaccgaagcatccaaatttgttggtgggtagagcggaaatgcgtcatgcaaaaaagcccgcgcangagcaagtgaaccaagaccatgggca

SEQ ID NO: 33176 - DNA, 434 bp, Glycine max
  Clone ID: LIB3051-111-Q1-K1-D2
ctccctcctcatcccttctctactccattattcacacaacttgcaactcttcccggatccgcaacgccatacctcagatctgtacgtcgtcgtttctatctacctcttaccgtttccgttcaggattaataatttagatcccctgatgttgcaacagaacaaggaatcttcttagattctttttctgcgtttattagcgtttcacaaatagagagagagaaacagaaacagaaacagaagaagaaacttttcttatttatatacagtctctgattgatcggtttttcggaaactctttttccgtgaaatccacgcgcgcgcttcggttatggatttggacgatttccgatccgtattggacaccgcgggcgtcgacgtgtggatgttcatcgacgccgcaatcgccgtcgcctccgcggattccgccggtgagc

SEQ ID NO: 33177 - DNA, 449 bp, Glycine max
  Clone ID: LIB3051-111-Q1-K1-D3
gcccgattccagattgcgaaattccgatggataaaacggtgaaagacaactcagcgtggagcgacatcgttttgcagggggtcatggttctggtgatggtcctctcctacttcttgatgcacgacgtgcccaagaagctgtgggccaagctccgtctaagcaaccgggccgacatccaagccaagcgccacttcgtccaaggggcccagctcctggcccgggcccgcgcctgcaagtccaaggccctcgccaaggaggcccaggcccaggctcagcgcgccatcgccctctacccgagcgactccgagccgcacctgctcaaggccctcgacttagacttcctgggcctacgctccgctgcgctggactcgctcgacgaggcgctctaccccgccggcgcgaagtccctctcggactcggagcgcggcgacgcgctcctcaagcgcgcc

SEQ ID NO: 33178 - DNA, 197 bp, Glycine max
  Clone ID: LIB3051-111-Q1-K1-D4
accctttcttaggttataggagggaactcatgaatccagaaaaatttgtcccaaatttgggggaatgtttttgggtgattttctattgtaggaaaatgaatacataacacaagttcaattgagtcacaaaatgtggttttactctagcccattatgaatgttaattacaaaaaaagaagaaaaaaatcttttatttt

SEQ ID NO: 33179 - DNA, 432 bp, Glycine max
  Clone ID: LIB3051-111-Q1-K1-D7
cttgaagggtaagtggcatattgctgatagaaggaattaaaacataaaaactgcagtaaccaaaaaccaaacttataaaacatagggaccaaaaggtccaaaaccaaatttgagtagactatagggataaaaaatgtatttaaagtttaaacctataatttatattcacctctctatattttagaagtatgtgggtgtatgttagaaaactattggcctgtttgttttaaagttgggtagaattataggcgttaacatactcagcataattgggatatgtattcaaattactgtcacaaatttttgcgcttggaacatgtgcagtgtgggaaattgattcttgggtgtaaaacaagtgggtgtatttagcaatccccacccctcttcctcttcccccaaaatgctaaaacacaaactactaaatctttcagt

SEQ ID NO: 33180 - DNA, 441 bp, Glycine max
  Clone ID: LIB3051-111-Q1-K1-E5
gcattccaatgtcctggttttcaaaataagaattggagtttttctttttgacactagtatgggggtgttctgtttgtcctctagagtctagacgtaggttggttttcttgagattgacaatacttggttatctaataggatgcatcgtaagaatggacagtttgcatcattgaaggaagactacaaatctcctgctgaaaattgggattcaagcaatggtactccttgcccagactctactgagcgtagatgccagcattgtggaattagtgagaagtctactccagctatgcgtcgaggaccagcaggtccaagatctctgtgcaatgcctgtgggctcatgtgggcaaataagggaactctgagagatctcagcaaagcaggaaggattgcttttgaacaaaatgaactggatacttcagctgatataaagccttcaac

SEQ ID NO: 33181 - DNA, 439 bp, Glycine max
  Clone ID: LIB3051-111-Q1-K1-E8
ccacgacccgcgacggcggtggtgtacgaagagagcgagagcaggaggtgagcggcgactgtgtccgactacagatatcttcaccacaacagataaaatgaggtacatgaagcccttgccattgtttcatgatttgaagaatacaactcctcagcgcggaaggttgcttggtttggatgtcggggataaatatgttggccttgctctttctgactttgataacaatattgcttcacctttcaacgttctcgtcaggaagaagacaaatattagtttaatggcttctgatttagagagtctgattgctaaatattccttgaagggctttgttattggcatcccttttgacaaacatcaagtgtcttctgatgctatgcaagtgaaggtcttcattgataacctctgtagaacaaaaatgcttgaaggtgtaaagtataca

SEQ ID NO: 33182 - DNA, 338 bp, Glycine max
  Clone ID: LIB3051-111-Q1-K1-E9
cccacgcgtccgcccacgcgttcgaaacaaaaccctaacttgtgattttgaagatggggcgaagaagcatgcccacgctgaagaggagggagttgctccgcttacttcaccaacactatccgattccgactctgattactaggactcttcagccgatgatcaccacgaatcttctgtctggctggattctcaatcccgatccgaattagaagacgcttcacctgaaaatggtaactcctgactcgtaaaatctggagcaaatgaatcatctcaatacgacgacactgttaatggacaagacggttgtagtgagagctctgatctgcatctggaatgag

SEQ ID NO: 33183 - DNA, 327 bp, Glycine max
  Clone ID: LIB3051-111-Q1-K1-F11
ggagaaccaccggtgaagccctaacgctctggtctactgctccgatcctgttaccgtgcgtctggaacccggagacgcgggtacctacttctactacctcatggagaaagaagcgcttcttctcagaacctccaacgggcttctcttgctccacaacgtcgacgacgccttccacgctacgcaagtcgatggcaagctcgactgcagcgtcaatgcagatcacctcagccctgaccgaaaactactccacgtaaccaccggtttcgggcaccttatggtcatgactcacgattgcgacatgttgtacgaaacatgactgcacgatga

SEQ ID NO: 33184 - DNA, 430 bp, Glycine max
  Clone ID: LIB3051-111-Q1-K1-F2
tacccactttcccttcttcttcttcttggtcaatttgggttttctcaaaagtgaaaagcgaggtgcgtcactgccacaatcaccacttagatcagtgatatacacacccatctcagaaaccccacaagaacaaaaactcagaactcttgagtgatagacttcgaatgaaatcctgtttttcattagtgagattcaattgaagtgaagtgattattcactggaaaacttatttttcatacaactgaagctgttagatttgttttaactacacaagtttgttggatctttgagcatggctgggaatcaagatcagttcgagatcaagtttcggttgactgatggttctgatattggccccaaaagttttcctgcagctactagtattgcaacattaaaagagagtgttcttgctcagtggccaaaagacaag

SEQ ID NO: 33185 - DNA, 431 bp, Glycine max
  Clone ID: LIB3051-111-Q1-K1-F5
gccttttctgccccataagattgaacaggatgatgatcatatcaaaacattccagtcgtgggattcagataaaacatccagaaatggtgatgtgaaactgtttgggaagatactaaccaatccttcaaccacacagaaacctaatgtgggtgctaaagggagtgaagaaaatggcacccatcatcctaagttaagcagcaagtcttctaatctgaaatttactggccatcatagtgctgatggaaatttgaaaattttgaagtttgaccataatgattatgttggccttgaaaatgttcttgaaaatgttcccatgaggagttatggttattgggatgggaaccgaatacagactggtctctcgacattgcctgattctgccatcttgctagcaaagtatcctgctgccttcagtaattatcccacatctt

SEQ ID NO: 33186 - DNA, 336 bp, Glycine max
  Clone ID: LIB3051-111-Q1-K1-F6
gttcgcagtggcattgtgtacaacgtcgtcgttcttcccttcccgttttgaaatgggcagggcaaagcagcttcagcttccacctctcctttcaatgtcactgtcgtcgaagctaccgttgcatttctccggcaatgccatattcaaccgcaaccacccaaccatgttcaaaattcgagcctcaaactcttcatccaaactcgtcttattgagctccactatcgtcgtcacaacagcggtagcgaatcgcgtgctctacaaattggcccttgttcccatgaaagagtacccctttgttctcgctcaggtcataactcttgggtatgttggtatata

SEQ ID NO: 33187 - DNA, 442 bp, Glycine max
  Clone ID: LIB3051-111-Q1-K1-F7
ctttgagcttcaatgaggtccttcaatggtgattttccaccatggagatgcagcagaagacgaaaggagaagaggtgagaggaggcgtcatctactagggaataagccatggaagaagaagcttcaccacaaagaatgtgccttggataagaagcttgaagaggatgctttaatggaggaaaagaaagagagaaggggggagcacgaaattgaaggaataaaagagggagagaagtggaacttcgaagtgtgtctcataagactttcattcatcaaagttacaacaagtgttacacatgcttctatttatagactaggtagcttccttgagaaactttcttgagaaaacttccttgagaagcttctttgagaagctaaaccttagctacacacacccctctaataactaagctcacctcagtctcgtgctgtccacataaca

SEQ ID NO: 33188 - DNA, 301 bp, Glycine max
  Clone ID: LIB3051-111-Q1-K1-G12
tccacgcgtccgaccacgcgtccgaaaaaaaaacaactacaaaaaaaaaaaaaaacggggtaccggacaatctagacgatcgaatcttaggctcacatgctttcgacgtcataactactcaatctgattcctaaattcatttacctggccgtcattctacaagattaactctgcattaaacccttgcgtgacccaacagcatcgaattactgaaattgccatttacttcagctagcgttaaaacgaatacgccttaaccgatattccttgccaacagttacgcagtctcaattgcgaatga

SEQ ID NO: 33189 - DNA, 433 bp, Glycine max
  Clone ID: LIB3051-111-Q1-K1-G2
cccacgcgtccgcaaatttcctttgttgtgttcctcacacacatgagtgtaggaacaacagcgtttgggcattgttatgatggagaaccagaatctttctttgccaccccacgtggacgcatctcgaccgtcccttgggttccctttgggcactgtccttctcttgatcatcatcttcaccttcagtggcgtcctctcttgctgctaccattgggatagggtccgttccttccgtcgttctttctctcattccgacccccaaatgccttcctcacccaccaattctaagcattccaaggaatcgaaggaaaacagggggcaaagcttgccagtgttgatgccaggggatgaggtgccaaagttcatagccatgccgtgtccgtgccagccttcaagaccagaaaacatcgttgtcaccgtcgaaatggagaag

SEQ ID NO: 33190 - DNA, 429 bp, Glycine max
  Clone ID: LIB3051-111-Q1-K1-G3
gattcctactagagattactgttttgctgcttcattgaaggacattttccgtgctgtggaggtcatacatgaaaatgcattgtctggacgaactacatatgtccattgcaaagctggacgtggtcgtagcacgactattgttatttgttatctggtgcaccacaaaatgatgacacctgatgctgcatattcttatgtgaaatcaattcgaccaagggtgcttctagcttcctctcagtggcaagctgtccaagaatactactaccatcttatggtgaggaggaccgttggatgtgctcctacagccaatctatttgtaaaaacttctcaggtggcagcaggttcacgagatcttgtgatgtttgatgacaattctgtagtcatggtaacagagtcagatctagaaggttacaacccaagtagtcaatc

SEQ ID NO: 33191 - DNA, 383 bp, Glycine max
  Clone ID: LIB3051-111-Q1-K1-G4
agataaattgaagaatgtatcgtcttcatctgaaaatacgaatggctgcacagaggattctgccttgtcaagtgacaagtctgcaccttcactctctggcagcaccaaagtggtttctgactcaagtaacacgtattcaactgcagtagaacgggtcgttgtttactcacgcaagaccaatgtggaaattgaagatggtggcactatattgccgattagcgatgacaggtgggttgcttactcatattctcattgagatagttggaacagttgcaggctctcctgtgtcatattttgcgtctctctccgaattgatttgtatagaaggatttgactcccggtaaatttagaaaacaaaacgtggaacttgtaacctattgatt

SEQ ID NO: 33192 - DNA, 439 bp, Glycine max
  unsure (1)..(439): unsure at all n locations
  Clone ID: LIB3051-111-Q1-K1-G8
ctttggtaagccagaaaacgaggttgtgacatagttcttgaggaagcattattgcagtatgagacgctgatgagagattgttctcactgagattactattttatagtggagagttctcagaatcgtgctaatgtttatggtttgagcatgtccatgggtgaccctaatcaggtatagttgtattgtatgatatataataaactttctggtaggttagtttttatgagatcttattatttgtttcactgtttcttgaaagcaaaggcaatctctaatgatgtccaaaatgtttggaatatgcttaggatttgaatcctcaaactatatatatgtcctcaagtcaaaaaaattgggcatctacttgtgctctgtaaagacatctcctcatgatgttttattcatttagatctaattngtggaaaaaataataaattaaaaa

SEQ ID NO: 33193 - DNA, 371 bp, Glycine max
  Clone ID: LIB3051-111-Q1-K1-H12
cgcacgcgtccgcccactcttccctcttttctttctttcatccccaaatcggaaccgaaattcccaccttcaactttctcccccaaatcgaccaccaccactgtcaagcccattcatttatattttattcgtatatatacatacagagagtgagtgagagagagagtgggaagaatggattcggatcaaggcaagcttttcatcggtgggatttcatgggatacgacggaggacaagctcaaggagcatttcggtaactacggcgacgttttgagcacttccgtcatgcgggagaagaacactgggaagccaaggggctttggtttcgtcgtttttgcggatcctaacattctagatagggttttggaaga

SEQ ID NO: 33194 - DNA, 445 bp, Glycine max
  Clone ID: LIB3051-111-Q1-K1-H2
gtgaaatgaaaggatgatatggtgatgtgtatggtctctgaattcgaagacagaggaagaagggaaataagataggaagggtatagaccaaattctcattaaaatttgtcaatcaatacatggccaaatatatctcagtcacatgctcactattctaactaactgcccaaaggaatctaagaattgatcccctctaacagaatacatgataagagccttctagaataagctgagtcactctccctattattacaatatcagatatctaaaagctaatgataaagcacgtaatccttcatctttttcggtgtaagaataatccttttgggcctcaactctgcttcagtggcaatccgtccactctcctcaatggcctgtacttgacaaatgggctcagtcatagcatgtggaaaaaatataatctatagattctaatcaatttaaa

SEQ ID NO: 33195 - DNA, 430 bp, Glycine max
  Clone ID: LIB3051-111-Q1-K1-H5
cccacgcgtccgcccacgcgtccgcttattttgtttttagtatttggtttttgtattttataaccctagttttgccatcagagacatttgaatatgttaggattgatgatttttcttgaatcctgattgggaacatcaacactgttgcgccttgagtcgattcgcgtctctttttttttttttttcattttttgtgttaatttgtggctgatttattttgcgttaatatctaattggatgctttgaattgataatttgtcgtacgaatttccttaaattgatctcggatctttgttttccacattatataacctttggtaattagattttagaaatttgcaaattaaatagaggaagtggagaaattctattagtaattgtcttttaaatcagttatggcggtaagagaaatgaaacaacacactctttg

SEQ ID NO: 33196 - DNA, 439 bp, Glycine max
  unsure (1)..(439): unsure at all n locations
  Clone ID: LIB3051-111-Q1-K1-H7
cccacgcgtccgctctagtaagtaaggttattgcttaatgaggaatacttttgctttcctttttgatggaaagaaatcttacttctagggaataagtctacttttatttttcgacaaatattaatatttctagcatgatgagagattatttggttattatgaagacattataatttttatttatagtctattcctagtttaaatggaaaacagagtttgcgtttacatggtaggtaatttacagtttacaattgcatatagttgtatgtgaatgctaaatcataaaacgcttatttcttgattcatgggggttttcacacttggtgtttgatggagttgtatgtagcagtgatactttctgaattattgacagattangaggaagatagacttattcgtattacagagtaaaaggaaaactcatactgaaaggctgatt

SEQ ID NO: 33197 - DNA, 285 bp, Glycine max
  Clone ID: LIB3051-111-Q1-K1-H8
acgtacgcgtacgcattcgcaattgtggacgcccatggtgcaagtcactaccatacaagggggaatggttatcgcatacttggcgaaatctcagctgctctgactcatcgtggaatacaatcatcaccttgcactgaaagtatacactgcatctaacatatatctgtatactcttgcatatttatcgaacgatcactggcatcaaatatcatatgccaaacgtgtataacatgatcacagctgattcaaacgccacactgacacattgtcttcaaagaaagatga

SEQ ID NO: 33198 - DNA, 379 bp, Glycine max
  Clone ID: LIB3051-111-Q1-K1-H9
ggttttctctattttgggtagctgggccaacttcttgaccctgttctacataggtaatgaagtggttctttatcatttgacatttactgccatggaggttctaatattaacttgaattttatatactgcgatgtaatgtatttctatgttttcgtgaaacagcttttgttttgctgcacactgtgcctgtgctttatgagaaatatgaagatcatgtagactcttttggtgggaaggcaattgccgagattaagaagcaatatgcagtgtttgatgcgaatgtgttgagcaagatacccagaggacctttgaaagataaaaagaaagattgaagtggcactagattctgacaaatatgttttagtggggtttcatgaat

SEQ ID NO: 33199 - DNA, 410 bp, Glycine max
  unsure (1)..(410): unsure at all n locations
  Clone ID: LIB3051-112-Q1-K1-A11
cggagttgaagccagagtggttggtggagatagccccccactattaccagcttaaggatggtgaagactcatattcgaagaaaatgcctcgtggagcaggacttccatcgtaggacagattgttggcatctttacatatgctttgggaggagaaagtacttttatcaagtcattttggggggataaaaaagtgtcattcttaaacatgggagacgtattgtaaatattttttcgccgtaatttatactatagcatgcatattatatcttgttgaaattagcttagcctgtagtaaccctcacttgctatagtagctctcccttggtgagtggtgatatcatttacatacaaattntgtcatctaagtttcagtttcaatttttttgtaacaagtgccatctataattcaa

SEQ ID NO: 33200 - DNA, 387 bp, Glycine max
  Clone ID: LIB3051-112-Q1-K1-A5
ggtggtgcaaaattatcttaaaaggactggtcgtgaagagtgggcaagacagtttcgtggagctgctaagcagaaggatgatactgccatgatgaagattatgtcaaattacggtgaggaagtagttacagctttaggaagtgaagtagataggttagagaaggagatccagaatcttgtgcctggtattcggcatgttgatattgaggcccacaatccttcaacagaaacaaccttgtcaagtgaaagttttcaataaaatcgacactctcttcacattcatttatattatcaaagcatttatgaaaaattgatttgggtttatccagtatcacgagttctgaagaaatccggagttgagttacatgcctcgggttgagtcgacac

SEQ ID NO: 33201 - DNA, 253 bp, Glycine max
  Clone ID: LIB3051-112-Q1-K1-A6
atctgcatcaatcaaccatcatcataatcatgtcttgctgtttatcttgctgcgcgtcttggacctgtggtctctggaacttcacttgatcttgcatctcccaaaaatccgctagaatcgggtactggggtctcttcggtgtctctctcggtcgttcgtggatcctcacagaagttggagcacccctcttggagaaattcccatggataggtggcacattcgataccaacacaacggaatggtatcaagcaca

SEQ ID NO: 33202 - DNA, 280 bp, Glycine max
  Clone ID: LIB3051-112-Q1-K1-A8
gctcagtgctcctgtcaacatcctcaatcacgagcagaacgcccaatccatgaaattagggaagtgtgagaataagggtttgaaacaattggagttgaattctttaacctcaagtaatcagaataataatggtctggttgcaaagtttacaagtaatgcttctacagctaatgctcctgcagtagagtccaagcccagagagatggtgccaaagaacatgttcaaacatgccgatactaatggagttattagtggaaaagttgctaatggaaaagtcacg

SEQ ID NO: 33203 - DNA, 155 bp, Glycine max
  Clone ID: LIB3051-112-Q1-K1-A9
cccactcgtcctcccactcgtcctaaaaaaaaaaaaaaaaaaaaaaaaaaaaaaaaaaacggacaatatcaaaaactaataactcacatacacatacatacaaaatattaaaataattatataaagtaacctatattaaattaactctaccaaca

SEQ ID NO: 33204 - DNA, 302 bp, Glycine max
  unsure (1)..(302): unsure at all n locations
  Clone ID: LIB3051-112-Q1-K1-B10
tctgcctgcgaatgcctacttcaactatcaggttatctggagaatcaagcaaatgtagcntatgccttgttgcggtgaagcattcagtctacggctttgagaactggagttatgttttataaccttggtgcctttttgcttgagcttggtctcacaaccatgacactgcttttggttcaaacatcttcttaagctgtatttaatggtggtcctacagtttttatattcccaaatggtcctatccatatcatggttcagtccctttctttttaacctgtggcattctttgttgatttccctgt

SEQ ID NO: 33205 - DNA, 453 bp, Glycine max
  Clone ID: LIB3051-112-Q1-K1-B4
ctgaaggcaaaggagagggtgttaagtctgaaactgacagtacatctttaaaggttttgcgtccatggatgattacatcaggtatgaatcttacaaaggaacaacgtggagaggtgaagcaagaaacaaagatggatgggacttcaacttccacagcagcacagtacacagatgacaagaagtcaacaattggacatgacaacaatcaaaatatacaggatgagtatattaaggcttattatgctgctttacttaaacaacaacacgaattggaagaagctgcaaaaaaacaattgtcaaatacacttgctgctgctaatccttctagcagtacttccattcgccaggttggcatgaaatcaaaacgtgaggaagacgatgatgatactgaatgggaggaagctccaattgcaggcaatggaaatggaggttacacggttgatttgaatgttg

SEQ ID NO: 33206 - DNA, 434 bp, Glycine max
  Clone ID: LIB3051-112-Q1-K1-B7
gtcttagacacatatatggctcgacttgtattgttcttctcagcattttctcttgtcctgctaaattctactatcacggcacaagtcccagcaccaccatctccttctacaattccatccccaatgtctcctttggcaccttctacaccaccaccgtcccgttctcttcctgctcctccaacgtctcttacgccaccacttccatctacagattccgctcccactcctccaccacctattggatttggaggaggtggtggaagtggaattggaaaaggtggtggtggctcaggcgttggaataggctcaggaagtggtagtgtggcgttcaaggtggtggtggacaaggacgtggtgttgggataggaagtggcgttggcagtggtaccggctatggtggcggtggaactggcattggcagtggtgacagtagt

SEQ ID NO: 33207 - DNA, 447 bp, Glycine max
  Clone ID: LIB3051-112-Q1-K1-B8
gcaagaagcatataaaggtcaaattgttggaattatctactgtcacgtggccactactcagagagtcgggcaagaagtttgatgtgatatttactcctcaccatccgtatgctcgatggttggcagaaacaaatgcagtgaatgcaacattgccagaagtggtgctggttaggagaacccttgcttggataacaggaattatattgctcgtttcaacccttatggggatatgctacctcctgaatatgccgctcacaagggacacccttctatattctaatgtcaagcttgattaagcatggatgcgcaccaagacaaatcttttcaaccaacgaaggagaaccggtctgccgctgaagcttgtaattgggggagtctttttcttgatgcctctaatccgtgtgcatgattatattattggtatagcttttggtacttgtgtttaat

SEQ ID NO: 33208 - DNA, 366 bp, Glycine max
  unsure (1)..(366): unsure at all n locations
  Clone ID: LIB3051-112-Q1-K1-B9
tcggccggcgaatgcctacttcaactatcagggcagctggagaatcaagcaaatgtaacggagcccttgttgcggtcaagcattcagtctaaggctttgagaactggagttttgttttataaccttggtgcctttttgcttgagcttggtcgcacaaccatgacactgcgtttgggtcaaacatcgtctgaagctgtagttaatggtgggcctgcagtttttatatccccaaatggtcctaaccatatcatggttcagccccttccttttcaacctgnggcaagctttggtgctgtccctgtgggagctgcacagtctaactcaagttangtagtggacttgttcaagctttttcccaagcgtata

SEQ ID NO: 33209 - DNA, 445 bp, Glycine max
  Clone ID: LIB3051-112-Q1-K1-C1
cccacgcgttcgctcacgcgttcgcccactcgtccggcttggcttgcgataccataagagggactgtctattatacagtgagtgagtgagtgaccctttgatttgaagaagatgggagatatgggtcagaaggcccaagaagctaaggagaacacgaaaggggcggcccattctgcaaaccagaaagcccaagaaaagagtggtcaaactaaagaaaaggcctctgagataggccagtccaccaaggaagcggcccatggtgctactgaggctgtgaagacaaagactactactacccaacccagcatcgcatagaatacaatactagttaatttcttcaatatatagtttaaacactctatgttgttcaataagttgtggcttcgctcttatgtgcccaaaagagagcgtggaatgtactctactgtagagtttctattatcta

SEQ ID NO: 33210 - DNA, 325 bp, Glycine max
  Clone ID: LIB3051-112-Q1-K1-C11
tcttcctcatacacatctatcgagaacaagactgcattttatctcaccatcccatatactgggactagatatatcatcagaggagaacatcttcaattcaccaagaattatcccaaaatcaatcttcttttcctcatcccatatatatccaagcatcagactaattttaaaagaactaaaattataaaacattcaaatcatcaaaacccgtcattattccataaacttatcaactcttaacattcaacttcacaatttaaaacaactttcattctcaacgtacatacaatcttttaacctgtaaactcaaattcgttgactccta

SEQ ID NO: 33211 - DNA, 372 bp, Glycine max
  Clone ID: LIB3051-112-Q1-K1-C12
cccactcgttcgattccttctctctttctcctgcaacaacaaccatttaagggatttcgggatgcgtttctgcggtctgttgattgtgttggtttgttgagtgtggcgttaacgtaatttggttttgagtgaagatgattttgtgatgtggttgagtgagtggtttttgtagtggaaggtttgttacttttgttgttgttgttgttgttgtgttggtttattttgttgaagagttcggaacatagtcggcggacgagaaaaattggaatttttggatgggtaataaacttgggaggaggagacaagtggtagatgagaaatatacgaggccgcaagggttgtataatcataaagatgtggatcacaagaagc

SEQ ID NO: 33212 - DNA, 304 bp, Glycine max
  Clone ID: LIB3051-112-Q1-K1-C2
cccacgcgtccgctagtgctttgttagttcacacactaagttctgaaaaatgagttccagagtctttcttattctacttatgttcatggccactatacttttgatctcctctgaggttgcacccgatgatgcataccagaattttgacaaaacagatgggaagcgtactgcaaatggggtagatgaaagcaaatattggcgtggtggctatggcgactatggtggttgtcgtggtggtggttggcgtggcggctatggatgctgtcgtggtggctatagtggtactcgtactagctatggtagc

SEQ ID NO: 33213 - DNA, 232 bp, Glycine max
  Clone ID: LIB3051-112-Q1-K1-C3
ggggcggtccctgtcgtggtggtgccggttgtctctgaggaggttgccatcaaacctaagggcagccctaacaactaagaagaaaacttgctaaagcttctttacggttttaggtgttcgcaataaataaaacttcatgagatgtgtacttgcaataaaagtggaagtctctcttctcttgagatataaacgaataatagcgttatatatgtaaaaactatcattgttatcc

SEQ ID NO: 33214 - DNA, 469 bp, Glycine max
  Clone ID: LIB3051-112-Q1-K1-C5
cccacgcgtccgcccacgcgtccgcccacgcgtccggcaaagcaaaaactactacgaggagctttcctccatacgaatcaaaggaggagagagagagagagagagagaggagacacagacacaaaggaaacggaaaaagcaacacacaaaaaaaaagaggtctgtgcctcctcttatatgtaatagctagtttccgagacaagaaaaaaaataaaagtaaaaagagaacatggattatgaaaacaacagttggatttgggagggggtaaactactacccgtgtgtgtttggcggtctaatggttacagcagccttgctgggcttgtcaaccagctactttggtgggattggggttccttatttatcgctgccatgttcctggtctaatttggggattttccaccagaaaaaatctgggaagaggcgcattcgggtgtacatggatggctgttttgatctgatgcattat

SEQ ID NO: 33215 - DNA, 427 bp, Glycine max
  Clone ID: LIB3051-112-Q1-K1-C8
caattctcaatcttatgaagaacaacaaaatatagggtaattttccaccttcttcgctacggaccataccataagggccccctttcaacgcatgctttccctcccaaattcttcacctttctcccctctttcccttcatttttctattttcttacatgttgttgcatccgtgccaaaaggggtttgttcctgcacaattaaattcaaccccttaggctataaaaaaaaaagatttttcattttcatttctttggaaggtttcaataataagaagcccttgattctagaagaaaaacattgcctccatgtccacgattccaattcacagacctgaattttgtaccttattcttcaatgggtcttcaagcccttataaatgccccagaattactggctcatggatcattgccatggaattcaaattttc

SEQ ID NO: 33216 - DNA, 370 bp, Glycine max
  Clone ID: LIB3051-112-Q1-K1-C9
gaaacacatgtatggtgaacaggaatccagctgatctcaccataccagaaacagggaatggctatatgatcagaggagaagatctgaaattcgagaagagttttcccaaaaacaagcctcgtttccccattccatatggatccaagcagcagaagaatttgaagggaactaaaatgaaagaacattcaaaacattgaaacccggcattattccataaactggtgaagtcttcacatggaacttgagaatggaaggtgactttcattctcagcgtagaaacaaacttttgacttggaaactgaaatttgttgactcggggaagggttgatcggatgtcatttcgaaaaccgagtgatacataaatcagtca

SEQ ID NO: 33217 - DNA, 435 bp, Glycine max
  unsure (1)..(435): unsure at all n locations
  Clone ID: LIB3051-112-Q1-K1-D1
gtagtattgcagtttattctatcatatccttggtcaaataattntcttttcaattacaatgcaccgaatcccagaaacttatgttcatgaccatcctcaaggtcccaataacatttacttgaagacaaatttgagttgaccttacagcctagttccacctacatacacncttgatccttcaaagcctctcatagttccaatactggcaacaataatactcttgggcatctaaactatctccattctgtttttccccctttctttgcagtnggattgcgaggttttaaagaaattaaatgcgtttttatgtgctaaagagctaggtaaatatagaattcatctcacacatacttctttntactaccttttatcttttagattttattttgaaataatccttgttaatggagtaacttaattcgttgaggggttgtg

SEQ ID NO: 33218 - DNA, 181 bp, Glycine max
  Clone ID: LIB3051-112-Q1-K1-E12
actctcaaatcaaacgtattcagcaatcagctcttatactcctgatttccttatccagggtaagtttctcagcaccctttgccaaaacatctaaccaaatcacacaaatcaaacttacaactcatactcaatcgaatcaactactctcatcaatatgcaaatatacaaattcatacagtct

SEQ ID NO: 33219 - DNA, 198 bp, Glycine max
  Clone ID: LIB3051-112-Q1-K1-E3
tgtataatcatcaccactttatctatacataagacctgcctctaataacctggtacccaacggcctgactcttcaattctttttaagccaaatttttaattcctaaactggtgtttaaaaccgtataaaaaaaaatctaaaagacccttacgcatatatacaaaacaaaagataactgcatctgcatgggaagtgtat

SEQ ID NO: 33220 - DNA, 337 bp, Glycine max
  Clone ID: LIB3051-112-Q1-K1-F1
aaaaaaagatgcgtattaatatgcattggtggcaacagcactaccgtggcagctaccgcggctaggccatgcatgcgcagcttccgccgcatcagaggccccgattgcggcattctgacaggctacgtcgcgttgagcaccgacatattgaccgagctatgcttcgctctcttcgacgacaaccctgcttactttatcctcatgctcgccctcatgcctttagccgttagcctctgcagaatgtgtttactccgcgagattcctgccgtcgacaccaacgaccacgaacagtctacttatgtctcggttgttaacgcggttgccgtagtcgtcagcg

SEQ ID NO: 33221 - DNA, 433 bp, Glycine max
  Clone ID: LIB3051-112-Q1-K1-F10
cccacgcgtccgctctgtctctgtttttgttttcgcatacataaaggagtcctgcttcggcacacgaacaacaacaacgtaggttttgttagttccgtggataacaacaatggagccagtgttggacaaactcaacgcgtttgcgaaatccggccaggattttttcgacggacttttccgtcgccgcaatccggtatttgctatctctctctttctagcgtcttggggtttatgtgagttcttcagcctttttcttttactcgtaaatttcaggttgaaatccttaaacggttgcagagagaagcgttctctgatctcatgaaactgagagagcgtcaagataaggttgagcgggtgctttctttctaccagtcctcgaaagtgggtccctttcaagagaccaccactcacgtgagaggacaagtggatttct

SEQ ID NO: 33222 - DNA, 121 bp, Glycine max
  Clone ID: LIB3051-112-Q1-K1-F12
gctagacgtaatctttgactgaatttggcaaagcccattcactaatcatcaccaatacctaggtgctcccaaaccacatcatcgatcatcagcgcgccagtatcacgaacctcaactaatc

SEQ ID NO: 33223 - DNA, 269 bp, Glycine max
  Clone ID: LIB3051-112-Q1-K1-F3
tcgatggatattaagtgcttctgggctgctaccttaaagatgatcgacgatatactgggcagagatgcccttataacggttctatgagatatcctgaaactggctgacagatcttacgtccattgactcaggatccactgaaaggattttcccaacgtgacgatgacgctctgtcccagaatcttatctgagctaaaaaatttgttatatgacaaagcagttcttcagcatacattctagcgatcagatctggtgaacactttcattat

SEQ ID NO: 33224 - DNA, 282 bp, Glycine max
  Clone ID: LIB3051-112-Q1-K1-F4
atttcattctggtatgcgtttggatggcgtacgaggtaatgccggatttcgacctgctcggggaggcaattttggtgttttaaggaatccacgcacacagacacctctgcagtatgctggagggattctttctggtccaatgcaatccatggttaatcagggaggaatgcaaagaaatagccctgatggagaaaggtggcatcgtgctactagcttccagcataggggtttaatttcatctacttctacttctcaaactcctttacagatgatgcacaaagc

SEQ ID NO: 33225 - DNA, 329 bp, Glycine max
  Clone ID: LIB3051-112-Q1-K1-F8
gtttcgctagctcacacactaagttctgtataatgatttccaaaggttttcttatgctacgtatatccatggccactatacttatgatctcctctaatgctgcacccgatcacgcataccacaattttgacaaaacatattgcaagcgtattgcacttggtgccgatgaaagcatatattgtccttgcgcctatgtcaactatagcggttagcccattgagggatatcaatggccactaaccatcaagaagcttactcttgctgaatgttcacgttatctgaagcacctcgtatattcaatagacacagaatactatgtgtacaactat

SEQ ID NO: 33226 - DNA, 211 bp, Glycine max
  Clone ID: LIB3051-112-Q1-K1-G1
ctccacagaccattccatccatttacatgccctcttttcagattcaacctgcagctcacataagctctcctcatcacaaaagacatctacccctcggcgcctcactcttctctaatcaatccctatatcatactttgcatggacagactatgcaagctctacctgatcttcaatgcacactgaaaccacttatgacaacactgataatcta

SEQ ID NO: 33227 - DNA, 332 bp, Glycine max
  unsure (1)..(332): unsure at all n locations
  Clone ID: LIB3051-112-Q1-K1-G2
cccacgcgtacgcaacaagttccctcaaaacaatgcatcagttcttctctgctgtcttccgcttgctnctncttacactgtgcagcaacgctcaaacagcacgacaagcgaacaacacgggcttcacgtgcaacttcacacgcacgtgcacgtnctacgccttctaccgggccaccgcccccaacttaccgacctggcctccatcggcgacctcttctcggtgagccgcctcatgatatcaaccccatccaacatctcctcttcttccctcaacacccctttactcccaaatacacccctcttggtccccttaacctgctcctgcaaccccg

SEQ ID NO: 33228 - DNA, 183 bp, Glycine max
  Clone ID: LIB3051-112-Q1-K1-G4
tcggttatgctagttcacacactaagttctgaaaaatgagttccaaagtttttcttattctacgtatgttcatggtcactatacttttgatcttctatgaggttgcaccccatgatgcataccataattgtgacaaatcagacgggaatcctagtgctaatggttttaacgaaaccaaatatt

SEQ ID NO: 33229 - DNA, 455 bp, Glycine max
  unsure (1)..(455): unsure at all n locations
  Clone ID: LIB3051-112-Q1-K1-G5
gtcatcctgtccattgctgtgagaggttcggagaactattccaaaagtatgtctggctgtgactggacaatgcggatcatgagaagatcaacagtccaggctctggaaaggctcttcttaaagttacagaggataacattcggatgctgttagatgttgcttctgagcaggtaaatagggagttactgctgcagaagcatttttttgcattgctttcatctgtctggaaggtggcatcacatgttgaccgcaggcgaaatccattacccacctgcaatggtctctatttcgatcagagtttctatacttccattggccagccttcacaaaattccttgaagaaatcctctaaaaggatgacatttacaaatttagcccatagcangaagttagtagcagctgcacttgatgatatcacaactaggcaagtgaatgacaaagtcattctctctaac

SEQ ID NO: 33230 - DNA, 421 bp, Glycine max
  unsure (1)..(421): unsure at all n locations
  Clone ID: LIB3051-112-Q1-K1-H1
cccacgcgttcggtgaatgtatacaaccttatatcatcagtataacttccatggaagcgagtcatgtgcttgaagcagtggtagatgcatgagggtcacatgttattgaggcttttctatgttcgggagcttctgggaaacagaagcgcagattggttacaaaactacaagggcattttggagaggttgctctcacctcatctggtgcttttaccattgaaaagtgcttcactgtcagtaatctgtcactaagagaggctatagtgtctgagatgttggctgtgcgaagtgatctttccaaggcatagcagggctcttacctattgaggaaactagatattgacggatatgctgcgaatcctgatcattggaggtcaaaacaagcattcaaagaatctacttatanagattttataccatg

SEQ ID NO: 33231 - DNA, 291 bp, Glycine max
  Clone ID: LIB3051-112-Q1-K1-H5
gcactcgtacgcccacgcgtacgtccacgcttcctacagatttctcctcaagatgaacatagttctgaatcgccaatactgtaagtatctccatcttcaattaacaaaaattctacaacacaccaaaaaactacctcacattcttctatgctgaccatcataacataatccctaactcgtcaaccctctaaacctctgatcacctcatataagagatatatcgatcaaaccttcacactataaatcacaatattcaatgaccacacctgaaaagtctccaattcaatctgt

SEQ ID NO: 33232 - DNA, 428 bp, Glycine max
  Clone ID: LIB3051-112-Q1-K1-H6
tcttcctcacaatcgaacgacaactcttactttaaatttctcctccagattaacatcattcggatggttaaaattccatactatctccatcttcacttatcaaatcttctacaatacaccaataaattatcttacattcttctatactgacactcataacataatccttaactcttcaacactctaatcctctattctcctctataatagatacatatatcaaaacttcacactatatatcacaatactcaaatttcacaccttacaaatatccaattcaatatgtatctcatgaaacatcgagttataccatctagaaatgtctaattcctcatgagaaccctataaaacaaacaatagataacttgtccaatgaaaataacacgaatcctattaagaaacatataacccatagacctatcatttac

SEQ ID NO: 33233 - DNA, 326 bp, Glycine max
  Clone ID: LIB3051-112-Q1-K1-H7
cccacgcgtccgattacagagcattttccaacacgattacacgaccgaatcaaaccctctgtttctctccgaagctgcgtttaatatcttactcgccttagattgttcttctctttcattatactgttctcttttcgatttgagggaacagtacaagagtgtgaggatcggttaacccaactgcacaggtagtcactaaaataatggagtctcacgatgagactggatgccaagctcctgaacgccccattctttgcattaataattgtggcttctttggaagagcagctaccatgaacatgtgttccaagtgttacaaggacatg

SEQ ID NO: 33234 - DNA, 255 bp, Glycine max
  Clone ID: LIB3051-113-Q1-K1-A1
ggcaaaacgaccgcgtcgagatcatccccaacggccaaaggcaccggaccacttccttttgtgtagccttcaccgacaccgagaggctcatcggagacgcgggaaaaaaccagtcggcatgaaccccgcagacaccgtctttgacgccaaagcgttaatcggtcgcagattctcagactcttcagttcaaaacgacatgaagctgtgggccgttaaagtcgtggctgggccctggcgacaaagcccatgatcgtg

SEQ ID NO: 33235 - DNA, 438 bp, Glycine max
  Clone ID: LIB3051-113-Q1-K1-A11
ataacccaaactctcttttaaaaaaaaacccgatcacatagaaacagagaaagtgtgagtgtcggcgccgtagccctaccctctcttcatattattctattgcctttctttaactccctcactttttcagttttgaagcgcttccagtggcgtatttacggttatacccttcttgttatgatagcttccaatcggcgtcagccacagagccgaagctcttggcttccacacatattttcggtgctgtcgattgagatacaaagccgccaagccagccgagccaatcttcaaattccaactttacccctaccggttaatattctcctcttttaacggctatttcgatcatgccaaattcgaagaacaaccgtaacggacagggcgagcctcaccgccgggggaagttaacgaaaaaatcatcgtccttctacggtcact

SEQ ID NO: 33236 - DNA, 435 bp, Glycine max
  Clone ID: LIB3051-113-Q1-K1-A12
attatcctatctctctcactcgaaacagttcatttcatcacaaccggaaaaccaaaccaggtcgggctgctcccgccgctgtttttcgccgctgtcgacgtctgtcccacctcaccgtggcggcgcgcgcgtcttcgatgggaaagtacatgaagaatgcgaatccgaatggagaactcgcgctcgtcgaatacacgcaccagcaacaccaccacctgctacatgggggtccgaacccgctccaaaaccctagcgcttaagaaatcgcacgcgcagcagcacgagctcgccgtcacctccgactcctacctccagctgctgagccgtcgacttcagaagccttcgattttggttcactctccgaagcgccctaagcacccgaaccctaaatccccaatccccgaacctgccaggctcggactcgcttcggagcgc

SEQ ID NO: 33237 - DNA, 273 bp, Glycine max
  Clone ID: LIB3051-113-Q1-K1-A2
cccacgcgtccgctcaattttccgggaaaacccttcagaatggtttcccgggaaaataccgattggctcttcgattacggcttgatcgacgatattcccgttccggatgccacctttggcgtcaattcctccgtcttcacatggccccctaacgccctcgacgctccttccaatgtcggtgttgacattgatggctcattgggggattctgacggtctcaaagagtctggctcaaagaaaagagttaggtctgaatcatgtgctgcttctagc

SEQ ID NO: 33238 - DNA, 339 bp, Glycine max
  unsure (1)..(339): unsure at all n locations
  Clone ID: LIB3051-113-Q1-K1-A4
cccacgcgtccgcccacgcgtccgcttcattataaagctgcagatagaagttttaatttggaaaagttgccactacttcttagatgtaaattggattcaccttagcacatgctgtttagttttaacattcctttaggaacttccttccagctttagtacagaataattgccagttgcataggctaaatcagcattgcttgctcgaacgtcagtcagattcaacagataatataatgcagactcaggaatattttctcccggataagatggtacttcctttggcagatgaggccattgatcctcatatgcngtgctcacttgcttctgcctttgatgcat

SEQ ID NO: 33239 - DNA, 318 bp, Glycine max
  Clone ID: LIB3051-113-Q1-K1-A5
gcggccacacctaccttcatatgaaactccatatcgacttttgcgacatgaccactaatcttggggtcagcagcacataacagagaggactacactaaaacgccatgaactatcatcatgtcatttatcttcatacccctactataaccctcgacacctatcctgctctaagactgaagccttacaatgacacccgtcatcttacatccctctttatagaccatatctgtcactatcatcaatctcatgataatatttattgacaacatgccatcaataacttctatcatcctagctacacttctcatggatttattc

SEQ ID NO: 33240 - DNA, 318 bp, Glycine max
  Clone ID: LIB3051-113-Q1-K1-A6
caagtttgttgtcggagacaacaagaagaatgttagggtgacatcatttacggtcacgtgcgcttaggtgttgtgatgcgcggtgaaagctgagcaacccaactgcgaaagagtgccttatgtattcaacgtggactgtatggcgcgtttggaccctaccaattccggaaacgtacttcgggaactgcgtcatggctttgttggcttcggccaagcgagaagagcttttgctggaagaagcgtttctcaaaagcgttatacggataagccaggagttgaactggttagacggtgacgtgtcgaacggctcggacaaat

SEQ ID NO: 33241 - DNA, 447 bp, Glycine max
  Clone ID: LIB3051-113-Q1-K1-A7
ggctttgtttatcacacaagataaggcctaatgtgttaggataactaatcttggggttgggagtgcataacagagagcagaacactatctggtcatgtactctcatcaggtgatttctgtatgatacccctactataacccttgtacacctattctgctttaggactgttgccttattttgttacccgtaagcttacatccctctttagagaccatagttgtcactatcatcaatcttggaatactatttattgagaacataccatctctaacttctgtgatgctttctacgcttctgatggatttattcttaatcttatacaaatttcaatggatctgcatatttttccaaaaaaaaataaataggtgctagttataggctaactaagaccatcatctttaaattatccagtgaacacccgcaagacccaactgtttgatagtgtc

SEQ ID NO: 33242 - DNA, 416 bp, Glycine max
  Clone ID: LIB3051-113-Q1-K1-B11
ctaaactcttcatcaccataaccatgttttaactaacaacatcctctcacaccgtcctagtacgaaacctcaccaaccctttcactctctactccttcaaacccacattcatcaaatacgccacccaactccatactcaatccctgcccctcacccactcccaaaatctcctcttcaacttccacaaccttccctccaacctcacttaaaacttactcctacatgcccaatactagctctacaacttcaccttatcacccatcagcgtcatctaaattatccaccccttcaaggacaatctctccataatccataaagccaaatccgatctccacgctctgctccagatccgccctaaatactccgtcctctatctccacagcagaaccaccttccaaaacgccttcatcaccctc

SEQ ID NO: 33243 - DNA, 434 bp, Glycine max
  Clone ID: LIB3051-113-Q1-K1-B12
attgtgttttcttacaattcatggagagtgaagagttgttgtgagaaggatgaagaatggaatggaaaagtgaagtttagagatggaagaagaaaaagcagcggcgtactacgacgagctggcccgtaagggcgagggagctgcgaggttcaagcaaggtctaggcttttcctcttcagcaccaaacgacgacgttccaaaaccctgctcctacttcctctccaaattcgtcaaagcctcctccgagtcggagaagcaagcgcagctccaatccatccacgacaagctcaagaaaaatccctcttccgagtctagggtttcgagcagcgacagaagcaagagcagagaaaaacgtaggaaaaggagcagaagcggagatagatacagggaaacgcggaggcgaagcatgagtagagagagacatagggatagtg

SEQ ID NO: 33244 - DNA, 250 bp, Glycine max
  unsure (1)..(250): unsure at all n locations
  Clone ID: LIB3051-113-Q1-K1-B2
nncgccacgcgttccgtagcagaggataaggttttgcagttgcttcgattttccttgttaagcggctttacaaggaatgagttatgaattatgatgcgaatggcaaaagcaattcatttctgatttcccgtatttagtaagaaagtgactggataagagaatgagtgctgagattggattcaacttatgctcctgaacctcacaaaatgtctggagcaactaccagtggccaaaagctctctatattttc

SEQ ID NO: 33245 - DNA, 300 bp, Glycine max
  Clone ID: LIB3051-113-Q1-K1-B5
cccacgcgttcgactagctagtgttctataagttcacgggcagttctgaaaagggggttgcacggttttgcttgttgtagttatcttcatagcggctatacttctgatctctactgaggctgcacccaatgaatacgaaaattctaacaatatacatgggaagcatgcttcaaatgggttatatgatagccaatggggttacagttgttggggtggaccttgcaatcgccgctatgctgggccttattatggtggcggcttgagtgggccatattacggcagtcgttggggcctgccctt

SEQ ID NO: 33246 - DNA, 347 bp, Glycine max
  unsure (1)..(347): unsure at all n locations
  Clone ID: LIB3051-113-Q1-K1-B6
cgctttgtctcgcctcttaacgttacccaaggaggtttcggaggctgctgcggaggcgctggtgaacctgtcgcagaattcgagcctcgcggaagcgatggttggaattggtctggtcaaaacgacgatggatgttctgtacaagcccgagtgtagcattgctcgcttgcttgtcatgctgttggtcaacctcactcaactcgaagctggtgctgcttccttgcttcagactgaagatgagaaggtgcatggtttatatgttatgaagcttgtgagatcattttgtagaacctgccatgagagtaatgatgatgctttngaacatgttggatcaatacttgttaaca

SEQ ID NO: 33247 - DNA, 374 bp, Glycine max
  Clone ID: LIB3051-113-Q1-K1-B7
actaactaactcttacaaccagactcacttactgaaatgttacaaaaggggtacgagcttaaatgagtgcataaaccacacaatatcttatctttgctacacatttatagtaactattcatactctaaaggggtatgctgtaaatgtgcatatcgtgctatcatatcacacattgtctatagagcatcctatcaagaattacttctctactgcaggacatcagtccttacgctctgccctgacatgcacacgacataaaaatgacctctcgcactatacgataagacgcgctattacagaacgactgctcctattcctgctccatagacatatagatgaccaatagatgctattggcttgcacatctacggtga

SEQ ID NO: 33248 - DNA, 424 bp, Glycine max
  Clone ID: LIB3051-113-Q1-K1-B9
aataaaagagaaagagagagaaaaattgtcttcttgaaacaaaagttcaaaattttcctgtctggcattttctctttaattcaactttcaaatttttatcttttctcttattttctttccaccttaacaaatggatcctttattacttccctcaattttcttttaccataccaaaacatacgattaggttctttcaatactattctaaatagacgtaagaaactgcatattgtaaaagaagaaaaaagggaaattgagaattgagaattgagaagctaacacgtggaagagatgagggagagagcttcggatcggcgccaacaagactggacccagaaatcggagacggagaaggatttgagagcgtcagaaacagagggaagccactctctgatgaagtttatgtcggtgaggtagaaatcgt

SEQ ID NO: 33249 - DNA, 434 bp, Glycine max
  Clone ID: LIB3051-113-Q1-K1-C11
gagcaaccaaacgcctcgcctactccttttaaagcaatccatcgatcgatgccgttgcagcacgcgtcactccaaagccgcgtgtcgttgtagagcgaaacggcgccgttttgagcaagtgggttttattgctgtgcctcctcagctcgattagatcaactcacctgggtgctgcgtgtgaagaaaagaaaagagagaaaaaccgaaacagaaacataaaaagtagctgccaatttcacgttctcattcttccaaattgaaacctcattcctcaatccacgagtttctcgtgacccttctctcatcatcgtcatcttcgtgccctaatcgattatctcgttgcgggtgctgatgattgattgattgggctataaaacgctgccaccgaccatgatcaaccattcataaacaaagagagaaaaaaagcttttttt

SEQ ID NO: 33250 - DNA, 393 bp, Glycine max
  Clone ID: LIB3051-113-Q1-K1-C3
gcaggaactatggtgacttatggtggaatgtctaaaaaacctgactctgtgtcaacatggtccttgagtatttaaggatatttccttgaggggattttggctgcataagtggttgagcacagataaagctgaagagagcagaggaatgatagacagacttttgagtcttgtacaagaaggaaagctaaaatacaagatggatttggctccatttgaggatttcaacacagcattggataaagctctgggaaaacttgggagccaacctaagcaagtgatcaaattctagacgtgttggtgctgattatacaattttctggtagataaacaattgttctggaatttccaagaaatagcaatctgggaaagaaaatgacttttcagagggatcta

SEQ ID NO: 33251 - DNA, 433 bp, Glycine max
  Clone ID: LIB3051-113-Q1-K1-C5
cagccaaaaaaattgatgctctgcatgtctctgagaaatctgcaccagacattggtggtggtagtggcagtgatgttattaaccccaagtcaatcttgaagagtaaggataatctttcggagcccagggatgttcgcaaacgtgttcggtttgattctgaatgtgatgatagtggtaacgatgatgatgggcttgaaggaagaaccagggatgttcgcatgaagacctcttcaatggaagaggctacagcttctgaccagttgtcaaagtcaaaagaatttgattcagctgttccagattacattcgtaatccttcaagatacacccgttacacttttgatgattctccaagtgacatggatgacaaatcaaataaggaagcatgcatgagcttccttttgcagttgaaggggtcaaatgctgccaagagaac

SEQ ID NO: 33252 - DNA, 433 bp, Glycine max
  Clone ID: LIB3051-113-Q1-K1-D11
tgttctagtaagagttgaagtagccgacaatagattcagagattccattttgaaagaggggggtgatatccaaaatcgtctgaaatcagttaaaaataaatgtgaagaggctggttgttctcttttaaactcatcaaaacatgacgaggaagatttttgggaggagggtaatgttgtatctatggaaatctcatctagtgcaaccaacaataaaaataaacatcttgacgtggcatcaacttcccataaaatgagtaatgataatcttggtttgcacaataaagagtctaatgattctggtacggacaccctgcttcatcgaggacgtgaagttgagccaaactctccaaggagtaaacttcaagccgaagctcctgtggtacgatggagttcttacctggataactggggttcaaacagggtttttatggct

SEQ ID NO: 33253 - DNA, 213 bp, Glycine max
  Clone ID: LIB3051-113-Q1-K1-D3
ataacatgcagaattcatcaattttaaaatttaaaataaaaaaaaaaaaaaaaggccaaagaaaatatataaaaaatagaacaaaaaaacaaaataaaatataaaaaaaaaaccttaacattttaagggaatcattcttgattacattgctattccggacttcttctaattctttacattccctcaaactcaatatactttaattgggtttaa

SEQ ID NO: 33254 - DNA, 333 bp, Glycine max
  Clone ID: LIB3051-113-Q1-K1-D5
ataacatgtagaaagcatgaaggataagatagttcatatctacatggcatgaggagtcctgggatggtaacattgtggaccatgttggcctcaaagccatggagtcaggaattgaagtgtttgggagtatactgctcaacccattgcttggcgggcaacaaagaacagattacgataagcgtttatatgggaagtattatggtggagaaaaggatcgagactggtattggatggcttttcttaaaggaggtgaagatagataccaccatgcatgcagccttgctggactcaaagacaaaaaccttgaagggataatctttaccaaaagccttg

SEQ ID NO: 33255 - DNA, 188 bp, Glycine max
  Clone ID: LIB3051-113-Q1-K1-D9
accacacgttcgaaaaaaataatacgcattttgtattcacaaacccaaataattatacaaggtgcggataatcactactgctggatatgtacttaaacaactacattcatctaaagataagacacatactcaataactaaatacatatccaaatccctctgaacgatgtccaacccgttcgcattatg

SEQ ID NO: 33256 - DNA, 411 bp, Glycine max
  unsure (1)..(411): unsure at all n locations
  Clone ID: LIB3051-113-Q1-K1-E11
gtgcctccaacattcttaaaaaccaaaaccaaatccataaatttgcaggtctncgncgncgtacagncaccaccttcgttcggattctccgcggacctactatccctactactctatttacacggaagaacaaaaaaactatcccacaaaaaaaattccaaagcggttcggttagggtttaagttttttttttttttataataatttcgggtatcaaattttcatcagtaatatttttttggaggcggcgaaatggcgcaaattcaggtgcagaatcaaagtccggggtcggttccttctccgaacggcgtggctaacgcgccgaacaacccgaaccagttcgttacgacgtcgttgtacgtcggcgatcttgagcagaatgtcaacgacgcacagctatacgatctgttc

SEQ ID NO: 33257 - DNA, 429 bp, Glycine max
  Clone ID: LIB3051-113-Q1-K1-E12
cccacgcgtccgcccacgcgtccgcaaaactcgctcgtggattgccccgttacgaaccaggctgtgacgtggttagcgtctcaggtttcgattctttacggtgcggctaacggaaaggcttttgctcttaatttcgcgaaaaaatgcattctggttggtgcttcggttctgttgctgattcctttaagggacaatgctgcttcaaagcaagagtcccaaaatttaggtaccgagagtggagaccccaaagaaaccaaacctggtgctcaatgtggagaaaagaaaaattggataccgaatataaagagatctgtgtgcccaagatgcaaggcggttgcggcactgtacgcacgatatctgctttagcacaaaatttatgggtattgggtttctcagaagccgcgtgactctcatcatctgtgcgctgag

SEQ ID NO: 33258 - DNA, 342 bp, Glycine max
  Clone ID: LIB3051-113-Q1-K1-E2
acggggacatccatgcacttgtggatggcgagtatccaagaaccattcaacatatcgtggtgagtatactccacaaattcactagtgctgaagctaaaatcgggaagggtctaattgattacggtggaatcaaccagtatactacgatcattcatatatgatcctgatcaatcaaaacctaagatgccatgctatcaaatggactggaatgcaagattagcttgacagacaatgctgactttaaccattgctacagatatgatctatgcatgcccatgactatgctctctaatgcccatatggatgatgtgaacattgaatatgcagataatggactgccta

SEQ ID NO: 33259 - DNA, 231 bp, Glycine max
  Clone ID: LIB3051-113-Q1-K1-E3
cctatgaacaacacaaaatataacatagatttaacaaactaattgtccatattgttgaaggtgattctgtgaaacagtaactggggttgcatctaggttgagacttgttatggagggtgatggtagtagatttaggattggaagttaatccatttagaggaacagcgcacgagctgagatcttgtcaaactgtgtacaccgagaccatgatgaacatgatgctatatggga

SEQ ID NO: 33260 - DNA, 256 bp, Glycine max
  Clone ID: LIB3051-113-Q1-K1-E4
cccacgcgtccgtgaattttctgtgatgggtactgcttttttttttttttttcgtttaggtttcttttgttcttaccaccagcatgatgtggtttggcctaaattattagtagtacttgctactgttagtgttagttcctgccctcttcttgcactgcaagtgtttttgttgcgtcaagtgctggctggatctcgtgagatgtgtattgtttcctgtatggttttaattagccaagtaaaatttcatattactgtc

SEQ ID NO: 33261 - DNA, 315 bp, Glycine max
  Clone ID: LIB3051-113-Q1-K1-E6
gagaagctgcgcaccttttcatactagtgctgattgctgaaactgccatcgctcgccatgggcacatagatcccaacaacacttgaaagttgaaacagaaaaacaccaatccctcatcgtactgttccgttatcaattctcgtgtttaaggacacaatttgcttgatacattttcaagttttcatctccatgttttgattttgaagaataaggagtatgcaattgactactacagatatggttttactataagtggcctgtatatggttttgggtcttgcaagtgtaagcagtatggaggatattcaattggata

SEQ ID NO: 33262 - DNA, 436 bp, Glycine max
  Clone ID: LIB3051-113-Q1-K1-E9
ggctctggctgcagtatgaaactcgtacagatgacattacagtcatcattgtgcatgtagatggactaactgaatctgctgttggtcagtcagcaagttatggtgatgttttgcgaaaccctgtgcctcaagttgtagaggtgacaggttcagaatccccttccacctttggttggagcgctagaaaccatcgtgtaaggcatgacttgtcaagggcacgccttcgagcacttgaaaattccctagaaaatggtcaatcctgggttcctccatcttcagcccataggaagacatgggaagaagaagcacacatagagcaggcgttgcatgatcattttctcttccgaaaacttactgattctcagtgccatgttttattggattgcatgcaaagagtggaggtccaacctggggatattatagtcaaacagggtgg

SEQ ID NO: 33263 - DNA, 374 bp, Glycine max
  Clone ID: LIB3051-113-Q1-K1-F10
gggcagtgagtttggttagccttggtggtacaaagttgatgtctcttggaatagctttggtcgcggtatcaaccatgtggagttgatccatttggcagctgcattttcaattttatttgtcaaacacgccgttagtttctttcatttttcctttttaaaaattttgctatctgtttctggtttcttgtgtgttggtgttatgagaaggacgtgaatacttcaatgattaatgattcagttgttaaaccaataatctttaaaaagacaaaattttaaatatataaaaaaaatgttataataaatttgattaaaatttttaacgttctatgctctactacagatatatgatatttattgcatttatctctaattat

SEQ ID NO: 33264 - DNA, 304 bp, Glycine max
  Clone ID: LIB3051-113-Q1-K1-F4
gtgaaacgcacgcgacgtagtttatataaagcgccgtccctttccgtttgtgcagtcagggggacgatgacctgtgccaaattattttccgtcttttctctcagtttctaatttccgagaagaagtaagttattggttcttgcttgaaattgaagtggcttttgagttttctattgggattttcggctatcatgggatcagcttgttgtgttgctgcaaaggatcctaatcttactaacaaaactggaagtgaaaggttgcatacagatgatgtgtgttcaccattcgggagctttcaatggga

SEQ ID NO: 33265 - DNA, 394 bp, Glycine max
  unsure (1)..(394): unsure at all n locations
  Clone ID: LIB3051-113-Q1-K1-F5
acgctccggatatgaaagcttacgtttttggtgaatgtctggcaaggatgtaaacctgagatttgtacatntaattctttaaataatggactttgcaagaatcataagaatggagaagccttgagtttatatcatgacatgttcttggaaggggttattgctaacactgtaacatacaacacgttggttcatgcatttcttatgagagattctatccaacaagcatttaagcttgttgatgaaatgctatttaaagggtgcccttttgacaatattacatataacggccttatcaaagctctgtgtaaaactggggcagttgaaaaaggattgggatnngttgaagaaaatgcttggaagggatttttnctactattatctcttgaatatactg

SEQ ID NO: 33266 - DNA, 352 bp, Glycine max
  Clone ID: LIB3051-113-Q1-K1-F6
tgatactattaggtttactcttctagcccccctacgtttttggtggatttactggcgacgaagtatgtcaagtatattgatgttcgctattttacgtttataagtctaaaaaagctcgctagtactttggagggaaaagatgtctcagatgataaaattgcaagtgcagatggcaccagtgaaagtcaattgagctcaaatatggaatgtgtcatccacaacatgtattacactatatcacatgttcccccacataaaggctcggataatacatctgatttggaaatgtggagcagctcagaaagtgaccataagcaactctctggagataagggtgctgatgataagccgc

SEQ ID NO: 33267 - DNA, 242 bp, Glycine max
  Clone ID: LIB3051-113-Q1-K1-F7
cttgtactgttctattagttcatactaagttctgaaaatgagttccaaggttttgcttgggctactgatgttcttggccactatacttctgatctcctctgaggttgcacccgatgatgcatacgagaattttgacaaaatagatgggaagcctagtgcagatggggtagatgaaagcaagtattggcgtggcggctatggtggcggctatggtggtggtcatggaggtcggcgtggaggct

SEQ ID NO: 33268 - DNA, 254 bp, Glycine max
  Clone ID: LIB3051-113-Q1-K1-G1
gggtctcccattttcaattccttctcagtttccttttctctgaaaaaagatgttgaggggggcagctaggaggctctcttctctctcctcttcttctccgttgcggcccaatcacgccgcttccgcttttctctctcgaaacgacgtcgtcgtcgatgaccacagatctgttccttccttccatccccttcttcccttccgaggttttgctactgaatccctgatccacccaatagaaaacagcattattcccc

SEQ ID NO: 33269 - DNA, 356 bp, Glycine max
  Clone ID: LIB3051-113-Q1-K1-G10
cccacgcgtccggttcggcataattgagcgatcgatggcggcgttgataaggtcaccggcggtgatactggcgatcctgacgatctcggcgtgcatcgcgtgtacggcgtcgtacgggggattggtcgggggaaggtcgaagatccctgacgtgaaggcgaacaagaaggtgcaggatctatggcggttctcggtggaggagcataaccggatgctgaggcaagcgcagaaggaggaggagcaagtcacgttcgtggaagtggtggaggcgcaacaacaagtggtgtctgggatcaagtactacatgaagatatcggccacgccaggtggcgacggtggagattccagaatattcg

SEQ ID NO: 33270 - DNA, 436 bp, Glycine max
  Clone ID: LIB3051-113-Q1-K1-G11
gcagctggtgtctactggtttgattctatctgcgaaaaactgaattgtgctccagatttggctgttaaaggttgtgaagtctggttaatatctgcttatctgctcacatacactgatacacacatattgaaggcatgcaatcttcaacataattttctgtaaccatgcagacttactaaaggaatacaatgtggaactaaagggtcccttcaattattcagctcgagataaatctggtattcccggtgattggtatgatgatgcatcatccgcaagcactaaggacaagaaagacaaagatggcaatcaaaaacagctctctgcagtaagtgacaatcatcctgctcattcctgcaacttttatgagcttaatttttatgtactggccatgtaaaactcaagtactcaactaataagaaattataatggatatgat

SEQ ID NO: 33271 - DNA, 460 bp, Glycine max
  Clone ID: LIB3051-113-Q1-K1-G5
aaacatctcaataaacatgtacatgaattgttggaaagacatcttaattgtggtcactcctaacccaccttagttgtggcgggcaaccttgggcaaagaaaggtgtgttgaagtcccccatcaactaaaatgaactaagtcctgtttgtatatacttctctgtatgataaggttactcgtcatccaaaatcatcacaaattggcccttcctttgacaacaacagaatagagaagatgaagcctctttcaagtaacttgcatggtatgcatgaaactaccaaggaaaatgatatcaacagtcctggaacaagaacaccgaaatttctagaagccaaccgttgataaaaatggtttcttttcttggtggtggtagttaattttcatcattaatggcaattgaaaatgggatgaaagctcacactaacgcagacttttattctggtattggcgatgatatttt

SEQ ID NO: 33272 - DNA, 424 bp, Glycine max
  Clone ID: LIB3051-113-Q1-K1-G7
gcatggggcacttcaatgatattgacttatgagtatctgaaacgtgtatgctcaaaaggtgaatagatgcaattagtctgaaagcttgtatttaactgatcgatttaccacgattaggatgatgatgttgggtttgcacctttagcattggagttgctgttcaacatttatcactctgactcaagggttaaacttttagcagtacagctatgctgacagattatatgaaaacactcggctggatatgaatatggcagacttccttctagaaaataaattgcatcattatttttttataattctattggatttggcgcattcttttgtagcattgctatggatactgtattatcatgtaagggaaaggaaatagattgctattaaatgcattgtaaagagatgttgaagaataaatttgaattct

SEQ ID NO: 33273 - DNA, 374 bp, Glycine max
  unsure (1)..(374): unsure at all n locations
  Clone ID: LIB3051-113-Q1-K1-G8
cccacgcgtccgcccacgcgtccgcgactcggtatttctcttcctctaaagaccgagtccgactcggagggcgaagaaggcaaactcagtaacctttccttccttcactacacgcgagagagacctcagtgtctgagacgcaggcaacgtgcattttcccatacgaaggacaccatcacgccgttttcgcgtccccgtcgtttcggatccatcgtcatcgtttttgtcttcttcttccattagtttagttgagaatcaatcccaagacaccgagctggagccttcgnccgtcaccgtcgctgccttcaacggtcagatccggtaccgatcgccgtccttcgncgagctcttcgacggcagcagcaactcttcgg

SEQ ID NO: 33274 - DNA, 437 bp, Glycine max
  Clone ID: LIB3051-113-Q1-K1-H10
cccacgcgtgcgccggcaccggcgtgtgtgagatagaagaagtggacgagaattcgaacgataggcggctacatgatgatgatgatgatgatgaagagtactgagtttatgtcgcatagggtaagagcgacacaagcatggacgctctctcatgggctctcaacaactttgttgctcaatcaccatctaccatcatttatctcattcatgttttccctcagatcaaccacattccaaatccattgggaatctgaatgattccaaggaatcaagtgagtgctgagcacgtggagagttatattgaccaagaaagaggcaagaggagagagctccttcagaaattcctacaatcatgctctacttccaaggttaacgtagacaccatcctgattgagagtgactcagttgcaaaggctatcctcgacctgattcccatt

SEQ ID NO: 33275 - DNA, 246 bp, Glycine max
  Clone ID: LIB3051-113-Q1-K1-H2
tcgaccacacgttctatcacacgtccacgactttttatttttcgtgctctaaagaccgattcggactcggacggctaataaagcgaactcagtaacctttccttcccttactacacgccagagagacctcactgtcttaaacgcaagcaacgtgcattttcccatacgaaggacaccattacgccgttttcgcgtccccgtcgtttccgatccatcgtcatagtttttggcttcttctatcattag

SEQ ID NO: 33276 - DNA, 216 bp, Glycine max
  Clone ID: LIB3051-113-Q1-K1-H3
acgtccacgcgtacgcttatttagggttatagtgactgtgctccacaaccgagtcgcgatggggtgacatgagagtataggaaggatgcaagcacggcagaattaccggaggtgatcgcacacgcatctgatgagatggattcaagcagctactccgtatcggagcctcacgttgaggagagcaccatgaatgtcgaaccttactggcaaacgggc

SEQ ID NO: 33277 - DNA, 244 bp, Glycine max
  Clone ID: LIB3051-114-Q1-K1-A4
gtttctttttcatacattcacaattcagatttacttcttaattcagagcaaggcacccgggcgtggttaaatagttgttatggctggtcgatcatgaagagagaaagataggttgatagcttaaccatggcaaattgtttgatgttgatttctcgatgatgtgattcaatttgaggccacctactcatcaatcacttcaatgaacaaccgtgtctttgagtgcaaaacatgttatatgtatttc

SEQ ID NO: 33278 - DNA, 214 bp, Glycine max
  Clone ID: LIB3051-114-Q1-K1-A5
cccacgcgtccgtaacattggaaaatactttacattctatttttcgtttattttggcttggtttggtatttgtttttcagatattgcttttcataagttaatcagtcaatgaaataaaagttgttaatgaaaaaacaaaaaaaaaatataaatattatataaactattaaataaaaaacatagtaatttattaaaataatcaaactatacaatt

SEQ ID NO: 33279 - DNA, 448 bp, Glycine max
  unsure (1)..(448): unsure at all n locations
  Clone ID: LIB3051-114-Q1-K1-A6
gcttcacaatatggagatataaagcaaagcatggaatccagcgacgggagaacgacagtggaaggctttgtaagaagctactttggtttcaagcatgattttctgggagtggttgcagctgtgattgttgcattcccagtagtctttgcattggtctttgccatatcagtgaagatgttcaatttccaacggcgttaagatcgaacgtgttcaagtagtttgtacagggtgtttcatgtaatgtaacatgttgagagaagatatccacatagcttttttttattcttttatttaccaattaaattaaacttatcatagtcgaaatccactaggatctgtcaacagtagtggagaaatttagttagttttcatgagatcatagatntaaatctcattggcatatcactgtaaaaaaaagtgtatcatatttgatgatattaatatatgt

SEQ ID NO: 33280 - DNA, 448 bp, Glycine max
  Clone ID: LIB3051-114-Q1-K1-A7
gctgtacagccgtctgataaagatgcttcttcaggagagatttccagaccggcggagacggaatcttcctcactcagacacaccacagagtcaaaattcaaaaccacttcctcgacatcagaagaatttgagccattgaacggtgagtcaaattccatttcagtgaaacattcccaaaatgtggtgtcggagccaagtccagtaccaagtgtttcattagaaggaccagcacatctgcagctgcagccaccaccatcggcacctactgacacatcatcagtaactgagtccagcaatacaagtggttctgctagtagcgatagttctgctagtttacaaagttcatcagagactgatgtatcacataacacgaaagccacagtaactgttgttaggaaatccgcaagccatgtcatggatggcttaatgcgtccatgggatttaattt

SEQ ID NO: 33281 - DNA, 368 bp, Glycine max
  Clone ID: LIB3051-114-Q1-K1-B1
acaaacacttaatttctcatctcatcatttctaattctacctcttttctcttgcactaacaatccaagatgaataccaacaacgacaccgaaaaaaaccaatcatttccagaagcacaaggagcatcatcatcatcatcttctccacccaatgttgggactgagaattggggaactcacataatgggcacccctgctgttccaagcagccacccagataacaaaaaagcagctttacaaagtggacaacctcaaccagttcaatactaccatgaccaacatcaacatccctacgtgcaacatagcccagttgacaaaccaagcaacagtcccatggagtcaatccttaacatgttcgaatcatggagc

SEQ ID NO: 33282 - DNA, 395 bp, Glycine max
  Clone ID: LIB3051-114-Q1-K1-B12
gtgttcacaagttttaggctttatgggttgttagaatttggctatgtagtatgaaaaagtaagatacaggtggttaaatacttttgatattattctctgatttaaattagagtttcatcttggtagtctcattaaaagtttgtatttaaaatcagcataattatgttatagaggaaaatgtctaattttcatcggacaacattgctaaaaaacatcaaagcaagataaatctaaattttgccttatattatagaattgtaatagaattgtaatgtaaaaatcttgccttattcagctgaaaattctaatgttagtttatactatggaattgtaatataagagaaccttataattgacagggaagctaagatttggaacaatgtgtttgagaaagc

SEQ ID NO: 33283 - DNA, 143 bp, Glycine max
  Clone ID: LIB3051-114-Q1-K1-B3
atttcggccagcatcgaattggatttatcaaactttcatagttactgatacagcaaatgcgaaggtttgtactttttacatgaaatggcttgaatgagactttgatgatcgaattacttagtaaaacagttctttgtaggtgt

SEQ ID NO: 33284 - DNA, 69 bp, Glycine max
  Clone ID: LIB3051-114-Q1-K1-B4
cccacgcgtccgaaaaaaaaaaaaaaaaatttaatttaaaaaaaaaaaaaaaaaaaaaaaagagaggat

SEQ ID NO: 33285 - DNA, 412 bp, Glycine max
  Clone ID: LIB3051-114-Q1-K1-B6
attatttattaagatcaatgttgctttcattatctgcccctagcttttgtttaatgtatggctggaaccttcattatcctccttcttcagttcaaaaaacatgtttttctgttcgttgttcggtttcacagacaaaaaatggagctaaagtggaatatactccttggctcattattggcttgggcaatcctggtaacaaataccatggcacaaggcacaatgtatttcttccgttcttgaatacacttcctatttgtattttgtactgaaccttaatcttattaatttcctctctattattacgttggatttgaaataattgatagcctttctcgagcataaaggattcatatgaacactatacattcaaaggttcttattggaatatgttctatagttgaattaccttttt

SEQ ID NO: 33286 - DNA, 330 bp, Glycine max
  Clone ID: LIB3051-114-Q1-K1-C11
agtcaataatttagtaaaaatgttgtcttctctgctgaacccttccttcaggaccacgcttccaatccattcaattttaatccctaataaccgccgcgcctccaccgtagtatcatgcaccttctcacacctcaccaccaacaaccactcccatgtttcttcgccgccgaacatcaaggacgaggcccgccgccgccccgcggcggagaacgacttcacggcgaagtacgtccccttcaacgccggcttcgactcgccggaaacctactcgctcgacgaaatcgtgtaccgcagccgttcctgcagactcctcgacgtgcagcatgacat

SEQ ID NO: 33287 - DNA, 368 bp, Glycine max
  Clone ID: LIB3051-114-Q1-K1-C4
cccacgcgtccgcttttctgccactaacactgttttggccaagcaaggatagtagcctgcgcctgtaggaaacaaagtatttcggagaaaaatattgttgtaaccttaaaaatgttgtaagcagatgcttttattttcgttgatcacaacttatgctgacattctcgggttcagcacatagataggccattaccataattatttttgtggtgtagggcttttaccttgttatttgaaaggttgtttgaatgttagcttcctacactgtaacattggaccactatgtaatgtaactcatgatttgtttaaaaaaaaaataaaatataaaattatttttatttttaataaatattaatagttaatttttt

SEQ ID NO: 33288 - DNA, 363 bp, Glycine max
  Clone ID: LIB3051-114-Q1-K1-C5
atcatgcatagttttgaggctatgtatcattttgcagtggctgtggttgtagatcgaaggcttagtgttaaatgcaaagtggtgattgatgcttttcgattgatcaatccgcagacaatgatgctctttcaagaaccaaggtagacaacatccaatctcatacatctgaataaaccattcattcaagcattgatccatcggttgaaccttcattactattccatacccattcattacaggaagaatgaacttcaagagatgatgttgcttaatcttcacatgaagaaatggactgatggtttgacacttttgcattatgatacacattccaaaacttatgaacagactgtacaggaaattgct

SEQ ID NO: 33289 - DNA, 451 bp, Glycine max
  Clone ID: LIB3051-114-Q1-K1-C7
accacgcgtccgcccacgcgtccggtgaaatatgcacacactttgctaattgtgagctggtttcaatcgtcatcattgatagacgtatgattggatcaagtgaatcaactaccaactatcctggcaagattcctcgtggccccgatgttcccagtgaagctgctgactaaaaccattcagggattatccttaccaaataatagctcctctttgtgatcattggtcgtatattggaattttcattggtataatagggttatttcttaattgcatttacaggcaagtgttcaatatttagttctacccgaacaaactaatccgtatgagcagtttcaaaattcctttttagtggcttaaagtacattggtaacatatgtatgtgccaatttttaagatgatgaaaaggatgtcaacaatgattataccaagtttagctacttgcacattcatg

SEQ ID NO: 33290 - DNA, 440 bp, Glycine max
  Clone ID: LIB3051-114-Q1-K1-D4
ccaaaagcctaatcccagatgcagcactgcaggtgattgaaggcacaaagttcacagaagagagcgcgctgaatagtgtgcatcggttcagacttcagagcatatgaaatactgcaaattttccctcgtctgtgacgctaaggaaaaatcgacctagatttattttattggggaatagagggtacatatcccttccactctgtcgaaaacacatctccccaaatttgaaaagcatgatgcccatcacatgtgaaagctcaattgtttcccctcttctcctgtcacgagtatgtcaggctaagacggacccaacaagagcccttctgttagggaataaattctcaacaatggcagtaactgccttgccgaagacaagttgtatccaatgcacgattgtccgatccaaatttagccacaaaagttgtggtcccatggagagt

SEQ ID NO: 33291 - DNA, 438 bp, Glycine max
  Clone ID: LIB3051-114-Q1-K1-E1
gctcctgaaagtgttgctatcagagctgattagaatagttatagttacaagcaactcatcgcatcggcacagaagatatctaatctcttgtgtggcagtgatgcacagacaggaaatctcggtggagctcgaataggaattgtagccaaaccttctgctgaatttgttgctggaatacttgggatttggcttagtggaggtgttgctgttccgcttgcaaccagctatccagaagtagagctcttgtatgtgattaataattcggatgtatctgcaatactgagtactgaggatcatactgaaataatgcaaagcgtagccaataaaagctcttctcagttttttcatcttccacctgttctcaacaagtcttctgagaaaagcagagataaacattcacagaatgggggaattcatacagataaaattttgttggat

SEQ ID NO: 33292 - DNA, 359 bp, Glycine max
  Clone ID: LIB3051-114-Q1-K1-E11
tgctaataagattgcacaatcattggtttatgcaagcaccccttgatcctggtccctggtcgcacatctcaatgtgttacagccattcactttcaaatggcaattcctctacttctaagccttatcaggctgagaagttggagctcccttcactccaatatccataactcgatttaggtaactggcgctcatcccccccaccttctttgctcgactcagttgatgatttacttcagtcttctacaccaatcagtacactggagtcagatagttcttctccacacaatagtggcctgctggatgctttactttatcaggcaaagactatgagcagttcaaagaaccattgttctgacaag

SEQ ID NO: 33293 - DNA, 289 bp, Glycine max
  Clone ID: LIB3051-114-Q1-K1-E12
aggccacgcgtagctattcatctgattggtctgcatacatggtaagctagtcaccacacagggcatggtcaaccttcaacatacacttgaagtgcagtgaactcaagctgaaaccaagggaggaagaatactgtgctatatgaacactagtcttcgacttgcctattacgatactagacacatgatctatacagctgcagagattactatcatcgattctctgcacttcatactcaacaaagaaatctcagcttatcctcaacaattactcaatggatactagggaatc

SEQ ID NO: 33294 - DNA, 314 bp, Glycine max
  Clone ID: LIB3051-114-Q1-K1-E3
ctcacacgtgcgcaacaagctgttcatccttctattggatctgccagtgaataatgctgaggaagattgctgccacttcacaggacactctacagaacaagctacataaccacgtcgataacgcctgcgaatacgcgtggcattacctctagctagtgcgacagccgtaagataatccgtcgcagcaagttctcaatcatggtcactatatccttcaccacccctaacaccgatcctatctatgctcctatgaatagaccttgtctgatcatgatgcagatgctgatatgcattgccaatgtcacgactgtgcc

SEQ ID NO: 33295 - DNA, 450 bp, Glycine max
  Clone ID: LIB3051-114-Q1-K1-E8
gtcaaattgtgtcttttaatcagttctctgaagcatttggaaagttttatggccagtcgaggcatggagtgagcaatgatacagttgaaacttcaagaactcgtggaactgttcacgaaaactgtataaagtatatatctcctttcatgacctccgtactttttccaaatgttattggttatgttacatatttctaaaatgctgagattttcaattatatggtagcggtttccattgttcggctcaatttattatgctcctacccacaacacaatggatggatattccattaacagtgggattcaggcaacttaaagttcatataaactgttaatggctggttgattttttggcttgtagttgtattatgcctcttggggatcatggcacattgctaaggcgtttcagcacatcaggattggatggaagaattgttgtatgggatttgga

SEQ ID NO: 33296 - DNA, 426 bp, Glycine max
  Clone ID: LIB3051-114-Q1-K1-E9
cgcacgcgtccggttcatcagttacctttggttagtgcatacacatgttgggcaagagcagttggccttggatatgagcagcataaaaggagactggatggtggaacgaatgaacctttattcacaaatgtcactagagattttattggcactctagattacatattttacacagcggattcattggttgtggagtcattattggagttgctggatgaggagagtttgaggaaggacacagcacttacttcacctgaatggacctcacatcacattgctctcttagctgagtttcgctgctgcaagaataaatctaagcgttgacagttaaggtcactttcagtgatacataaagaaaaagtctgaaagaagcatttggctggtaagttttttcgtaaaatggtagatcatgccatgctttttcaa

SEQ ID NO: 33297 - DNA, 350 bp, Glycine max
  Clone ID: LIB3051-114-Q1-K1-F3
ggcatctctgaaatcaggcaagtgaaaacctaaattaaaatggtctcacagacagttgaagtctgaaagaatgagattcctctggagcaggaatcagtggttttagctgaagatgctgtaaatggtctcgttcttgtggacatcataaatggcttttgcacaattggtgctggaaatctggctccaagagaatccaatacgcagatttcgcgaatgatcagtgaatcagcaaggctggctagagtgttctgtgagaagaatttgccgggtatggctttcctggattctcaccatactaacaagccagaggacccttatccccctcactgtattgttggctctgatgaatc

SEQ ID NO: 33298 - DNA, 437 bp, Glycine max
  unsure (1)..(437): unsure at all n locations
  Clone ID: LIB3051-114-Q1-K1-F5
ggtttaataattcacatggttcatatggtattcaccatcatgaagttagtcaccacgaccgaaacttccaaccttctagagctcatcagaattggactccaccaaacaacccgagtgggcacagggattatggtcatcattcatccaatcaatattctttattagatagaagaggaaacaggaatccaatgcccccacctggttacagtcgcaaataaattcatttcgttcagggaatattcttccctacgaattaaaaattgttgtaccatatctttttctctctcaattagttgaggtttgagagttgtacttgtatttcacctattaagtctagttgagacaatacttgaccaattttccattgaatagatcagtgtcaaattataaccccccttagaactcaggtttgataacatntatatacttgataggct

SEQ ID NO: 33299 - DNA, 361 bp, Glycine max
  Clone ID: LIB3051-114-Q1-K1-G1
cccacgcgtccggtcccccatgtatacgcttcactgccttcaactgtattttcagagaaactgaatgagaatccttctgataaattaacagaagttcataagattgaagtaaagtctgaagataatggaaattttgacttgaacaaaatttctgagggtcgaagtaacagtgggcaaagttgtcagaaacaatcagacagtgaggagaattcagggctatcttctggtcagaattggagatgccctgatgtaaccaatccagtgtgtaacatatctacatggctatcaatctttggtgaaccaaatgatttggatgagtcagtttcagatctgctggctgaaagtgaggcaatggagtcac

SEQ ID NO: 33300 - DNA, 419 bp, Glycine max
  unsure (1)..(419): unsure at all n locations
  Clone ID: LIB3051-114-Q1-K1-G10
cccacgcgttcgagaaagaacaagaacgaacaaaagtcaaaagttcaattgggggtagcaaaatggaaaatcaagcctcatcatctatgcagatcctcatcctcgaacaagttcagttcttgaaggtgaacgacgattccctcttgcagtgtgaactcgtagacgtcgttgacgccgaagaggagatagatggctttggttcttcagattcttccgttccttggttcgaatccgattcttctccctgcgattccccaattgaagaaattcgacaccttcttcttcatcccgatgttggtttacaagatcgacatgatggtgctgatgaatcggagcaagattcgggtttggaaaatcatcatcactaccattatcaccatgatgatgatgatatgggcggngatgataatgatgaggat

SEQ ID NO: 33301 - DNA, 334 bp, Glycine max
  Clone ID: LIB3051-114-Q1-K1-G3
ctccacttttcttcaacaccatctttctctttctttttatttttatatttttgtcaattggtcgattcttttggtgttccagggagatcgattgataccgtcccgttgattttccaattcgacgaataagggtatcacatctcttaatcaaccatgtttacccgaatttttggtaaacctaaaccggaagtcaatactctaaccgctttagacgagttaaatgacaaacttgaaatgttagagaaaaaggagaaagtactcctaataaaggctgcagcagaagttgaaaaagcccaaggaattcactagggcaaaagaataaaagggcggcaat

SEQ ID NO: 33302 - DNA, 431 bp, Glycine max
  Clone ID: LIB3051-114-Q1-K1-G6
ttcctgcgaaatctgaatgctaaacggagttttgcgcctcttcttccattgcgtggtgcgctgacgtcgccgctgcccctgtccaccacttccctttcactgttccacgactacagagaggatgaagaaatttgatcctgtactttctagagacaaagctacttcattagtagatctagaagcatcagatgctcatcatccaagtgcgagtattcaaggtgctgattatgaattggtggctacatatccaggaattatgcctacaatttcaagctaccatcctgacatccaaaatgagatgtgccagaagtgatggtgcgacatcagcttcaaaattatgttagaaatgttcgatgtgattccaaatttgcacaattaaaagtgcaaagcttgtggaaacaaaaaagtgcagcacatctgatatagtatat

SEQ ID NO: 33303 - DNA, 221 bp, Glycine max
  Clone ID: LIB3051-114-Q1-K1-H11
cagaacaacaacttggactcgaatatttataaaggttcaactctctgtttagttaaagcaaacgccattctatatttctatctttgaccaatcccaaacccagaccataacatgtgtatggggggagatccgatgcaaatgctggtgagaagaagaaaggaccaggacgacgacgatgaagaatagttatcatatagtcaacatggtgtgaaacgagagca

SEQ ID NO: 33304 - DNA, 340 bp, Glycine max
  Clone ID: LIB3051-114-Q1-K1-H3
ctcacgcgttcggtcacgcgttcggcagacttaatttgcaagtacgaccgaggctacacgcgggaggcggcacatactgcacagaatggagcccatcgacaactacgacatctcagaaaggtgtgtcccccgacgtcagagactccgcgaagcaaaccatttccaccatgcttggattggtcccatgggaccacttttctgacatagacactgtatataaacaccctctataccgactaatctgctcctgccacaagacaaggtgaatacagaaacaatgtgaattatgacgatcattctagtggagtgcctggaacatatcgagaatcgacgacgacgt

SEQ ID NO: 33305 - DNA, 349 bp, Glycine max
  Clone ID: LIB3051-114-Q1-K1-H5
ctctacaatcactccttcctctcattctctttaaagaaagtgcttaatttgtgtgggtacgtggttcagtttccatggattggcggcttgctatatcttctcatcctaaaccttattcagtcacaactggtggaaatctctggcggagtaaacacaccaccaagaatatttactttgcatgttcttggatatcaaaagcttcacgacacataagggaaactcatatagaacataatgttttgaggtttccaccaaccaagtttggatccatcattacaaatgcatcacatgagggtctccatatcatgaatgcattatataatttgttgtgaacgcaatctttaaacaa

SEQ ID NO: 33306 - DNA, 366 bp, Glycine max
  Clone ID: LIB3051-115-Q1-K1-A2
cacacacgatcggcatatatagcactaagtacgcgcgttgagtgctgaggactgaatcggactgcacaggtatctacctaggaagaggaataaatgggatccaacggacacatctcggtctgaccaatgggataacagacctgacccagtgactcgcatacaatgaatcaaaggaaacagaacaacacggtgctttgcaagaccaaggcagtcgcttccaccggagtgaacaagttgaaggagggtacccttgatgaactgcattggatcaagacccactatcacaacaccacccagaagcattaaactacttcttacttatcttaatatgattgcttctgtacatatttataataatctttgtct

SEQ ID NO: 33307 - DNA, 311 bp, Glycine max
  Clone ID: LIB3051-115-Q1-K1-A5
cccacgcgtccgggctttgcctggtaaaggtggaaatttacaacggtgtgttgtggcgttagaatccaatgtaagtggctcaaaatgtgggaagacggaatttgaagcctttgcctctgcttatatgatgatcattgctaaatccatgttgagtctcaaggctctcgaaatgttctagaaatttgtacacttaacacttgtgatatgcctctagtttaatgtggttctagtggtgaagtcaggccacagaccacacgagaatcttaatctctttttctcaaaaaaaaaaaaccaaggaacaaacataaaaa

SEQ ID NO: 33308 - DNA, 368 bp, Glycine max
  Clone ID: LIB3051-115-Q1-K1-A8
ttaaactcacagagctcgatgcagaaactatgagacgaactcgaatctccaagctctgtcctatacactatcgtgaccatgtggcacacgcagagaagctaactcaataataataagtcaggggatcttcaaactagggcttaagctctcagtgacacactgtggacagtgtagagtcaccatcttcctgactgactaaaggacttttaacgatagtgatctgctatgcaactgggctcgagactgaaatggatgtaagaatgatgtctgatgtacaccttcagttaagcccacagactaccaatgcacttggctatacagatatggaaacaaaggtgactgagacgctagttgcggaatctatgaat

SEQ ID NO: 33309 - DNA, 431 bp, Glycine max
  Clone ID: LIB3051-115-Q1-K1-B12
cccacgcgtccggttgctgaccacaagtccttgtaggttgtatctgcaaaggttagactttgtcttactggtttgtgcatttcctctttgatattgtgtgatttaagactttaagcattatttatcaacaacatcgtagccgatcaagatgttaaaaattgcaatcttcctttaggaccccatatttaataattgagctcaattttttccttgaacacataatggctgatataagatatttgaaatatataaggcagaataaaaaaaatatatttttcttaaacaagcatgatacagtcacatgttgactttattttttgatgaacacacgttatttgactatgtaatgatgtaaacttcgatacgtttgacaggaaaatactaggatataccatgaggtctttgcttgcattcccaacaatcagatacac

SEQ ID NO: 33310 - DNA, 346 bp, Glycine max
  Clone ID: LIB3051-115-Q1-K1-B4
ctctccatcacaatgttctcacttaccaaaaccgctacgctcaaaaaattcaaaattggtctgcgccaattctccttcgagcgctactccttacaaatcatacctatccgataacctgtgattcatacactggctccctgctaaaaccttcactcggaacaaatgctcctaaacagatagcaatgtaagtcctgcactgatgacagtaactcatgatcttcatgagatacaacgctcgatccactgtctgacaatcactacatacctgattcacaccttattaatctatagcacgaggtgactgaggacttactatctaccctgtgatttaacacaatgctatctc

SEQ ID NO: 33311 - DNA, 420 bp, Glycine max
  Clone ID: LIB3051-115-Q1-K1-B8
gggcctttcatgacatacctgccatcttggacataaagaatggcaagcgccctttggaccccgatggggaggaagaaccccagtcaaggaaggctaataggatagtggattctcaccatcaaggcaagacaactcagtttttgtttcaacaactatcatgtcatgctgatgattctgctgttccgcaaatggattgtgattggaggaaaggttgtgagtacgagagtaattcgcacagagttgagaacactgacgccttttctgcccagctattggatgaacgagagccgcattgcactggagattcattggtggtgtcacagtgaccttcaatccaattaacacgaggaggatcaatccgatgattcatcagattctggtgttcagcaatccagtgaacagctgatggagcacgacgtg

SEQ ID NO: 33312 - DNA, 77 bp, Glycine max
  Clone ID: LIB3051-115-Q1-K1-B9
tcgtgctcttgtaggatgcttaaagtggaaagaagagtgactttatcaaagggagctagaaatgggttaaaattttt

SEQ ID NO: 33313 - DNA, 440 bp, Glycine max
  Clone ID: LIB3051-115-Q1-K1-C1
attcggtcccacaaatgcgagtattcataaaattctcacaggtcaagtaccgcgaccgtggccttaggcatggatggtgacaaaaaaagtttggagaatcttatcaagaaaaattgctggtggaccaagagcagctgggcatttctgaatgaaccgccagttatagaagctgcttccaacaagtatgcttcacagtttcaagtggccaacttgggatcaacgaaatttaaccccggagatggaattagtgcttgataattgatattagtctttctcacgtcaccctgcatagttcatagaatcgtagattcatagttggtgtctatatgtataaattaaggcttctattttgtcgcacacaattctgcataagaactgtatttctggtttctttgaaaagggttcaaattttctgaacagatttgtatgagaaaatgttc

SEQ ID NO: 33314 - DNA, 335 bp, Glycine max
  Clone ID: LIB3051-115-Q1-K1-C10
cacacgcgtccgcccactcgcccggatttacggctccttcactcacatcacagccgcgtggctcatctgtgcgtgctcttgttctttgtcaggtctgtcgcttcttgatccacaacttggatccatttcattccgatcctgccccttcaccggcactgcatatcgatctgatcaatcatacaagttgattgctctcgcctgtatgttgctggttggctttgaggacaagaacttttacattgttcacacatgtgccatcattgaatgcataaagggactggtgtttgacagtgcagcgatgacatttggcttgacgtactgtaatttatgcaatg

SEQ ID NO: 33315 - DNA, 260 bp, Glycine max
  Clone ID: LIB3051-115-Q1-K1-C11
aaaaaacaaacaaacactcacttaaaaattaaaaataaaaaaataaaataactaggaaagaaaatctacttcctctcttacagatccatgctgactctgtcactcacgcgatgcacatattagttccacttcatacctatcttcaacactctctcactgttcatacctctctgaaattcaatacacgctgattgctctcgcctgcatggtctcgcataacattgaggtctagagctttaacgtctttgccacgtgaacca

SEQ ID NO: 33316 - DNA, 324 bp, Glycine max
  Clone ID: LIB3051-115-Q1-K1-C12
ctttactaacttacaacaatatgataaaagcaatgcacacacacactagtactgccagataaccacatcacccgatggcaacggacttaatttcattcccattattgatattaatccccttttggcttaaggcgatgattcaaaaatgggtgaggatcctggtgtgcttgaggttgttaaacaattggataaagcttgtacagaagcaaggttcttctacgtgaaagggcatggttttcctgagactctccttaaagaagttagagatgtaacgcgcagattctttgaactttcatatgaagaaaaggcgaagatcaaaatgac

SEQ ID NO: 33317 - DNA, 432 bp, Glycine max
  Clone ID: LIB3051-115-Q1-K1-C3
aaaaaaaagatttcttagggtgaaggttggatctagttatgatttaggtatctcaattggccgctcttccgctgcgccgcccccttatcgtcaccacaaaacctaagacactcaatagatcttaacttggtaaccactttctcacggcaagggctgtttgaactttgaaccgccgccgtcaaccgtctgccactgccaggttagtagaagaatacaatcaccactttatattattcgatcgttggtatgtatgactctcttattgtaaaaattcttatcatttatgaatttatgatgatttgttattagataatagtgtaaaaatcttttacatttactttgccgaccacaaagccatgcctctccatagctgcaagctgcgtcatttgtaaagattttgctagagttgtaagagcaacagaattaaattct

SEQ ID NO: 33318 - DNA, 289 bp, Glycine max
  Clone ID: LIB3051-115-Q1-K1-C8
gttctattagttcatactaagttctgaaaatgagttccaaggctatgcttgttctacgtatgttcttggccactatacttctgatctcctctgaggttgcacccgatgatgcatacgagaattttgacaaaatagatgggaagcctagtgcagatggggtagatgaaagcaagtattggcgtggcggctatggtggcggctatggtggtggatatggaagtgggcgtggaggctatggaagttggcgtggaagctatggacgactacgtgttgaatatggccgctgacg

SEQ ID NO: 33319 - DNA, 411 bp, Glycine max
  Clone ID: LIB3051-115-Q1-K1-D1
atggagagcgaggtggtgtccattgcatttgtctaatgaaaacatcatactatacaccggttgggaacgaggacaactatggtgctgccgctatttactgctttcattctcttcgcttttattccgtatggattgttagcagttccttccaccgtaccgtcattcctttggtcatcacattatgaactggcctctgaaaatatattgaaggaatctgtatattaccaagtcatttcttcgaacgatctatcaaaatctattttatctgaagcatgctggtcaaattttctgtgcacaagatagaaatttcatgagcctctggatctaacactcttactcgttcttttagattgcaaactctatatttaagcatgaacatacatgcaaactcagctcttttggacctgctca

SEQ ID NO: 33320 - DNA, 434 bp, Glycine max
  Clone ID: LIB3051-115-Q1-K1-D10
gtggttttgaagatcaaactgcactgtgacggttgcattgcgaaaattcgaagaatcagtatgaggttcaaaggtgtacaatccgtgagccttgacggaagcaaggacttggtgacagtgaagggaacaatggacgtgaaggagatggtgtcgtacctgaacgagaagctgaagcgaaacgtggaagtggtgcctacttcgaagaaagacgacgatcagatagagaaagaaggtgacggtggcgaaaagaaagagaaagagaaagacggtggcggtgagaagaaagagaaagacgttgctgcagcggcagaggttattaacagaatggaatatatgcaccagatggcacctccgtcgttctggtacgacggacgacactctccaggtcaaacatattacgctatggaagttcacccaggatatggtgctagtgc

SEQ ID NO: 33321 - DNA, 435 bp, Glycine max
  unsure (1)..(435): unsure at all n locations
  Clone ID: LIB3051-115-Q1-K1-D11
ggatgttgcatttgagaagaggaattatgatgaaatgcttgctcaatcaagagctatgaggagacaaggtggtggcaatcctcaagcggctccttcaggatttaggtaatcacacagcataaggccacttattcagctccaaatccaatgccttcaaaggatgctcgcgggttaaatttaagttgacgcctggcataaaggtcaaaaagctatctcacatcaaggccatgtggaaaatttctctggatattgtatgatatctgtatcttggcagttgggcgacttgttcaatacttatatttgaattacttatgcttagtttcaacaactaaagaaagtgaccatatttcttaagttgtaaatatcgaaccattagcaatgtgatggactntatctgatggctgcattctcttcaaccgtttcatttcacatttt

SEQ ID NO: 33322 - DNA, 436 bp, Glycine max
  Clone ID: LIB3051-115-Q1-K1-D12
tcgtccacgcgttcggcaccgtctcgcactgcgcatgcagagaaaaacctaaagtggcggaagatgacggaggtggcgagatcagtggtgcacgacgttttggggcaaagagtggtcgacgtggaccagccaatcgtcgattatatcgtcaacgtcctcgccgacgatgacttcgatttcggcctcgacggcgaaagcgccttcgatgccctcggcgagctcctcgtcgccgtcgactgcgtcgacgatttctcccactgccgctccgtatgcagcacgctgtgcgacaagttcgggaagcacggtttggtgaaggagaagcccgctgtgcgaagccttgcggcgccgtttcgaatgaacgagggaatggacgacgtccaagctcccaagaagaagcccgagcccgtcgacggccctcttctatccgaacgcgatc

SEQ ID NO: 33323 - DNA, 439 bp, Glycine max
  unsure (1)..(439): unsure at all n locations
  Clone ID: LIB3051-115-Q1-K1-D4
aataaaactgtaagtaaggttttttcaaccgcactcaaagtatgtgtcttctaactttgaagtatgtcgaatgcatttgatgtagcaacttttaaccatttcctatttgctgcaggatagtcattactaataatgctttttgctctagcaactttaaccattttctattttgaaagagtctcaattgttgcttatgaactaatgttgctgttcggaaatgtgattgcaggtatatagtttattaaataatgttgaagttgtatcaccatagatcgtcttatcaagtgtaaatctgcaccgacgattatgctgcttttgttcttttccctccttttttgggaatctccaactagctagttgtagtgctatagccaaaaatacaataaaattgatggagtgcacgagtaatgtgcatttctcctncatcttncactctctc

SEQ ID NO: 33324 - DNA, 426 bp, Glycine max
  Clone ID: LIB3051-115-Q1-K1-D6
tgatctgcagaaaaataataatggctctatttatcctgcaatagatcaaactcgtggaggtgcagaaccacctctaattccttttggcttgaaagggaatcacaaggaatgtgcaatccttggtttattaaattttcctccagtatatgaaggtgtttctgaggatcttcacccagccactgaagcatcgttacatgaataccccaggctcagtaaagattcagttgtagtactagaagcttccaacaaagagatagagatcattgtaaaaggaagttctggggtaaaaagtcactataagcaatctacggtgagcttatccagcgaatcaaaacaggaacaagaacatgtaaaaaataaagttgaaaatcagggtgctggtaatattccaagatacttgaatctagaaccatcacttgcaatgga

SEQ ID NO: 33325 - DNA, 424 bp, Glycine max
  Clone ID: LIB3051-115-Q1-K1-D7
tccactcctacgtccactcgttcgaccaccttcctatgcttcttcttcatccgtggtgggccaaatgcccaatcttgtcgaccctgaaatgttggcctgcatgacccgcgccatctgcgacgtattccagacccgatccgcactcaagctaatcgtagcaccgcccacccacgagcaggtggactacgcctatgccagactcgacgacctctatgaccatctctgccgtcagctccaacagatcgtggacctgctcatgccccacgagatcgacgagctccgctggcggtcccatgatcacgagaaagataatgccattaaagaatccacggagcaagagaagcgcgttctcaaatcactgattcaactcgtccagatgcacgattactacgagaagctgctgaaggacgcccttaagcgactc

SEQ ID NO: 33326 - DNA, 330 bp, Glycine max
  Clone ID: LIB3051-115-Q1-K1-E5
cccacgcgtccggtcgaagggagatgtttttggaattaaaataagctggaactgcaatgcccccatttgcattccttgcaatcaaagatcattaaataaaaatgacaaccttgtctgcttcaaggttgttggtatggaaccttcagatgagccggttttccgtgtcaataacaccttaactgctcttgtgctggtagggagttctccatccgcactccctccagatttgttgattggtggacaagcagaaggacctgtgcctttgcaaggggacactgtgaacatcttggcttcaatacttacaccaactttttgtccgtcagtgctttc

SEQ ID NO: 33327 - DNA, 437 bp, Glycine max
  Clone ID: LIB3051-115-Q1-K1-E8
cttctttgccgtagaccaccattactaccattgtttccactcaccaacacacaggaccggagcaattagggtttgtagattctgttgttcccaccacagatatcacattcgtagtttcaatcagcgtttgaatctcgcatttgcaccccctactgccgcaccgcaccttcctcactccatctctgcctccgccaccagtcactttcctccccaataaacaaaactcacaaagttaacccctttccctttttctcgaaccagaagacacaatttttcacgaaaagaaagacaacccaaaagcagaagaaaccttttcctaacccttgcaagcgttgcggcatcaccctcgatagttgaaaccgatcaatcgttcccagaaaccgaaaaaaatgaaactaagagtttaacgatgagaactcagacactgtttttgtgtt

SEQ ID NO: 33328 - DNA, 372 bp, Glycine max
  Clone ID: LIB3051-115-Q1-K1-F1
accacgccttccggtggttgtgccttatttctaaagtactgcagacatccctgcacagagggggttccagctgactggtgactggcaaagcccgttgcgcacgcctctcccggaccctgcctgacttatattgcaggactgctacactagacgcctccagatgatacattgcattagatactgaccaagcttatacgctggataagagtgtccactctgcatcttaatccatatgctctaagccaactaacgcctcataggatccatatgtccactgacgtaaacatgcacggtacacggggcctggactagtgcaaactcatgaatgacccatcggtatccaaggaccatgctatctgcgaacatccttca

SEQ ID NO: 33329 - DNA, 436 bp, Glycine max
  Clone ID: LIB3051-115-Q1-K1-F10
cccacgcgtccgcccactcgtccgcgaaagcaaagtgtctctctaacctctgcaaaaggccaaggttgcacggttttaactgcttaggtttttgtcttcaaaattaaaactgtgcaactttggttgcaaagtcataggggttaagttgtgtttgcatgaaagtgggcttgagataattgtgcctcttgtatgatggaatccctttggaagcttttgtatttgctggagcctgcgcctgtcacacttatcactacagctgtggctgtgacatttggtgctgcttttcgagctctaaactatgggaaagaaatggagcgtaatcgggacttctctgaagcatcgattacattggataggtctcaggcattgatgatcccagtgatgagctcttttagctcgcttttgatgttctacttgttctcatctgtctcacagc

SEQ ID NO: 33330 - DNA, 438 bp, Glycine max
  unsure (1)..(438): unsure at all n locations
  Clone ID: LIB3051-115-Q1-K1-F12
gaaaagatgaataagatttttgcaatgtctgaagaagaaattatgtcagaccaagcagaggtcattatgaagaaatctactaacttttgttggccaagtattcaggacctgaatgcagctgcccacaaagaaaaatgtgggtggtgctttacttgcaaaggtgaaaatgaagacagggattgcttgtttaattctgtggtgaagcctatttgggaagtgcctaataatactttagttgggcttcaacccaggaagatccagaatggacgtcttagagatatcatatgtcttatcttctctcttgaggttcgattacgtgggcttttgttgggtccatggttgaatctgcatcaaactgatctttggcataaggatcttttgaaggcatctgattntcttcctgttaaacgattatggcttcttttagaatccaatttg

SEQ ID NO: 33331 - DNA, 411 bp, Glycine max
  Clone ID: LIB3051-115-Q1-K1-F3
cccacgcgtccgacagaaaccaccttgtttcggaattctgttgcaaaattaagacagaggaagcatactccattaatgggtggtgttagatggggtcgtacagagtcatcttcatccatgaaactcttcttgctcatggtgcctatggtactggttgcaaggcttgtttctgtattgggtcctaacccctctagttggctctttagtgcatacgcacctgtgttatatttggagggctctgttacttcctcttcctcaactagtagtggtgctgtgactgtgaccaatccttccgaggtgaagcagatagaacggttagtggtgatggtcgtgtagaatcgtggtggatagaaagttatctccgatgacactgacttcaatcactcttctacacctacatgttctgttcag

SEQ ID NO: 33332 - DNA, 181 bp, Glycine max
  Clone ID: LIB3051-115-Q1-K1-F5
cggacgcgtgggcggacgcgtgggctttttcttttgaacatgttccttttttcttgccattgctcttttctttcggacagtcaatttagtatgctttaaagtttgaactatctttgtcaaactttgatgatgtagacttccatactttgtataaagatgtaatgaaaatttagtagcattc

SEQ ID NO: 33333 - DNA, 410 bp, Glycine max
  Clone ID: LIB3051-115-Q1-K1-F7
ctccctctcggaactttgaaaacgtggaagcacacccgagagcccacaccagtccccgtttgttccgctgcaaaacaaaaacaccgcgtcttccccgtgcggggaaaaagaaaagaaaagaaaagaaccctcaattttccgggaaaaccctacccacaatggtttcccgggaaaacaccaattggctcttcgattacggcttgatcgacgatattcccgttccggacgccaccttcggcgtcaattcctccgccttcacatggccccctaacgccttgaacgcttcctccaatgtcggcgttgaaattgatggctcgttgggggattctgacagtctcaaagagtctggctcaaagaaaagggttaggtctgagtcatgtgctgcttctggctccaaggcatgtcgggag

SEQ ID NO: 33334 - DNA, 451 bp, Glycine max
  Clone ID: LIB3051-115-Q1-K1-F8
ctttttcttttccctttctgcctctcggaactttgaaaacgtggaaacacacgggagagcccacaccagtgcccggttgttccgctgcatatcataaacaccgtgtattacccgtgcggggaaaaagataataaaagaaaagaaccctcaattttccgggaaaaccctacccacaatggtttcccaggaaaacaccaattggctcttcgattactgcttgatcgacgatattcccgttcctgacgccaccttcggcgtcaattcctgcgccttcacatggccccctaacgccttgaacgcttcctccaatgtcagcgttgaaattgatggctcgctgtgggattctgacagtctcaaagagtctggctcaaacaaaagggttaggtctgagtcatgtgctgcttctcgctccaaggcatgtcggtagaagttgataagggataggcttaat

SEQ ID NO: 33335 - DNA, 420 bp, Glycine max
  Clone ID: LIB3051-115-Q1-K1-G12
actcggtgtccttcaaacatggtaaaggtgtttatttttccttcaaatgtgcattattctaataattcagtaagctacaatgacctggtattcttattttgttaaagaagctataatgttattatccagctgatggccaatttgtaacgagcttatggtgcctactgcatttgcttcatgaaaaacccaagttggaatgaaggcccctcagtgaactgatggagttacaactctaagaattgacctgatgagcaagtctatatgctctcgtttatgtgatgatctgatggcttcaaaaccattagcaagcatacggattatcctagataatcttgtatcaatgatgagtccttcctcactttttaaccactaaatgctgagctgccttagaatctgattcaataataactttgggaaatt

SEQ ID NO: 33336 - DNA, 409 bp, Glycine max
  Clone ID: LIB3051-115-Q1-K1-G2
cttctctattttaagtaattcaatggcttacactgcaagtcttgtgttcttagcttcgactttccttatcataaactttcctcttctggcaaacgctatcggatgcaatggaccatgcagaaccctcaacgactgcgacggccaactcatttgcatcaacggaaggtgcaacgacgaccgcgacgtcggaacccacatctgcggcggcggaatgccgccaaatccgccaccaagcggcggaagctgccagtcctcgggaaccctaaattgcggcggaaaatcgtatcctcagtaccgttgctctccgccggtaacttcctcgacgccggcgatcctgacgctgaacgacttcagcgaaggcggcgacggatgggacccgtcgcagtgcgacgagaagttccataacaac

SEQ ID NO: 33337 - DNA, 444 bp, Glycine max
  unsure (1)..(444): unsure at all n locations
  Clone ID: LIB3051-115-Q1-K1-G3
cccacgcgttcgcccacgcgtacgattgacattggcatggctacctcgctgtgtacacgcagctacagagtcacactgaaactgtacggaacagattcccataagttaaacgcaaagccctcagttcgttataggcgtcgttttggcaccaccaccagaatatgctgcacctctaataattacaacgacaacaacattcaacgacgaccccaatgcgaagctattcaagtttactcgcanatcgagagattacttacagattctgttagacaatcacaggatggttggtggggttccccagactggagtgaagttgagggagcttggattctcaaaccgaaaagctctgaacccaattatgtagtgcattttatcggacgtatatttgttggagctgctcctcagcttacctaccggaggtttcttgagcgtctctcagaaaag

SEQ ID NO: 33338 - DNA, 443 bp, Glycine max
  Clone ID: LIB3051-115-Q1-K1-G5
tcgtccgtccactcgtccgcggatccatacactcccagaaaacatttttcattctatttcggagcgccagtcagcaacaacaacatccctttcctttccacaagacaccaaacaaagttcacagctttttttgttctttcacctcgattcacgaactgggtcatcctctgattgtggattattggatttcattttgagctacaccacacccccaagactttgactttcaacccaaaaccaggtaataaaatcaaataaaatctcatcatcttcctttgtctataccctttctagatacatatttctttctttctttttgtatttgaatctttttttttttcttctctctgaattctcttttgttttctagtgctggtgtgtgatttgaaggaggaattttaaagtggcttgtggttttagaattctgtgactaacgcgttctg

SEQ ID NO: 33339 - DNA, 434 bp, Glycine max
  Clone ID: LIB3051-115-Q1-K1-G6
cagagaatacctgctgtgcctttgagatcatatggcggggtaacctctataaggatcgcaaaggcagagaatacctgctgtgcaatatgttcagcaggatattgacgtaggggaaattgcaagaagctcacctagctgtcaccatacattgcactagatatgtgtggacaaatggcttgtcaagaatgattcttgtcctgtctgcagacagaatgtataacttgttccttgggcaatatgagattatctttatgggcagatgtatatgttgtataatccgtttctatacacacatactgagattaccattaagatttgaatagttgacattggcatcttgctctattctgcgatgtaatcgataaatgatactatatgggatggaagccaatgcccaataacagatgttttgggagaatgagactaacgcgttc

SEQ ID NO: 33340 - DNA, 366 bp, Glycine max
  unsure (1)..(366): unsure at all n locations
  Clone ID: LIB3051-115-Q1-K1-H10
gtttattctatcatatccttgttcaaataattctcttttcaattacaataccgggatggcagaaacttatgttcatgaccattctcaaggtcccaataacatttacttgaagacaattttgagttgaccttacagcctagttccacctatacaaacacccttgatccttcattcttttttgagttgaccttacctagctccaatactggcaacaataatactcttgggcatctgaactatctccattcttttttttgctgctttctttgcagtggatttgctaggttttaaagaaattaaatgcgtttntatgttgctaagagctaggtaattatagaattcatcttacacatacttcattttact

SEQ ID NO: 33341 - DNA, 457 bp, Glycine max
  unsure (1)..(457): unsure at all n locations
  Clone ID: LIB3051-115-Q1-K1-H2
tcgggaacctcatcccttgttaggtgctcttgaaaacataccagtagtgcaaattgctgctggatattgctatctactttgtctggcttgtcaacccagtggaatgtcggtatattctgttgggtgtggtttggggggcaagcttggacatggctcgagaactgatgaaaaataccctcgtttgatcgaacagtttgggctgctgaacctncaacccatggttgttgcagctggtgcttggcatgctgctgtggtggngcgggatggccgtgtttgtacgtggngatggngccgatatggttgcttggggcatgggaatgaagaatgtgaatcagtacctaaggtggtggaagcattgagcaatgtcaaagctgttcatgttgcaacaggagattacacaacctttgtcgtgtctgatgatggtgatgtggattcatttggctgtggagaatctgct

SEQ ID NO: 33342 - DNA, 441 bp, Glycine max
  unsure (1)..(441): unsure at all n locations
  Clone ID: LIB3051-115-Q1-K1-H5
ctgattggaactagaaagtagaagctgaaaagagaagaggttgcgaccaactttgcaatcgcacctcgaatcaatcgacactcagcggaaaccctagaaagtagaaactgaaataataataataataataataaaaataatagaatgcgaatttagagattttgcaaatggcgaagcattcggtggcaatggcgaagaagcggtggccgataatgttggcggcattcttgtccgtctcaacagtgacggtgctcttaatgagatccaacaactccgattcctgcaacaccaaccattttactgttgcacaagataatcagattcgttcccctgtccaactcacaaatgcggcttccagtcccctaattntcatgaagtccaagctagttctcatggtttcgcacgagctttctctttcaagcgggcctttgctgctgatgg

SEQ ID NO: 33343 - DNA, 223 bp, Glycine max
  Clone ID: LIB3051-115-Q1-K1-H8
aacagcgtacgaatatggttttctgattcttcttaacactgttcattgaagggttcagagtattctcaacaagactcgcgctctgcgaggaatcgcctctgggataagagtcatactgcgatttgttaagccaggaatcccgctgcaggacatcatcccgctgactcttgatacataggctttcagagacttcatagacttgcatgtttggaggtaccgatgt

SEQ ID NO: 33344 - DNA, 157 bp, Glycine max
  Clone ID: LIB3051-115-Q1-K1-H9
cccacgcgtacctacatgaccttctgattctccttaacacttctcattacaggggtaggactatcctcaacagtactcgcgctacccgagaatcgcctattgtaccaacatcattcgacgaataccataaggcagtaatttttcagcagacacataa

SEQ ID NO: 33345 - DNA, 433 bp, Glycine max
  Clone ID: LIB3051-116-Q1-K1-A2
ctcagtttatgccctttcgccgccttattctgattccagaaacatcttcaatcaatcggccctcgtctcctctcaatcaagtttgaagctgagaaataatcatggccggtggtgcgaatttcgtgcagagggttctctcttacgtggtgaatgaagtggttgtcaatgggcttgccaacagccctgcatttcagaggtttgcagtgaggacatcaaaaagaattgaagatatttctaacaaagctgttcagaagaggcaggagctagctgagcagatcaaggacatctcaaaaaatatggagtcattcaagaaccagtaattttggtattcttgctaatggagtcctgattttctttagccaaagatgttcctggtgacaaggctgggtttttgtaaatttcttttggtggaatatattctggttcttaactc

SEQ ID NO: 33346 - DNA, 436 bp, Glycine max
  unsure (1)..(436): unsure at all n locations
  Clone ID: LIB3051-116-Q1-K1-A8
gatttttctgatgaaaaccatgctggcgagggccctggaggagcagttgcaatggactgtgaaatggttggtggtggaagtgatggttctctggaactttgtgctagagtgtgtttggttgatgaagatgagagattaatcttccatacttatgtacagcctgaaatacctgttactaattacagatatgatataactggattgacagaagagcatcttagaaatgccatgccacttaaggaagttcgagaaaagctactgcaaattctacacaatggagaatccattggcaaagttagactggatggtggaaaagcaaggcttcttgtggngcatgacttagcacacgatttggattgtttaaaaatgaattatcctgatcatatgctgagagacactgcaaagtaccgtccgttgatgaaaaccaacttggtca

SEQ ID NO: 33347 - DNA, 419 bp, Glycine max
  Clone ID: LIB3051-116-Q1-K1-B11
cccacgcgtccgctcctctctctctctttctctccttcctctctggccatgattggaagtaaagatcgttctgctgactttgaaggtgagaactccaggagcaagctttcaaggcacaattttgaggccaacaaggagtacccagatgaaaaaggtgttgaatttctgagggattcatcagaagtgggtggttgtggtggcagctcagggttgcaagagttgaccctcagctacctttgtgacaacccaaaattcaatcttgctgagaaagagattcctggtaaaagcttgttggagaaaatgagccacaaaggtaaagaggttgtggtatgtgagaattcatatcaagatgggaaatgggtggaaagagatttcctcagcctgagtgagccaagagaagattcttcaaagagatccct

SEQ ID NO: 33348 - DNA, 426 bp, Glycine max
  unsure (1)..(426): unsure at all n locations
  Clone ID: LIB3051-116-Q1-K1-B12
ggagaaataatggtttggttcctttaagtccaattgtgctgcttgtggaatgtgctgatggcataactagtgcagggttaggtgaaggtgacaaaaaggcaaaagttagggctagattgtcacggcctctttcaaaacctcttcagagaggccgtggaaaacatgttaatcatggggacttccgctctggccgcaattctggaagattggtaaggtcttcacggagtcaacctgcaccacgtagtcttcctgcccatgtggtgagaggagttggaagtcgtgttccgccagttagacctattagtgtgagaaatagacgtcctgtcacacccatgctagtaagagccaggccagtggctcctncagctagaagctatgacaggagattggctgctcctgcttattccaaaagtggcatgaaaagag

SEQ ID NO: 33349 - DNA, 131 bp, Glycine max
  Clone ID: LIB3051-116-Q1-K1-B3
cccacgcgtgcgtccacgcgttcgcacacgcgttcgaaatagagataaaaaaaataaaggataagaaaaaaaaaaggtgaaaaaataatagaagattataatatataaatgaaatgaatgaaatgaaagta

SEQ ID NO: 33350 - DNA, 411 bp, Glycine max
  Clone ID: LIB3051-116-Q1-K1-C10
cccacgcgtccgtctgtgtctaggtcacgatctagatctcaatcagcatcaccaatcggatcttctaggccaagatcacgatcccgatcacgatcacgatctggatctggatctcctcatcaggtcctgtcaggtagtggttgaatttctgacaaagctggtggttctctggtgatattgttccattctggtgggcagtatcggaattatattggagttggactaaattgttttaagggaaaattattgatgtgcctaggctgtttggtgattgtcttatttcttttaaattaaaatgttggacattggccttgccctttgtaccttagcaaacacaagaatatctttagtcctcgcaaactgtgaatccaatttgaatggttttaaacagatttattaaaaaaaaaaata

SEQ ID NO: 33351 - DNA, 399 bp, Glycine max
  Clone ID: LIB3051-116-Q1-K1-C3
ctacaacacaaggttaattgaaatttgaaatcctagaagagaagtacgatgtggaagtggttgttctctcgggagccagcgccgccgccgccgccggtggttctggtaccgccgctcttcgacttccctcccctcgccgcgcgcaaccgcatgctccattcctcctacgacgtcgttttcggcaagctcgccctcacttcgctcttcgaggactacttccaccaggccaggaacttcaccaccagaatcatgctcaagccgatcgaggatcctcacgtcgatctcattgcaaccgtttcgggtcctcttgatcacaagccaaaagacagtattgccggagatgcattgtttcgctggcaaagtgatgttaatgatcctcatacgtttatggacctttat

SEQ ID NO: 33352 - DNA, 212 bp, Glycine max
  Clone ID: LIB3051-116-Q1-K1-C6
cccactcgtacctcaacactttctatataatatcatcccattatcacttcatcgtcaggccgatcacgcatgcccgactagactcaaccttcgactaacccaatcctcacctttacgatcacctctcatcaacgcaagtacaacaaccatcactgttatacagtcttcttcgacgtctcaaatacaccatcaaattcatactgcctatacaa

SEQ ID NO: 33353 - DNA, 386 bp, Glycine max
  Clone ID: LIB3051-116-Q1-K1-C8
tgcaagcgtacggaaatttagcaacgcaatgggttctcttatggcaagatgggactttgtgacctaggatccagaattaactacaattgataggaatcgatatgttaacaaagaggaaattaaagctttctggaaaactaagaatgaagccgaattagaacacctgaaagctctttacaaattatctgagactattcgggcacgcagatgcgagtattcaaacagatctcacaggtcaagtaccgcgaccgtggacttaggcatggatggtgacacatgacgtttgtagaatcttatcaagacaaaatgctgcagatactagtcgtgactgcatgtggaccaatagcatctgggcatgtctgaatgaaccgccagttatagaagct

SEQ ID NO: 33354 - DNA, 325 bp, Glycine max
  Clone ID: LIB3051-116-Q1-K1-D2
agagaatcaaaaggacacgtttcatggagcttaaagatgacgtccacaaggctttcaacgatggacaaggccgagtttagccgctctgggatttcatcttcatcatcctcatcatccctaagagattctgttgtacattacaaggctaggaaagtgtaataataaaagcatacatagcgttttttattttgacatacatattatatatagtgcaaatttgaaaggtgaagcctaccaactcatctgtaaaattgtgaaagcaggaaagttgatgttatagtaccttttgtaatcaaaaaagatacactgaaaaccaaaaaggtta

SEQ ID NO: 33355 - DNA, 430 bp, Glycine max
  Clone ID: LIB3051-116-Q1-K1-D3
cccacgcgtccgcccacgcgtccggtgaaagagaaaatccgagactctgattttgagagtcgagtgagtgagtgctgcttcctctgaatcaaatcattcatcactctctctggttctgagtttctgacaccaaaatggtgaatcctcgaattccacgttcaaggatcccaactttcacacctttcacttctgctatctccatcgccctctgcattttctttgttctctctcttctcttcacttcccattctgattcatcccatcaataccaccacacaggttctgatggtggtgttgcacatggatttgagtcaataaggagatccattctagctctgaaaacagatcctctcaagcctcggttggaccagattcgtaagcaagccgatgatcatcgctccttggctcttgggtattcttcctatgcacg

SEQ ID NO: 33356 - DNA, 352 bp, Glycine max
  Clone ID: LIB3051-116-Q1-K1-D7
gaggaatcacacaagagaaatttggtgtggatcttggcaatttatatttggtggatgaatcgttagaatgaaaaccatcgcttatatagttcgcatgtacttgctaacggtggcgcaccttagggggtcacgtgagttcatgcgggtctcggaaagacatggcggctaattttgcagtgacggctatggtcaatatggctatggacatgacgatcgtagaggtgctgggtgtgatgagctccgctcgtagtacacgtttcatgtgttgactcatggtgatgaataccttctaggtggcactattagattctcaggagttcaatcggttatacgcctataaaaataacttttt

SEQ ID NO: 33357 - DNA, 360 bp, Glycine max
  Clone ID: LIB3051-116-Q1-K1-E10
gttatatctcaccactaagtttattattatcaaaaccaaaagctagcaagctaccttgcgaagcaacacatggcttctacagacaagcatggcgacactgaatacagaacatcatcttcaactccagctcctgcgggtgttgattactttaaatttgatgttatcctaaggtttgtgttatttgcagcatcactggtagctgttgtggtgatcgtcactggtaatcaaacagaggttattcttgtgccacagcctgtgccatggccagccaagttcagatacacaccagcctttgtgtaatttgtagctgcattgtccgttactggcctctacagtatcattacaacacttgcatcactc

SEQ ID NO: 33358 - DNA, 390 bp, Glycine max
  unsure (1)..(390): unsure at all n locations
  Clone ID: LIB3051-116-Q1-K1-E11
ttccaaggagcctggccaggtgcagcttcctccacctnctccacctagtcaggtgccagccaaggctggtgctatccagtctgatggtgctgtgctttctactgagaataagaattcactgtcaagccaggagatcccaaaaatggttgccgggcatcctcctccaaggcaacaaccccctgttccaggacccaccttaatcccaagtttacagcctgatgtattactccctggaatatctcgtttccctccacccccgccaccacccgatatgagaccttctttgtccgtcacagggctacatgctcaggcaccacctnctggaatgatggtccccctaatgccaaggccaccatatggtcctncacctggtcctnctccaatgatgag

SEQ ID NO: 33359 - DNA, 426 bp, Glycine max
  Clone ID: LIB3051-116-Q1-K1-E12
cccacgcgtccgcccacgcgtccggtggcagcaactgtcacaggctgcttttgagaaagttgagatagataaagatggctatattactacggaagaacttagaatgcatacatgcttgagaggctccgttgatcctttgctagaggaagctgatattgacaaagatggaaaaataagcctaccagagtttcgtagactcctaagaactgcaagcatgagttctaaaaatgtttcaagcccatctgttcatcggcggcggagattctagattagaggtgcttcagaggctgagataagtttggagatacgagtggtggagttcctctataagtatcttattgtgtgattgtgctgagtctcttaagactatcttctattatgcagattttagccactcatccatgctgacaatctatgaaactcaaa

SEQ ID NO: 33360 - DNA, 422 bp, Glycine max
  Clone ID: LIB3051-116-Q1-K1-E3
gcggtgcgttatggaggaatgatcggagtagcagccatgcccagtggatgtagcatcagagcaatatggattctcaacaaccttgacggcgtcgttttttcccggaggtttccggtggtagagaagcgttggcgagctgcttgcaactcaaacgcccacaatgatacccatcaaatcttctcttccttacccactgactccgacctcgctgatgcttttctcgaccgaaagcatagggagggatctgcacgaggatttggcatacgaaagagtaactcaactctgggatcggattcttgggtggatgatcccattactcgccatatcatcggtctttacattagcagagaaggggaggaaaataagaatctattgtggcctttaatcttgcacacaaagggcctttacagtattcttattct

SEQ ID NO: 33361 - DNA, 374 bp, Glycine max
  Clone ID: LIB3051-116-Q1-K1-E6
aggacgcgtgggtcagagcaacgctagcattagcattcgcctatattatgcaacgctgtgctcatccgatatcaaccactctcagacaaaccgaacactcgtgctgtgtctatctcattccatttattaaacaatgccattgctgatcaacataattctgacaccctctatagcaatggagttggacctctgattactctaactctagctaggattgagaaacatgatcaatatcaacgactacgagtcgaagagagtggtttgtttcaactgttaataatggctgacgagtatcagcgtcgtgaaactcagatgatcttaccgatattgataattctgctgcttgtgttgatgctggatcgatgtcagggctc

SEQ ID NO: 33362 - DNA, 397 bp, Glycine max
  Clone ID: LIB3051-116-Q1-K1-E7
attcaaagggcaacaaacaagaaggcacagactcagagtcagagcaataccaaaacggagaaaatcaactccacacgctttcggaaccatcaccatccttctctctccgttcccgcaaatccccttcgccaccactccactccctctctgactcccccatctccgatgcccacctctcccctgcgccgcagaagccgccgtccgattcctcgccggactcctcgatctccgacggccacttcacgatcggtgaacagcgcctctccccggcgccgtcgaccgtggtgacggctcatcggttgaaggtggagcccgcggtgttgaccagggtcgatcccggcgccgaagagggtttcgtgaaagacgtcgaacaagccaccggcagcgccggtagtcg

SEQ ID NO: 33363 - DNA, 430 bp, Glycine max
  Clone ID: LIB3051-116-Q1-K1-E9
cccacgcgtccgttcgtatcaaaattctatttgggacatctcttctcaaaccaaacagggccttatttgtgtagtgtgaatgtgtgatggcgagtcgttccttcttaaaaaattggaaaatccttgattttgcttcgttactactgggagagtttacgagaagtatcaaacccataaaagacgtttcttcaacatcattgaccttcgttgaatttaattcgttcaaaacggcgttgtgtttccggcaataccacgacggaaggcccagaggccccctttggaaaggaaaaaagctcattggcaaagaagcgctttttgtcatatcggggtttaagaggtttaacgatgacgaggataagcttcacaagttcatcaaaactcacgttctcagactcttgaagatggacatgatcgctgttctcactgaact

SEQ ID NO: 33364 - DNA, 409 bp, Glycine max
  Clone ID: LIB3051-116-Q1-K1-F1
cggcttcaaccttgtagttattctctttcttcttttttagctatccctctcttgaaagatctagatctcgttcttccttgatctacgttacgcttttagtgaccggatctgtatggatctgaaccagatctacacgccgatggtggttttggcctggtctttcatagatctgatgcatggaggctcagatctactgtacagaggtgtgcgattcatgttcgtctctcttttggaatctgtttcgtagaaagtcgtttggtcttccatgtcgcatggctcttgaggtatttttttttgcagatactgtagataatcgatgagaagaacgcagatccagccgcttccgcttgttcgatcgctacagacgcttgtatcggattattcatgattgaatcataagcagcatgtc

SEQ ID NO: 33365 - DNA, 411 bp, Glycine max
  Clone ID: LIB3051-116-Q1-K1-F3
caggactacaggagcaattgaattagtattgattaacgttacatctaacgggtattacgaagtcaaccgatctaaaaaactaaaactcggatcccctttatgttgtttattttgatttggagtggttccatcgggagtttggatggccaccttgaatgttccccctcttcctccttcaccgagagacgatgccatacaactttacgctgctttcaaaggatttggatgcgatactagcgttgtgatcaatatacttgctcatcgagatgctacccagcgtgcctacatccaacaagaatacaaagcaatgtattctggggatcttctcaaacgcttatcttcagagctttctggcaagttggagactgcactactgctttggatgcacgaccctgccggacgtgatgcaat

SEQ ID NO: 33366 - DNA, 420 bp, Glycine max
  unsure (1)..(420): unsure at all n locations
  Clone ID: LIB3051-116-Q1-K1-F6
aaaaacactggcattccatttttcaccggttcccggacttcaccacaacgatgggcaacgaccgggttttccggcggaccgagggccttaacaaccaacttcttcggcggacaacccccacccttcggcccttcttcaaccccaaccctgccttagctactcccccccgagctctcaacaccatctncttcgacacgcgtgagatgcgaaaactaatggattgccacaatctggaggagcgcgactggatcttctctctcatcctccagagccccctcttcaacccccgccaccgcgccggaagggtgttcgtctnccccgactacaaccagnccatgtaacaccagcgccaggccaccatgaagcgcatcggttatctcctccaaaaaggggtcttccgaggatggctcacgggaaatg

SEQ ID NO: 33367 - DNA, 411 bp, Glycine max
  unsure (1)..(411): unsure at all n locations
  Clone ID: LIB3051-116-Q1-K1-F8
cccacgcgtccgcaattgtctttttctgttgtttctttaaaataaatacttattccaggtagttactattttcagcatcctaaatcagaaatagctggagccaagttttgcagttctgacttggatgatggtagttctgagttgagtttaggaagcacagaaggtaataatgaagattattctagaaaaacaattcattggagtggtagagaaaatactggaagaggaaggaataaagaaaagaaaataaaaaaagacaggaagaatttagagacaggagagaatttaaacaagcatttgaatgacataaaggaagcctncagtggaacagatgatggtaaaaatcttagttttatcaaatcaaattttgtcacagattttgcagatgcaaaaaattcaaggtcctcttac

SEQ ID NO: 33368 - DNA, 404 bp, Glycine max
  Clone ID: LIB3051-116-Q1-K1-G10
accacttctccaactaatgggcgtgttcagcgaagatccgaatgccaacccgaacccgagcgcgatccgagaggattgggcctacaatctcgaatacgaattcgaactcatccgcgaactcatcgatcgctacccttgtatctcaatggacacagaatttcacggcggtattttccgaccacatgtggaccccaccatacccttcaaccaccgcaaccgtacgtccgaccactaccgcctcctcaagtgcaacgttgacgctctcaacctcatccaggtcgagctcaccctcaccgacaccgtcggcaacctcgtcgacctagccggaaaccgctccatctgggaattcaacttccgtgacttcgacatggcgcgtgacgcctacgctaccgactacatcgatc

SEQ ID NO: 33369 - DNA, 426 bp, Glycine max
  unsure (1)..(426): unsure at all n locations
  Clone ID: LIB3051-116-Q1-K1-G12
ttaactctcttttctagaagaatcagaagcagttttcgtttaacttacagtatccagtgcctggttagaacatgactacgacaataattatgtcgcctgttgttcattattctgatctcattgttcccatttatggtcttatctaagttcaaccagatactattgttcatatcagaagagtgattgctgtattaaggtgcctttctagagctcccaggttgacaagcttggattgcgggtcaagtattagatgttgtatgagatatgaggccaaagttgctgagttgttaccaaaaaattctgcttgtaagaatgtggaactctaatggaggaatgcataatgtttgcaattgctcatgcatatcaatntgattcactgctaactnttcatgattagctatctgacttttccaggttcatgacact

SEQ ID NO: 33370 - DNA, 306 bp, Glycine max
  Clone ID: LIB3051-116-Q1-K1-G2
gtcgccgccggtaaggcaattcgatacctcttaaccctaaccagacgcagccaccgttgtcgatttccatacccctctcatactttgcctgattgctttcatgtttcgattctctcttttcatttcaatttttatacggttcgacgttgattgtatccagcaaaaaagtaaagaaaattataattgatttttgtcttgcggtttttttattgattgattacggttgcgtcaatcattgaaaaaaatattgaatcctccgttctgatttttttggagggttagggtttcgaaatttggggatttttt

SEQ ID NO: 33371 - DNA, 390 bp, Glycine max
  Clone ID: LIB3051-116-Q1-K1-G6
cggacgcgtgggtgggaagttcaattccgcttcaccaaaccctgaaagcccttaaaccgcaacccaaatctccatcaacaacagcaagagttccatggtcgttgaatcccaacaatgaaagctctgagaaccctaagaagaaccctctattccccaacacccgcaaccgtttttcgcgccttcttctccgcacaaccacagccgcaccacgatgaccccaccgactcctccgtcttcgatagttcccactacgcccttgaggccgagcccacgctcaagcccgagccaaagcccacgtgggacgagaagtaccgggccagggcggaccgggtggtgttcggggaagagggccccaaggggaagctgcgggtgaaggaagaagaggatgag

SEQ ID NO: 33372 - DNA, 418 bp, Glycine max
  unsure (1)..(418): unsure at all n locations
  Clone ID: LIB3051-116-Q1-K1-G7
cccacgcgtccgaatttggtttactcaatcgatcttaggttttggtcgagaagatttcggttatgaatttttttattttatttaaaatttagcgtttagaatattacattgctttcgaatttgtaggtcggtcaactgccgaagaagtgtgaatgggtctatactcaagtacgggaagggaatttcaaatttggtacgaactaaagggctttgaaacttgaatctaatagtgatcggattaagtattcacgtttttttaatggtaatcaatgaaaatatgcgtttcgtcgtgtgttattaggatgatttgcgtgtgtgagatcttgagagtatatgtttttctcttctcggtcttcttgtaacagagagattcaattcatggtgaaactaactgtgtatggntttgattcattgaaca

SEQ ID NO: 33373 - DNA, 383 bp, Glycine max
  Clone ID: LIB3051-116-Q1-K1-G8
gtgacgcgttagttcacacactaagttctgaaaaatgagttccaaagtttatgttatggtacttatgttcatggacactatactttagatctcctatgaagttgcacactatgatgcataccagaattttgacaaaacagatgggaagcgtagtgcaaatggagtagatgaaagcaaatattaggcgtggtggctatggcgactatggtggttgacgctgaggtggatggcgtagcggctatggaagctaccgtggtggctatagacgtacgcgtcatagctatagaggctggcgttgtggctatgagtagcgacgtcgagactacaagagttgatgtgggggctatagccctaacgaacatcatgaggctaacaattgatgc

SEQ ID NO: 33374 - DNA, 442 bp, Glycine max
  Clone ID: LIB3051-116-Q1-K1-H3
gcataatgtttcaggccctacttcagttacaaataggaaatctgtgtcgaactcatttgaagctcaccagattatttctttgaatccactacctatgaaaaagcatggttgtgacagagctccaatacgagcttgctctgaggaggaattcttgagggatgtaatgcagtttttgatacttcgggggcataatcgtctaattccgcctggtggacttgctgagttcccagatgccattttgaatgcgaaacgccttgacctgttcaacttgtatagggaggtggtttcaagaggaggctttcatgttggaaatggtatcaattggaaagggcaagttttctcaaagatgcgcaatcacactatgacaaatagaatgacaggtgttggcaatacactcagaagacattatgaaacttatctcttagaatatgaattatctcat

SEQ ID NO: 33375 - DNA, 265 bp, Glycine max
  Clone ID: LIB3051-116-Q1-K1-H6
gggattcgcgtttactgatctcaagtttttcacctcactgtcgtaaccaaatgattggtataattcaagattatgtaccaatttattcattctgatatcatcattattactatttatattataaatataattaatgtatttaatgataatttttttcgatattgccaatttgtgattttaaccttagaaatttaatatatattaaaaaggtctttcattctaaaggattcaaacttacttacactttcatgctaatttataccta

SEQ ID NO: 33376 - DNA, 438 bp, Glycine max
  Clone ID: LIB3051-116-Q1-K1-H9
ctgatgtaaattcaaatagtggaagccaatttacctattttttgactgctcctttgtcagcattttgccaaatgattggtctcacccccaatgaggctgatacagatgtctacaatgaagcagagaacattatcgctaatgctttcacggagtgggaaataattctttgctcatcaactaccatggatttagtatgggcgcaggttataagtgatccatttctaaggcggcttattctaagatttattttctgccgatccgtgatatcttttttctgcacacctgaggaaagtgaacagtaccttccactttgtttaccctatctaccctcttctgttgcaccaacgtctgaagccgtgcgttctgctgttgtgcaacttgccatgcactttgacgttgctgactcctttcactttactgaaacataagattttggga

SEQ ID NO: 33377 - DNA, 403 bp, Glycine max
  Clone ID: LIB3051-117-Q1-K1-A1
aacacgcgtacgttttagaagaaaataaaattgcattgagggagtttgtgggttgtcttgcgttgcttcgttgtcgttgggccggccaaagacacatcctttgatgccgttttagtgtctgctttggacacctctctctctgtccctcagtttgatttgataatctgagatgaactaccttctcactgattcatttgatggcgaggctagtaatggccagccttctagacaaagtgatattgaaatgggacaggttcctagaaacaactccgatatgggaatggaagcttttaataaacagatccatgaggctgataaacaaatcgataagctttccgtgctacttcaaaagctaaatgaagctaatgaggaatccaaagctgtcacaaaagcatctttcatg

SEQ ID NO: 33378 - DNA, 125 bp, Glycine max
  Clone ID: LIB3051-117-Q1-K1-A10
aaaaaaaaaaaaaataaaaaaaaaaaaataaaaaaaaaaaaaaagaaaaaaaagggtaaagaaacgttatgggcggagggtaaagtgttcgtgcgtggactttcctatactggctacgtattaac

SEQ ID NO: 33379 - DNA, 389 bp, Glycine max
  Clone ID: LIB3051-117-Q1-K1-A4
aacaaagtatagcttctaaattttgtgagtatagtctgggcaattgtaaaatggacttgcgtaatcgtgataaacaactgactgttgctgtgaagaagacagcattgagagatctgcaaaatgataataaaatcatggtgccaacctctgttggaagctcttcatttttcaaggataaggatcttggtactgattctagtagagtttctggcaccaagagacccttgtctgactacccattgaatcaccatcttcaacaatctccaagcaataatgctgcaaatggacatcttgtgtatgtccgcagaaaatctgaagccgaattgagcaaaggcacttgttttgaaaatccaagtattgatgcttattgtccacattctaagcagctt

SEQ ID NO: 33380 - DNA, 432 bp, Glycine max
  Clone ID: LIB3051-117-Q1-K1-A5
ctcttctcctttcttcgattttcgccttttcaattcactctctgatgatcaccggttccggttttcggtttcatttttccttccaacattctatttctctttttttgcatttcattttcgatcatccgcagatcgcttgcgtttttgttctacgacgctgatcgtatctttaatttttattttaattttttttccttctggtactttcggtttttttttagaaatatatatatttcttattcatttattttggtgaactcctgctattatgcatatggaatttgggaagaatttgattcagtaatgagttttgcaagtctcgtttggtgttattagactgatctactgaatagccagctagtttgtgtatttggaattttacatgataatctgtgtttacttacggtcaactcaatcggtttcttctcttat

SEQ ID NO: 33381 - DNA, 443 bp, Glycine max
  Clone ID: LIB3051-117-Q1-K1-B1
cccacgcgtccggattagcttatcagtctagcatgaatctgactaaagcaatcacagattgtgtcgtgcatttatctcacgtattagaggatgttttgacatggataactgaatggaacaaaagacctgaagatgagcatttggagaatattcttttacttcttcggaaagacgggcataatgatggaccgggggaggtctttcacattttagaaacattcatttcctctatgaatgatgcagaacttggtgatcgcatctcccaatctctaaagtcttggagtcctgctgacgttttcaggaaaatgatgactgggaagctaaaagtactgacagaattttctgccatctgtgagtcaaaattgaagttatttaattctatgaaacagcagatagctcaactgtgaagaattctccatcatttactggtgctgaagttttat

SEQ ID NO: 33382 - DNA, 443 bp, Glycine max
  Clone ID: LIB3051-117-Q1-K1-B2
cagcactgtaccgtaagtcttattatctccgaaaactttttgagaatagagagagagagagagagaggaaatgggtaaggggggaatgtcaattgatgaacatggagaaggcaaagaagagaatatggctgcttggcttgttggaataaactctctcaagattcagcctttcaagcttcctactttgggaccccatgatgtcagagttagaatgaaagctgttggtatttgtgggagtgatgttcactacctcaagacactgaggtgtgctcactttatagttaaagaaccaatggttattggtcatgagtgtgctgggatcatagaagaagttggcagtcaagtgaaaagtttggtgcctggtgaccgtgtggcaattgagcctgggatcagttgttggcgttgcgaccactgcaaacagggtcgatataacttatgcgatg

SEQ ID NO: 33383 - DNA, 360 bp, Glycine max
  unsure (1)..(360): unsure at all n locations
  Clone ID: LIB3051-117-Q1-K1-B4
ctccaatagtcaccgtaaagggttgaaaattcggataaggaaaaaggtggttgaaccggttaccggtttggcccaaactcaaatggttccaacctgctgatatttaattagagtctagggaaaaatttgcagtttaggaatacaaacccggtttgaaccggttcggtttttgtatgatnattagttagtgctagtgctaggcagtagtcacactagtcangcaaccaaccgataatattaggaattactagtaattaggcatttattgtttgtatttgtaaggttgtattgtattgtatcccatttacttagtgttgttgattntatttaatttaatacatagtttaagttaacttgagg

SEQ ID NO: 33384 - DNA, 436 bp, Glycine max
  Clone ID: LIB3051-117-Q1-K1-B6
cccacgcgtccgagaggagggtgtgttgcttgtttctggaaatttcagcccccatcgaaaggcaagaagccccaacggtagtaatcatcgaaggaatttgaaaggtcgaaacttgagcatctgggatcgcgaaattggggattttggttaaaagggtataatcttcggaactgattgatggcaaaactgtacgtgaaagctgtgccaccggcggatctgaacaagaacacggattggttcacgtaccctggcgtttggaccagttacatgctcatccttttcttttcttggatcctcgtactctctgtcttcggtgatctcctggcatcgcttggaccatcgttaatctcgcacactttgctgtaacatatgacttttttcactggaagaaaggaacttcgtttgcagaggaccaatggatctacaatagattgac

SEQ ID NO: 33385 - DNA, 435 bp, Glycine max
  Clone ID: LIB3051-117-Q1-K1-B7
cccacgcgtccgcccacgcgttcggcaaatatggtgactcatgttagcaagggaatcatcgattgactatgctattgcgactttgtttaatcctatgcctacctgtattttgcagtttattattaatgatatgagttaagtttgtcttaaaaaaaaaaaacatcttatgcatagtacaattcacatgtctccctatatccacattgatcttggctatattaattaacacagtgcaacgaggaagcacaagaatcaaggtgctaaggttgaacaaacttgttctcgtcatgtatatgattattgtgccaatgccccctaattagtagttccacaattttatgcttcgactaaggacctatattagctgtcaagtaactagacctagctcgcgtataaaaaaaactagacctagctccaaatcattagaaaagaacg

SEQ ID NO: 33386 - DNA, 388 bp, Glycine max
  Clone ID: LIB3051-117-Q1-K1-B8
cccacgcgtccgcccacgcgtccgtccacgcgtccgcccacgcgtccgcccacgcgtccgggtttttttttttttataaaaaaaaagaaaaaagaaacatattcttgcaatttcgttgtacaaacaaaattcccctattttcggcacgcctttgttgaatttccaatctctatttttctttctttctatttatacgtaataattccaaaaagcctaacgcgagagattcatcagtttttcaattattcctcgaattttgaaagaatcatacaaacgcttgaaatattcgtcatcaacaacaaccttacgctgctatagattttttttttctcttcttacagatccaaacatggccgaagaacaccgatgccaagcttccgaaagtcac

SEQ ID NO: 33387 - DNA, 363 bp, Glycine max
  Clone ID: LIB3051-117-Q1-K1-B9
gtgaatgatgactcttccttcattgtcctctctattcttcttcttcttccctaactctctctgcaataacaacaccatcaacaaccccttcaagccggcctaaaccccattacccaaaactttttcttttttctttccttcaacactctctattggatcatcacatattcaatttcattctcttcaaaaattccccttcaaaaaaatttaaaattaaaaaaaagtgctctttttgtgaattttgagccatttgccaccgacagatttcgatcttctccgtgccaaagttgtaatcttttcgaattttggcgaggtgggtcgatctgatttcgctcgaataattgcgggttcgattttgatctg

SEQ ID NO: 33388 - DNA, 180 bp, Glycine max
  Clone ID: LIB3051-117-Q1-K1-C1
cgttgctttcactttacaaaaatgaatagcatgtaaaagtgttcagagacgctatgcttatcaatagcgttccttaaaagagccgcagcagatcaatgcggcgcacaatctgggggagcgttaatgccaaacagatgattgtgcatcaaattttggcggtgtggttacacatattgctac

SEQ ID NO: 33389 - DNA, 58 bp, Glycine max
  Clone ID: LIB3051-117-Q1-K1-C10
cggacgcgtgggcggacgcgtgggcggacgcgtggggtaatgtttcttaatgattttg

SEQ ID NO: 33390 - DNA, 436 bp, Glycine max
  Clone ID: LIB3051-117-Q1-K1-C12
ctcattctttattttattttctgtcttaatatcagccccaaactcccttgtgaactgttaagtctctgatcgatcttaagagtccccaacaacgacataagacacaaaaaatggaggggaatctagagaagaagctgttgagcagagaaaaaaaatcagaagaagaagaagaagaagagaaattatcattggtgaagagggtgtgggaagagagcaaggtgatgtggatagtggcagcaccagccatattcacaaggttcaccacctttggcatcagtgttataagccaagcatttattggtcatattggttcaagggaactcgctgcttatgctcttgtgttcactgtcatcatacgctttgccaatggtattctgtattaacatcaatggatgggaaatgatgatagcatttggtttcatggctgcagcaagtg

SEQ ID NO: 33391 - DNA, 421 bp, Glycine max
  Clone ID: LIB3051-117-Q1-K1-C2
ctctgttgctgcattcccccatggcttctgcttcagattttgcgttagcggtttcttctgaactcgagtcagttttgaggctgaagactgttaactactttgttacgaggaggccatggctcgatctttatggagttaacgtgagacctgttgcgcctgttgggagtgcaagtaggaggccttacgtggatcctgcacttatacatcgttccttacctgatgagctgctttttgaggtttttgctcgaatgactccatatgatttggggaaggcatcttgtgtttgtcgaaaatggaagtacacaattcgtaaccctgtattttggcgcaatgcatgcttgaaagcttggcagctatttggaattgtagaaaactattagatacttcaatcaaaatatgatggctcatggcggaaaatgtg

SEQ ID NO: 33392 - DNA, 430 bp, Glycine max
  Clone ID: LIB3051-117-Q1-K1-C3
caaactttaacaatctcataaataaataatcagaacgaagaagaagaagaattgaattcgaaaaatcgtagcgtagcgttggttgcgattgaaacggtacgatgggaagaggaaaattcaagagcaagcccaccggtcgccgccagttctccaccccggaagatatgcttgctggaacctctaaccgtcctcgaacttttagacagaaagaagctgagcatgaagaggagcctgaggaagtatctggggatgaatctggagaagaatcagaagaggaaacttctaagaaaaaaggaacacatggagttattgagattgaaaatcctaacttggtaaagccaaagagcttgaaagctagagatgttgatgttggaaaaacaacagaactttcaaagcgtgaaagagaagagatagagaaacagagagccca

SEQ ID NO: 33393 - DNA, 100 bp, Glycine max
  Clone ID: LIB3051-117-Q1-K1-C4
atcgcaggttcgcacattaacctcttctatgattctcataaactcgtgcgatggacacacgcacaatcttgtaattttaccttctaaagccttacttgct

SEQ ID NO: 33394 - DNA, 325 bp, Glycine max
  unsure (1)..(325): unsure at all n locations
  Clone ID: LIB3051-117-Q1-K1-C5
gttagaaaaaactttcaactgggcatgcatcttatatcttgtgacatgtcatatattggtggcctattagaattaatatgttccagtttgagacttccatttttgcaagcaattcttagtcttgtttagtttgtttgaataaagtagtaaggagcatttcttgtggtatatgtaacttttggagttattgcatatattggcagangggaatggtagagaaatttaagttgatatacttatggttcactactcaagtaagaaagaaggtagaggtctgaagagaaattaaggtgataaacttatggttcactactcaaggtagaaa

SEQ ID NO: 33395 - DNA, 342 bp, Glycine max
  unsure (1)..(342): unsure at all n locations
  Clone ID: LIB3051-117-Q1-K1-C6
tcggccacgcgtccgtgattgacaaccgtcttgatgatcttatttcaaatcttaaaccgggttgaggtgaagggaatcttttgggcctttttcccccttccaaaaggtcttattgaacctttttttggccttttaaccaaggaaggactgttggccttggtggagattaatgaaaggaaaaattttggggggaacctaaaggaaatgaagtcttctttaacacccagttaacaaacaaggctgattcatctgaagtcattgagactgtgaagctgcgagttagagatgctaaattgccggacattgangtggtgcggatcttgtgggatgttntaatggatg

SEQ ID NO: 33396 - DNA, 433 bp, Glycine max
  unsure (1)..(433): unsure at all n locations
  Clone ID: LIB3051-117-Q1-K1-D10
gagagaaactagagagagaaagcaaagcccaaacaccccttttaaccattgcaattctcgttcggtttcagagaaccccttttgaatttttttgaattttctgggaaacagggcgttttgtgaacatcatctgggttctctcgatctccatcttttttttctgggtttccgttttttctcctcagatcctcttctgtttttgttttctccgtttttgaatcggattttcgaagttgtctcgcaattctgcctcgtgggtgtgtgtttttccaaggaaaagattcagtttttcatagcgtgaaagtgggaaaaggattgattcctatctgggttttttttatgcaattgttggtttaaattttgagggcaatgatgttgacctttaaagtttcgttatgaagtaatatgaaagtggtccttatacggntacaac

SEQ ID NO: 33397 - DNA, 153 bp, Glycine max
  Clone ID: LIB3051-117-Q1-K1-D2
aaaaggggatcttgtccagaaggccatccccgtttttgaatacttgggaaatgctcttgggaaatttgataatgggccatttttgcttggccaattaagtttgggggaaatggctaatattccatttgttgaaagattccaaattgtctttgc

SEQ ID NO: 33398 - DNA, 361 bp, Glycine max
  unsure (1)..(361): unsure at all n locations
  Clone ID: LIB3051-117-Q1-K1-D8
cgaatccgttaaccaaccccacaggttaaccacaccacaacacaaaacccaacaacagtgtggtctctctctctgtctctcgctgtcactttcgncaccgtcttcgacgcgaatgccaccgtcttcggccactgctcttcagcatcttcactctccagaagtcaatcagatgttgcaaggatcatgagtcctaccttgggtgatcagatagaggataagctgattgtttctgactcaatgagagctacaaattagaaaataaatggaacacccatcaagatgctcatagaccaagaaatgtccaaagaagttgtttcaagcacaacccaccaccaaatgtagttgcaaaattaatggggct

SEQ ID NO: 33399 - DNA, 425 bp, Glycine max
  Clone ID: LIB3051-117-Q1-K1-E1
cttttatttacaccacatagccccaccctcaccctcttacagaatgggaaggactccggtgaggtttgagagggtagcggcggcctttgacgctgacgtggcgcgtgtgaggctctgcaatagcagcgagaatgagcagcactcgccggaggactcggctgatttgtcagatctggtgaaatcgttcatggagagagggggagagggagaagatgcggttggtgttcgttcggatgatggggttgagaattttgattctgagaaaagggagattttggagggaatatttgatgatgacgacggggatgccaaagaaaagattagaagagaagttcaacttgcatgggggcttgttgccgaaaaggataactcatcaccccaaattaaacaacaagtggtgtctctcctaccgtacaaaaggtttg

SEQ ID NO: 33400 - DNA, 237 bp, Glycine max
  Clone ID: LIB3051-117-Q1-K1-E10
gtgatctttccatcagcatctcgacatgctgcttgctgttacttatgctattcttcaggttcacttcctctatgcgggagatgaagggcaccctttaccatggacaagacactagagccctgtgcttacaatggaaacacatactacagctccatacatgatgcacacatagtgaagcagcttcgagcgagcaacgtttcgaatactggctgcgcctgtggtcacaaatcagtactt

SEQ ID NO: 33401 - DNA, 433 bp, Glycine max
  unsure (1)..(433): unsure at all n locations
  Clone ID: LIB3051-117-Q1-K1-E12
cccacgcgtccgcttctctattttaagtaattcaatggcttacactgcaagtcttgtgttcttagcttccactttccttatcataaactttcctcttctggcaaacgctatcggatgcaatggaccatgcagaaccctcaacgactgcgacggccaactcatttgcatcaacggaaggtgcaacgacgaccgcgacgtcggaacccacatctgcggcggcggaatgccgccaaatccgccaccaagcggcggaagctgccagtcctcgggaaccctaaattgcggcggaaaatcgtatcctcagtaccgttgctctccgccggtaacttcctcgacgccggcgatcctgacgctgaacgacttcagcgaaggcggcgacggangggacccgtcgcagtgcgacgagaagttccataacaacacggagcgtgtg

SEQ ID NO: 33402 - DNA, 363 bp, Glycine max
  unsure (1)..(363): unsure at all n locations
  Clone ID: LIB3051-117-Q1-K1-E6
gattgtttcaacaactcacggtctgggaaggatgaaccacagacttcttcagatggagtggacagtgtgacagatacaatttctaaattagatatcaacacaaatgttgattcaaaatccataccaactgcagagaataagcttgggttgggcattaaagaatgtaaatggtgaatggcactttgcatttgggaaactccaaacccttcctctgatgcaactccccaacagaaacccaatccaagtattgcaactccaataaatcctaaatctaagaagacagatactgttccgaaaaatagaagctccagttcaactagcanatntagttctatgttaaacgttgtcatgtaactaatggta

SEQ ID NO: 33403 - DNA, 396 bp, Glycine max
  Clone ID: LIB3051-117-Q1-K1-E9
caggagtggccattgtgtccaagaaaattctaagggtctctcatgtggcaagtgacagaggggttagaattttagcctctatttgtaggtattccgccaatgctagagtgcttcatgaaatgttgcaggttggggcagtgtccaagttgtgcttggtgcttcaagtgaattgcagtttaaagactaaggagagggcaaaggaaatactccaattgcattctgtggtttggaagaattctccatgtattcctgtacctttgttatcttcctatccatgatctaattctttcataattagtaagttctttttgtgtacatgcaatgaaagtgtatggtgttagagatttttgaattatacaaatgaatcttaataatcaagagcgaaaattttttctt

SEQ ID NO: 33404 - DNA, 434 bp, Glycine max
  Clone ID: LIB3051-117-Q1-K1-F12
gtcgattcagatcttaggggttcttcttcttttctttctggggagccccattgaccatagccgccagccagagagagaagagaagccttcgatcgtagggtttcttacccttctttcttccaaatcggacctttcccgttctcgaatcgcttccgcagcttagcgatctggaaaacccagaaaagaaccaaccgaacgttttatatttttcggataatcaatcaattgaagatgtctcgttgcttcccttcccccctcctgggtatagggcacgtggcgaggccttgatcaaatcgattaagctccgagaggagatggagaaagcagagaatgaccggagggagaagaaggagaagaaaagggaaaagaaagagaggaaaagagagaagaaggagaagaaagagagaaagaaagcggagaaagaaaggaaactt

SEQ ID NO: 33405 - DNA, 257 bp, Glycine max
  unsure (1)..(257): unsure at all n locations
  Clone ID: LIB3051-117-Q1-K1-F2
cccacgcgtccggcagaactttgctatagtatattagttataaccaaattctaacaattgggttcccaagaaaagatagggtttgccaatgtgttttcagtgttattgtggcaagaggctgttgtatatattgacatttaaagctgtaaattgttgatctcagaagcagctattggtgctctcaaaaaaaaaaatnaanataaaaaaataaaaaaaaaaaaaaaaaaaaaaaaaaaaaaaaaaaaaaaaaagaaaaa

SEQ ID NO: 33406 - DNA, 418 bp, Glycine max
  Clone ID: LIB3051-117-Q1-K1-F4
caaaaatcaaaaccatcgtgagggattctcttttcaaccaccgtcatcagcgatcggattcggattcggactccgtctcgggaaaattcgagaagatttttcgaatttttcaccactgctttgtgcgcagcgatcggtttcggattcgggctccgattttcgcctcttgcgaagagcttgggttcatttgcactaatggaggggaaggaggtttgcgcgtcggagtcggcggttgatggaagccgcgacgtttggagttcggagccctcgctcgcttcctccgcggatcacctcgttgtaatggtgaacggaattctcggacgtgagacggattggaaatatgctgcggagaaatttgtcaaggagttgccagataaagtgtttgttcactgtagcgaacgaaatgtgtctatgcata

SEQ ID NO: 33407 - DNA, 395 bp, Glycine max
  unsure (1)..(395): unsure at all n locations
  Clone ID: LIB3051-117-Q1-K1-F5
agaagaatcatttttcatttgatttggaagctgatgtttctattatttttgccgcgttggcaaaaccctaaattgaagaaatcccaatttcccctcctctctctctgctttggatgattttcaaccaaaaatctgtgcttttgtgcttttcgaatcttttgctctgatgggtacttccaatcttctattgttcttctctctggtgagtctgtgtgctatggcggcttccaaggtggttcttattgggaataatatcactctctccttcgatgatattgaagctaattntgccccaacagtcaaaggttctggagaatatgggatcttatatttggcagaaccactggatgcatgtacagaattgacaaataaagttgaacaacttcccaatgcga

SEQ ID NO: 33408 - DNA, 401 bp, Glycine max
  unsure (1)..(401): unsure at all n locations
  Clone ID: LIB3051-117-Q1-K1-F6
cgccgtacaaatcgtataacaggctgaggagtttcagctcccacccggatctccggcaagagtcgcagtggctcgccgccgatgaacggtggcgattctatgacgatacgcacgttaacggttaccgtggatttgacttggaagaacaccggcagcatagaacggaagccggagaagaagagagcgttgagaacatagaagtggttgcgaaagaagttccaccaccgncagctccggcggagaagaagagtgggggaaataagaataagagaacaagtgcaactaaagagttgttgacatcttcgaaaggaaaagaagaagaaacaaagacaaggaaacgttgaaagtgttaagagcattccttcacaaccttnctcagtttttcataatatggtttcttc

SEQ ID NO: 33409 - DNA, 53 bp, Glycine max
  Clone ID: LIB3051-117-Q1-K1-G6
ctttcttcttctcggttttacctttaccggttctaaaaaggggaaagttggta

SEQ ID NO: 33410 - DNA, 321 bp, Glycine max
  Clone ID: LIB3051-117-Q1-K1-G9
ctccacaaaaacaaacagaaccacagattcaggttttgatgctcttctgcggtgtgtccagagagagagagagagggttgtagaggatgttctgagaggaccgctctatctgaaaaaagatcttgagtcgcagaaagttatcgttcacacagagagagagagtgagagaaacaggtgttctagaactagagtgttggagcacggatgtttgccactttacattgaattccatcattcttttctttaactagcttgctgtactcgctacaatctatattactgtaagcgaattcatgttttaccgtggcaaaatggacctaa

SEQ ID NO: 33411 - DNA, 175 bp, Glycine max
  Clone ID: LIB3051-117-Q1-K1-H2
gccacacctgcgccactaccacttgaccttgagacatatcgtgcagactaaggatagagggtactggcgctttgtatcatatacattaattgctacagcaaacgagattatgaagtactagctactttcagagacatagagaatcactgcgtgcaacctgacgatatccaacaca

SEQ ID NO: 33412 - DNA, 83 bp, Glycine max
  Clone ID: LIB3051-117-Q1-K1-H4
acgcccacgcgtccgattttttaatcgattgtttatccatgtatcagaaagcaataccgagtggagatgagaaattacatgtt

SEQ ID NO: 33413 - DNA, 405 bp, Glycine max
  Clone ID: LIB3051-117-Q1-K1-H6
cttcacctttcactccacggaatcaaaagcaagtgctaagaagttccgtgttcctattctgaaacctgtagcaccaaagccaagttgtcatccaagttttataatactacatatattattattatacgatacataacaatagtattaatattgttgtgattgtgtgtgatttttggtgtcgtccttttttcttatattaaggtggtacggagcttatatgtgttgattcaattcgtcgacaagaaaccttagtttgatatttgattggttctgtggagagttttcctttggtgtggttggtttgtgctgtttttggttgggaataggaatggctaatgaaggaaagaaaagcaataacttctattcgatcttgggcttgagcaaagagtgcactgaattggagct

SEQ ID NO: 33414 - DNA, 154 bp, Glycine max
  Clone ID: LIB3051-117-Q1-K1-H7
gtatacctttttctctgttgttaatttccgacgtagtcttaaatctaagtaaacggcattggtccgtaccacacatacgaacgacgcaatcttctgattcttatggatacaatttctctcttctattactaataaacgcgtacccaatttcact

SEQ ID NO: 33415 - DNA, 437 bp, Glycine max
  Clone ID: LIB3051-117-Q1-K1-H9
ctgggtttctgagcgaaagtcaatcaagggtgatgtttgccaaatttctagatcagatttcaaaacttttggtggattctccattatatgaacaatacaacgaggtaagggaaaagctttcgactttgtttgaaacaaagcaaaatgctggtattactagtcaaataactgatctgagtcaaaaactagtaaatattattgaggaaagtcagctatctgtttctcctcaattatttgatctacaagcccgctttacttctacaatcgaagattttcagaagcaacttgacttgatggtgaagtatgattgggacttcgatcattacatggaagaagatgttccagcagcggtgagatagaatacataatgaaacaaagcatgcctaaagatggaaaattacttgcaattggacactccatgggtggtatcctgcttt

SEQ ID NO: 33416 - DNA, 545 bp, Glycine max
  unsure (1)..(545): unsure at all n locations
  Clone ID: LIB3051-008-Q1-E1-F7.F1
gatgatgaaattgatggtttattctatcgcaagcaaatgaacatagaatcatcgtgaaatcatttattctcctccctctcccgattccactgctcgatcctcgcgcgggctcctcgctcccttccctggccggaggctcccgatgttgtctcctccgtccaccgctgccgtccctctccctgctccgccgccctccacgagaatcactctcccgtctctcccggcggtatctcggactcgcgctgggctgcgactcctgctccggctgaagcggtggtaggtcccactgccagcgtnggntttgcggccgaagagtcgcctccgtagatctctcccgatgagcttcacatgcatgaaattacaatacccgccgcggttgcagctattctcctcgaactgccgacacgtggcctcgcgaaaatccgtgacgggggagaaatcagcgatgattgggcgtgcgttgtagaatctcccacgaagcgcgtgaagcnnttggcggcctggtcctcttcgcggaactgaacatagacgttgccgatcatgtg

SEQ ID NO: 33417 - DNA, 544 bp, Glycine max
  unsure (1)..(544): unsure at all n locations
  Clone ID: LIB3051-025-Q1-K1-H10.F1
agaatagtagctattataatattataattacttgagtggttaacatggctcactccctcntttttcaacccaactccctggcatcataggccattgctgtgccctctaaccccttttccccaataaaaaaaaaattaattaaaacaaggttataattttatatttgtttttgaaaaactccaaattaacaactaaacaacactcctaatccctgtcccagtagtcacaatccgaattctcgggttcgggcatcttattaaggtcaacccggtcggcgaattctccagcaggcagcgcgttgggggtgctggcggtggagagcgtcgactctggcgccgacctcggtggccttcttcctgatggaggctgcggacatgtcggcggcggggccctccgcggcaacaagctcggggaagttgaggcgcgcagaggggccccggagggtggaaaacggcggtgtcgtaagcacgcgcgccggancgggctgtggagtaagaaccgagccaaatccttgaacgcttgttgggttctcgaatctcagcga

SEQ ID NO: 33418 - DNA, 546 bp, Glycine max
  Clone ID: LIB3051-059-Q1-K2-E10.F1
aaacctataatctcgacgactatattaatttcatgatctgatcatcaaaatacatatacccaaccagaatagaagagagaaatgagatcaatgaccactagggtttgtattgcataagtcaacttaaattacaagaatgtaaagagtagccgtctaaagtatccttaaatgaaaataaataacaaaatcaagccacattatctaactccagtaagtacctaaaggattaagatgctgccaagaggacgaattggtgtgaatagcttgtccaaactggggatgtaatgtattactaatgccagcgtctaaactactcctcggattcatttggccattcagatccatgtttgcggaatgcagaagggtcgaagttggtgttacatatcaacaaccgtgcaatgatgtgattgttgatctctgacaagagcagtgtcataaacattcgcaaagttcagagtctggacatgtagtggatctccctgtggaaaccaatctactgggttctttgaggctctggaaataaatccatttacatctacagttttt

SEQ ID NO: 33419 - DNA, 585 bp, Glycine max
  unsure (1)..(585): unsure at all n locations
  Clone ID: LIB3051-092-Q1-K1-C4.F1
ggcgcctttttttttttttttagcattttaaatcgcattttatttatataaattcttcctaatgcttgtaacagcaacacacagtttgacaagatgtcatttcctcagccaaataaaaaagagacaactgaaatttttttgtagaagagaaaatatatttcttggaaaaggtaagtttcatagaggatgccataactgattcagtcttcatattctgtttcctcatcatcatcttcattgtttcctcctgcatatctccaaccatcttcaacattgtcacgatcctcttctgtttcttcgctatcttcttcatcgaaaggttcatctttcacgggccaagaatttttatttacagttaaagagggagtggacagtttgcgttttgcaattttggaaggaggcaacttgaggtttggtttaggcttactctgcttctgaattttaccatttgatcgtttcgcaacataggcatcatggtcacttgcttcatccatttcattgtcaacattagcctgagcatgctnctgcattttcatcagccataagccccggatgctccctcttcaaatggagtctaagcttgta

SEQ ID NO: 33420 - DNA, 572 bp, Glycine max
  Clone ID: LIB3051-002-Q1-E1-E5.R1
caaaatactactagtaccttaataaacaaataaataaataaggtgagagaaaaaaaaaaatgtagaggaacctggaaacttccacgaggttttcggtgaaaacaaatttggggctttgcatcgcaagatttaccctttccaatcaaaattcttctgccttcccctaccaattctttctctcaaccgatttatctgagtgaggggtttggccaatgacgagtggttttggtgaatcaacgagagcgtctgcaccgagcccatcatgctcggggaacagttcaaacgatgccggtgattttgaatgcaacatatgcttcgatttggcgcaagaccctgtgatcacactctgggtcacctattctgttggccatgctttataggtggctccacatcactcccattctcaggaatgccctgtttgcaaggcccttgtgcaggaagagaaattggttcctctttatggaaggggcaaaacacagactgatcccaggaccaagtcatatcctggaatggagatccccaccgtccttccgggcagaggcgcaaaccgcgccacccccgccacctcctga

SEQ ID NO: 33421 - DNA, 540 bp, Glycine max
  Clone ID: LIB3051-002-Q1-E1-E5.R2
caaaaactactagtaccttaataaacaaataaataaataaggtgagagaaaaaaaaaaatgtagaggaacctggaaacttccacgaggttttcggtgaaaaccaaatttggggctttgcatcgcaagatttaccctttccaatcaaaattcttctgccttcccctaccaattctttctctcaaccgatttatctgagtgaggggtttggccaatgacgagtggttttggtgaatcaacgagagcgtctgcaccgagcccatcatgctcggggaacagttcaaacgatgccggtgattttgaatgcaacatatgcttcgatttggcgcaagaccctgtgatcacactctgtggtcacctattctgttggccatgcctttataggtggctccaccatcactcccattctcaggaatgccctgtttgcaaggcccttgtgcaggaagagaaattggttcctctttatggaaggggcaaaacacagactgatcccaggaccaagtcatatcctggaatggagatcccccaccgtccttccgggc

SEQ ID NO: 33422 - DNA, 321 bp, Glycine max
  Clone ID: LIB3051-007-Q1-E1-H12.F1
tctccaccaccgccccttttttttttttttcactccacttccccaccatcgcttttccacccactccacgccactctcacccactccacccccccaccccccaccaccacctgcactcccactcccacaccccacccactccactcacttgccccccccccccccccactcccccccccacccaccacacacccctccaccatccacccaccccccaccccccacccccaccccccactaccacctcccgccacctccaccaccttccctcacatactttcaccaccccccacccacttcacgctcccactccccccacca

SEQ ID NO: 33423 - DNA, 581 bp, Glycine max
  Clone ID: LIB3051-007-Q1-E1-H12.R1
aacattgttcaggctcctttgattcctagtcacactgatattgctaagattgtccagaaagtgttacaaccaaagcttcctgtccatcccacgtggactcctccatcaagggattatatgaataaggctttcacatgtcagatgtgtgaactcagtgtcaatgaggttgatactgtacttctctgtgatgcttgtgaaaagggatttcacttgaagtgcctgcagccatcagtcttgagaggaattcataatagagttgattggcattgtatgaggtgcttgagtttaagtggtggaaagcctttgcctccaaaatatggtcgtgtcatgagatcctcaaacacaccgccaaaattgccctctaatacaggtggcgttcaaccatgttctgagaagaaagtagagaatatcgatccaaaggtcatcccacagacgttagcaacaaatgggagctctgttccaactgtttccggtggccatcacaatgttgagttgccatccgaatcaaagataccagataccaaagatatgcaagggactggcatttcatccaccattgaagctattgataagaagcctga

SEQ ID NO: 33424 - DNA, 571 bp, Glycine max
  unsure (1)..(571): unsure at all n locations
  Clone ID: LIB3051-007-Q1-E1-H12.R2
ngacattgttcaggctcctttgattcctagtcacactgatattgctaagattgtccagaaagtgttacaaccaaagcttcctgtccatcccacgtggactcctccatcaagggattatatgaataaggctttcacatgtcagatgtgtgaactcagtgtcaatgaggttgatactgtacttctctgtgatgcttgtgaaaagggatttcacttgaagtgcctgcagccatcagtcttgagaggaattcataatagagttgattggcattgtatgaggtgcttgagtttaagtggtggaaagcctttgcctccaaaatatggtcgtgtcatgagatcctcaaacacaccgccaaaattgccctctaatacaggtggcgttcaaccatgttctgagaagaaagtagagaatatcgatccaaaggtcatcccacagacgttagcaacaaatgggagctctgttccaactgtttccggtggccatcacaatgttgagttgccatccgaatcaaagataccagataccaaagatatgcaagggactggcatttcatccaccattgaagctattgat

SEQ ID NO: 33425 - DNA, 548 bp, Glycine max
  Clone ID: LIB3051-008-Q1-E1-F7.F2
gatgatgaaattgatggtttattctatcgcaagcaaatgaacatagaatcatcgtgaaatcatttattctcctccctctcccgattccactgctcgatcctcgcgcggcgctcctcgctcccttccctggccggagggctcccgtgttgtctcctccgtccaccgctgccgtccctctccctgctccgccgccctccacgagaatcactctcccgtctctcccggcggtatctcggactcgcgctgcggctgcgactcctgctccggctgacgcggtggtaggtcccactgccaccgcggtggttgcggccgaagagtcgcctccgtagatctctcccgatgagcttcacatgcatgaaattacaatacccgccgcggttgcagctattctcctcgaactgccgacacgtggcctcgcgaaaatccgtgacgggggagaaatcagcgatgattgggcgtgcgttgtaaaatctcccacgaagcgcgtgaagcgccttggcggcctggtcctcttcgcggaactgaacatagacgttgccgatcatgtg

SEQ ID NO: 33426 - DNA, 587 bp, Glycine max
  unsure (1)..(587): unsure at all n locations
  Clone ID: LIB3051-008-Q1-E1-F7.R1
caaaggttcgttaaagtcgagataaattaatgcaaagtagttagttggcagatagaagaagatcatcatcataatcgatccgttacaattagggtttctgattggagcataatagcgtattatcatctcatctctcagcagcagcagcatggcggaaccttgcatcgatcttcggcaggagaaggaccgcgtgaactgcccgttctacttcaagatcggcgcgtgcgccatgggatcggtgctcgcgcctccacaaccgccccagcatctcgcccaccctcctcctctccaacatgtaccagcgccccgacatgatcacccccggcgtcgacccacagggccagaccctcgacccccgcaagatccagcagcacttcgaggacttctacgaggacatcttcaccgagctcgccaaattcggcgaaatcgaaagcctcaacgtctgcgacaacctcgccgatcacatgatcggancgtcatatgttcagttccgcgaagaggaccaggccgccaagcgcttcacggcttcgtgggagattctacaacgcacgcccaatcatcgctgatttctcccccgtcacggattt

SEQ ID NO: 33427 - DNA, 586 bp, Glycine max
  Clone ID: LIB3051-008-Q1-E1-F7.R2
cagaagttcgttaaagtcgaagataaattaatgcaaagtagttagttggcagatagaagaagatcatcatcataatcgatccgttacaattagggtttctgattggagcataatagcgtattatcatctcatctctcagcagcagcagcatggcggagcaccttgcatcgatcttcggcacggagaaggaccgcgtgaactgcccgttctacttcaagatcggcgcgtgccgccatggcgatcggtgctcgcgcctccacaaccgccccagcatctcgcccaccctcctcctctccaacatgtaccagcgccccgacatgatcacccccggcgtcgacccacagggccagaccctcgacccccgcaagatccagcagcacttcgaggacttctacgaggacatcttcaccgagctcgccaaattcggcgaaatcgaaagcctcaacgtctgcgacaacctcgccgatcacatgatcggcaacgtctatgttcagttccgcgaagaggaccaggccgccaaggcgcttcacgcgcttcgtgggagattctacaacgcacgcccaatcatcgctgatttctcccccgt

SEQ ID NO: 33428 - DNA, 605 bp, Glycine max
  Clone ID: LIB3051-009-Q1-E1-E7.R2
cagcgattgaggtgaggaaccatgtttccccagaaccagagccagagtcggaggaggattccagttgttgttgcccaatctgcttgggaccattccttcaactttcctacctcgacaaatgttttcataagttttgcttcaattgcattttacgctggaccaaggtggttgctggcaagcaccgttctccaccttcttctgtaaaatgccccctctgtaagttttatcttatcaagagcgcacagatatagattacaatgctattacactgaacaaggtttcttagatgacatattcaatatatcgcaatattggagatctctaaagtacaatcagccaaactgttggcttgaaaattggttaagaagagaaattcaagctcttatccaggaggaggatgttgacatcattttgcaccatatccttgctgtggtcaaagcagcattatggactaggagagagcagaagtcacacatgaatgcacctgaaaagaaacaggaggagttcaagatgtcagtctctgaagccgcaggccttttctggcagcaagaccgacagatttgtatatgagattcaactatttcttgcttcgggaatgaatattg

SEQ ID NO: 33429 - DNA, 486 bp, Glycine max
  Clone ID: LIB3051-010-Q1-E1-B9.F1
aaatgaaaaaagtaccatattaagtcattattacagatgcaaacaaccaactgagcaaaatttcagcgaccacgtaaaaagaacacaaaaactggatcccagtctgaaacaactaagggacccggcaaaaccaagcagagactcccatgggggatccctcattgccccccctttgattttccgcaagaattaaattccacagcactacgaaaccctaaaaaggattcggcggctggaaaaatgcccttcagggcttgacggtggcgcagatggtggaggggctaatcttgtaagggatgttgaccccacattggccagggaccaacgccgccatggcggcattcaaactcggtcccagattaacggcaaggtttttcaggcaacggaccgccccctgggatccagcggtggccttcgccgcgccgcgtgaaggacttcaccccggtgcagcaggctctggacggttctccgccgcgtcgaagataa

SEQ ID NO: 33430 - DNA, 394 bp, Glycine max
  Clone ID: LIB3051-010-Q1-E1-B9.F2
aactgcaaaaaggactctttatgtcattattacctatgcaaacaaccaactgagaaaaaattgcagggaccccgtaaaaattactcataactggatcaaagtctgaaacaactaagggacacggcaataccaagaagagactcccatgggggatccctcattgccctccctttattttacacaatgattaaattttaccgcgctactatatcatttttagaattctgcgactgaaaaattgcccttcaaaacttgatcgcggcccaattggtggaggggctgattttgttaagaatgttgaccccacttttgccagggacaaaggctgatttggcggaattaaaactctgtctcatattttcggcaaggtttttaaagaaaatgaaccccccct

SEQ ID NO: 33431 - DNA, 559 bp, Glycine max
  Clone ID: LIB3051-010-Q1-E1-B9.R1
agaacatacacgttacattactaagtctttgttcatttgactagtagtgatggctagcctcaaggttgcatgtgtggttgctgtgatgtgcatggttgtgtgtggccatgcagtgctgcacccatggcacaggccgaaatcacgtgcgggcacgtcgccggcgcatggctccgtgcttcagttatcttcgaaactgcggaaaaccgtcgcatgcctgctgcaacggaatgtacgctcacctctagcagtcgcggcgatagtacgaccgtcggaccgccatggagagtgacagtttcctgaaaaaccttgccaataatatgggacaagtttcaatgccggcaaagagcctctctccctggcaaatgtggcgtcaacatcccttacaagatcagcacctacaccaactgcgccaccatcgagttctgaagggcaatttttcagtcgcaaattctatatatgatatagtagtgctgtagaatttaactagagtgtaaaataaatggactgcaatgacggttccaccatgcgattctcttcttggtattgccgtgtcccttag

SEQ ID NO: 33432 - DNA, 517 bp, Glycine max
  Clone ID: LIB3051-010-Q1-E1-B9.R2
cgcaaatacacattacattactaagtctttgctcattagagtagtagcgatggctagacctcaaggttgcatgtgtggttgctgtgatgtgcctggctgaggtggccatcaatgctacacccatggcacacgccgcaatcacgtgcgggcaggtcgcacggcgacatgtcctcctgagcgtttagtgtattcttaagaagctgcgagaaaaccgtcgcaggcctgctgcaacggagtgaattccctcagcagcgcggcgaaaaccaccgatgaccgccagagggcatacagttcgcctgaaaaaccttgcctataatattggacagagtctgaatgccgacaacgcatactctctccctggcaaatgtgacgtctacatcccttacaagatcaggaacttcaccaactgcaccaccatcaacttctgaagggcaatttttcagccgcagaatactatatatgatatagcagtgctgtagaatataactatttgtgtaaaataaacggagggcaaaga

SEQ ID NO: 33433 - DNA, 506 bp, Glycine max
  Clone ID: LIB3051-011-Q1-E1-G5.F2
aataaataaatgaataaattatctccatattcgacaaggaaagaagaaaaaaaatgatttcacacaaccataagctgtggaaaacccaacgccgggtggggagataacggtgacaagggcggcacggtgaatattccgtttgcatcactaccccagaaccctaaccaactagacggcgttaaaggattattcttaataagactaacgtcggattcccctatcttttctctcttgacgacttcaagcaccggctccaccttctcttccctttggcgtttgcggtcatcggcgccggcttcgagggggaagttgaggatggctttggagccgcgaagcctgaacgcggctcggtcgtaggctttggcggcttcgatagccgtgtcgaacgtcccaagccacaccctggagccgcgcttgttcgggtcccggatctccgctgcaaacttcccccacggtctctgtcgcactcctctgtagtggcttttctcttccgcgttcgggttact

SEQ ID NO: 33434 - DNA, 536 bp, Glycine max
  unsure (1)..(536): unsure at all n locations
  Clone ID: LIB3051-011-Q1-E1-G5.R2
aactttctaaagctccttctcctctcaatatctcatggcaaacgctcttgaagtctctgctctcaatcgcatcaagctgcatcttttaggagaactctctcccctcacccaatttcaggaaccaaacacaacctccctctgttcccaatcttcaacttccgattcattcaccacagttgaccaaatcttctccgaattcctcgatttcccaactactactacttcttccacagaacaaaaccagttttctgcattcgagtttgagccaaaacccgaaataattgagccacaattggaattcagttttccaaccacacgctgcaaatcgagtcgaaggccgtcgctgcaaatctctctcccgaagaagaccgagtggatccaatttggagagcccgaggttaccgaaacggtgtcgcagagtaacccgaacgcggaagagaagaagcactacagaggagtgcgacagagaccgtggnggaagtttgcagcgggagatcccggacccgaacaagcgcggctccagggtgtggcttggg

SEQ ID NO: 33435 - DNA, 562 bp, Glycine max
  Clone ID: LIB3051-014-Q1-E1-A8.F1
gagaacatcctaccattctttgacaatgtaacaaaagtcttacaatccacaagagaaatcatatcgaccgctgttttcgcatgtagtatccggctatcacttaaaaacattctaaatgatgaaattataaacagagaatatttcctttaatttcctgtatgctgcaaccgaggactctgagtaaaaaatggaataaacccagaaaactcagaaaacgaaacaatcaaaatacagccataagttcgggttgctatcatattaaactcatgactttgtaacctcgcttctcaaacactacacagtatatttgaactcctatgttgatgtattattcaatgggagggtcgaaaaccaaatcctgatcgcacacagggcaagtttcacttctttccatccattccagaatgcatgcaaggtgaaaatgatggtcacaatttgttgcgagttttggattctctgcatcatattcttctaaacagattgggcatgcatcttcctcttccactaaatctataggtttcccgacttagcaagttcaatttcggaaccctttgcagaatct

SEQ ID NO: 33436 - DNA, 497 bp, Glycine max
  Clone ID: LIB3051-014-Q1-E1-A8.F2
gagaacatcctaccattctttgacaatgtaacaaaagtcttacaatccacaagagaaatcatatcgaccgctgttttcgcatgtagtatccggctatcacttaaaaacattctaaatgatgaaattataaacagagaatatttcctttaatttcctgtatgctgcaacgcagggactctgagtaaaaaatggaataaacccagaaaactcagaaaacgaaacaatcaaaatacagccataagttcgggttgctatcatattaaactcatgactttgtaacctcgcttctcaaacactacacagtatatttgaactcctatgttgatgtattattcaatgggagggtcgaaaaccaaatcctgatcgcacacagggcaagtttcacttctttccatccattccagaatgcatgcaaggtgaaaatgatggtcacaatttgttgcgagttttggattctctgcatcatattcttctaaacagattgggcatgcatcttc

SEQ ID NO: 33437 - DNA, 599 bp, Glycine max
  unsure (1)..(599): unsure at all n locations
  Clone ID: LIB3051-014-Q1-E1-A8.R1
ttccttgccttctacaaattctaatgcaattcaagaaccagttgctagagacattcatgggacctcagctaagttggaagagccgaagaatccgagtgcaaagttcagactgatctggagctagattctgcaaagggttccgaaattgaacttgctaagtcggggaaacctatagatttagtggaagaggaagatgcatgcccaatctgtttagaagaatatgatgcagagaatccaaaactcgcaacaaattgtgaccatcattttcaccttgcatgcattctggaatggatggaaagaagtgaactntgccctngtgtgcgatcaggatttggttttcgaccctcccattgaataatacatcaacataggagttcaaatatactgtgtagtgtttgagaagcgaggttacaaagtcatgagtttaatatgatagcaacccgaacttatggctgtattttgattgtttcgttttctgagttttctgggtttattccattttttactcagagtccctgcgttgcagcatacaggaaattaaaggaaatattctctgtttataatttcatcatttagaatgtttttaagtgatagccgga

SEQ ID NO: 33438 - DNA, 607 bp, Glycine max
  Clone ID: LIB3051-014-Q1-E1-A8.R2
ttccttgccttctacaaattctaatgcaattcaagaaccagttgctagagacattcatgggacctcagctaagttggaagagccgaaggaatccgagtgcaaagttcagactgatctggagctagattctgcaaaggttccgaaattgaacttgctaagtcggggaaacctatagatttagtggaagaggaagatgcatgcccaatctgtttagaagaatatgatgcagagaatccaaaactcgcaacaaattgtgaccatcattttcaccttgcatgcattctggaatggatggaaagaagtgaaacttgccctgtgtgcgatcaggatttggttttcgaccctcccattgaataatacatcaacataggagttcaaatatactgtgtagtgtttgagaagcgaggttacaaagtcatgagtttaatatgatagcaacccgaacttatggctgtattttgattgtttcgttttctgagttttctgggtttattccattttttactcagagtccctgcgttgcagcatacaggaaattaaaggaaatattctctgtttataatttcatcatttaagatgtttttaagtgatagccggatactacatg

SEQ ID NO: 33439 - DNA, 510 bp, Glycine max
  Clone ID: LIB3051-018-Q1-E1-H10.F1
gtaagtcaacatgagttagttcgtagtatgatgaccaattctaccgaggagtcattggcgaataggaagttctgcccttatcgtgaagttatcccttgaatcttaaatagtggctatcgtctgctatgggtgcagtccatggaatcccagacaggttcctataccccacagccttgcccgcggtggaggcgtgatcatccgttgacagccgtcctcgatactcctcagctcgattttgctctggcagcgaattcagagtccacatgctgccagactgatcccttgaattgccctgcggaagctaggccgcgcaaatgctgatggattttgcttggtccctgttgcagcgagctggcacggcattccacctgctcccgtaggggtttagcttgagagtgagttcgtgcattaccggccagttgtgcaccttcgtcagcctttaggtccagggatacgacactccgggatgcgggcatctgaacttcaagcaccgtcacatggcggcgtcgt

SEQ ID NO: 33440 - DNA, 476 bp, Glycine max
  Clone ID: LIB3051-018-Q1-E1-H10.F2
gttaaacatgaagagcttataagcactagagcaccaatcctaccaaggaggccattgtgtaatatgaagcataaccctttgatgaattaatcccttgatgaaaaaaggctatagcctgctatgaatgcattcattggattccaaacgcgttcctatacccttctagacttgcccgccgtgaaatataacattgcttgaacctgccaatatactcctaagtaatataatgcctctagcaaaaaacccttagtacaacatgatacagatactgacatccttgaaattgcacatggtgaagataagcccaatgaaatgtacagccttgggttggtaccatattgaatggagctagacacagaaaaaccattgctcccctaagaggaatgctcgaaaggtaatcctgacattacgaaaaaatatgccaacttcttatttctttaagaacaggtataccacacaccaagggccgggcaatg

SEQ ID NO: 33441 - DNA, 535 bp, Glycine max
  Clone ID: LIB3051-018-Q1-E1-H10.R1
atccttactatcaccctcaacaaataacgtgtctaatactcgaaggaattaggatcacattcgacggcacagatggcgttggtaccgtcacactctacgtctcgaattcaacaacatcgatttctcactaccggattctcaacattagcagctatacccgtcccccatttcatccgcgcccaatcccaatctctctctaccctcggtccacaccgttagagccgcatactctctacgtacgaacgcccatgatggcctcatcactcctgatgcatcattagattgtcatctacccgatgcagcaggaagttgatggcaatcactgggcgctcactttcaagcgctaagtttctcatcgcaagcatctcatcactggagcctgagttggtcacagcatcttagagttaggcccctaccgacaggttctccaattcatgcacaatgaagccccttctgtgtacagcctcaattcgaatgtggcgcgagagtctaagcggcgagatgcgactctacgaacccgtgattctcaagatgc

SEQ ID NO: 33442 - DNA, 477 bp, Glycine max
  Clone ID: LIB3051-018-Q1-E1-H10.R2
atgcttattattacacactataaagaacaagctataatactcaaaggatctaaaatgacagtagccgacacagatgacgtctgtaccaagtgatactaaaccttattattcaacaacaggaataaatcacaccgaatactaaacacacgaggatatacccgaactttattagatccgggctacaataaacattctactgtactaacctgggctaacataatcagtaaaacaacgcagtactctagtcttcataaacaaccacaatgatggtatctattagcaccctagacgtaaaaatgaaattgtacttaaccagatgccaatgaagaagtggcaatgactgaagcatcaatacaacgtgatgaattttatgatgatgctgacaaatcaaagaacattgaggactcaaaaatactgagaggtaggaccatacacagaagttcttctacattcgcaaagaaaagcctatgctttcac

SEQ ID NO: 33443 - DNA, 530 bp, Glycine max
  Clone ID: LIB3051-018-Q1-E1-H3.F1
gagagagagagagagagacagatctctctcaaggggtttaattgcagagatcttttgcgtttcccaataaaagtgaaagagtagacagagagaaagagaagatcaaaagagctaaccctggccccctgaaaatcttcccgttttttatctgaatcacgctttagtttgtcccttagctttgttttcgtttgatcccatgcccctctagcaaaacccgtttgtcttcaatgccaccttcagactgatcaaaacaaaacaaaacttgtttttttcgcaatcttcttccccctttggggaaagcataaataaaaagcgatagaaagggatcgatagaaagagtcttggggagtagcccccactgtaaagatgggtactggttggagaagagccttctgcacccgcgaccctgcatctaccaaatcggataaacatcccggaagcccaagcccgagcccaagaacctgcactcgattggggtttccccccggggggagaacccttccaccccaagcttggttgcacaacaaaag

SEQ ID NO: 33444 - DNA, 328 bp, Glycine max
  Clone ID: LIB3051-018-Q1-E1-H3.F2
gggagagagagagagagacagatctctttcaaggcgtttaattgcagagatcttttgcgtttctcaatataagggaaagagttgcccgggggaaagagaagatcaaaaggagctacccctggctccctgaatatcttctcgttttttatctgaatcaccctttaatttggctcttagctttgttttcgtttgatcccatgcccctctagctaaactcgtttggcttctatgccaccttcagactgatcaaaacaaaacaaaacttggttttttcgctatcttcttctccctttgaggaaagcctaaataaaaagcgatagaaagggat

SEQ ID NO: 33445 - DNA, 583 bp, Glycine max
  unsure (1)..(583): unsure at all n locations
  Clone ID: LIB3051-018-Q1-E1-H3.R1
cccacggtccgcccacggntccgtanctttccacgtggccttgcaaacagggcacaccaagcttccatgcttgcgtacatgcgctgcgatgcacgggaaatgaaacgcgtgaccgcattccgctgtgtatatcgccgtaccctgtcctgtcttcacgctgttcaagcaaattccacagctactctgctcaaccataacaaatcacaatcattgaatactccatacatgggaatcttaaaaagatgaaagaagcatgacataccctgaatttgaagctgttcttgaagagggagagcttgagaggggagcgtggagaagttggatttgagactgatggtgatttcgttgctctgggggtgttcttgctttgaactctgggactatcacttaatgtaactgtttgagaagcagtttccgcttttgttgtgcaaccaagcgtgngggtggaagggttgctaccaccagagagaaaacccaatcgagtgcaggttcttgggctcgggcttgggcttccgggatgtttatccgatatggtagatgcagggtcgcgggtgcagaaggctcttctccaaccagtacccat

SEQ ID NO: 33446 - DNA, 557 bp, Glycine max
  unsure (1)..(557): unsure at all n locations
  Clone ID: LIB3051-018-Q1-E1-H3.R2
cccacgcgtccgcccacgcgtccgcgtctttccacgtggccttgcaaacagggcacaccaagcttccatgcttgcgtacatgcgctgcgatgcnacgggaaatgaaacgcgtgaccgcattccgctgtgtatatcgccgtaccctgtcctgtcttcacgctgttcaagcaaattccacagctactctgctcaaccataacaaatcacaatcattgaatactccatacatgggaatcttaaaaagatgaaagaagcatgacataccctgaatttgaagctgttcttgaagagggagagcttgagaggggagcgtggagaagttggatttgagactgatggtgatttcgttgctctgggggtgttcttgctttgaactctgggactatcacttaatgtaactgtttgagaagcagtttccgcttttgttgtgcaacgcaagcgtggggtggaagggttgctaccaccagagagaaaacccaatcgagtgcaggttcttgggctcgggctttggcttccgggatgtttatccgatatggtagatgcagggtcgcgggtgc

SEQ ID NO: 33447 - DNA, 489 bp, Glycine max
  Clone ID: LIB3051-025-Q1-K1-H10.F2
agaatagtagctattataatattataattacttgagtggttaacatggctcactccctctttttcaacccaactccctggcatcataggccattgctgtgccctctaaccccttttccccaataaaaaaaaattaattaaaacaaggttataattttatatttgtttttgaaaaactccaaattaacaactaaacaacactcctaatccctgtcccagtagtcacaatccgaattctcgggttcgggcatcttattaaggtcaacccggtcggcgaattctccagcaggcagcgcgtgggggtgctggcggtggagagcgtcgactctggcgccgacctcggtggccttcttcctgatggaggctgcggacatgtcggcggcggggccctccgcggcaacaagctcggggaagttgaggcgcgcagaggggccccgggagtggaaaacggcggtgtcgtaagcacgcgccgccgcgacgggcgtggagt

SEQ ID NO: 33448 - DNA, 511 bp, Glycine max
  unsure (1)..(511): unsure at all n locations
  Clone ID: LIB3051-025-Q1-K1-H10.R2
cngacacctcggctcagtgtctctctgcactgcaaaacccctataacccttcccttcctcgcacttcattcttttatttcatttatttataccctcttcatgaaaaattaagggaattttcagagagagagagagggagagagtagttatggaaggagaagaaggaggaattgcaacaaagaagagagggaaagagggtgaaactgagacgacgcgctacaaaggaatcagaatgagaaagtggggcaagtgggtcgctgagattcgagaacccaacaagcgttcaaggatttggctcggttcttactccacgcccgtcgcggcggcgcgtgcttacgacaccgccgttttccacctccggggcccctctgcgcgcctcaacttccccgagcttgttgccgcggagggccccgccgccgacatgtccgcagcctccatcaggaagaaggccaccgaggtcggcgccagagtcgacgctctncaccgncagcacccccacgcgctgcctgct

SEQ ID NO: 33449 - DNA, 452 bp, Glycine max
  unsure (1)..(452): unsure at all n locations
  Clone ID: LIB3051-030-Q1-K1-G5.F2
aagcgccaaaaatttcggggaaaaaaaaaaaaaaaaaaggggggggggcccaagagacacgggccacccaaaaaggggggggggggggaacaaaagaaaaaaccccccccaaaggggggaaacgccccaaaaacggggggggggcccccccaacagaaaaaaaaatttgggcaaggaagagaaaaaaaatttaaaaaactgcaaaacggggggcccccaaaagcggacccccaggccccaaaaaggggaaaaaccgagaatacacaaaaaaaagaaaaaaggcccaagggagggcaaagggggggggagaaaagacgggaaaagcccccagcgccgagggagcgtaaaaaataaagagggaaaagatntaaaaaacctccaaaaaaaaaccccaaaaaaacaaaaggcccgcgggggccaacccgaaaaacgccgcccgggccccggaggga

SEQ ID NO: 33450 - DNA, 436 bp, Glycine max
  unsure (1)..(436): unsure at all n locations
  Clone ID: LIB3051-030-Q1-K1-G5.R2
atctgcttctgggagcaacttgtaggaggatttaatagatgttttcacttcaaattgttaatgcactcaggatgatgagtccttgacagttctttcctgcaaacatctgtaccatcctgagtgcattaacaattggttgaaaataaacaaggtttgcccagtttgtagtactgaggtatctgcttctgggagcaacttgtaggaggatttaatagatgttttcacttcaaattgaagaaaatttatgctaagttgggggctaatatcccttgttctaatagcatttccacattagggagatagtctgtgctattgtttccagctccttcattttaagtgtaacatgtaacttttggaacctgctctctagattgtctttattttaatggaaaatgaatggcatttaagtggccannnnnnanannnannnnnnnaa

SEQ ID NO: 33451 - DNA, 548 bp, Glycine max
  unsure (1)..(548): unsure at all n locations
  Clone ID: LIB3051-035-Q1-K1-E3.F1
gagtaaaaggggctttatatcactaaatgatttggctcgttcaacttgtttacgccaatgctttctataacattcactcagaaagggtccaactattaagccacgtaaactttcctccatatacataacatatgttgcaatgctagggatgattccttctccactccttacagggcaagaccagaaaggattttcattgcacttttggtggcacttatagcagcatgatttaacatgcatcctttcttgcttgaaacagaggctttgcaagaaatgcaccagccacacctctctcttggaacctccacaagcttcttttcagaacttggccaaaagaagcgtgaactgtnttgggagaatgcttttgctagcaaataagtgtttccagatgttgctttccccaagttgccagacacatgaccttctgatctagaatcctctgaagaaagaacggccaggttagcagcagcagacgcagcaacatcaccatgcatatagtaattaatatatgactgtggtttataggagcacccatgtacacaaaatca

SEQ ID NO: 33452 - DNA, 573 bp, Glycine max
  unsure (1)..(573): unsure at all n locations
  Clone ID: LIB3051-035-Q1-K1-E3.F2
gagtaaaggggctttatatcactaaatgatttggctcgttcaacttgtttacgccaatgctttctataacattcactcagaaagggtccaactattaagccacgtaaactttcctccatatacataacatatgttgcaatgctagggatgattccttctccactccttacaggagcaagaccagaaaggattttcattgcacttttggtggcacttatagcagcatgatttaacatgcatcctttcttgcttgaaacagaggctttgcaagaaatgcaccagccacacctctctcttggaacctccacaagcttcttttcagaacttggccaaaagaagcgtgaagctgtttgggagaatgcttttgctagcaaataagtgtttccagatgttgctttccccaagttgccagacacatgaccttctgatctagaatcctctgaagaaagacggccaggttagcagcagcagacgcagcaacatcaccatgcatatagtaattaatatatgacntgtggtttataggagcaacccatgtacacaaaatcattagttaaactgcctttgcacttt

SEQ ID NO: 33453 - DNA, 566 bp, Glycine max
  Clone ID: LIB3051-035-Q1-K1-E3.R1
aaaactactgcctgcaagatgctgaaactaagaagtatgtttcagaattgaatgctgaggaggatgatgttgatggcaatggagatgaatgtcgcttgtgtggcatggatgggaccttgctttgttgtgatggttgtcctgctgtttatcattcaaggtgtattggtgtgatgaagatgcatataccagaaggggcatggtattgtccggagtgcaaaatagatatgattgggcctactattgcacggggaacatcacttaaaggggctgaagtattcggaaaggatttgtatgggcaagttttcatgagtacttgcaaccacttactggtgtatgtttaacttcttttgtgtttcttccactccttcatttgttatgctggatgattctggctcaatgtcaacagtgatggcttttgtcttaaatactacaatcagaatgacatacctagagttctccaagtcctttatgcatctgagcaacatagacctatatacaatggtatttgcatggcgatgttagaatattggaatatttcaggaaagttcttacccatgttgtgtcag

SEQ ID NO: 33454 - DNA, 574 bp, Glycine max
  Clone ID: LIB3051-035-Q1-K1-E3.R2
aaactactgcctgcaagatgctgaaactaagaagtatgtttcagaattgaatgctgaggaggatgatgttgatggcaatggagatgaatgtcgcttgtgtggcatggatgggaccttgctttgttgtgatggttgtcctgctgtttatcattcaaggtgtattggtgtgatgaagatgcatataccagaaggggcatggtattgtccggagtgcaaaatagatatgattgggcctactattgcacggggaacatcacttaaaggggctgaagtattcggaaaggatttgtatgggcaagttttcatgagtacttgcaaccacttactggtgtatgtttaacttcttttgtgtttcttccactccttcatttgttatgctggatgattctggctcaatgtcaacagtgatggcttttgtcttaaatactacaatcagaatgacatacctagagttctccaagtcctttatgcatctgagcaacatagacctatatacaatggtatttgcatggcgatgttagaatattggaatatttcagaaaagttcttacccatttgtgtcagtagactaact

SEQ ID NO: 33455 - DNA, 285 bp, Glycine max
  Clone ID: LIB3051-037-Q1-K1-C4.F1
cctctatatgttctccctttttttttttttttaaaatttatattattatttcattttatcatcattttttttcatttataatccattatcattactaatctatttatataccttacttatatcatcttaatccaatattgataatttcacctctttaacatttttcatatttatctttttctatctttaacatttaatcactattttcaaccatcaattatatttttttcatcctcctttacttcttcttgtccatatattatttactttcatcatcatcaactc

SEQ ID NO: 33456 - DNA, 566 bp, Glycine max
  unsure (1)..(566): unsure at all n locations
  Clone ID: LIB3051-037-Q1-K1-C4.F2
aaaagttaaaatagtatttcattgtatcaacaaaattttacatttangaaaccaacatcagggacgaatctatttatagaccttacttagaccatcttaagccaagaggataatttcaccacgggaacattgttcatatatatcttttgctagctgtaacattgaatcactatgttcaaccagcaatgatatttttttcagcctcctttactgcttctgcagccagatatgatttactttcagcatcagcaactctgtaggctgcagtatccgcagcttcctttattgtgtcattagtcattaagacagaagctggggattgctgttgtggttgtggtggccggacatcctttggttttggtgaaggtgattttgtccccgaggaggcttcctttttcaccttgtaaccattttgtaccttttcaagtttcccttgactaacaagcctcctcaactttgtacttaatgcccttctaaaattttggtttacctgaagattttttgctccatgaatttaatgatggcattcatgtcagatccattactatctttcagcgctgatagag

SEQ ID NO: 33457 - DNA, 573 bp, Glycine max
  unsure (1)..(573): unsure at all n locations
  Clone ID: LIB3051-037-Q1-K1-C4.R1
cccacggntccggcgaagaagtagagaacaaagaaagagagagagaattgaatgtgaatggggaatcagaagcagaagtggacgcagagaagaagatgctctcatcgccggcgttgaaaagcacggccccggaaagtggaagaacattctcaaggatccccaattcgcccctttcctcacttcccgttccaacatcgacctcaaggataaatggcgcaatttgagcgtcaagacggtgctcagggctccaaagaaaaatctagggttcccaagcttaaagccctccctgctcctcctgctcctaccgccactcctcagaacgccgctcctgctctgcaaaacgcagcatctgatgtcactcccccagatgcttctcagaatgaccaagatgccaaaaaccctccaaggtataatgcaatgntttttgaagctctatcagcgctgaaagatagtaatggatctgacatgaatgccatcattaaattcatggagcaaaaaatcttcaggtaaaccaaaattttagaagggcattaagtacaaagttgaggaggcttgttagtcaagggaaacttt

SEQ ID NO: 33458 - DNA, 588 bp, Glycine max
  unsure (1)..(588): unsure at all n locations
  Clone ID: LIB3051-037-Q1-K1-C4.R2
cccacgcgtccggcgaagaagtagagaacaaagaaagagagagagaattgaatgtgaatggggaatcagaagcagaagtggacgcaggacgaagaagatgctctcatcgccggcgttngaaaagcacggccccggaaagtggaagaacattctcaaggatccccaattcgcccctttcctcacttcccgttccaacatcgacctcaaggataaatggcgcaatttgagcgtcagcaacggtgctcagggctccaaagaaaaatctagggttcccaagcttaaagccctccctgctcctcctgctcctaccgccactcctcagaacgccgctcctgctctgcaaaacgcagcatctgatgtcactcccccagatgcttctcagaatgaccaagatgccaaaaaccctccaaggtataatgcaatgatttttgaagctctatcagcgctgaaagatagtaatggatctgacatgaatgccatcattaaattcatggagcaaaaaatcttcaggtaaaccaaaattttagaagggcattaagtacaaagttgaggaggcttgttagtcaagggaaacttgaaaagtacaaa

SEQ ID NO: 33459 - DNA, 526 bp, Glycine max
  Clone ID: LIB3051-040-Q1-K1-F12.F1
aattccagaagctaattaataaacttcattcaccatctatagtattatcaacaagtctttctacatatttatgttaacttcattcacccaagagctataacacaacatttcagaggctgcgcttctaacctagaactgcgtaaagtacacatcctagagctgaagataaacaacacaggactaaagacactgaactgcacaatatacccttcacaagtctcaccagttatacattcatgtaatcaatcatttactgctactgctattatgagttacttctgctgattgaagtccatgaagttagggtggttctgtccagagggaggaggaggcatgccaacctgtggctggtgttgtgtctgctgatggggtgcagaattagacaactgttgcatggctaattgggaaccaactggttgaatatcccaccaaaagaagggttacaccaatagcacccaaacgagtactttgtgccctaagggctgcagttcttccttcaatgcctcattgagatcttctctaagct

SEQ ID NO: 33460 - DNA, 505 bp, Glycine max
  Clone ID: LIB3051-040-Q1-K1-F12.F2
aattccagaagctaattaataaacttcattcaccatctatagtattatcaacaagtctttctacatatttatgttaacttcattcacccaagagctataacacaacatttcagaggctgcgcttctaacctagaactgcgtaaagtacacatcctagagctgaagataaacaacacaggactaaagacactgaactgcacaatatacccttcacaagtctcaccagttatacattcatgtaatcaatcatttactgctactgctattatgagttacttctgctgattgaagtccatgaagttagggtggttctgtccagagggaggaggaggcatgccaacctgtggctggtgttgtgtctgctgatggggtgcaaaattagacaactgttgcatggctaattgggaagccaactggttgaatatcccaccaaaagaagggttaccaccaatagcacccaaacgagtactttgtgccctaaggcgctgcagttcttccttcaatg

SEQ ID NO: 33461 - DNA, 560 bp, Glycine max
  unsure (1)..(560): unsure at all n locations
  Clone ID: LIB3051-040-Q1-K1-F12.R1
atttccacttgttcttcagcaaactcacaaccacaacccaaccaacccacctgaactactgaacaacaacctcttcttcttctctctctctctttagcataatcattcatcaccacacaagagaaaaaagaaaaagaacaaagaacaaataaacctttttttttttataaaaaaagaaagaaaaggaaataaagttttttgttttttcgatgaaccagaagttcatcgnaaagccgccggcgncggtggacctggatcggatgccggagcgtgggtcccaccaccggcgttcccactccgacacctccttccgcttcgccgcgaacttcgacgaccttctcctcttcgacccctccgacttcgacatctccggcctcccgtcgccgctccctctgccatctccggtctccgccggcttggttccgatgtccgtcgactccgagcagtccggcaaacagcgaggccggcggggcgtcgcgggggcacctgcggagtctgtcggtggattctgacttcttcgacgggctcgggttcggcggcgagagagaggcgccgggaaa

SEQ ID NO: 33462 - DNA, 547 bp, Glycine max
  unsure (1)..(547): unsure at all n locations
  Clone ID: LIB3051-040-Q1-K1-F12.R2
atttccacttgttcttcagcaaactcacaaccacaacccaaccaacccacctgaactactgaacaacaacctcttcttcttctctctctctctttagcataatcattcatcaccacacaagagaaaaaagaaaaagaacaaagaacaaataaacctttttttttttataaaaaaagaaagaaaaggaaataaagttttttgttttttcgatgaaccagaagttcatcggaaagccgccggcgacggtggacctggatcggatgccggagcgtgggtcccaccaccggcgttcccactccgacacctccttccgcttcgccgcgaacttcgacgaccttctcctcttcgacccctccgacttcgacatctccggcctcccgtcgccgctccctctgccatctccggtctccgccggcttggttccgatgtccgtcgactccgacgagtccggcaaacagccgaggccggccggnggcgtccgccggcgggcacctgcggagtctgtcggtggattctgacttcttcgacgggctcgggttcggcggcg

SEQ ID NO: 33463 - DNA, 574 bp, Glycine max
  Clone ID: LIB3051-040-Q1-K1-G5.F2
gtattgaaagtaaaacttggcattaaccaaacaaattcttgccaccgggaaatggcacaagcatttatcattaccctatcccaccaccctggttgacatcaaccctaatgccaaaaactgacattacatccaccaactagccaagttcgacctgagctacaatcaagactcaagtatacagagattgagagcgaccctatatgggaagataaataacagcttgtaaaggagaagttggctaattacaaagtagaagatataagctgttgtcttaatgtttgcaaagttggagcctgtactagttcacaatcttaagtgataatttccctgacaagccaatccaaactaggatatgagaagtacaaaatgagaaatgacgggagggcaaacagaattgtaacaagtacatacagagccaaaatggctgcacttgctggtattgcatataagacaattaacaagaatataatgaccaatgggaacttagccgtcaactgtacaaagaagatcagtgatttccaaagataaacatgaaatctttccgtattgaggtgattaccagtattaccatgat

SEQ ID NO: 33464 - DNA, 587 bp, Glycine max
  Clone ID: LIB3051-040-Q1-K1-G5.R1
cgaaccaccgtttctctctcacggtgctgccactgtcactcttctctactttctgcttcccagattctctatttttgcgcgtaatcgaatgtggactttgcatcgaattgcattgctggaactgtgggactaaaaaatgattcaaagcctactcactctgcttcagaatgttctgatgatgagacttctgttataggcagagaggaagggctggaatgcccaatatgctgggaatctttcaatattgttgaaaatgtgccctatgttttatggtgtggccacaccctttgtaaaaattgtatcctcggactgcagtgggctgttgtgaaatttccaacactgcctgttcaacttcccctttttatctcctgcccatggtgcaacttatgtctttccgtttagtttaccggggaaatcttaaattccctcgcaaaaactactttcttctttggatggttgagagcatgaatggtgatagagggaaatcacattcacctttctgtagcgataatcaacaacactcaattaaagacaatttaaccacgggaagccaagtaagccatggaaaccttcggaggggtcaagtt

SEQ ID NO: 33465 - DNA, 571 bp, Glycine max
  Clone ID: LIB3051-040-Q1-K1-G5.R2
cggaaccaccgtttctctctcacggtgctgccactgtcactcttctctactttctgcttcccagattctctatttttgcgcgtaatcgaatgtggaactttgcatcgaattgcattgctggaactgtgggactaaaaaatgattcaaagcctactcactctgcttcagaatgttctgatgatgagacttctgttataggcagagaggaagggctggaatgcccaatatgctgggaatctttcaatattgttgaaaatgtgccctatgttttatggtgtggccacaccctttgtaaaaattgtatcctcggactgcagtgggctgttgtgaaatttccaacactgcctgttcaacttcccctttttatctcctgcccatggtgcaaccttatgtctttccgtttagtttaccggggaaatcttaaattccctcgcaaaaactactttcttctttggatggttgagagcatgaatggtgatagagggaaatcacattcacctttctgtagcgataatcaacaacactcaattaaagacatttaaccacgggaagccaagtaagccatggaaac

SEQ ID NO: 33466 - DNA, 547 bp, Glycine max
  Clone ID: LIB3051-041-Q1-K1-D6.F1
aacaacaattctccgctttccattttgtataatatttacacgaacattgaacactgaacacatactcaacaacctaaacagaacactcccgtccccaaatctaggattttttttccctagagtcattcatgattgtaatagaaatcaggaatccctgaagcagcccaaagtctatcattgaaggcagcttgcatatggtggggtatgaagggtgtccgacacaggggacacgttctttgatcgtatcccatccaacggtccagacaccctctgtggaatatgtggcggcagttcgtcagccgtctgatctcgtcctctccctcgaactcgtacagacacaccgcgcatcttccggcgcctccgcaatctccatctccatctccgagaacttcaccaccggtaggatttcccttatgagcaccgcccacaccgactggaattccggcgccctctccggccacgcaatgtcggattcgaagaaatcgtggaagcccatgtagcacaagaggacggtgatgagttttcttatcaagcccaatacggatag

SEQ ID NO: 33467 - DNA, 498 bp, Glycine max
  Clone ID: LIB3051-041-Q1-K1-D6.F2
aacaacaattctccgctttccattttgtataatatttacacgaacattgaacactgaacacatactcaacaacctaaacagaacactcccgtccccaaatctaggattttttttccctagagtcattcatgattgtaatagaaatcaggaatccctgaagcagcccaaagtctatcattgaaggcagcttgcatatggtggggtatgaagggtgtccgacacaggggacacgttctttgatcgtatcccatccaacggtccaaacaccctctgtggaatatgtggcggcagttcgtcagccgtctgatctcgtcctctccctcgaactcgtacagacacaccgggcagttctccggcgcctccgccatttccatctccatttccgagaacttcaccaccggtaggatttcccttatgagcaccgcccacaccgactggaattccggcgccctcttcggccacgcaatgtcggattcgaagaaatcgtggaagcccatg

SEQ ID NO: 33468 - DNA, 545 bp, Glycine max
  Clone ID: LIB3051-041-Q1-K1-D6.R2
tgcttatactaactaactcttcttgagaaactctttctcacacgccaagagtaacatgggatttccagtggggtacacagagttgatgctgccgaagtgtttctgcaggtgctatccgtattgggcttgataagaaaactcatcaccgtcctcttgtgctacatgggcttccacgatttcttcgaatccgacattgcgtggccggagagggcgccggaattccagtcggtgtgggcggtgctcataagggaaatcctaccggtggtgaagttctcggagatggagatggagatggcggaggcgccggagagctgcgcggtgtgtctgtacgagttcgagggagaggacgagatcagacggctgacgaactgccgccacatattccacagagggtgtctggaccgttggatgggatacgatcaaagaacgtgtcccctgtgtcggacacccttcataccccaccatatgcaagctgccttcaatgatagactttgggctgcttcagggattcctgatttctattacaatcatgaatgactctaggg

SEQ ID NO: 33469 - DNA, 363 bp, Glycine max
  Clone ID: LIB3051-045-Q1-K1-D2.R1
cccccccactcccccacgcccccccccccccccccccaccccccccccaccccgcccccccccgccccccccctccccccccccccccccccctcaccccccccccccccccccccccccccccccccccccaccccccccccccctcccccccccccccccccccctcccccccccccccccccccccctcccaccttcccccccccaccctccccccgcacccctccccccccaccccccccacccacccccccctccaccctccccaccacccccccaccccccccctcccctccccctcccctccccccccccccaccccccccttccccccccccccccccccccccccccccccccc

SEQ ID NO: 33470 - DNA, 573 bp, Glycine max
  Clone ID: LIB3051-045-Q1-K1-D2.R2
cccacgcccgtccgtaaaaaacagagcaactactcaattcttcactctgtttccccttaccttacacactctaacacatggattcaccttcctccttcttcaactcaccctcttccggtttctgctccgaatcttcctctccggaagccttctcgtgggaagggtacctacccttcaacgagaacgacccggaggagatgcttctatacggcatgatcgccggcgcgacaaccgaggagcactccggcgagagggcgagctcggaggagagtgctgcagcacggaaggagaagtcgtaccgcggcgtacggcggcggccgtgggggaagttcgcggcggagataagggactccacgcgccacgggatgagggtgtggctggggacattcgacagcgccgaagccgcggctctggcttacgaccaagccgcgttctccatgcgcggctcggcggcgattctcaacttccccgcggagatcgttagagagtcgcttaaagagatgaactacgctcatgatgattccaacaacgaaaaagggtgctcccctgttgtcgctctcaagaggaacactc

SEQ ID NO: 33471 - DNA, 508 bp, Glycine max
  Clone ID: LIB3051-059-Q1-K2-E10.F2
aaacctataatctcgacgactatattaatttcatgatctgatcatcaaaatacatatacccaaccagaatagaagagagaaatgagatcaatgaccactagggtttgtattgcataagtcaacttaaattacaagaatgtaaagagtagccgtctaaagtatccttaaatgaaaataaataacaaaatcaagccacattatctaactccagtaagtacctaaaggattaagatgctgccaagaggacgaattggtgtgaatagcttgtccaaactggggatgtaatgtattactaatgccagcgtctaaactactcctcggattcatttggccattcagatccatgtttgcggaatgcagaagggtcgaagttggtgttaacatatcaacaaccgtgcaatgatgtgattgttgatctctgacaagagcagtgtcataaacattcgcaaagttcagagtctggacatgtagtggatctccctgtggaaaccaatctactgggttcttt

SEQ ID NO: 33472 - DNA, 567 bp, Glycine max
  Clone ID: LIB3051-059-Q1-K2-E10.R2
gaaatatggggagagtgaagcttccgatcaaaaagattgagaacacaaccaataggcaagtcactttctccaagaggaggaatggactcatcaagaaagcttacgaactttctgttctttgtgatgttgatgtggctctcatcatgttttccccatcaggaagagccactttcttctctggcaacaaaagcattgaagaaattctagaacgatatgttaatctttcggagggtgaacacggaaggatgcataataaagagcacattcaaaagttgcttagtaagttgaaagatgaagctggtcaaatatgtcaagcccctagctcaatgacttcagattcccaaattgaggatcttcgaagagaaattttcacttgcaagtctcaattggaagagatggagaagcgactaaggatatttgaaggtgatccttcagagatcacaacgctcagcgaggctgaatatcgtgaatatgtccttcgggatactctaaaacaagtgcaactgcgaaagtgtgttttggaggagtacaattctcatgccactcattctccacaggtacatgctg

SEQ ID NO: 33473 - DNA, 563 bp, Glycine max
  Clone ID: LIB3051-065-Q1-K1-G8.F1
gagaaacacatctaaatatgattcagaagggaaagccacataaaaattagaagtaaaaccaaacaagcatggcggaggcattggcttatacaataatacaagtcaggtgcaatgccagcctgctgtacatgtcaaacataatgtcatacataaattccaatttctattttgtgggattattggaaaaacctgataaagtaagagaaaagtattagctataacagttggactgtacaggaagcttgttgtgtcactaacattgaatcttcattcctcaggctcaggcccgactttgatctccaatagcctctcaactggttgtctgcagattggacatctatttgtctggaacctcaaaaccttcgcacatccgctacacatacacatgtggcggcatggaaggacagttgtgtcccgaggctctgacaagcatataacacactcttttcctgggtcattcccatccacatcactctccactgaatttccaataccatatatctcctgcagttcatacctcattccatttacccataagatctgcttcacaaccttcacctgga

SEQ ID NO: 33474 - DNA, 529 bp, Glycine max
  Clone ID: LIB3051-065-Q1-K1-G8.F2
gagaaacacatctaaattgattcagaagggaaagccacataaaaattagaagtaaaaccaaacaagcatggcggaggcattggcttatacaataatacaagtcaggtgcaatgccagcctgctgtacatgtcaaacataatgtcatacataaattccaatttctattttgtgggattattggaaaaacctgataaagtaagagaaaagtattagctataacagttggactgtacaggaagcttgttgtgtcactaacattgaatcttcattcctcaggctcaggcccgactttgatctccaatagcctctcaactggttgtctgcagattggacatctatttgtctggaacctcaaaaccttcgcacatccgctacacatacacatgtggcggcatggaaggacagttgtgtcccgaggctctgacaagcatataacacactcttttcctgggtcattcccatccacatcactctccactgaatttccaataccatatatctcctgcagttcatacctcattccattta

SEQ ID NO: 33475 - DNA, 571 bp, Glycine max
  unsure (1)..(571): unsure at all n locations
  Clone ID: LIB3051-065-Q1-K1-G8.R2
tgggaagcctggngtgaaaagcaaagtcaattgctgctaaagattgcttataaacatttctttcttccacgtttgatatgttctggattttgatctgatctcacactagacacatcaccatacttttctttgcaaaagaaggggaaggttgcacactaactccaatgaaagaaaatgttcttccacccgtgactgtaaatttccagcaaggacttggccagaagtttaaacagccagctggaactggtattgatttttcaacatttgaggagtctgagttattgaaagtaggggacatggatgtctatcctgttgcaattaaagcagatgcatcctccagcgaccatgatgaatcaaaatcaaatgaaactccatcatccggtagctcaaactctcagataactcaagcagtgtttgagaaggagaaaggagaattccaggtgaaggttgtgaagcagatcttatgggtaaatggaatgaggtatgaactgcaggagatatatggtattggaaattcagtggagagtgatgtggatgggaatgacccaggaaaagagtgtgttatatgctt

SEQ ID NO: 33476 - DNA, 526 bp, Glycine max
  Clone ID: LIB3051-078-Q1-K1-E6.F1
acacaagattcatgatggtacaatacatgcaacacccaaaaaaaaagtgacaaagccacaagaaattattagtctctgaccaattttttggtactacaaatcacacataaaatctttttcagcccacgaaatatcgacattggacaatcatgttaaaaaaaatcagcacaaatctacttagtaatagagtttcaaatcacacatctgatagaagttttcttaatgaagattgaacagccgacagacagcgtgcattttattcactgccattgcacaacaacacacctgacttgacttggcgcttgtttggatttccggtacagaggcttcaacatacgttcagagaaataacccctttgttacttttgccctgaatgtacatttagaggggctggaatggattttcaaacatagttttagaaattccagcagtcatatgcttgaggtcagtggctaaatcatctccaagaaaggccgttgcagcatcagttgtgatggtttggttcttgcaatgtccagaacctag

SEQ ID NO: 33477 - DNA, 440 bp, Glycine max
  Clone ID: LIB3051-078-Q1-K1-E6.F2
acacaagattcatgatggtacaatacatgcaacacccaaaaaaaagtgacaaagccacaagaaattattagtctctgaccaattttttggtactacaaatcacacataaaatctttttcagcccacgaaatatcgacattggacaatcatgttaaaaaaaatcagcacaaatctacttagtaatagagtttcaaatcacacatctgatagaagttttcttaatgaagattgaacagccgacagacagcgtgcattttattcactgccattgcacaacaacacacctgacttgacttggcgcttgtttggatttccggtacagaggcttcaacatacgttcagagaaataacccctttgttacttttgccctgaatgtacatttagaggggctggaatggattttcaaacatagttttagaaattccagcagtcatatgct

SEQ ID NO: 33478 - DNA, 341 bp, Glycine max
  Clone ID: LIB3051-082-Q1-K1-G12.R1
ttttatatgtacaatattaggattggatttgctatgattttctatgaacttattaacaaatcgaattggtcttttgcagctttgcccatatgtctgaccaattcaaaagacatggccttcggatgtggacatcagacatgttgtgaatgtggacaagatcttcagtcgtgtcccatctgtagaagccccattaacaccagaattaagctttactaggcggcctcttccgttgtgaattaattattttgttgtgtaagctaaaattctttgatttttttaaccttctctggttgtatacaaacgttagatcagctgtgtctattgatgaaaaatggtacaac

SEQ ID NO: 33479 - DNA, 342 bp, Glycine max
  Clone ID: LIB3051-082-Q1-K1-G12.R2
ttttatatgtacaatattaggattggatttgctatgattttctatgaacttattaacaaatcgaattggtcttttgcagctttgccccatatgtctgaccaattcaaaagacatggccttcggatgtggacatcagacatgttgtgaatgtggacaagatcttcagtcgtgtcccatctgtagaagccccattaacaccagaattaagctttactaggcggcctcttccgttgtgaattaattattttgttgtgtaagctaaaattctttgatttttttaaccttctctggttgtatacaaacgttagatcagctgtgtctattgatgaaaaatggtacaac

SEQ ID NO: 33480 - DNA, 591 bp, Glycine max
  Clone ID: LIB3051-084-Q1-K1-A12.R1
cccacggtccgtagagaaataaaaagagaaagccgacagcacatagatagagagaggaaaacgacttaatattctttttccttgagacctgaaggggctaaggaaaattagaaggacacacaagtataaaggcggtgaaataaaagagaaagacaagaagaagacatgggaagaccaccttgttgtgacaaagaaggggtcaagaaagggccttggactcctgaagaagacatcatattggtgtcttatattcaggaacatggtcctggaaattggagggcagttcctgccaaaacagggttgtcaagatgcagcaagagttgcagacttagatggactaattacctgaggccaggaatcaaacggggcaacttcacagaacaagaggagaagatgataatccatcttcaagatcttttaggaaacagatgggctgcaatagcttcataccttccacagagaacagacaatgacataaagaactattggaacacccatttgagaaagaagctgaagaagatgcaagtaggttgtgaaggtggtagctttggagaagggttttcagcctcaaggcaaatccctagaggccaa

SEQ ID NO: 33481 - DNA, 580 bp, Glycine max
  Clone ID: LIB3051-084-Q1-K1-A12.R2
cccacgcgtccgtagagaaataaaaagagaaagccgacagcacatagatagagagaggaaaacgacttaatattctttttccttgagacctgaaggggctaaggaaaattagaaggacacacaagtataaaggcggtgaaataaaagagaaagacaagaagaagactgggaagaccaccttgttgtgacaaagaaggggtcaagaaagggccttggactcctgaagaagacatcatattggtgtcttatattcaggaacatggtcctggaaattggagggcagttcctgccaaaacagggttgtcaagatgcagcaagagttgcagacttagatggactaattacctgaggccaggaatcaaacggggcaacttcacagaacaagaggagaagatgataatccatcttcaagatcttttaggaaacagatgggctgcaatagcttcataccttccacagagaacagacaatgacataaagaactattggaacacccatttgagaaagaagctgaagaagtgcaagtaggttgtgaaggtggtagctttggagaagggttttcagcctcaagcaaatccct

SEQ ID NO: 33482 - DNA, 156 bp, Glycine max
  unsure (1)..(156): unsure at all n locations
  Clone ID: LIB3051-084-Q1-K1-E4.F1
tctgagacncccccttgttttttttttttgattcgagaaaattacgnaaacaagatctttgatttcactntgtngatctgagatnnctaaacatttacanntgattnctcttancagagacaaaaatncagatataatnttccacccaactttttt

SEQ ID NO: 33483 - DNA, 574 bp, Glycine max
  Clone ID: LIB3051-084-Q1-K1-E4.R1
tgatctggtaccttactattaggtctggtttaagtcgattatagtgctccatatatgctgtaatttattgtctttgactttgttatcttttattcacattcttgtatttccttttatgcaggaaaatgcagatatcaggggccactgatctagcttctaagggacagggtgcatcagatagcagtagtgtaaaggttaaaagtgaatttgatgatgcctttcaaccagatgtgaagattcgctgtctatgtggaagtagattggaaacagagaatttggtcaagtgtgatgatgcaagatgccatgtgtggcaccatcagttgcgttattattccagagaaacctactgaaggcatcccactagttcctgataaattttattgtgaactctgtcgtctcactcgtgcagatccattttgggtttcagtggcgcccctttgcatcctgtgaagttgaccacaaccagtaatccaactgatggaaacaacccagtgcagagtgtggagagaacatttcaactgactagagctgacaaggacttggtatcaaaaccagaatttgatgttgaggcttg

SEQ ID NO: 33484 - DNA, 129 bp, Glycine max
  Clone ID: LIB3051-084-Q1-K1-E4.R2
tgatctggtaccttactattaggtctggtttaagtcgattatagtgctccatatatgctgtaatttattgtctttgactttgttatcttttattcacattcttgtatttccttttatgcaggaaaatgc

SEQ ID NO: 33485 - DNA, 346 bp, Glycine max
  unsure (1)..(346): unsure at all n locations
  Clone ID: LIB3051-088-Q1-K1-C3.F1
gaatntgacatcaaatcgattganttgaaatctngaagaactcancttcaacctaantactnctttntctttatctctaaacaattcttcaaantnctncctcntaccacttaaactccattcntatctacctcaaanncttaaacctttatcatncatcctccaacctcccattccctactccctactcttcaaataatatttattcaaataacancancaaatantaacantttaacccaaaaccacataaaaattcantgaactnnactccaaataatctaaaaaancaaaaacanataaattaaaataaataaacacaacaaacccttnttctttctttaac

SEQ ID NO: 33486 - DNA, 542 bp, Glycine max
  Clone ID: LIB3051-088-Q1-K1-C3.F2
aaatgttaacatcaaatccattgagttgataatctggaataaactcagcttccaacctaagtactgctttgtctttatctctaaacaattcttcaaagtgctgcctcgtaccacttaaactccattcgtatctacctcaaaggcttaaagcctttatcatgcatcctccaacctcccattccctactccctactcttcaaatagtatttattcaaataacagcagcaaatagtaacagtttaacccaaaaccacataaaaattcagtgaactggactccaaataatctaaaaaagcaaaaacagataaattaaaataaataaacagaagaaagccttgttctttctttaaccaaagaaagagaaaaaatagaataaagaaaaaaatgtgtattccatgtcaaccaggtggtggaggaggatagccactggtatctgaccacgtcgaaggtggaagctccgaaaactctgacccactaccaccgtcttctccgccatgaccctgctctcccggcggccggaaaatccccatttgctggctgga

SEQ ID NO: 33487 - DNA, 591 bp, Glycine max
  Clone ID: LIB3051-088-Q1-K1-C3.R1
cccaaaccaatcagtgggtgccgcggggaagtggttttcccatgatgtcacgttttatgcatgcgccttctcccgttctgtcttcttcgcatcctcatttgggagttggccacaagagagagcgtgaagatgacactggcgctggtgcagtggaggtgttgctattgcagcagcttcttcacaaacgcaaacacaagagattgaaagtgctggcggcgacaggaggaggagatacaggggagtgaggcagaggccgtgggggaaatgggcggcagagattcgcgatcctcacaaagcggcgagagtgtggcttgggacattcgacactgccgaggctgcggccagagcctacgatgaagccgcattgaggttcagaggtaacagagcaaaacttaatttccccgaaaacgttgtaccggttccacctcctcctccggttcccgatttaccggcaagtgcggtacgcggttccgattccatttccggttccggttcagtggtggcaggtttttcgccgacgctgatgcagggagcgccgtttcagggctcctctgcttttctgagagattatttgggggtattctcagctgc

SEQ ID NO: 33488 - DNA, 608 bp, Glycine max
  Clone ID: LIB3051-088-Q1-K1-C3.R2
cccaaaccaatcagtgggtgccgcggggaagtggttttcccatgatgtcacgttttatgcatgcgccttctcccgttctgtcttcttcgcatcctcatttgggagttggccacaagagagagcgtgaagatgacactggcgctggtgcgagtggaggtgttgctattgcagcagcttcttcacaaacgcaaacacaagagattgaaagtgctggcggcgacaggaggaggagatacaggggagtgaggcagaggccgtgggggaaatgggcggcagagattcgcgatcctcacaaagcggcgagagtgtggcttgggacattcgacactgccgaggctgcggccagagcctacgatgaagccgcattgaggttcagaggtaacagagcaaaacttaatttccccgaaaacgttgtaccggttccacctcctcctccggttcccgatttaccggcaagtgcggtagccggttccgattccatttccggttccggttcagtggtggcaggtttttcgccgacgctgatgcagggagcgccgtttcagggctcctctgcttttctgagagattattgggggtattctcagctgctgaggagtacaggggac

SEQ ID NO: 33489 - DNA, 573 bp, Glycine max
  unsure (1)..(573): unsure at all n locations
  Clone ID: LIB3051-092-Q1-K1-C4.R2
cccacgcgtccggatccaaatccaagtacggttgggttggagagaaaatgcgtccctgctgaaaacaccaaccctaaaacgcgaaagggttctaagaatttgcgaaggaaagagctagcggagatggagattcactacagtaacagctatttcgagaggcgccccatcctcaagtccaaggctgccgctgtcaaatgggtcaaagaatgaggataccttgaagaccttgaaagaaaaggtaaaagagccttcagtgccagagccagaacctgagccaactactgaagtactttttctttgcagctatgatggctgtggaaagacattcatagatgctggtgcattgaggaaacattctcacatccatggagagaggcagtatgtttgtcactacgatggatgtggaaagaaatttctggatagctcaaagttgaaaagacattttctcattcatacaggggagagggattntgtgtgtcctcatgaaggctgtggtaaggccttctncctggatttcaacttaaggtctcacatgaaaacacattcccaagagaactatcatatctgcccata

SEQ ID NO: 33490 - DNA, 547 bp, Glycine max
  Clone ID: LIB3051-095-Q1-K1-E3.F1
gaacaactacaatccccaattaaaaatcaaagaaacaacataaagaaaacacggttcaccaacaacatgatgaagattatatttaagataacaaaacctaaaccctagataatcagtcctaaccatgtcccacacatgaaaccgattaagctagtgcttattctaaaccagaattgaaaaacacaaactaaaaatttaagtaggacatcaacaatgatagatctcatatgaagaaatcaaaagaacccaaaaatagatcattctccatgtgtatgtctcatgtgtttcaactttatctccttcaacatcttatggtacttctcgagttgggcattgctcatgctttcaattggcacatcccaccagatgtgatccttcgcagccatcaacaaatggtttagatcctctacacgttgcttctccgcgtcaatttggttggacaaacagttgaggtgtgcttggagctcaccctcatccatggtgcaaggggcctcattgaggtcttgggtgaagaggggaggtgggccctctgtcgtataacgttgga

SEQ ID NO: 33491 - DNA, 497 bp, Glycine max
  Clone ID: LIB3051-095-Q1-K1-E3.F2
gaacaactacaatccccaattaaaaatcaaagaaacaacattaaagaaaacacgggttcaccaacaacatggatgaagattattatttaagataacaaaacctaaaccctagataatcagtcctaaccatgtcccacacatgaaaccgattaagctagtgcttattctaaaccagaattgaaaaacacaaactaaaaatttaagtaggacatcaacaatgatagatctcatatgaagaaatcaaaagaacccaaaaatagatcattctccatgtgtatgtctcatgtgtttcaactttatctccttcaacatcttatggtacttttcgagttgggcattgctcatgctttcaattggcacatcccaccagatgtgatccttcgcagccatcaacaaatggtttaaatcctctacacgttgcttctccgcgtcaatttggttggacaaacagttgagagtgtgcttggagctcaccctcatccatggtgcaaggggcc

SEQ ID NO: 33492 - DNA, 570 bp, Glycine max
  Clone ID: LIB3051-095-Q1-K1-E3.R2
cccacgcgtccgcggacgcgtgggttcagaaaacgtgccaaacttgagcgacgtcactaagaagacaaggtcggcaaaagatagagatgaagacgatagccaacaagtgtagccttcaagtgacattttcaaagcatcgaactggagttttcaagaaagcgagtgagcttgccaccctttgtggtgtggaccttgctgtgattatgttctctcccaataaccatgtttactccttcggtagccctaatgtggattctgtaatccaacgttatacgacagagggcccacctcccctcttcacccaagacctcaatgaggccccttgcaccatggatgagggtgagctccaagcacacctcaactgtttgtccaaccaaattgacgcggagaagcaacgtgtagaggatctaaaccatttgttgatggctgcgaaggatcacatctggtgggatgtgccaattgaaagcatgagcaatgcccaactcgagaagtaccataagatgttgaaggagataaagttgaaacacatgagacatacacatggagaatgatctatttttggggttcttt

SEQ ID NO: 33493 - DNA, 336 bp, Glycine max
  Clone ID: LIB3051-106-Q1-K1-A7.F2
aaataagctgcatagagatttactagatagaatcaggacacaaacaagctcatttgtgttcatctccagcatgtgctgtataagatattcagtgacagaagcctttttttttttcctcatacggaagttttaccgatgttgacgtgggttacacttaagttgggatgtattcaattggtgtgcacggtggctatcttttactctcattactccccttttgcagaatgtttcctcaaagagggaccctgcttatgacatctctgtgggtgggggcttcatctcatgtttttgtgctttggctttgggcggttgacgtggattttgcctcattgggcc

SEQ ID NO: 33494 - DNA, 433 bp, Glycine max
  Clone ID: LIB3051-106-Q1-K1-A7.R2
cccagcgtccgaagaaagagcatcataaagcaatacacttttgttcccctcattctaccttccttcaccttcttcttcgttgcggtggtgccctagattttctctatccctttgatcgttcctgaattaccagcccccgtccctggctggagggtttcccatggattccgaggacgatatgcacgacgccaactatgtggagtccctcgaccaccatttctacagtggccagacctaggtccctcccgtggattactacagtgactactacgacttcgccgacgattactttgacgacgccgtctattctgtccggattgagtctcgccgccccgtgcccttctttaccatattgagggatctggttgttcttccttggcaggatgtctacctaccttgaggcgcggccgatcttttcctaccttcggtttct

SEQ ID NO: 33495 - DNA, 592 bp, Glycine max
  Clone ID: LIB3051-112-Q1-K1-G10.R1
gcaatatttgaaggttgtgttattctgaaaagaagatagggagggcggtttggtttggtgcaaatggattccttagaagacagcggctgttgggattttctcgattactctttcatcgatcaagcgccccctgatttcctttggtccaataacaataatagtgtgagcaccgaaattgacattccaggtgatgctgttgcttgtcaagagaacaccaagaagaggggacgcaccgattcatgcttcaaggcgggatcaaaagcttgccgtgaaaaattgcgaagggagagactcaatgaaaggttctgtgacttgagctctgttttggagccagggagacctgtgagaacagataaaccagctatacttgatgatgctatcagagtcttgagccaacttaaaaccgaagcccaggagctcaaaaaaacaaatgaaaaattactagaggaaataaaatgtttaaaggcagagaaaaacgaactacgcgagagaaacttgttctgaagcagataaggaaaggattgagaagcagttgaaggccttgcccgttgcaccagcagggttttatggctccacctgtagctgctgctgc

SEQ ID NO: 33496 - DNA, 597 bp, Glycine max
  Clone ID: LIB3051-112-Q1-K1-G10.R2
gcaatatttgaaggttgtgttattctgaaagagaagatagggagggcggtttggtttggtgcaaatggattccttagaagacagcggctgttgggattttctcgattactctttcatcgatcaagcgccccctgatttcctttggtccaataacaataatagtgtgagcaccgaaattgacattccaggtgatgctgttgcttgtcaagagaacaccaagaagaggggacgcaccgattcatgcttcaaggcgggatcaaaagcttgccgtgaaaaattgcgaagggagagactcaatgaaaggttctgtgacttgagctctgttttggagccagggagacctgtgagaacagataaaccagctatacttgatgatgctatcagagtcttgagccaacttaaaaccgaagcccaggagctcaaaaaaacaaatgaaaaattactagaggaaataaaatgtttaaaggcagagaaaaacgaactacgcgaagagaaacttgttctgaaagcagataaagaaaggattgagaagcagttgaaggccttgcccgttgcaccagcagggtttatggctccacctgtagctgctgctgctgc

SEQ ID NO: 33497 - DNA, 503 bp, Glycine max
  unsure (1)..(503): unsure at all n locations
  Clone ID: LIB3051-002-Q1-E1-E5.R3
tgacttggtcctgggntcagtctgtgttttgccccttccataaagaggaaccaatttctcttcctgcacagggccttgcaaacagggcattcctgagaatgggagtgatggtggagccacctataaaggcatggccaacagaataggtgaccacagagtgtgatcacagggtcttgcgccaaatcgaagcatatgttgcattcaaaatcaccggcatcgtttgaactgttccccgagcatgatgggctcggtgcagacgctctcgttgattcaccaaaaccactcgtcattggccaaacccctcactcagataaatcggttgagagaaagaattggtaggggaaggcagaagaattttgattggaaagggtaaatcttgcgatgcaaagccccaaatttggttttcaccgaaaacctcgtggaagtttccaggttcctctacatttttttttttctctcaccttatttatttatttgtttattaaggtactagtagtattttg

SEQ ID NO: 33498 - DNA, 462 bp, Glycine max
  unsure (1)..(462): unsure at all n locations
  Clone ID: LIB3051-008-Q1-E1-F7.F3
cgaggttgtcgcagncgttgnggctttcngatttcgccgatttggcgagctcggtgaagagtcctcgtagnagtcctcngagtgctgctggatcttgcgggggtcgagggtctggccctgtgggtcgacgccgggggtgatcatgtcggggcgctggtacatgttggagaggaggagggtgggcgagatgctggggcggttgtggaggcgcgagcaccgatcgccatggcggcacgcgccgatcttgaagtagaacgggcagttcacgcggtccttctccgtgccgaagatcgatgcaaggtgctccgccatgctgctgctgctgagagatgagatgataatacgctattatgctccaatcagaaaccctaattgtaacggatcgattatgatgatgatcttcttctatctgccaactaactactttgcattaatttatcttcgactttaacgaaccttctg

SEQ ID NO: 33499 - DNA, 407 bp, Glycine max
  Clone ID: LIB3051-008-Q1-E1-F7.R3
tgtcggcagttcgaggagaatagctgcaaccgcggcgggtattgtaatttcatgcatgtgaagctcatcgggagagatctacggaggcgactcttcggccgcaaccaccgcggtggcagtgggacctaccaccgcgtcagccggagcaggagtcgcagccgcagcgcgagtccgagataccgccgggagagacgggagagtgattctcgtggagggcggcggagcagggagagggacggcagcggtggacggaggagacaacacgggagccctccggccagggaagggagcgaggagcgccgcgcgaggatcgagcagtggaatcgggagagggaggagaataaatgatttcacgatgattctatgttcatttgcttgcgatagaataaaccatcaatttcatcatc

SEQ ID NO: 33500 - DNA, 358 bp, Glycine max
  unsure (1)..(358): unsure at all n locations
  Clone ID: LIB3051-018-Q1-E1-H3.R4
cccccagnagcacgaantcaccatcagtctcaaatccaacttctccacgctcccctctcaagctctccctcttcaaaaacagcttcaaattcagggtatgtcatgcttctttcatctttttaagattcccatgtatggagtattcaatgattgtgatttgttatggttgagcagagtagctgtggaatttgcttgaacagcgtgaagacaggacagggtacggcgatatacacagcggaatgcggtcacgcgtttcatttcccgtgcatcgcagcgcatgtacgcaagcatggaagcttggtgtgccctgtttgcaaggccacgtggaaagacgcggacgcgtgggcggacgcgtggg

SEQ ID NO: 33501 - DNA, 581 bp, Glycine max
  Clone ID: LIB3051-025-Q1-K1-H10.R4
acgcgctcaaggaatcagatgagaagtggggcaagtgggtcgctgagattcgagaacccaacaagcgttcaaggatttggctcggttcttactccacgcccgtcgcggcggcgcgtgcttacgacaccgccgttttccacctccggggcccctctgcgcgcctcaacttccccgagcttgttgccgcggagggccccgccgccgacatgtccgcagcctccatcaggaagaaggccaccgaggtcggcgccagagtcgacgctctccaccgccagcacccccacgcgctgcctgctggagaattcgccgaccgggttgaccttaataagatgcccgaacccgagaattcggattgtgactactgggacagggattaggagtgttgtttagttgttaatttggagtttttcaaaaacaaatataaaattataaccttgttttaattaattttttttttattggggaaaaggggttagagggcacagcaatggcctatgatgccagggagttgggttgaaaaagagggagtgagccctgttaacccactcagttattataatattataatagctactattcct

SEQ ID NO: 33502 - DNA, 461 bp, Glycine max
  Clone ID: LIB3051-035-Q1-K1-E3.F4
ttggagaactctaggtatgtcattctgattgtagtatttaagacaaaagcctcactgttgacattgagccagaatcatccagcataacaaatgaaggagtggaagaaacacaaaagaagttaaacatacaccagtaagtggttgcaagtactcatgaaaacttgcccatacaaatcctttccgaatacttcagcccctttaagtgatgttccccgtgcaatagtaggcccaatcatatctattttgcactccggacaataccatgccccttctggtatatgcatcttcatcacaccaatacaccttgaatgataaacagcaggacaaccatcacaacaaagcaaggtcccatccatgccacacaagcgacattcatctccattgccatcaacatcatcctcctcagcattcaattctgaaacatacttcttagtttcagcatccttgcaggcagtagtttt

SEQ ID NO: 33503 - DNA, 485 bp, Glycine max
  Clone ID: LIB3051-035-Q1-K1-E3.R3
gcatggtgatgttgctgcgtctgctgctgctaacctggccgttctttcttcagagatctagacagaggtcatgtgtctggcacttggggaagcacatctggaacacttatttgctagcaaaagcattctcccaaacagcttcacgcttcttttggccaagttctgaaaagaagcttgtggaggttccaagagagaggtgtggctggtgcatttcttgcaaagcctctgtttcaagcaagaaaggatgcatgttaaatcatgctgctataagtgccaccaaaagtgcaatgaaaatcctttctggtcttgctcctgtaaggagtggagaaggaatcatccctagcattgcaacatatgttatgtatatggaggaaagtttacgtggcttaatagttggaccctttctgagtgaatgttatagaaagcattggcgtaaacaagttgaacgagccaaatcatttagtgatataaagccccttttactc

SEQ ID NO: 33504 - DNA, 407 bp, Glycine max
  Clone ID: LIB3051-037-Q1-K1-C4.R4
ggagggtttttggcatcttggtcattctgagaagcatctgggggagtgacatcagatgctgcgttttgcagagcaggagcggcgttctgaggagtggcggtaggagcaggaggagcagggagggctttaagcttgggaaccctagatttttctttggagccctgagcaccgttgctgacgctcaaattgcgccatttatccttgaggtcgatgttggaacgggaagtgaggaaaggggcgaattggggatccttgagaatgttcttccactttccggggccgtgcttttcaacgccggcgatgagagcatcttcttcgtcctgcgtccacttctgcttctgattccccattcacattcaattctctctctctttctttgttctctacttcttcgccggacgcgtggg

SEQ ID NO: 33505 - DNA, 264 bp, Glycine max
  Clone ID: LIB3051-040-Q1-K1-A1.R4
cgctcccgtggatctcggctctgaactggaatctcttgctactgaggcacactattctaaatccgccagcttattatggatagcctgggttgccattggacgttagcgatacataaattaagtgctattctcctcactgtctaatgtccggtagggaaacaaggcagcgccctttacttaattgaatgatccactgacgcggggagaggtgaattacttgttggccgcctgggtatcacacttgttcagcacaggcatgggcaa

SEQ ID NO: 33506 - DNA, 453 bp, Glycine max
  Clone ID: LIB3051-040-Q1-K1-F12.F3
gtgcaactgcatcgacgcgctactaaggcatcagtaatgataagtggggcaagtgggtcgctgagatcggagacccaacagcgttcaaggttttggctcggttcttactccacgcccgtcgcggcggcgcgtgcttacgacaccgccgttttccacctccggggcccctctgcgcgcctcaacttccccgagcttgttgccgcggagggccccgccgccgacatgtccgcagcctccatcaggaagaaggccaccgaggtcggcgccagagtcgacgctctccaccgccagcacccccacgcgctgcctgctggagaattcgccgaccgggttgaccttaataagatgcccgaacccgagaattcggattgtgactactgggacagggattaggagtgctgataagttgttaatttggagttcttcaataacagatataatattatgaacctt

SEQ ID NO: 33507 - DNA, 460 bp, Glycine max
  Clone ID: LIB3051-040-Q1-K1-F12.F4
ccgcagtgcccgccggcggacgccccggccggcctcggctgtttgccggactcgtcggagtcgacggacattcggaccaagccggcggagaccggagatggcagagggagcggcgacgggaggccggagatgtcgaagtcggaggggtcgaagaggagaaggtcgtcgaagttcgcggcgaagcggaaggaggtgtcggagtgggaacgccggtggtgggacccacgctccggcatccgatccaggtccaccgtcgccggcggctttccgatgaacttctggttcatcgaaaaaacaaaaaactttatttccttttctttctttttttataaaaaaaaaaaggtttatttgttctttgttctttttcttttttctcttgtgtggtgatgaatgattatgctaaagagagagagagaagaagaagaggttgttgttcagtagttcaggtgggttggttggg

SEQ ID NO: 33508 - DNA, 461 bp, Glycine max
  Clone ID: LIB3051-040-Q1-K1-F12.R3
ttgggtgctattggtggtaacccttcttttggtgggatattcaaccagttggcttcccaattagccatgcaacagttgtctaattctgcaccccatcagcagacacaacaccagccacaggttggcatgcctcctcctccctctggacagaaccaccctaacttcatggacttcaatcagcagaagtaactcataatagcagtagcagtaaatgattgattacatgaatgtataactggtgagacttgtgaagggtatattgtgcagttcagtgtctttagtcctgtgttgtttatcttcagctctaggatgtgtactttacgcagttctaggttagaagcgcagcctctgaaatgttgtgttatagctcttgggtgaatgaagttaacataaatatgtagaaagacttgttgataatactatagatggtgaatgaagtttattaattagcttctggaatt

SEQ ID NO: 33509 - DNA, 500 bp, Glycine max
  Clone ID: LIB3051-040-Q1-K1-G5.R4
tgaatgtgatttccctctatcaccattcatgctctcaaccatccaaagaagaagtagtttttgcgagggaatttaagatttcccctggtaaacgtaaacggtaaagacataaggttgcaccatgggcaggagataaaaaggggaagttgaacaggcagtgttggcaaatttcacaacagcccactgcagtccgaggatacaatttttacaaagggtgtggccacaccataaaacatagggcacattttcaacaatattgaaagattcccagcatattgggcattccagcccttcctctctgcctataacagaagtctcatcatcagaacattctgaagcagagtgagtaggctttgaatcattttttagtcccacagttccagcaatgcaattcgatgcaaagttccacattcgattacgcgcaaaaatagagaatctgggaagcagaaagtagagaagagtgacagtggcagcaccgtgagagagaaacggtggttccg

SEQ ID NO: 33510 - DNA, 431 bp, Glycine max
  Clone ID: LIB3051-041-Q1-K1-D12.R4
agagcttctgatccgcaagctcccctttcagcgtcttgttcgtgaaatcgcgcaagacttcaagcaaatcactgacattttttgttgatatcgttgccaatgtgaccgatatgattccagactgatttgaggttccagagtcacgcggttcttgcgcttcaggaagctgcggaggcttacttggtgggtttgtttgaagacaccaacctttgtgcgatccacgccaagagagtgaccatcatgcccaaggacattcaactcgcacgccgcatccgtggagaacgtgcttaggcttataataatgataatagcatagttgtcgccttttcgttttgcaatacatttcttgtttcttagggttttagtgttattttccagtttgttatgttttgtatagaagatagatatatcaacagcaacagcttcttacc

SEQ ID NO: 33511 - DNA, 653 bp, Glycine max
  Clone ID: LIB3051-059-Q1-K2-E10.F4
gaagagcaaattttcacttgcaagtctcaattggaagagatggagaagcgactaaggatatttgaaggtgatccttcagagatcacaacgctcagcgaggctgaatatcgtgaatatgtccttcgggatactctaaaacaagtgcaactgcgaaagtgtgttttggaggagtacaattctcatgccactcattctccacaggtacatgctgcaaaaactgtagatgtaaatggatttatttccagagcctcaaagaacccagtagattggtttccacagggagatccactacatgtccagactctgaactttgcgaatgtttatgacactgctcttgtcagagatcaacaatcacatcattgcacggttgttgatatgttaacaccaacttcgacccttctgcattccgcaaacatggatctgaatggccaaatgaatccgaggagtagtttagacgctggcattagtaatacattacatccccagtttggacaagctattcacaccaattcgtcctcttggcagcatcttaatcctttaggtacttactggagttagataatgtggcttgattttgttatttattttcatttaaggatactttagacggctactctttacattcttgtaatttaagttgacttatgcaatac

SEQ ID NO: 33512 - DNA, 323 bp, Glycine max
  unsure (1)..(323): unsure at all n locations
  Clone ID: LIB3051-059-Q1-K2-E10.R3
atccgaggagtagtttagacgctggcattagtaatacattncatccccagtttggacaagctattcacaccaattcgtcctcttggcagcatcttaatcctttaggtacttactggagttagataatgtggcttgattttgttatttattttcatttaaggatactttagacggctactctttacattcttgtaatttaagttgacttatgcaatacaaaccctagtggtcattgatctcatttctctcttctattctggttgggtatatgtattttgatgatcagatcatgaaattaatatagtcgtcgagattataggttt

SEQ ID NO: 33513 - DNA, 480 bp, Glycine max
  Clone ID: LIB3051-065-Q1-K1-G8.R4
aggctgtgcgaggtgtgtgtgccatgacccaggaaagggtgtgttatatgcttgtcagagcctcgggacacaactgtccttccatgccgccacatgtgtatgtgtagcggatgtgcgaaggttttgaggttccagacaaatagatgtccaatctgcagacaaccagttgagaggctattggagatcaaagtcgggcctgagcctgaggaatgaagattcaatgttagtgacacaacaagcttcctgtacagtccaactgttatagctaatacttttctcttactttatcaggtttttccaataatcccacaaaatagaaattggaatttatgtatgacattatgtttgacatgtacagcaggctggcattgcacctgacttgtattattgtataagccaatgcctccgccatgcttgtttggttttacttctaatttttatgtggctttcccttctgaatcatatttagatgtgtttctc

SEQ ID NO: 33514 - DNA, 506 bp, Glycine max
  unsure (1)..(506): unsure at all n locations
  Clone ID: LIB3051-084-Q1-K1-A12.F4
tctttctcaaagggtgttccaatagttctttatgtcattgtctgttctctgtggaaggtatgaagctattgcagcccatctgtttcctaaaagacttgaagatggattatcatcttctcctcttgttctgtgaagttgccccgtttgattcctggcctcaggtaattagtccatctaagtctgcaactcttgctgcatcttgacaaccctgttttggcaggaactgccctccaatttccaggaccatgttcctgaatataagacaccaatatgatgtcttcttcaggagtccaaggccctttcttgaccccttctttgtcacaacaaggtggtcttcccatgtcttcttcttgtctttctcttttatttcaccgcctttatacttgtgtgtccttctaattttccttagccccttcaggtctcaaggaaaaagatattaagtcgttttcctctctctatctatgtgctgtcggctttctctttttatttctctacgnacgcgtggg

SEQ ID NO: 33515 - DNA, 661 bp, Glycine max
  Clone ID: LIB3051-084-Q1-K1-A12.R4
ccagtgggaaaaaaagctccaaactgatatccaaatggcaaagagagccctcagtgaagctctttcaccagagaagccatcttgtaatttatctgcctcaaactcaaacccttcagatagtagcagctccttctcttccacaaaaccaacaacaacacaaactgtgtgctatgcctcaagtgctgacaacatagctagaatgctaaagggttggatgaaaaacccaccaaagtcctcaagaacaaactcatcatctgtgactcagaactccttcaacaactttgctgcagcaggtgctgatactgcttctagtattggagcaaagggaccaccaagcagtgctgaattgtctgaaaacaattttgaatcattgtttgattttgatcagtctttggagtcttcaaactctgatgaattctctcggtcattgtctcctgaggccactgttttgcaagatgaaagcaagcctgatgttattggtgcagaaattatgccattctctttgcttgagaaatggcttcttgatgaggctggttgccaagagaaattagttggttgtggtgatgatgccaagtttttctaagttgggttcattttgtgacatatatgagactgtggaaatttttattttatttcataagttataggtagggcctcatca

SEQ ID NO: 33516 - DNA, 469 bp, Glycine max
  unsure (1)..(469): unsure at all n locations
  Clone ID: LIB3051-084-Q1-K1-E4.R4
ctggttgtggtcaacttccaggatgcaaaggnngtgcgccactgaaacccaaatggatctgcacgagtgagacgacagagttcacaataaaatttatcaggaactagtgggatgccttcagtaggtttctctggaataataacgcaactgatgtgttgccacacatggcatcttgcatcatcacacttgaccaaattctctgtttccaatctacttccacatagacagcgaatcttcacatctggttgaaaggcatcatcaaattcacttttaacctttacactactgctatctgatgcaccctgtcccttagaagctagatcagtggcccctgatatctgcattttcctgcataaaaggaaatacaagaatgtgaataaaagataacaaagtcaaagacaataaattacagcatatatggagcactataatcgacttaaaccagacctaatagtaaggtaccagatca

SEQ ID NO: 33517 - DNA, 689 bp, Glycine max
  unsure (1)..(689): unsure at all n locations
  Clone ID: LIB3051-084-Q1-K1-H7.F3
ccaaacatatgtgcatttacaataattgtctgtttccctgtctaaaggatataaacagttagcgctggcagaactgaatacaccttcatgcagttaaaaatttccccttcttcaaagcctccgttcaaaacctcctcatcttcatctgcggtaaagtcttccttgataaataaaccaagccgctccaatgggttctcaaactgaggtttatccaatgtctccaatgcaactttgtagccatttctacagcccacggctttataagatagcgtgcatccactcaaactttcaagttctttaataatctccacattatgttctatatcaacggttcttttcatcttttctatagctgctcgagcagcttctctttccttttctctccgctgccttgactcttcctcggccctcattctagcagcagcttcagcaattttaatttgggcttcgatcctagctctttcttcacgctgaatcctttccaacctctccttttcctgctgcattttttgaggattacctttatcaccatgatcaagaagggtcttttgctgtgctttcaaaatggtatctgcaaagcggcttttaagcatagcagcacgaagagcctttttaggagaaagctggacaggcaaaacaggtgtgctccatacttncccagnagnagcatcagtagtaggagttacatg

SEQ ID NO: 33518 - DNA, 649 bp, Glycine max
  Clone ID: LIB3051-088-Q1-K1-C3.F3
aaatccattgctggctggagaaacagagatacgagcagggaggcgaaacgacggcggcggcggcgatggcaacaacgacgatgaagaagattgaaacgctgccatttgagaatcaaagaaccactggtcgagtccatggaagtcccctgtactcctcagcagctgagaatacccccaataatctctcagaaaagcagaggagccctgaaacggcgctccctgcatcagcgtcggcgaaaaacctgccaccactgaaccggaaccggaaatggaatcggaaccggctaccgcacttgccggtaaatcgggaaccggaggaggaggtggaaccggtacaacgttttcggggaaattaagttttgctctgttacctctgaacctcaatgcggcttcatcgtaggctctggccgcagcctcggcagtgtcgaatgtcccaagccacactctcgccgctttgtgaggatcgcgaatctctgccgcccatttcccccacggcctctgcctcactcccctgtatctcctcctcctgtcgccgccagcactttcaatctcttgtgtttgcgtttgtgaagaagctgctgcaatagcaacacctccactcgcaccagcgccagtgtcatcttcacgctctctcttgtggccaactccc

SEQ ID NO: 33519 - DNA, 463 bp, Glycine max
  unsure (1)..(463): unsure at all n locations
  Clone ID: LIB3051-088-Q1-K1-C3.F4
ccgcacttgccggtaaatcgggaaccggaggaggaggtggaaccggtacaacgttttcggggaaattaagttttgctctgttacctctgaacctcaatgcggcttcatcgtaggctctggccgcagcctcggcagtgtcgaatgtcccaagccacactctcgccgctttgtgaggatcgcgaatctctgccgcccatttcccccacggcctctgcctcactcccctgtatctcctcctcctgtcgccgccagcactttcaatctcttgtgtttgcgtttgtgaagaagctgctgcaatagcaacacctccactcgcaccagcgccagtgtcatcttcacgctctctcttgtggccaactcccaaatgaggatgcgaagaagacagaacgggagaaggcgcatgcataaaacgtgacatcatgggaaaaccacttccccgcggcacccnactgattggtttggg

SEQ ID NO: 33520 - DNA, 443 bp, Glycine max
  unsure (1)..(443): unsure at all n locations
  Clone ID: LIB3051-088-Q1-K1-C3.R3
tggtcagtataccagtggctaatcctcctccacccacctggttgacatggnatacacatttttttctttattctattttttctctttctttggttaaagaaagaacaggctttcttctgtttatttattttaatttatctgtttttgcttttttagattatttggagtccagttcactgaatttttatgtggttttgggttaaactgttactatttgctgctgttatttgaataaatactatttgaagagtagggagtagggaatgggaggttgggaggatgcatgataaaggctttaagcctttgaggtagatacgaatggagtttaagtggtacgaggcagcactttgaagaattgtttagagataaagacaaagcagtacttaggttggaagctgagtttattccagattatcaactcaatggatttgatgttaacattt

SEQ ID NO: 33521 - DNA, 573 bp, Glycine max
  unsure (1)..(573): unsure at all n locations
  Clone ID: LIB3051-088-Q1-K1-C3.R4
caggggagcgccgtttcagggctcctctgcttttctgagagatattgggggtattctcagctgctcgaggatacaggggacttccatggactcgaccagtggttctttgattctcaaatggcagcgtttcaatcttcttcatcgtcgttgttgccatcgccgccgccgccgtcgttttcgccttcctctgcttcgtatcctctgttttcttccagccagcaaatggggattttccggccgccgggagagcagggtcatggcggagaagacggtggtagtgggtcagagttttcggagcttccaccttcgacgtggtcagataccagtggctatcctcctccaccacctggttgacatggaatacacatttttttctttattctattttttctctttctttggttaaagaaagaacaaggctttcttctgtttatttattttaatttatctgcttttgcttttttagattatttggagtccagttcactgaatttttatgtggttttgggttaaactgttactatttgctgctgttatttgaataaatactatttgaagagtanggagtaggga

SEQ ID NO: 33522 - DNA, 611 bp, Glycine max
  Clone ID: LIB3051-016-Q1-E1-G10-r7
aaaaacttgctagcggttggttggttggtttggttaatagggccagaaacagaggtttgatcctcaacctggaagccaaaattacaagagttttcaggagggccgtcatagcagtgttcttcaaccttaggtaagcaacaagaagaagggaaggtcatcaaaaggttttcactaaggttatcctcttcatcttgggagaagtcttctgagtggtcttctggttcaaaggcatgagaggaatcagcaggctccacgaatgaagtgcaatgtgggctatccgaatcaaggacatcacttttggctgagttggcatcttcttgcttgcagcatgttaccataatagggagtgggagtggtgacaacactttggtcccattttcagatgttgttgttgttgttgcattttttgaaataattaataaatccataggctccttgttgttgtggggtgaagaagaattgacagcatcatcaggagatgacttgtcatccgaattctcctccttctctttatctctaagaatcaatttgctctccagagaattcacctgtcagtaacaaaaattttgtgccaatccaatcattaacccattagtgggataaataataaa

SEQ ID NO: 33523 - DNA, 621 bp, Glycine max
  Clone ID: LIB3051-047-Q1-K1-D12-f6
ggaattgctgaagtccggctgaggaagcaggccgagactgaagaattggcacgaaaagttgatatgttaactgctgagaatgtgtccctgaagtcagaaataattcaactgactgaaggttctgagcagatgaggatggaaaattctgcattgagggaaaaactgagaaatactcaactgggacaaagggaagagataattttgagtagcatcgagagtaagagggctgcacctgtaagtacagaaaacttgttatcaagagttaataattctagttctaatgacagaactacagagaatgagaatgatttctgtgagaacaaaccaaattctggtgcaaagctgcatcaactattggatacaaatcctagagcagatgctgtggcagctggttgaaaccagtaactgcactggctgattatgcaattttggcatattacaagcccaaaattacagcttggtgctaacagttttcagagggatggatcagctgaattttacaatctaaatccatctatgtagaccagaactaattctttgcttgtcagtttcttaggacataaactctgtattttactagatttcacacaattggatgacaactttaaaagtttgtaaatc

SEQ ID NO: 33524 - DNA, 586 bp, Glycine max
  Clone ID: LIB3051-063-Q1-K1-B11-f4
gagttaggaaggtttaacaaagacatcctgaaaacaagcagtgtctgctgtgggcaaagctgctggagcaaaatggaagaccatgtctgatgctgaaaaagcaccttatgtggcaaagtctgagaaaaggaaagtggagtacgagaagaacatgagagcctataacaagaaacaggcggaaggtcctactggtggggatgaagaagaatctgagaagtctgtatctgaggtgaatgatgaagatgatgatgaggaaggcagtggcgaggaagaggatgacgattagagaatggactgataattgcatttatgtaggttctgatgattttgatcatctgttgtaggtggtctggtcatttcctgataaacatatttcttgcttccaaaaaatatttccctgctccctccgtaaattggttgtctttccaaaacgtgaatagtttaaagaagggagttctttatttgtacttctaaatccaactgtttagttaaggggtgtttatctcttgtagagcttttagtttgatttagagttttcttgttgaaatctggttaagtttgtatcaatataattggcttatcattc

SEQ ID NO: 33525 - DNA, 213 bp, Glycine max
  Clone ID: LIB3051-063-Q1-K1-B11-r4
ggctctttggcttgttagggtctttcgctgccttccccttgccggcgggtttcctagccttggtggcggctcccttcttattcacagcaagtttgggatcggctctcttagattcggtcttggactttcctcctttcatgacggatacgagaggggaacagggtcgggagttagggtttgggtggagagagaagagagaaacggacgcgtggg

SEQ ID NO: 33526 - DNA, 614 bp, Glycine max
  Clone ID: LIB3051-069-Q1-K1-A2-f4
ggttgggactcgttgcgacactaaggatcgggcaaatgagatatataagagggttgaagatcaaaagtctagtagaggaagaaatcaagatgctttattggctgcttgtctctacatcgcttgccgacaagaagacaaacctcgtactgtaaaggaaatttgctctgttgccaatggggccacaaagaaggaaattggccgagctaaagaatacatagtaaaacaactgggtttggagaacggtaatgctgtggagatgggtacaatacatgcaggggacttcatgaggcgattctgttctaatctttgtatgaataatcaagctgttaaagctgctcaggaagctgtgcataaatcagaagaatttgatataaggaggagtcccatttcaattgctgcagcagttatatacatcataactcagctttctgatgataagaaacctctcaaagatatatcacttgccacaggcgttgcagaaggaacgattaggaactcctacaaggatctttatccccatgtttccaaaataataccaaattggtatgctaaggaggaggatttaaagaatctttgcagcccttgaattgtagagcaaaatattaccatccaca

SEQ ID NO: 33527 - DNA, 613 bp, Glycine max
  Clone ID: LIB3051-115-Q1-K1-C4-f9
ttctattgaatacttggtcctggtaaatatgtcatacccagaaatccatgccatcatcaaagtttgaatcataagcatgatgaccctgctggaaagtttcctcatagttagcaaaagggtattgaagtcgcatctcatttgagattgtcaaagactgagatgatgacatggtgggggtttcatcatcaattgcagcttctgaccaaaagctctcatcaatcacaggcattgtttccgtagactctgtgtcttcactcttgatatttttgctgtcaccaaccgtgaccgatgaaaaatcactactagaagtagtgcatgctgatgatgttattgtgtccatttctctgaaattaaaattgtcaggttctgattgagttatgatgctggaatttgaatcagaacgttcgatttttggcttaatggctcttttggaacttggtttggacttggactggtctgatttcagcagcctcttcttcaaattggtgtgccaaacatttttaatctcattgtcagttcttcctggcaatttggctgcaattgctgaccacctgttccccagcatgtcatgcagcttaatgatagtttcttcttcttcaattgtgaaattccc

SEQ ID NO: 33528 - DNA, 614 bp, Glycine max
  Clone ID: LIB3051-115-Q1-K1-C4-r9
gttctgattacaattctcgcatcataacctaatacgaacctgacaattttaatttcagagaaatggacacaataacatcatcagcatgcactacttctagtagtgatttttcatcggtcacggttggtgacagcaaaaatatcaagagtgaagacacagagtctacggaaacaatgcctgtgattgatgagagcttttggtcagaagctgcaattgatgatgaaacccccaccatgtcatcatctcagtctttgacaatctcaaatgagatgcgacttcaatacccttttgctaactatgaggaaactttccagcagggtcatcatgcttatgattcaaactttgatgatggcatggatttctggtatgacatatttaccaggaccaatgattcaatagaattgctagagttctgaagttttcatgtgacacgttgaacgagggcattattgaatttggcagatagagtagtttaaatggcatggtataacttgaatttgaccgttacaacaaaagggtacgataatttctggtgtggggacagcattatcaccagctgcaagatctagaggcataatccattgacaaagaaactagccagggtaatgcgaaag

SEQ ID NO: 33529 - DNA, 669 bp, Glycine max
  unsure (1)..(669): unsure at all n locations
  Clone ID: LIB3051-018-Q1-E1-H3.TG
tctctcagggcgtttaattgcagagatcttttgcgtttctcaatataagtgaaagagtagacagagagaaagagaagatcaaaagagctaaccctggctccctgaatatcttctcgttttttatctgaatcacgctttagtttgtctcttagctttgttttcgtttgatcccatgcccctctagctaaactcgtttgtcttctatgccaccttcagactgatcaaaacaaaacaaaacttgtttttttcgctatcttcttctccctttgaggaaagcataaataaaaagcgatagaaagggatcgatagaaagagtcttgtggagtagctctcactgtaaagatgggtactggttggagaagagccttctgcacccgcgaccctgcatctaccatatcggataaacatcccggaagcccaagcccgagcccaagaacctgcactcgattgggttttctctctggtggtagcaacccttccaccccacgcttgcgttgcacaacaaaagcggaaactgcttctcaaacagttacattaagtgatagtcccagagttcaaagcaagaacacccccagagcaacgaaatcaccatcagtctcaaatccaacttctccacgctcccctctcaagctctncctcttcaaaaacagcttcaaattcagggtatgg

SEQ ID NO: 33530 - DNA, 257 bp, Glycine max
  Clone ID: LIB3051-025-Q1-K1-H10.TA
cccgcgcggttgtctaggtcacacatgacactcaaaagcaattgttacaaatgattttgactgtactgaacttaaaccaagcccttgctcaatattctgaaagaaggggatggacggaattgaaacaattcatgtcaacttccagtctcattcaagaggagtctcttcttctgtttggacctcatgagatgctgctagtgctggctcttgtgatggctcctctagtagtggtggagtcgaggaaccaatcctcctag

SEQ ID NO: 33531 - DNA, 352 bp, Glycine max
  Clone ID: LIB3051-082-Q1-K1-G12.TA
tggctatttttttgttgtaccatttttcatcaatagacacagctgatctaacgtttgtatacaaccagagaggttaaaaaatcaaagattttagcttacacaacaaaataattaattcacaacggaagaggccgcctagtaaagcttaattctggtgttaatggggcttctacagatgggacacgactgaagatcttgtccacattcacaacatgtctgatgtccacatccgaaggccatgtcttttgaattggtcagacatatggggcaaagctgcaaaagaccaattcgatttgttaataagttcatagaaaatcatagcaaatccaatcctaatattgtacatataaaa

SEQ ID NO: 33532 - DNA, 109 bp, Glycine max
  Clone ID: LIB3051-001-Q1-E1-B7
agaaaaaaaaaaaaaaaaaaaaaaaaaaaaaaaaaaaaaaaaaaaaaaaaaaaaaaaaaaaaaaaaaaaaaaaaaaaaaaaaaaaaaaaaaaaaaaacaaaaaaagaaa

SEQ ID NO: 33533 - DNA, 254 bp, Glycine max
  Clone ID: LIB3051-001-Q1-E1-G12
gtgaaatgttgctaacagacaccatgatcaggacccttgaattttcctccccttgtctatgatcgaggaagattatctgtaagagattatgcacaaaatagttaaggtcttttcctttaaatgggctggatcaatgaaccgagatcactgcaggttcatggggatgggaggattatgaggctatgttttttaatcttccgatgttactgttgtgattttttaatttcaatacggatattatatacttgctgccc

SEQ ID NO: 33534 - DNA, 59 bp, Glycine max
  Clone ID: LIB3051-001-Q1-E1-H2
agcccacgcgtccgaaaaaaaaaaaaaaaaaaaaaaaaaaaaaaaaaaaaaaacaaaaa

SEQ ID NO: 33535 - DNA, 580 bp, Glycine max
  Clone ID: LIB3051-002-Q1-E1-E5.F2
aaagacaaataggcagcattcaagtttactgcagatgcttataatacagttaataaagagccaaagtggcagcattctcaagcatacaattccctcataaagccagttaaaatatttacacaagcaactccttaagaagcattgtaacctcaacacagaacgaccattaccacacaaaaataaccgtaagaaggacaagaaacccaatcaacataagcagattcttcaaaacattatcctcctgccgctgcacttgaccagttgcctgcgtaaaaccccgcgtgttccctccatgaaagccattaaacccaaagggataaccagacgttgtcccatagacagtggcatcctgaaacccatggaaatgaatgttgagtagggacgggataaacccgccaaaggcagtggaaagcgtgaagtttccaaatcgagcagttgccataggaatgaaccctcccattagtccaaacccataactcccgaaagggttagcctcaagaggtggcgggggtggcgcggtttgcggcctctgcccggaaggacggtgggggatctccattccaggatatgacttggtcct

SEQ ID NO: 33536 - DNA, 395 bp, Glycine max
  Clone ID: LIB3051-003-Q1-E1-A10
cccacgcgtccggcttgtaaccgctttcatgatggtgtggtgtcaatggttgttgataagccagtgacaaataattttggacatctggggcgaaattctactatcatttgtctaaattaaattgcatcgtctttcttgcaaatttcttcttgatatgctcactatcaaatcaaatgagtttgctttaattcaataatgctgtcatttcctgcaatattctctctaaatcaagttaatctgtttatgtagataggatccactgagtgggttgaacaaaaccttattaatctaagttccaaagctgtagcataccttaatgtggactgtgctgtgcaaggtcctgaattctttgttggttcaactcctcagctagacaatcttattcttgaggtcac

SEQ ID NO: 33537 - DNA, 150 bp, Glycine max
  Clone ID: LIB3051-003-Q1-E1-C6
tgccttttatatgttacggtttgtatctggtgttgaactggtataatatgtaaacaaacatcgatacgactttcaagctttatatgtggccataagctgaaataacaaaatttaactatagtgacgtaaaaagaaaggaggaggaagaag

SEQ ID NO: 33538 - DNA, 135 bp, Glycine max
  Clone ID: LIB3051-003-Q1-E1-F10
aaaaaaaaaaaaaaaaaaaaaaaaaaaaaaaaaaaaaaaaaaaaaagggcggacgcacgggaggatgcactataggatacaacgcttactgtaacgtcaaagccactccatagcgcatcaaagttgaactcaaag

SEQ ID NO: 33539 - DNA, 337 bp, Glycine max
  Clone ID: LIB3051-003-Q1-E1-F9
cccacgcgtccgagcaaatggggttacggtggttggggtggtccttggtatggcggctggggtggcccttattatggtggcggctggggtggcccttattatggcggtggttggggcggtccctggcgtggtggtggcggtggtggctggggaggttggcgtcgacctaatggcaaccctcacaactaagaagaaaacttgctaaagcttctttacgggtttaggttttcgcaataaataaaacttcatgagaagtgtagttgtaataaaagtggaagtctctcttctcttgtgatataaaggaataatagttttatatatgtattttcttatcttt

SEQ ID NO: 33540 - DNA, 194 bp, Glycine max
  Clone ID: LIB3051-004-Q1-E1-A6
aaatagagaacagaaacacacaagtttgctaccaattacatcaactagctatttttgtggtgatggaaataaagttgtaatacctaagaaactttaaacactatatatatctttctatccaaaaaaaaaaaaaaaaaaaaaaaaaaaaaaaaaaaaaaaggaagaagaacaaaaaagataaaagaaaaaataaa

SEQ ID NO: 33541 - DNA, 423 bp, Glycine max
  Clone ID: LIB3051-004-Q1-E1-C11
aagaagatggcgtccgagtgcaaaggtaagagctcatggcctgagttggttggagtggaaggaacggtggcggtggctacaattgagagggagaatcctttggtggatgctaacactgtgcttaaaggatccatcgtcaccgctgattttcgatgtgatagggttcgggtttgggtcaccaaacatggaattgtttatcaggctccaagaattggataagaagtgtttacactaaagcacttcatatatatgttatgagtcatgaatataatagtatttaaataaggagttattcttccaattatgttatttgattgaaaataaaaacatgactataagaaatttgttttttcttatttttaattatgttatgcactgcatataaatatacaaattgtgtgtttcattttctaaaaactaaaa

SEQ ID NO: 33542 - DNA, 51 bp, Glycine max
  Clone ID: LIB3051-005-Q1-E1-A12
aaaaaaaaaaaaaaaaaaaaaaaaaaaaaaaaaaaaaaaaaaaaaaaaaaa

SEQ ID NO: 33543 - DNA, 90 bp, Glycine max
  Clone ID: LIB3051-005-Q1-E1-A9
aaaaaaaaaaaaaaaaaaaaaaaaaaaaaaaaaaaaaaaaaaaaaaaaaaaaaaaaaaaaaaaaaaaaaaaaaaaaaaaaaaaaaaaaaa

SEQ ID NO: 33544 - DNA, 65 bp, Glycine max
  Clone ID: LIB3051-005-Q1-E1-F11
aagaaaaaaaaaaaaaaaaaaaaaaaaaaaaaaaaaaaaggaggacggacaaaagaggtcagcga

SEQ ID NO: 33545 - DNA, 374 bp, Glycine max
  Clone ID: LIB3051-006-Q1-E1-A7
agccccttctgccctccccagccattaactgaaaaaaaaaaccaaaaaaccaaaaatactacaaatttttttcagtttctccgccgccgcacaaccaccacctcctccgttcggatctccggcggacctactatccctactactactctactctatttacacggaagaacagaaaactatccccctcccccaaaaaaaaccccaaagcggctcggttagggtttagttttgtaccatttcgtgtaatctaatttttcatccgtaaaaatctaattttgaggcggcgagatggcggagagttcaggtgcagcatcagagtcgggtgtcggcggctcctcctccaaacgcggcgtggcgaacgccccgaacaacgc

SEQ ID NO: 33546 - DNA, 156 bp, Glycine max
  Clone ID: LIB3051-006-Q1-E1-E12
agctgcttctcggctaattactggtgcattgttttggttacagtgtttgtctctcccacatcaaagaataataggagagatgtaaacttttgagttgtctcgttttcccaatgtaacatgttttcaatgagaataagtcaggattaatttattgac

SEQ ID NO: 33547 - DNA, 106 bp, Glycine max
  Clone ID: LIB3051-006-Q1-E1-F7
tctacacgtgcacgaaaggtaaaacctcttctatattgtcatctaaattcaattcattggcagtcgttttataacatcataactgggataacacatactttaccca

SEQ ID NO: 33548 - DNA, 156 bp, Glycine max
  Clone ID: LIB3051-006-Q1-K1-E12
gctgcttctcggctaattactggtgcattgttttggttacagtgtttgtctctcccacgatcaaagaataataggagagatgtaaacttttgagttgtctcgttttcccaatgtaacatgttttcaatgagaataagtcaggattaatttattgac

SEQ ID NO: 33549 - DNA, 253 bp, Glycine max
  Clone ID: LIB3051-006-Q1-K1-H4
gattttcgatcaatttgaaagaacttatccatttcttgcaattttagttgtgtacgggtaagtccatgcatgcaactcgttgagctatctcaataaatgccgtttgtatgtgttagtatttatatttatataccttttcggcatgtttcgctgctattgttgtggactatgtgttccttgtaatccaattaattaagaaagaaagtattaaattataaagtaacgagaatttgaaaaaaaaaaacatataata

SEQ ID NO: 33550 - DNA, 145 bp, Glycine max
  Clone ID: LIB3051-007-Q1-E1-B11
gttttccctacccggcatttccccaaccaggccggcaacggtgaccctccccagaactggccactcctgacgggggattgggaggctccccgtagcggcacagtaacccttgcaagtgtcctagttacgcccattttgacttcca

SEQ ID NO: 33551 - DNA, 535 bp, Glycine max
  Clone ID: LIB3051-007-Q1-E1-H12.F2
agaagaaaggcttttgtacaaatgaagtatcttacaattcagcaaactaagggaactacactgatctaattcaaagataataatgtaattattgggcctaaagagcctaatgcccaaaaaagaattatacagaatgaatatctatcagaaaaagaactaccaaagcgaaagctaaactaagcagtccacagattcagttacatattttacaccaaaagcaattcatgctgaaatgataaaacactctgtacgaggaggcaatgcttctgcaatgtgccttataatgggtctcaattgaatcttaatgcatgcttaattacccatccaagaaatatcctgttcgaagccccaccaaataccacaaaaatggcaccatgtaggaaccacaaaacatataagttcaagacataatcaactgattacaggttgaaataacttcttgaattcatcataaaaccacctgcataggaaaatgggctgcactctagaactttcctcatttcgtaactgacatcgcctgtcattctcttgttta

SEQ ID NO: 33552 - DNA, 94 bp, Glycine max
  Clone ID: LIB3051-007-Q1-E1-H7
aaaaaaaaaaaaaaaaaaaaaaaaaaaaaaaaaaaaaaaaaaaaaaaaaaaaaaaaaaaaaaaaaaaaaaaaaaaaaaaaaaaaaaaaaaaaaa

SEQ ID NO: 33553 - DNA, 145 bp, Glycine max
  Clone ID: LIB3051-008-Q1-E1-H9
agaaaaaaaaaaaaaaaaaaaaaaaaaaaaaaaaaaaaaaaaaaaaaaaaaaaaaaaagggggggccgctggacgatctacacgatcctttcctagttaggcatgcttcatatctcctctatcgtcacgtcagttcacttcactg

SEQ ID NO: 33554 - DNA, 354 bp, Glycine max
  Clone ID: LIB3051-009-Q1-E1-B8
atgtttaatttactacgtccgcgtggcccacacaagttgcaaccatagtcactactcactcacaagcatgcacgtcattttaaaatgcattcattgatggaactccaccaccttacaatacaacacaagtgttttgtttttgtcctggacccctcaaaaagcagaatccgatgttaaaagctatggctattgtggctcattggtgaagactgaagagtgaacatccccccaaattaaacaacatactatatggaggaaaggtggtagggctattaaatgatttctttccttgtaattttcttgtttatatagtatagaattctgtgttatgggcgaaaaaaaacagtaataaaa

SEQ ID NO: 33555 - DNA, 113 bp, Glycine max
  Clone ID: LIB3051-009-Q1-E1-C1
ccggtcgaccacgcgtccgacgaagcatcagaaactttagacaatgaatgctaaatttacagcactgcatcattcagtatccatcatcttttgggcctcactaaacataaggt

SEQ ID NO: 33556 - DNA, 558 bp, Glycine max
  unsure (1)..(558): unsure at all n locations
  Clone ID: LIB3051-009-Q1-E1-E7.F1
aaccaatataatatgatattgataacaaacatatgttaaacaactttacacccttgggtgangaatttgcaacttctgcagtagctggaaagaatcaatagcactcattggtgtgtgagcaaatttctcctatacaattcattcgggtagcaattacagcaaatacatgagaaaaacagaacaaagaatctactcattttcatcaaagtcaccatcaaataggtgcatgtatggaatcacagttgagcgatcaaccaattcactatgagaaacctcagtgtttaccccaggtgagctccaacctaaccgttgtatgtaagcagcatcataagcttcaatattcattcccgaagcaagaaatagttgaatctcatatacaaatctgtccgttcttgctgccagaaaaggccttgcggcttcagagactgacatcttgaactcctcctgtttcttttcaggtgcattcatgtgtgacttctgctctctcctagtccataatgctgctttgaccacagcaaggatatggtgcaaaatgatgtcaacatcctcctcctggat

SEQ ID NO: 33557 - DNA, 545 bp, Glycine max
  Clone ID: LIB3051-009-Q1-E1-E7.F2
aaccaatataatatgatattgataacaaacatatgttaaacaactttacacccttgggtggagaatttgcaacttctgcagtagctggaaagaatcaatagcactcattggtgtgtgagcaaatttctcctatacaattcattcgggtagcaattacagcaaatacatgagaaaaacagaacaaagaatctactcattttcatcaaagtcaccatcaaataggtgcatgtatggaatcacagttgagcgatcaaccaattcactatgagaaacctcagtgtttaccccaggtgagctccaacctaaccgttgtatgtaagcagcatcataagcttcaatattcattcccgaagcaagaaatagttgaatctcatatacaaatctgtccgttcttgctgccagaaaaggccttgcggcttcagagactgacatcttgaactcctcctgtttcttttcaggtgcattcatgtgtgacttctgctctctcctagtccataatgctgctttgaccacagcaaggatatggggcaaaaagatgtcaacat

SEQ ID NO: 33558 - DNA, 438 bp, Glycine max
  unsure (1)..(438): unsure at all n locations
  Clone ID: LIB3051-009-Q1-E1-E7.R3
agttcaagagtcagtctctgaaccgcaggccttttctggcagcaagaacggacagatttgtatatgagattcaactatttcttgcttcgggaatgaatattgaagcttatgatgctgcttacatacaacggttaggttggagctcacctggggtaaacactgaggtttctcatagtgaattggttgatcgctcaactgtgattccatacatgcacctatttgatggtgactttgatgaaaatgagtagattctttgttctgtttttctcatgtatttgctgtaattgctacccgaatgaattgtataggagaaatttgctcacacaccaatgagtgctattgattctttccagctactgcagaagttgcaaattctccacccaagggtgtnaaagttgtttaacatatgtttgttatcaatatcatattatattggtt

SEQ ID NO: 33559 - DNA, 366 bp, Glycine max
  Clone ID: LIB3051-009-Q1-E1-H9
acaggtatccagttggagagattttatgaagggtggaaagaagaataagaaaggggaaattcgtccaccgaagcttaagacagaagatcccaacaaatcctacgttcaaaggcctgtaaaaagaggttaggggttctgccgtcgagttagaagatcacagcaatcaattgaaacaggagtccgagagaacttatttatgcaggctatcttttgtatcagttagatacttttaaacagatttattactggggtcatttgaggcatgttaatggaatgtagacctccaacgaatgactatcccattttgggatgctaggacgttacaccccaatactgataaataggaattactggttgaggcattga

SEQ ID NO: 33560 - DNA, 170 bp, Glycine max
  Clone ID: LIB3051-010-Q1-E1-B2
atcgcgagcggccccctttttttttttatattttatgattatatttgtttatgttattttttttttttcaaccttgggttaaccctccaatttggttacaatttgggaaaaaccctctcctttgaatttgagcataaatttgttcaaaacacgggaagaatgaaatctcg

SEQ ID NO: 33561 - DNA, 419 bp, Glycine max
  Clone ID: LIB3051-010-Q1-E1-E5
aaccacgcgtccgaaaaaataaaaaaaaaaaaaaaaaaaaaaaaaaaaaaaaaaaaataaataaaaaaaaaaaaaaaaaaaaaaaaaaaataaaaaaattaaaaaaaaaaaaaaaaagtaaaataaaaaaaaaaaaagggggtgccgctctatgggtttaatgcttatttacgcttgtatgctaacttcatacctcttcaatattgtcacttaatttcatttcactggccttctttttaaaacttcgtgattggaaaaaccttggttttacccaacttattccctttgcagcaaatcccctttttgcaacctgggttattaccaaaaaggcccgctccattgtcctttccaaatatttgcccagcttaactggtaaatggaaccctccctgttacggcccattaaccccggtgggtttg

SEQ ID NO: 33562 - DNA, 426 bp, Glycine max
  unsure (1)..(426): unsure at all n locations
  Clone ID: LIB3051-010-Q1-E1-F2
agctagttctagatcgcgatctagaactagtattataacacccaccaaagaaccatggctacccagttcctcaaatccctccttctcctctccaccttaaccctaaccatctcagcagaatacacaggctttgtgggcacaatagacccaaagtcaataggcataaagcacaagaaaaccctaagccacttcagattctactggcacgaagtcttcagcggagaaaaccccacatcggttagaatcattcccgcactccccaaatacaacacaaccacaacctttggttcggttgggatcttcgacaacgctttaactgtgggacccgaggtttactccaaggttgtcggaaaagccgagggcttgtttgcctccacgtcgcaaacgcagttggatcntttgctgattttcaacttcgcattgaca

SEQ ID NO: 33563 - DNA, 101 bp, Glycine max
  Clone ID: LIB3051-011-Q1-E1-C11
gcgtcagcccacacgtccgcccacgcgtccgctttggccaaaatctcaaatacctctctctctcaccaacaatatgttacatagacttacacgcagctaaa

SEQ ID NO: 33564 - DNA, 128 bp, Glycine max
  Clone ID: LIB3051-011-Q1-E1-C3
cacgcgtcagaataaaaccaataatggttcctaaaggtctctttccattctctcggatgctgcactgagttgatatactctaaaataaagggcggcccctccgtaagttgttcccaatggtatccctt

SEQ ID NO: 33565 - DNA, 357 bp, Glycine max
  Clone ID: LIB3051-011-Q1-E1-G6
aggcagattaccaacatcttggaggagaatgtggtgcagcccctgcttgtgagcaccagtgcgatcaccttggcgacagagtgtgtgcggatgattttgaagattgatgatattgtaactgtgaggtagagttgattgaacaatgacgaatttggagagaaactgaatcatccattatcttctttttttttttttgtctttcgtgctttaattttatgttggtagtttatatgttctttctagctactttggttaagttcttttgactttggctactgctgttgtttgcaattttgaatgtcctcaaggaatgggatgtttgcaagtcaacagaatccaaagtgttgggaatttaac

SEQ ID NO: 33566 - DNA, 72 bp, Glycine max
  Clone ID: LIB3051-012-Q1-E1-A1
acccacgcgtccgcccacgcgtccgcccacgcgtccgcgcacgcgtccgccacgcgtccgtctagatcgcga

SEQ ID NO: 33567 - DNA, 175 bp, Glycine max
  Clone ID: LIB3051-012-Q1-E1-E3
agcattttcgtatttgcataatttattatgattttttgaaaatgggaacgtgcagttaagcaagagacaaggcggagaagactgtatattgcttaactgcaggtgcccatttgcgtagttgcataagttattatgattttttgaggagagggaagaggggggtcaccaggggaag

SEQ ID NO: 33568 - DNA, 187 bp, Glycine max
  Clone ID: LIB3051-012-Q1-E1-F5
aggcgagcggccgcccgcgatctagacggacgcgtgggaaaaaaaaaaaaaaaaaaaaagaaaaaaagaaaaaaaaaaaaaaaaaaaaaaaaaaaaaggaaaaaaaaaaaaaggaaaaggaaaaaagaaaaaaaaaaaaaaaagaaaagaagaaaaaaaaaaaaaaaaaaaggggggcgccccagaa

SEQ ID NO: 33569 - DNA, 260 bp, Glycine max
  unsure (1)..(260): unsure at all n locations
  Clone ID: LIB3051-013-Q1-E1-A4
accaagcgtccgattttgttccttctgtatttatcgattaaatggtattaaattttctgaatcatgctctttggcctcaattggaagtgtattcgttagttcacattgtatatgatgagatgatggggcaaaagggatgaggtgaggtgaatttggtcgccggcgattattttgcaatgtattttgagtagtattaagcctacaacggtacataatcgataaaatttagatacagtttcttatttaaaaaanannnanna

SEQ ID NO: 33570 - DNA, 424 bp, Glycine max
  Clone ID: LIB3051-013-Q1-E1-B7
agttctagatcgcgatctagctccattccagtttctccagaggagatgtacagatggtcaatagagatccaagtttgagtcctttttaagacttggtgtttgatgcattgttgtatcaggagaagggttttgttgtaattaagcattgagggaattgttggagtcaggcagagagagaggggggaggtttgttgtaagacacctagtattagtatcatgtagtggagaaaaagggttgttgatcctaatagctagacaaggcatgttgtagtagtcatggggtggggaagtccttttgttgtagcatgtaatttggtttagacttgtagtatgtcatcaattagatggataaagagagaatattgttatctacccgaggatgtaacaatgtttgtttctctgaataaaaatttcacatctgtct

SEQ ID NO: 33571 - DNA, 173 bp, Glycine max
  Clone ID: LIB3051-013-Q1-E1-C9
ccaacgcgtccgaaatgtaggttccttaaggagctggatttgcaggaaaatgaagttgatgaccacagaggccagtggctaagctgctttcctgattgctgtacatcacttgtttctcttaattttgcttgccttaaaggacagattaatctgggggctcttgagagacttgt

SEQ ID NO: 33572 - DNA, 140 bp, Glycine max
  Clone ID: LIB3051-013-Q1-E1-F2
aaccaagcgtccgcccacgcgtccgatagttttataaaaaatgaaagcacataggcataccatcaatgaaaatctgggacatgataaacgtaatgaaactacttgctgcattgtacaatagtccgaactgatattaaaaa

SEQ ID NO: 33573 - DNA, 218 bp, Glycine max
  Clone ID: LIB3051-013-Q1-E1-G3
atgagtctttacagtctcagaaaattgttaaatattttttttgcctgtttaagttttttgatagattacagcattaactaacaaaattctctctgtttacatcatatagagcttttgagtcactatcctttttggaagcacattatacaattgtcattcgtgcaatatccatacttttacaggttacaagcctaaaaaaaataaacaaaaaaaacaaa

SEQ ID NO: 33574 - DNA, 54 bp, Glycine max
  Clone ID: LIB3051-013-Q1-E1-G4
aaaaaaaaaaaaaaaaaaaaaaaaaaaaaaaaaaaaagtttaaaagctcttaaa

SEQ ID NO: 33575 - DNA, 380 bp, Glycine max
  Clone ID: LIB3051-014-Q1-E1-A9
acgcccacgcgtccgggaaaagcacgcagcagccaatgaatctgcacacgccgaatccaacggcgtctctcacggcgccgaccacggttggcagaaggtgacctacgctaagaagcagaagaagaagaccgttaacgccgccaacagcgccgattcccgcgcgaattccaacaagctcgttccgaacggcacgctgtccggcaacgatggcgttttccggtcgctcgagctgcagtcggaggaccggcgccggaaaattgtggaggcgaagaagctggccgatgccgcgtacgacgacgaagacgcgccgctcagatcgaagcagcggcaccacgacgacgacgaatacgactacgatgacgagaatgtggaccgttctg

SEQ ID NO: 33576 - DNA, 349 bp, Glycine max
  Clone ID: LIB3051-014-Q1-E1-B2
actagatcgcgagcggtcgcactttttttttgttatttcttgaacgaggtaaatttatttttctttaaatgtaaagcctagaaaataagacttcatttttttcgcacgcgtccgcttctctcgcgttcgcatcaaacacagggaaacactcccaatcgctctcgctctctcgctctccgagctagcgagaccgagcgatttgaccctaagctcgcgatgctccgccgcacaaactcctcccgcctcaccggcacctcccgcagccacgtcgcctccgaagtgccggcgacacccgccgcggagaccgccttcgcggaggcttggaagaaagtgagccccagcatcgacc

SEQ ID NO: 33577 - DNA, 295 bp, Glycine max
  Clone ID: LIB3051-014-Q1-E1-D3
gttggtcctgccattgaacaacaagtcctggctaaaattcaccaagcttcccccatgaaaaccctcaacatggagacatattgtttgctatacacatttttgtgttatacgtttttctgatttctgcttcatgtatttcgcctcactacctagtggttccaagaatgatttgggacgtttaataattcctttcatgtaatagttttattcatttgattcatatacgaaatataaacaaaattattacagttaatggcaccataacaagtttaaccatttaaaagattaactcatc

SEQ ID NO: 33578 - DNA, 204 bp, Glycine max
  Clone ID: LIB3051-014-Q1-E1-G8
gacccacgagtcagcccacgcgtccgaaaaaaaaaaaaaaaaaaaaaaaaaaagaaaaaaaaaaaataaaaaaaaaaaaaaaaaaaaagggcagccgctcgacggcgttcccagcttaattaggcgtgacgtccacgtgattactcttcgatagctgcttcgaaagatgcacttcaaggtgccgtcgttggccagtctctttac

SEQ ID NO: 33579 - DNA, 249 bp, Glycine max
  Clone ID: LIB3051-014-Q1-E1-H10
ggcgataattatttatagttgaagattaatattgttggtaaatgaagagaattctcgagaaaatatataaattactgcatagatatagtagctgggagttgctgacagattctttctggtgatatgtatatgtatagttgtgaagtctattttttgggtttgatggtatcagttttgtttttctttggaaagaaagaaaataaaattatattgattgggttagtcatgaaaaaaaaaaccaaaaataaa

SEQ ID NO: 33580 - DNA, 261 bp, Glycine max
  Clone ID: LIB3051-016-Q1-E1-B2
agcggtgacagagaccgtggttatggttgttgttgttaccgttgttactcccttgtggtaacgttgtgatggaggctggagaaactaaggcttgatgtcgttgattacggtttatgattatgctcagtaattttagttgtgtttgagtttgagtatctttatggttttgtgtcaccgtggttcctgtttttgaccaatatatctggttgtttatagtccatttaatgaaatgataatcagaaattggagtatcgaagttct

SEQ ID NO: 33581 - DNA, 109 bp, Glycine max
  Clone ID: LIB3051-017-Q1-E1-E11
ccacgcgtcaacccaagcgtccgcccacgcgtccgataaaaaaaaagctatcaacactctcaatatcatacgataccatttaaggtcaatctcaaaatgggcagcatcg

SEQ ID NO: 33582 - DNA, 322 bp, Glycine max
  Clone ID: LIB3051-017-Q1-E1-H3
cacgcgtcaaggagtgggagagaccgtggatatggtggtgacggcgggtcccgctactcgagaggaggcggtgcttcggatggaggaagctggaggaattaggattaggttttttagtgggtgaaaaaatggggggaggttctgttggagtaatatcatccccttgatattaattgtggtaattttaggtttggaatatgcgttgtggtttgagcatatgttactgttatggttggttggtttccgtgttactcctgtcctgtggttctcgtttttgacctctgataatgaatctgtgttcttgaaaaaaaactacaaaaat

SEQ ID NO: 33583 - DNA, 55 bp, Glycine max
  Clone ID: LIB3051-018-Q1-E1-A6
agcaaaatcaaaagaaaacgtaagcgcctcacaataaaaagaaaagagagaaaaa

SEQ ID NO: 33584 - DNA, 78 bp, Glycine max
  Clone ID: LIB3051-018-Q1-E1-B12
gacccaaacgtcagcgacaacgagggcgaaaatatttgcttaaatataaattttaaccactaatttaaaaaaaagaac

SEQ ID NO: 33585 - DNA, 75 bp, Glycine max
  Clone ID: LIB3051-018-Q1-E1-D10
agaaaaaacatcaagaaaaaagtaataaaaaaaacaaaaaaaaaaaaacaaaaaataaaaaaaaaaaaaaaacaa

SEQ ID NO: 33586 - DNA, 412 bp, Glycine max
  Clone ID: LIB3051-018-Q1-E1-D12
agcggacgcgtgggcgagcggcgccctttttttttttttttgcggaaaccgtatcacctgtgattccccataatcaagtagttactactacataaatgacccgatcaagccttgatcctaaattacttgcaacagaccaaaatattccaatcatatcaagctactgagacctaaatttgtggacacggtcactccaaagacataaataccaccaaagccaaaaatctcgatacttcaacatcttaatttgtaaatgtaaaaatggcacaatgaagagtgtacaggtaatttggtgtattgcttaagaaaccttgcctctaccatacaaagcattaagtccttaacggacacattctactacagttgtttagcacttccaatgatgcttgctgtcctaaagcctgaggaccta

SEQ ID NO: 33587 - DNA, 332 bp, Glycine max
  Clone ID: LIB3051-018-Q1-E1-E12
agcccacgcgtccgctggacagtggatgtttagctgataggatgtttgtggattagcgtatgcgtctagttttttatacctttggtggactatctgacacattactgcacgtaaattggtaagattgcagcgggttgtcaagagttttctgctgtgggtcattgcctcatcaaatttgtacatagaaatgatcagtcatggatcctgataagtgaatttctatactctaggtttctggtgcatgattaggttcagcaaggtttgttttttcccacttgctttcgataaatggtaaattgggaacatgctgatcaactaccatacaaagcatt

SEQ ID NO: 33588 - DNA, 371 bp, Glycine max
  unsure (1)..(371): unsure at all n locations
  Clone ID: LIB3051-019-Q1-E1-C12F2A
aaacaaagcaagataatccaaaatgagaatagaatttggcaaaatgggaaaaatgaagttattgagtaaaaaaaacacaaagtaaacagtttctagcttggtaatcttaagccgcaaaatacaactttcctaaatgttgagggtatttgaaaaggtacctatctccagagagcaatggtgaaaggaatatacatgttgttgaagagggttaaaaaaaactagccacaaacaaccctactgtaccaactgcaccctaaatcgaaatttgcaactcgtgccaaccaatggngtccactggggaaattcgggttacccaaaaaccaccaaacaccgacaccgacagaacaacatctgtgtgaaacaaaattatt

SEQ ID NO: 33589 - DNA, 420 bp, Glycine max
  unsure (1)..(420): unsure at all n locations
  Clone ID: LIB3051-019-Q1-E1-C12R2A
ccaccctcctggacccgcaggcctgggagagccttaagtttcccgtgatagcgaagcctctcgttgccgacggcagcgccaagtcgcacaagatggcgctcgtgttcacgcgcgacgcactgaacaagctcaagccgccgatcgtgctgcaggagttcgtgaaccacggtggcgtgatcttcaaggtgtacgtggtgggcgagcacgtgcgctgcgtgaagcgcaagtccctccccgacgtgtccgacgaggagaaggcgctcggcggcgtttccgaggacctgatgtcgttctcgcaggtctccaaccttcgccaccgtgaacgactgcgacggctattaccgtttgatgcatctcgacgacgacaccgaaatgccccnnccgacgcctttcgtttccccgggggttttcccgggggga

SEQ ID NO: 33590 - DNA, 285 bp, Glycine max
  Clone ID: LIB3051-020-Q1-E1-G5
acccacgcgtccgcccacgcgtccgaaaaaaaaaaaaaaaaaaacaaaaaaaaaaaaaaaaaaaaaaaaaaaaaaaaaaaacaaaaaaaaaaaaaaaaaaaacaaaaagggcggccgcacaaaaggtgtggaggctttacttacacgttgcacgcatacgttacacctcttcgaaagtttcacctacttccaattcacggcccatcttcttacaacgtgccgtcggttaaaaccctgtcgttaggcaacttactcgccttgcccaacttccccctttcgcaacct

SEQ ID NO: 33591 - DNA, 87 bp, Glycine max
  Clone ID: LIB3051-023-Q1-K1-B8
aaaaaaaaaaaaaaaaaaaaaaaaaggtcagccgatctaaaggatcacagctgtggatgcacatacatgcaacatggtagactatta

SEQ ID NO: 33592 - DNA, 69 bp, Glycine max
  Clone ID: LIB3051-023-Q1-K1-F5
aagaaaaaaacatttaaaaaaattaatttaaaaaaaaaaaaaaaaaataaaaagaaagaaaaattgact

SEQ ID NO: 33593 - DNA, 251 bp, Glycine max
  Clone ID: LIB3051-023-Q1-K1-G4
tctcgatattgtatatgaagatggtatagcaagatgctgaatgctagcattgcatggaaagaaattgcagggtgcagtgcagaacaatttattcctaatttcctatgctaatgtagtagcagtgttctttgagattaggtctgatttctgttaccaagtaatacgagaaggctgtactttatcctctccgttgaagggaaatataatggaaagtttactatttgacatttcaaaaaaataaaaaaataaaa

SEQ ID NO: 33594 - DNA, 100 bp, Glycine max
  Clone ID: LIB3051-024-Q1-K1-C11
gtgaaatccttttccaaccacaaatagaatgtgagccacagtgagcttcaaattggtgatattcttccctggccttttacaatacaattggttttaaggt

SEQ ID NO: 33595 - DNA, 71 bp, Glycine max
  Clone ID: LIB3051-024-Q1-K1-G1
gaaaggcaagacatgaccactttattctaaggatgtttgtttaacacaaaacagttgagttcatgatgctg

SEQ ID NO: 33596 - DNA, 383 bp, Glycine max
  Clone ID: LIB3051-025-Q1-K1-A8
aaatactaacaaataaaaacatagataatttctttgctgagaatgaacaacttgcattttgccctgccattgtgggtcctggtgtatactactcagatgataagatgcttcagaccaggatattctcttatgctgattcacaaaggcacagacttggaccaaactatctgcaacttcctgctaatgctcccaagtgtgctcaccacaataatcatcatgaaggtttcatgaatttcattcacagggatgaggaggtaagttaatgtttaatttcttatattttcttatttgttttctgtttgaaaatctggttgccttgttaactacttagtgctgttagattattcatgcacatgctgattgggtaatattgctgcctattc

SEQ ID NO: 33597 - DNA, 249 bp, Glycine max
  Clone ID: LIB3051-025-Q1-K1-C10
attcaaacaacatattgaaatatggctttaactgtatcttgattattttcatcaggttagtttccatagaggaaattcatgccaaaaattacacactgggttcattggtttgtttcatgaacaagacagggttgtagatttgaagtatgctgctgaaacaaatattctttttacgaacgaaaaagaaaaaagaaaaaaacaaaaaacaaaaacaaaaaaaataaaaagaggaagaagaagaaaagataa

SEQ ID NO: 33598 - DNA, 367 bp, Glycine max
  Clone ID: LIB3051-025-Q1-K1-D10
ggcacagctcaatcccgattctggcacttacgcggtgaagccgtgtaaggagcatgctggagcaacgcttgaacttccctccgaagaaattattcggaagtcagcatagggacaagaggcaagcggttagaacaaagtctagatttttatttttgcttaagatcaataagcagtattgcctctgattttatgggggtgtttgattattatttttttgctcccaatcctttgtttcctttcaaatctatttagcggagtagacaggatataaatctgactggcaaaagtttatgatgccctttttttgttgaatgatcacataatgtatcccaagtttttttgtttaatttgccttcagcagaatttc

SEQ ID NO: 33599 - DNA, 121 bp, Glycine max
  Clone ID: LIB3051-026-Q1-K1-E10
gcaagaagtgaaaaaataaaaaaaaattaaaaaaaaaaaaaaaaaaaaaaaaaaaaaaaggacaaaagatataaaagataacaaaattacttacgcttacttgaaactatatatcttgtta

SEQ ID NO: 33600 - DNA, 181 bp, Glycine max
  Clone ID: LIB3051-026-Q1-K1-F7
caaaatctaagttttcatgttgaatttcagtcattttgaagcagccaattagtttgtttttctttctcatccacttccttctaacttattcatgtctagtttatgtttcagtgatggttttgttactagaattctgagaagtaaaaaatatatattttgaatatttatgttcttgtgttcc

SEQ ID NO: 33601 - DNA, 105 bp, Glycine max
  Clone ID: LIB3051-027-Q1-K1-F8
aaaaaaaaaataaaattaaaaattaaatttaaaaaaaaaaaaaaaaaaaaaaaaagaaagaaaaaaaaaaaaaaaaaaaaaaaaaaaaaaattaaaaaaaaaaaa

SEQ ID NO: 33602 - DNA, 55 bp, Glycine max
  Clone ID: LIB3051-028-Q1-K1-A10
aaaaaaaaaaaaaaaaaaaaaaaaaaaataaaaaaaaaaaaaaaaaaaaaaaaaa

SEQ ID NO: 33603 - DNA, 296 bp, Glycine max
  Clone ID: LIB3051-028-Q1-K1-F12
cccacgcgtacggatctagatcgcgagctgcctgccccttgtttttttttttaaagaaagcactgtatgcaaatacttagcgagcgaaatcttctggtaacaagcttttgtgctacttttaatgacagcgtatcacagctatgatacaggaacatttcatcggaagatgctagctcattgtcgagtacaactgtgtcatacacaactacttatacgtggacactgaatcctacctcgcatcggaaacatgcacagcacagtcagacttaacgtcaggaatcccaacactgacacat

SEQ ID NO: 33604 - DNA, 77 bp, Glycine max
  Clone ID: LIB3051-028-Q1-K1-F3
cccacgcgtccgaaaaaaaaaaaaacaatttggctttcaaaaaaataaaaaataaagaaaaaaagaaaaaaaaaata

SEQ ID NO: 33605 - DNA, 159 bp, Glycine max
  Clone ID: LIB3051-029-Q1-K1-A8
tgatgacgggaagaacatgacatgattaagatgagccatctcgagctgtgtaccagctctccgcgctcggtctcaacctccttcgctcgcctctgtcgtcgttgacgttctctgacgaggttccgccgttggcggcgtcacggcgtcccgggctgggtc

SEQ ID NO: 33606 - DNA, 100 bp, Glycine max
  Clone ID: LIB3051-029-Q1-K1-B7
tccgaaaaaaaaaaaaataaaaaatttaatttaaaaaaaaaaaaaaaaaaataataaaggtacaaaaaaaaaaaaacataaatacacaaaataaatattt

SEQ ID NO: 33607 - DNA, 102 bp, Glycine max
  Clone ID: LIB3051-029-Q1-K1-H9
aaaaaaaaaaaaatagaaaaaaaaatttttaaaaaaaaaaaaaaaaaaaaaaaaaagagggaaaaaaaaaaaaaaaagaggaaaaaaaaaaaaaaaaaaaaa

SEQ ID NO: 33608 - DNA, 160 bp, Glycine max
  Clone ID: LIB3051-030-Q1-K1-A3
cccacgcgtacgaaaacacttactccaaaatggcacgaggaatttaaagttcccatggtacatgggagtctgataacgtgctggttattgcagttcgtgacaaggaccatttctatgatgatatccttggggaaaaaaactaaaagataataaagaaaaa

SEQ ID NO: 33609 - DNA, 300 bp, Glycine max
  Clone ID: LIB3051-030-Q1-K1-E6
aagaaaccaacaatttggatgggagctgagctgacatctccatttatcatagggaatccagtccaccacagttttagtgtgtaaatgctttagcttgagaccaactattgtggaagaaggtgagctactgcatcctttgagtgctctccatacaacatctccgggtcacacttttgtaaattatttaccctgtcaccacatatatacatttttaatatatattatgcatagatcgtaacaagagagggcttcctctctctttaaaaaaaaaaaataaaaaaaaacataaaaaaaataaaa

SEQ ID NO: 33610 - DNA, 311 bp, Glycine max
  Clone ID: LIB3051-030-Q1-K1-G5.F1
ttttttttttttttttttttttttttttttttttttttttttttttttttttttttttttttttggccaaataaatattttatacaaaaaaaaaaaaaaaaaaaaaaaaaaaaaaaaaagagaaaaaaaagaaaaaggagacacaaaaaaaaaaggaccgggaaaaaagagacaaaacacccccccaaaggggaaaacgcaaaaaaaaaaggggaaaagaacccaaaaagaaaaaaaaatcaaaaaaaaaagaagaaaaaaaaagaaaaaaacccaaaaaaaggggccccaaaaaagagaccccacagaag

SEQ ID NO: 33611 - DNA, 73 bp, Glycine max
  Clone ID: LIB3051-030-Q1-K1-H7
aaaaaacatacaaaaacacatacaacataacaaaaaaaaaaaacaaaaaaaaaaaaagggctaaaatataatt

SEQ ID NO: 33612 - DNA, 423 bp, Glycine max
  Clone ID: LIB3051-031-Q1-K1-F9
gttctagatcgcgagcggccccccttttttttttttttttgagaaggtaaaatgttggaatggctataactgtagcctcttgcactgttgcacataccaattacatccaaaaaaaaagagaaagaaatagaatatagatggcaggaatttgaaaaatggaatcaggggtggtggtcaatcttgaaagagggtaaataacccggcatgtaaagattgacggagaacaaacgacaaagggacattttagtagagctcatataatcctgtgatgactaatgggacctttggcgggccagggttatcctcgaactattattatcttatatccctttctcactctaagatacatgacacgcaagaattaggctacggttgccttttccttctggtcaccaaaaatgcgttgccggaagtcagaaacca

SEQ ID NO: 33613 - DNA, 99 bp, Glycine max
  Clone ID: LIB3051-032-Q1-K1-C10
aaaaaaaaaaaaaaaaaaaaaaaaaaaaaaaaaaaaaaaaaaaaaaaaaaaaaaaaaaagagaaaaaaaaaaaaaaaaaaaaaaaaaaaaaaaaaaaaa

SEQ ID NO: 33614 - DNA, 91 bp, Glycine max
  Clone ID: LIB3051-032-Q1-K1-C12
aaacaataaaaaaaaaaaaaaaaaaaaaaaaaaaaaaaaaaaaaaaaaaaaaaaaaagagaaaaaaaaaaaaaaaaaaaaaaaaaaaaaaa

SEQ ID NO: 33615 - DNA, 439 bp, Glycine max
  Clone ID: LIB3051-034-Q1-K1-A7
gctaccagtaccaggagctccctatctacagtgtctctctctctctgcaaaagcaacgaagctgtgttctgatccttcaaattagattccactccaaaccacctttcctcatcaagatctattttttattctattctctcaggatcactctcttgcgcctgatgcttctggttgtttgttatttttggagacttaaatggatgctaagccgtggattaggtcaatttgatctcaactgaaactttttagcatttctgatggactcgaaaactagttctagatctctcccgaaacaccatcagaagacagctgggattcgaacccctgagacgaaagatgcagggtcttcttttcagaagatggggaaaacggagctggctgctcctgtggatttattgaagtctgcagcgaacgcatgcaagcagaatactggcgaaac

SEQ ID NO: 33616 - DNA, 93 bp, Glycine max
  Clone ID: LIB3051-034-Q1-K1-D4
aaaaaaaaaaaaaaaaaaaaaaaaaaaaaaaaaaaaaaaaaaaaaaaaaaaaaaaaagagaaaaacaaggacgctcgttctataagctccata

SEQ ID NO: 33617 - DNA, 387 bp, Glycine max
  Clone ID: LIB3051-034-Q1-K1-F10
cccacgcgtccgcccacgcgtccggaagaggtggtgtgaagagaatcagtggtttgatgtacgaggaaaccaggggggttctgaagattttcttggagaacgtgattcgagatgctgtgacctacaccgagcacgctaggaggaagacggtgactgccatggatgtggtttatgcgctcaagaggcagggaaggaccctctacggttttggaggctaaagaatttaacccttcttttctgggttgcaggataagacattggttcttttgaatttgcgtggtgttttagtttaggtttgttatgtatcatacgaatctctggtttgcatagaaaatatttcatttgaaatttaaatggagtatcggttctgttaggcaaaaaaaataa

SEQ ID NO: 33618 - DNA, 287 bp, Glycine max
  unsure (1)..(287): unsure at all n locations
  Clone ID: LIB3051-034-Q1-K1-F3
ctagatcgcgagcggcccccttttttttttttttntaaatcataatgcataatagagggcatttcataaataaggtttcaacaagccatttatggattccaaaggccggttccattaaaattaatggtattaaaccaaccaggggaaaaaaggaaaagagattccaaatccggttttcacagagaccagaagagacacgccacttgataagtgtcacacaagatttcacaagagaaagggacatttcttttcaactatatactaaagtgactgatgagcatatgagg

SEQ ID NO: 33619 - DNA, 65 bp, Glycine max
  Clone ID: LIB3051-035-Q1-K1-A3
aaaaagaaaaaaaaaatactaaaatatattaaaaaaaaaaaaaatataaagggtaaatgaaaaac

SEQ ID NO: 33620 - DNA, 81 bp, Glycine max
  Clone ID: LIB3051-035-Q1-K1-F12
aaaaaaaaaaaaaaaaaaaaaaaaaaaaaaaaaaaaaaaaaaaataaaaaaaaaaaaagaaaaaaaaaaaaaaaaaaaaaa

SEQ ID NO: 33621 - DNA, 89 bp, Glycine max
  Clone ID: LIB3051-035-Q1-K1-G10
aaaaaaaaaaaaaaaaaaaaaaaaaaaaaaaaaaaaaaaaaaaaaaaaaggaaaaaaagaaaaaaaaaaaaaaaaaaaaaaaaaaaaaa

SEQ ID NO: 33622 - DNA, 160 bp, Glycine max
  Clone ID: LIB3051-035-Q1-K1-H12
cccacgcgtccggggagattgaaaccagaagaagctgtgcaggctacactttcttctgtccctgatgaggttgtagatactatacaggttacatctttaccctctgaggattctgtctcagagaggaggaggaaattggagttccttgaaatgcaagatt

SEQ ID NO: 33623 - DNA, 286 bp, Glycine max
  Clone ID: LIB3051-035-Q1-K1-H8
gcgagcgggcgaccttttttttcctcatcaaatctcttccttctctgtggtgattttcaaagttcctaactttgctaacccgagatctggtaaagcgaactgaactagatgagggtgctgtacgcgctgatgctgcaactgcaaggcatgccgacggtatgaccgaaaagcgattgggtccacattcgcgacgggtggaacgactacctgaaacacgagtccgcgcggatataccaggtggttgacaactacccttacatcgacgtggacactgagctagcgggga

SEQ ID NO: 33624 - DNA, 95 bp, Glycine max
  Clone ID: LIB3051-035-Q1-K1-H9
cccacgcgtccgaaaaaaaaaaaaaaaaataaaaaaaaaaaaaaaaaaaagaaaaaaaaggaaaaaaataggtaggcagatatattagttcacat

SEQ ID NO: 33625 - DNA, 328 bp, Glycine max
  Clone ID: LIB3051-036-Q1-K1-A6
cccacgcgtccgctctcaatctcaaacctctccattccttactcagtttatcattgcctgtgtgtagtggagcttttctaccttaaaaagattgcaccttcacccttcttcaggtttgcttaatttctcaagcaaactttgtttcatttccttcacaacttgtgattttcaaccttgcttacccaccatcacaatacgctgctatcttttgctttatttctcattcaatttcaaggacaatcaacaattggggtcatacatatatacatgcataccatctttcattgccctcattgttcttaaaacaaaattggaaccaattccatcc

SEQ ID NO: 33626 - DNA, 68 bp, Glycine max
  Clone ID: LIB3051-036-Q1-K1-F7
aaaaaaaaaaaaaaaaaaaaaaaaaaaaaaaaaaaaaaaaaaaaaaaaaaaaaaaaaaaaaggaaaaa

SEQ ID NO: 33627 - DNA, 295 bp, Glycine max
  unsure (1)..(295): unsure at all n locations
  Clone ID: LIB3051-038-Q1-K1-A3
ctttatcatcgcctctctctctcttaatcgttcttcacgagagagagagagactcacactagcacacatacatggacgccatcgttcaaaccagaggccttgtttctctccccaccaaccccaaaaccagggtttcgcatgacctgcatctatctcacggccttaaacaccgttttctctctctaaaacccaaacccctatccaccccttctgtctccgacgccgacgccgttaaatttcatccctatggcccatagccccanaatttattcatctgccgggccgaggccgccgg

SEQ ID NO: 33628 - DNA, 75 bp, Glycine max
  Clone ID: LIB3051-038-Q1-K1-D9
aaaaaaaaaaaaaaaaaaaaaaaaaaaattaaaaaataaaaaaaaaaaaaaaaaaaaaaaaaaaaaaggaaaaaa

SEQ ID NO: 33629 - DNA, 283 bp, Glycine max
  Clone ID: LIB3051-039-Q1-K1-D8
ggctggggtggcccttattatggtggcggctggggtggcccttattatggcggtggttggggcggtccctggcgtggtggtggcggtggtggctggggaggttggcgtcgacctaatggcaaccctcacaactaagaagaaaacttgctaaagcttctttacgggtttaggttttcgcaataaataaaacttcatgagaagtgtagttgtaataaaagtggaagtctctcttctcttgtgatataaaggaataatagttttatatatgtattttcttatcttt

SEQ ID NO: 33630 - DNA, 60 bp, Glycine max
  unsure (1)..(60): unsure at all n locations
  Clone ID: LIB3051-039-Q1-K1-G1
cccacgcgtccgggccgcccttttttttttntttttnttttttttttttttttttggcaa

SEQ ID NO: 33631 - DNA, 76 bp, Glycine max
  Clone ID: LIB3051-040-Q1-K1-G7
aaaaaaaaaaaaaaaaaaaaaaaataaattaaaaaaaaaaaaaaaaaaaaaaaaaaaaaaaaaaaaaaaaaaaaaa

SEQ ID NO: 33632 - DNA, 343 bp, Glycine max
  Clone ID: LIB3051-041-Q1-K1-A12
gctgggccatatggaaaccaatgatcaaatgtgggaaagtttgttgtgaaaatggatgctgctcttaaacttatgcaacacaaggttgaagcagacctactataatttctacaggtctatatatgttcctcttcatccagatgcttatataatgtactgctaaataatcatccaggaatccagaatttgattatgtgccctgcgagtagtttgaagggtaatcgatgagttaatgcgatcaaaggtgctatttatatatattcccgaggaatttcaatgcataaatcatatgtggatccctacatcaactatccaaggaattttcgaagagcataatatgaaa

SEQ ID NO: 33633 - DNA, 211 bp, Glycine max
  Clone ID: LIB3051-041-Q1-K1-E9
tcgatttcacctcatgatttgccttcttggccgctgtatattgtagtggagctgtgtctttgtaacatgaattatgtaggtgcgtcaattaaatgcaattttacaaaatcatttgttaaaaaaaaaaaaaagaagggaaacatgcttcaaaaggggatattaaaaagggcggcgtctgaggatcaagtacttctcttgatgcgaggtggac

SEQ ID NO: 33634 - DNA, 229 bp, Glycine max
  Clone ID: LIB3051-042-Q1-K1-A1
cccacgcgtccgcccacgcgtccgtccacgcgtccggcgagcggcgccctttttttggtttttttacaaaaataaattttccccccattccttgttccaaatgatgttttttcctccttttaagggggtttactaacagtacaaaaaagaaaagaaaaaaaaactatgaaaatagggggaaaatttatttttgtaaaaaatattaaatattaatattataaaagggcgg

SEQ ID NO: 33635 - DNA, 358 bp, Glycine max
  Clone ID: LIB3051-042-Q1-K1-D12
cccacgcgtccgcgcgacggccgtccctttttttttttttttagtggtgagcatccaacgcaatactacaattactgatctcatcctttcatggcctacaaacaaaggcactactcttgtcagttttgctctatcataataaacaaatgaagaaaaatacatcttgtgtctgaagttctagttcagttgaaaatgtgcaagggtagatatttccgaaaaagaatccgtctgctgaatgtgtttgcttgaattggtagaaaggtgctgatccccttaaaatggaatgcagcagcaaaggtgaacttgcactgtcacattgagagtgtgcacttaaatggtttaacatcaaatgcaacat

SEQ ID NO: 33636 - DNA, 52 bp, Glycine max
  Clone ID: LIB3051-042-Q1-K1-H11
aaaaaaaaaaaaaaaaaaaaaaaaaaaaaaaaaaaaaaaaaaaaaaaaagaa

SEQ ID NO: 33637 - DNA, 363 bp, Glycine max
  Clone ID: LIB3051-042-Q1-K1-H4
caaagatcaattaccttgttcttttttttttttcctttttgctccatctcgactacgttatttatccataccggttctactttcaaaagcggcaatttcataacaatgaacacaaatgaaaaattcaaattgtgcgagacaaacatgcatgggttgagtgatttgatgagttgaagagcctatccaattgagatgttgaggacgatgatggcaaaggatgagcaagttccaaatgtatgcaacaatggtgagagttgaagactcgattagagtgtagagatgatcccaaagagaggcttaaatttggattaaataaactttactacttttgagagtgcttgtatttaatttaaaaaaataata

SEQ ID NO: 33638 - DNA, 59 bp, Glycine max
  Clone ID: LIB3051-043-Q1-K1-A1
aaaaaaaaaaaaaaaaaaaaaaaaaaaaaaaaaaaaagggcagacgatataaaagggtg

SEQ ID NO: 33639 - DNA, 77 bp, Glycine max
  Clone ID: LIB3051-043-Q1-K1-F11
aaaaaaaaaaaaaaaaaaaaaaaaaaaaaaaaaaaaaaaaaaaaaaaaaaaaaaaaaaaaaaaaaaaaaaaaaaaaa

SEQ ID NO: 33640 - DNA, 52 bp, Glycine max
  Clone ID: LIB3051-044-Q1-K1-A8
aaaaaaaaaaaaaaaaaaaaaaaaaaaaaaaaaaaaaaaaaaaaaaaaaaaa

SEQ ID NO: 33641 - DNA, 341 bp, Glycine max
  Clone ID: LIB3051-044-Q1-K1-E11
tttttgtttgttccattatcatctttgcgccaaaccatacagccaaagcataaccacagaaaataactaacataactgtgcctagaccagcgccagctgtggaaccttcatgaactcctgatttgtaagcatctacaagaaatttgctataactagatactgcttgcttttccccagtaaaggatgcaacctggaaatatacacagggaaagaaaatataattattatagcactgtcaagacgcaagcaacaagcaataaacacattctcaaccaagaaattatagaattccacagatatctacttaaggtttcaacaaataacatacagttcttattgat

SEQ ID NO: 33642 - DNA, 397 bp, Glycine max
  Clone ID: LIB3051-044-Q1-K1-F12
ggaaacattgaacaaagagctggaatcaaatctggaaagtttggctcagaaagaacaagaggtaactgatatcaaaacaagaattgaagagatcagagagcatttaagcgagcttgagctgaagtcttctgatttggccaagaacatcttgtcaatcaagtccaaggttgataatttagacagcaaatccttgctagatgaactagtttaatgaaattgtttttgtctttgaatttcgtcctcagaattatggtaatgcttaaattgtagaatatggtactgaataaacgcatgagctatatttttaagctaaaaaaaaaatattataagagatagaaagaatacataaatgaagttaatactattgaatatttgaaaaaaaaggggcggccgcttt

SEQ ID NO: 33643 - DNA, 66 bp, Glycine max
  Clone ID: LIB3051-044-Q1-K1-F2
aaaaaaaaaaaaataaaaaaaaaaataaaaaaaaaaaaaaaaaaaaaaaaaaaaaagaaaggaaaa

SEQ ID NO: 33644 - DNA, 594 bp, Glycine max
  Clone ID: LIB3051-045-Q1-K1-D2.F1
aaagaagaaaattctcccagagtaggaaaacaaaaacaaaaacaaagaaaaaaagataagaactgaaaagaagttcaaatctgtcatccaaacatgacctaagcattttagccttacaaaaacaaaagaacaaagaagaagaaggaattaacactactaacacaaaaaccctaggtagaaactatgcaatggatatttataaggtttttgagatctgaattgcaattgaggaataaatgaatcagaaggtggtgggaatatgatgatcagaggacatcaacagctgttccaagtaatcaggaccaaggtcttcaaacacgacagcattgtctacggtactactttgtagtttgctattgttattgttgttcttcttcttcctgacgttaattttccttctcaaagagtgtttcctcttgagagcgacaacaggggagcacccttcttcgttgttggaatcatcatgagcgtattcatctctttaagcgactctctaacgatctccgcggggaagttgagaatcgccgccgagccgcgcatggagaacgcgcgttggtcgtaagccagagccgcggctttcggcgctgtcgaatg

SEQ ID NO: 33645 - DNA, 516 bp, Glycine max
  Clone ID: LIB3051-045-Q1-K1-D2.F2
aaagaagaaaatctcccagagtaggaaaacaaaaacaaaaacaaagaaaaaaagtaagaactgaaaagaagttcaaatctgtcatccaaacatgacctaagcattttagccttacaaaaacaaaagaacaaagaagaagaaggaattaacactactaacacaaaaaccctaggtagaaactatgcaatggatatttataaggtttttgagatctgaattgcaattgaggaataaatgaatcagaaggtggtgggaatatgatgatcagaggacatcaacagctgttccaagtaatcaggaccaaggtcttcaaacacgacagcattgtctacggtactactttgtagtttgctattgttattgttgttcttcttcttcctgacgttaattttccttctcaaagagtgtttcctcttgagagcgacaacaggggagcacccttcttcgttgttggaatcatcatgagcgtagttcatctctttaagcgactctctaacgatctccgcggggaagttg

SEQ ID NO: 33646 - DNA, 221 bp, Glycine max
  Clone ID: LIB3051-045-Q1-K1-D2.R4
ttcagcatctcataaaaccttataaatatccattgcatagtttctacctagggtttttgtgttagtagtgttaattccttcttcttctttgttctttcgtttttgtaaggctaaaatgcttaggtcatgtttggatgacagatttgaacttcttttcacttcttatctttatttctttggttttggttctgttttcctactctgggagaattttcttcttt

SEQ ID NO: 33647 - DNA, 286 bp, Glycine max
  Clone ID: LIB3051-045-Q1-K1-E5
aaagcatcttgaattttattttaatgcccctttggtaacttaaaaaaaaaaaaaaaaaatggcccatcattaccaatgggaatcaagaaattttgaacagtttgtaaataatcgaaaccaaattgacttgatgaaattaaatgaacccaaactattgaaccaagcccctttgcttgaaaacatttagcatggcagctccaattttggcaggggactccacaaccatgaccccagcttccctgagggttttaattttgtcttgtgcagtgcccttgccacccgacac

SEQ ID NO: 33648 - DNA, 382 bp, Glycine max
  Clone ID: LIB3051-045-Q1-K1-F6
cccacgcgtccgcccacgcgtccggaaataaccatgcgcagattaggatttgttcttcgtccaatttttggtagttggtgtgctctttagtttttatgtaatcaccgtctatgtgtttgtcatttccatgttttatacctttgtgagatgagatggatacagaaacaggaaaacaaacttcgctcacacttgctttcgatggtctgctcattctgaacttaattgtgatgctatagtagattttcctcacctgatattgttgtgccttccatcaggtattgactattggcacatatgttgaacagtatgcacggaaaatttaggtgtaccttttttttaagcgcaatatcaagcagagctgttgtaaaaaaaaataattata

SEQ ID NO: 33649 - DNA, 251 bp, Glycine max
  Clone ID: LIB3051-046-Q1-K1-B6
cccacgcgtccggatgtgattaagaagggagaggaagatagggagaaatgaagggtcagatgaaatgagtgtttaggtagctatgtatcattgttgtttttatctgcctttcatttgtattcattgtatgttattattcattattgtgggggagtaacgaaatcttcttttatttgtggctgtcccaaaatattttcattattattaaccattaatgttaattggtgatgctctttaaaaaaaacaaaaac

SEQ ID NO: 33650 - DNA, 442 bp, Glycine max
  Clone ID: LIB3051-046-Q1-K1-E1
gttctagatcgcgatctagacagcttttcaccaagaatccttagccaaaccgcaccagcagagcgttgaggcggttgatgagagctgcgaaggcgttggagaggatgaatgcttgatgaggagaacacttgccgctcacgttgactatatttatactcaaaagcataataatccttgaaatatagtactcgtagttagtactatagcatccacaaatccacttatggaaagatataggagcgagaatctatgtttgattgtttttataaattaggagttggtacgtaactggctcattaaatttgtttggagttgagaattatttgtattttccttttctcttctcttttgcttatatgtagtgtattatatgaagagttaatgtaatggttgtgtaaagggatttcacactctcaattaataaaaaggtaatggatttttg

SEQ ID NO: 33651 - DNA, 309 bp, Glycine max
  Clone ID: LIB3051-047-Q1-K1-G8
cccacgcgtccgtgcagctcagaagtttgtgaggaatgcgtttgccaagtcctcctgttctgttgatgaaacacttcgggcaagttaccgcggttctactcctgctttggctacacctacaagtgttagtagaagtgtgtcaaggtttgctagagatgggagcttggcttccaggtctccatctgttagagagggctccaatcctcccttgtgatatgttgtaacatattttgaaacaatgataaagtgactatgttgtaattcttcaattgcatttacttgctctaaataaaataaacgattaatagc

SEQ ID NO: 33652 - DNA, 74 bp, Glycine max
  Clone ID: LIB3051-048-Q1-K1-H9
aaaaaaaaaaaaaaaaaaaaaaaaaaaaaagacaaacaatataaaaaaaaacaagcaaacggacacatgcatac

SEQ ID NO: 33653 - DNA, 69 bp, Glycine max
  Clone ID: LIB3051-049-Q1-K1-F9
aaaaaaaaaacaaaaacaaaaaaaaaaaaaaaaaaaaaaaaaaaaaaaaaaaaaaaaaaaggaaaaatt

SEQ ID NO: 33654 - DNA, 82 bp, Glycine max
  Clone ID: LIB3051-050-Q1-K1-D2
aaaaaaaacaactaaaaacaaaaaagtttaaaaagacaaaaaaaaaaaaaaaaaaaagagaaaaaataaaaaaataaaaaat

SEQ ID NO: 33655 - DNA, 278 bp, Glycine max
  Clone ID: LIB3051-050-Q1-K1-H6
tttttttttttttttttttttttttttttttttggtttatatttttttttttttttttattatttttttttttttttttttttttttttatttttttattaatttttatatttattatattattttattttttattttattatttaaaataaaaaaaaaaaaaaaaaaaaaataaaaaaaaaaaaaaaaaaaaaaaaaaaaaaaaaaaaaaaaaaaaatataccaaaaaaccctaaaaaaaaaaaataaaaaaaaaaaaaaaaaaccacataatatat

SEQ ID NO: 33656 - DNA, 142 bp, Glycine max
  Clone ID: LIB3051-051-Q1-K1-E12
tttaaacatgccagtacctttcactactggttattccacattcgaagaaataaactcacccactaagcactacacaaatcacacagagttgcaagagaaagataaaagaagatggcgactcttgattccgacgtgcctatgg

SEQ ID NO: 33657 - DNA, 218 bp, Glycine max
  Clone ID: LIB3051-051-Q1-K1-G8
tgcaaagatgggtaggcacaagtgctagcccagaagggtgggtattttatcttgaaaaattgcccttgacttggtagtttatacatgattttttaccttctcaaattcattggtggccttgaacctgaattttgcaccaggaaacacactttctaacgcattatttccagcacattttttttattggttgtaattcatgcgtttctaaataatcaatg

SEQ ID NO: 33658 - DNA, 228 bp, Glycine max
  Clone ID: LIB3051-053-Q1-K2-B4
gcgagcggtcgccctttttttttttattttccattttatactcaccatatttttaaaagggtatatatattctatcacttctacatcatatttcactactaattattatactctacaaacatacagaatactataactgattatttttataattacatcattgtcatcctaaacgactatatatatactccctatatatattaattctaactaatgtgtcatacactt

SEQ ID NO: 33659 - DNA, 174 bp, Glycine max
  Clone ID: LIB3051-054-Q1-K2-A2
gggttctgaatgatgattcaattcaaactatgattgtgtccttgaataatttttatcatgcaattgtaatttgtattgagctaatcataaacatgaagttacatgttcaaaaaaaaaaaaattaataaataaaaaaaataaaaaaaaaaaaaaaaaaaatgaaaaaaaataaaa

SEQ ID NO: 33660 - DNA, 346 bp, Glycine max
  Clone ID: LIB3051-054-Q1-K2-F7
gggaaagacaaaagcggtggatgggtcaaatttttacccttttttttatttggtgctttagggtaaaaataaacaaagcaatttggaaggggctggaccatatttgcagagggattacggctccttccaattgttgaatcacagtggaatcattttgggggaatacttgtcagaagtaacatctgattccaacctgtccacccgcattactttactacaataaataataatgcaaggaattttcactatctcgttttacatttgtggacaatgatgtgttctgtagccttactagtattttttagccttctccagttttactaatttaagcccctttgttcttgat

SEQ ID NO: 33661 - DNA, 413 bp, Glycine max
  Clone ID: LIB3051-055-Q1-K1-C5
attcggctcgagtttgaatctttaggggtctgaaggtgctaacagagtcggattctctccatatttagtggaatttgcttactctttatcagcaacttaagttactcattgctgtcacgaaaaaaagaaaagaaaaggaaaacatcactttggaaatgtgtcaatccaatgaaggtatgatgcatggccatataagtagggagttatacgcctgcaacttgaaattgtttgttctctactttgactatgcatcaattataccacaaaagattgagaaggtagatattctctattgcaaatcaatctttagcttcaacacaatgtaagctacttccccaactgaaaaataatgatgatagttttattcatgaatcgagatcaaatactgttgctgagttcctctgtgaagatgt

SEQ ID NO: 33662 - DNA, 127 bp, Glycine max
  Clone ID: LIB3051-055-Q1-K1-D3
gtgaaagctggagcttttgcttcaattcattttactatttcactgattagaacaggcaaagatgtctcttttgggttgatctttttatgtttcgatcaattgaattttccattatgacaccgtcctg

SEQ ID NO: 33663 - DNA, 305 bp, Glycine max
  unsure (1)..(305): unsure at all n locations
  Clone ID: LIB3051-055-Q1-K1-D5
attcggctcgatgtatgaagatttgaggngacgagtgaagcgtgaaaggatgaccaattacaacggactaaggtcgcacacgaggctgccactgccagtgtcggatgacgtatcggccactgccactatcactactatagcaagagcagtactaaagaagcgggattagagagttaagggtcctcggcgcatgctagtgacccttgtcttgaccttcttgactatagatcctatcaaaatcctcattgcctagactaggataacgaatgcaccctatgaggataagaaacggaagaatgacaaat

SEQ ID NO: 33664 - DNA, 337 bp, Glycine max
  Clone ID: LIB3051-055-Q1-K1-E5
attcggctcgagtcttctgactgacgatacacctcagacccgcgggtctacgaaccctatacaggactcgcacctcaagatcgtacagcaggctctagaactcacggaaaccgcacccactgatctgcctgctacccaaaactcaattctgaccgcagcacgaaactcaaaagctaaaacccaagataacgacaagaaccataaaaaacacacagacatggacaaaaaccatgacctgcagcataataagcacaatcatagacaacaagactgaagcaaaaacatggaaaacgagacaaagacagacagatacacgcatcgtgactctagagctgat

SEQ ID NO: 33665 - DNA, 405 bp, Glycine max
  Clone ID: LIB3051-055-Q1-K1-G5
attcggctcgaggttatggcattggtaccattcttccacccaacaataagggcgcgccattggaggtcggtaaaggaagggtattaaaggagggaagtagggttgctcttgttggttatggaacaatggtccaaagttgtatggaagcagctaaggttcttgaagctcatggcatctcaacaactgtggttgatgcaagattttgtaagcctctagatggagatttgatgaggagactcgctagagagcatgagattcttatcacagttgaagagggatccattggaggatttggttctcatgtttctcattttctaggcttgaatggtcttctagatggtaatctcaagtggcgagccttgacattgcctgacagatatataaaccatgggtttcagacagatc

SEQ ID NO: 33666 - DNA, 396 bp, Glycine max
  unsure (1)..(396): unsure at all n locations
  Clone ID: LIB3051-055-Q1-K1-H5
attcggctcgagtttgacactaattcatcaacaatgccattagcggattcgggttttcagggttctctatatggttgcatggattcatcggagttgttgcaaagcgcagggcatgttgacccagaaaaccagagtcaaacctttgtcaaggtttacaaatcagggtcagttgggcgctcacttgacatatccaggttcagcagctatcatgaactacgcgaggagttggctcagatgtttggaattgaggggaagttagaagaccctcttagatcaggctggcagcttgtgttcgttgacagggagaatgatgttcttctccttggagatgatccgtgngaatcattcgtcaataatgtttggtatatcaaaatactttcacctgaagacattcag

SEQ ID NO: 33667 - DNA, 310 bp, Glycine max
  Clone ID: LIB3051-058-Q1-K2-B10
ttttttctgttttttgggtaaattgtactttttttatgggaaaacaaatatacaacttggaatggatttgaggcaaattgtgccataagcagatcttctttaagtggctaaaacaaagtttaaaaagcatgttaacaataaaagaaaatgtttctggtataggaccagcagtacaaaaaaatagtgtacgagtacctggataaaacacccgttttgcaatagtgcaacttttaagtacatattgttgactgtccgtagtccacgcatagttacaactccacacttcaacaacaacatgctgacagttcct

SEQ ID NO: 33668 - DNA, 167 bp, Glycine max
  Clone ID: LIB3051-058-Q1-K2-B11
atctgaagagaagcctctgctgtgccctggttgagccctgggggcctttatgggtgcttcttcaggccttccttaccccgtcattttactttatgccttaacgctgaaaaatgttctaggggctaataataaagctctcatttctcctgcaaacaataaaagaaaat

SEQ ID NO: 33669 - DNA, 346 bp, Glycine max
  Clone ID: LIB3051-058-Q1-K2-B12
cctgaattgcagaatcatctacaacatcaactgcttaaggtaagtgtcaatcttgcttgaatccctgcgcaggcagtggagcaggttataaaaagcaagattgacacttaccttaagctcctgaattgcagaatcatctacaacaacaactgctaagcccacattcatcctatccatttctgagatggttcttaatgatccattccctggcaaacttctctgagctttatagctttgtaatgcatgcttggctctaatgggtttcatcttaaataaaaacagactctgtagcgatgtcaaaaaaaaaaaaaaaacaaaaaaaaaaaaaaaaaaaaacaaacaaaaa

SEQ ID NO: 33670 - DNA, 58 bp, Glycine max
  Clone ID: LIB3051-058-Q1-K2-B6
cccacgcgtccgaaaaaaggaaaataaaagaaaaaaaaaaaaaaaaaaaaaaaaaaga

SEQ ID NO: 33671 - DNA, 354 bp, Glycine max
  Clone ID: LIB3051-058-Q1-K2-E9
gggtaaattgtaatttttttattggaaaacaaatatacaacttggaatggatttgaggcaaattgtgccataagcagattttctttaagtggctaaaacaaagtttaaaaagcaagttaacaataaaagaaaatgtttctggtataggaccagcagtacaaaaaaatagtgtacgagtacctggataaaacacccgttttgcaatagtgcaacttttaagtacatattgttgactgtccgtagtccacgcagagttacaactccacacttcaacaacaacatgctgacagttcctaaagaaaactactcaaaaaaaaaaaaaaaaggcataacccagatgttccctcatttgac

SEQ ID NO: 33672 - DNA, 194 bp, Glycine max
  Clone ID: LIB3051-058-Q1-K2-G10
cggacacttatcactagtctctaatacccttcatgttaaatgaacacacacggtggaccaatttcaaaatctaagactgcaatttcgtcaatgtctcttatcttcatttaatatacaatcaaatgaaaatccttccttatgattgagagaaagaacttctgattaaaatttgtcacaaatagcataaataaaaa

SEQ ID NO: 33673 - DNA, 430 bp, Glycine max
  Clone ID: LIB3051-059-Q1-K2-E6
tagttcagatcgcgatctagaactagtctggatgagttgtgcagcaatgagagtcttggcagggaatatgtagatatgttgcgatgtgatgtaagtaagctgctcaaggaacattctgagacgaacaatgtctaattttagcttgtatgaatacatatgcttcattgcttctattgtctcgcaactcttgaccttcctgaaagtccttctagagaatgggttttggcgtgttgtgccctgaataattaattgatcattaattggtctggatcattttgacggacttccagatcatgtgagaaaattaacatacaccacatgccagacggttgtttcaaatgtagcatttaggcgtttaatggccttccattgttatatatttttatgtcctttctgattataccctcgtttgggcttaatttggacagtg

SEQ ID NO: 33674 - DNA, 62 bp, Glycine max
  Clone ID: LIB3051-060-Q1-K1-A8
aaaaaaaaaaaaaaaaaaaaaaaaaaaaaaaaaaaaaaaaaaggaaaaaaaaaaaaaaaagg

SEQ ID NO: 33675 - DNA, 179 bp, Glycine max
  Clone ID: LIB3051-060-Q1-K1-D3
gttttatcctctgcatgacctggaatacgtgttgcctttcgattgttcgattgcttaatgtcatacaagaaattaggcatgaccctattgatgagtatgctctgcctatttgaaaatatccacacctcttttaattgtcgcaatgatgtgtgaagagtgtgttactttaaaaaagaaaa

SEQ ID NO: 33676 - DNA, 100 bp, Glycine max
  Clone ID: LIB3051-061-Q1-K1-A7
tcgaaatacaacaatctttcttttgtttgggtggcaagtggaaaacccgagttaaaatagtgtgaaggttatgtttagattgagaaataaataatcttgg

SEQ ID NO: 33677 - DNA, 73 bp, Glycine max
  Clone ID: LIB3051-061-Q1-K1-B5
cgggctaacaaacacattgccgcacatttaatggaaagggtttatgaaagaacaagaagaggaagagctcggg

SEQ ID NO: 33678 - DNA, 118 bp, Glycine max
  Clone ID: LIB3051-061-Q1-K1-F11
tgcaagttttctcctttacatgattcttacactgctaactgtatttggattgaatagtgggaatgaaaaatgtacacaattttcttctggttaaaaaacaataaaaaaaaaacatccc

SEQ ID NO: 33679 - DNA, 218 bp, Glycine max
  unsure (1)..(218): unsure at all n locations
  Clone ID: LIB3051-061-Q1-K1-H3
ccttccggccaccctttttttttttttttacattcacntaaatcactaattcaggcattttgggtaatttataactgagattgaacctaccaaaacctattctcttttgtccttcatccattagctaccactcttattaaaaacttctagaacaaacaaaatcaaaaactttctacaaacctacttataaatacaatggttcattcttaacacacatt

SEQ ID NO: 33680 - DNA, 61 bp, Glycine max
  Clone ID: LIB3051-062-Q1-K1-A2
aaaaaaaaaaaaaaaaaaaaaaaaaaaaataaaataaaaagataaaaaaaacaaaaaaagg

SEQ ID NO: 33681 - DNA, 155 bp, Glycine max
  Clone ID: LIB3051-062-Q1-K1-G5
gcacccctgtagcaatgttatctctgaattggttgatttgccaaactacaatgctttgggattttatgaggtgttgtttgttttgtttattttttagaatatatggtttactattatttctatgtaatttgttgatcttattaaattatttaatt

SEQ ID NO: 33682 - DNA, 114 bp, Glycine max
  Clone ID: LIB3051-063-Q1-K1-D4
aaaaaaaaaaaaaaaaaaaaaaaaaaagaattaaaaaataaaaaaaaaaaaaaaaaaaaaagggaactggggatactaaaaaatccaagattacaaacacatccatacaacata

SEQ ID NO: 33683 - DNA, 359 bp, Glycine max
  Clone ID: LIB3051-063-Q1-K1-F10
cccacgcgtccgcccacgcgtccgcgtataaagaaggctgcctcttctgtgtgcttgccaagttcttgaatattttcagcttcagcaaaactactagaaaacccatgtgatcaacttttgaaggttcaaggtaccatgccatgacatttggaattatgctgattttctggtgctcctaagttaatgcaagcagggatttggagtacctcttcaaattagccatttagatgaatgaataattttgcttttagaatttattgatagtaaaacttatctaagaactgtaaaaggttgagatatattcacaaaatggtaagtgacaatgacgtctacaatcaaaaaaaaaaaaaaataataaa

SEQ ID NO: 33684 - DNA, 314 bp, Glycine max
  Clone ID: LIB3051-064-Q1-K1-A1
aacaaaaacatggcaaaaaattagcgtaaccaataacaataaatttcgtaagattgcccaggctttgcagtttggaaaatccaggcaaactaataaaactatctacagagttggctacagcaagcaaacctaaattcctacctaaaaggctaaaacactattgccattgctccctaactcactatttccgcttgttagtacattctaatttatactcaagtcactgccaattaaaaagcccaaatcctctttcacttcctcgatctgtggaatcccgattactttccaattgctcattcgaactcttgcttgga

SEQ ID NO: 33685 - DNA, 54 bp, Glycine max
  Clone ID: LIB3051-064-Q1-K1-C4
aaaaaaaaaaaaaaaaaaaaaaaaaaaaaaaaaaaaaataaaaaggtcgaacaa

SEQ ID NO: 33686 - DNA, 74 bp, Glycine max
  Clone ID: LIB3051-064-Q1-K1-C9
aaaaaaaaaaaaagaaaaaaaaaaaaaaaaaaaaaaaaaaaaaaaaaaaaaaggacaaacaggctaaaagaggg

SEQ ID NO: 33687 - DNA, 386 bp, Glycine max
  Clone ID: LIB3051-064-Q1-K1-D10
aaaggtggtaaaatattaaagtttctggtttaatcagggtaaggggaacttctttagaaacaagtttcccagtacatgtaagatcatggtagatcctttattacatactatttattctctatatggatgatatatgtgagcaatttgcttaaccaaatggcctttgattgttacaatccaagttgtctcctgggcttattcccatcatttggcagtaccttatgtcaaagccgatccgatcttggacccgattatcctggccgtggccacattcgaggccacccttgattatgttggtgatgacaccgtaaccaggatcccgacccgatgatctgtcaacactagatggagtccatcttccagcgatcacatcatggctcgatggc

SEQ ID NO: 33688 - DNA, 386 bp, Glycine max
  Clone ID: LIB3051-064-Q1-K1-D7
aaaggtggtaaaatattggagtttcggatttaatcaagataaggggaacttctttagaaacaagtttcccagtacatgtaagatcatggtagatcctttattacatactatttattctctatatggatgatatatgtgagcaatttgcttaagcaaatggcctttgattgttacaatccaagttgtctccggggcttattcccatcatctggcagtaccttcggtagaagccgatccgatcttggacccgattatcctggccgtggccgcattcgaggccaccgttgattatgttggtgatgacaccgtagccaggagcccgacccgctgagctgtcagcactagattggagtcatcttccagtgatcacatcatggcttgatggc

SEQ ID NO: 33689 - DNA, 88 bp, Glycine max
  Clone ID: LIB3051-064-Q1-K1-F12
gccgggtattatttaacatatattcaaaaataaaccattcaagggttacagccttattttgatggttaatgtaggtactacttttggg

SEQ ID NO: 33690 - DNA, 115 bp, Glycine max
  Clone ID: LIB3051-064-Q1-K1-F7
cccacgcgtccgaaaaaaaattaaaattttaaaaaaaaaataaaaaaaaaacaataaaatgggaaaaaaaaaaaaaaaataaacataaaataaaaaacaagggctggctttataa

SEQ ID NO: 33691 - DNA, 283 bp, Glycine max
  Clone ID: LIB3051-064-Q1-K1-H2
aagaaaaccattcctttcaaattagtcgtatatactcaaaagatataaagatagtttatgggagaagaaaataaaatttgtgtgagaaaaccattcctttcaaatttgaactttagcatatactatttgatgtcatcaacttttatatcaaaaaactatatttatgtgcacaaacattgctaaaaggaattcgtacttgctgtgaaaaaaaaataaaaaagcatggtcttaattaactatgtgttgtataactgtaaaaaaatatatacatactttatttaaa

SEQ ID NO: 33692 - DNA, 396 bp, Glycine max
  Clone ID: LIB3051-065-Q1-K1-A1
agggactggtccctggcctttgctttggtgcgggtcttggaattacggtctttgggatggcgtacatgtttgtgcgcgatggattggttcataagagattcccggtgggccccattgcaaacgtgccctatctcagaagggtggcctctgctcaccaacttcaccattcggaaaaattcaatggagtgccatatgggctgtttttgggacccaaggaaattgaagaggtgggagggctagaagagctggagaaagagataagtaggagagcaagatcatacaaaatagctaatgagaacaactaatacaaatcaagaatgtttcgaagaattatcagtgtaaatcagaaatatgaaataaaatgatccaaaaattttgcttgcaaaaaaaatatac

SEQ ID NO: 33693 - DNA, 280 bp, Glycine max
  Clone ID: LIB3051-065-Q1-K1-A10
cccacgcgttcgatggggatggtttcaaatgggtttcccagtacatcaaatagtcccttggcaagagatggcttggtaactcatttctagaagtttgtttctctagttgagatttggaggtgttgttgggacaaaattgctgctaaagaaattgcagtatatttcaacttttatttatataaaatgactgggaaccttctcctgttttccccaatataaaaagctggaggctgatatcaacattggatatgaagatattgttaacacccaaaaacttgat

SEQ ID NO: 33694 - DNA, 307 bp, Glycine max
  Clone ID: LIB3051-065-Q1-K1-B3
taatttaatattaatgttcgggtacccccctccggctcgtagttgagaagagctttcgtttaggaaagggctaaatgggtgcgatccctctcgttgagagtcaagggtctcctggagtagaaggcacatcctggatctattaagccggcaagggttcagcattggctttcacgaccgcaaaggggccatctctcagtcggagtagataagatagatatacttaatttaatatcttttattatatattttaatataataaagaaaatcgtgaataaaagagcgtgacgagaaaaaaataacaacaaaa

SEQ ID NO: 33695 - DNA, 78 bp, Glycine max
  Clone ID: LIB3051-065-Q1-K1-B4
agaagaaaaaataaaaaaaaaaaaaaaaaaattaaaaaaaaaagagaaaaaaaaaaaaaaaaagggcaaacataaagg

SEQ ID NO: 33696 - DNA, 93 bp, Glycine max
  Clone ID: LIB3051-065-Q1-K1-E11
tatctttaaaaaaaaaaaaataaaaaaagtttaaaaaaaaaaaaaaaaaaaaataaatgggaaaaaaaaaaaagcaaatgtcatcctttctta

SEQ ID NO: 33697 - DNA, 301 bp, Glycine max
  Clone ID: LIB3051-065-Q1-K1-G6
gcggcgggcgtggtggctgtcgtggtggctatggtcctaaggaacatagcgaggctgggggggatgctaaccctcacaactaagaaggtaactttctaaagcttatatatgggttcaagttatcgcaatatataaaacttcatgagaaggttagttgtaatagaagtggaaaactttgtaaaggaataatacctttcatgaatttccttatctttgcgttgactctggctctgttttgctaaactcaaataaatagtattgcatgatattgactaagtaaaatgatatctaagaaaaatac

SEQ ID NO: 33698 - DNA, 260 bp, Glycine max
  Clone ID: LIB3051-066-Q1-K1-A1
tctagatcgcgagcgccgcccttttttttttttttttttttttttttttgatgtatatagcgtttagttgaatgaatcaacgggcttacaagaagaagaaatccgacaaatgcacatctaggaaataacagttgcaacaagaaaacaacataaattgcccataaactaaactatgtcaacggcattatatgatcaaaacagcaaaaccccctcttgctcaagttgcagatgagattcaaggttgttgctgagcatcaatg

SEQ ID NO: 33699 - DNA, 202 bp, Glycine max
  Clone ID: LIB3051-066-Q1-K1-B4
cccacgcgtccggttctagatcgcgagggccgcccttttttttttttttttttttttttttgtttgggtttttttttttttttttttcaagactaagttttagctttatgctaagctgttaaagaatgtaacttacgtgtattgggcatgacacaacaatccttaattttctgttggtgataattaatgtattttatcctgc

SEQ ID NO: 33700 - DNA, 87 bp, Glycine max
  Clone ID: LIB3051-066-Q1-K1-C5
aaaaaaaaaaaaaaaaaaaaaaaaaaaaaaaaaaaaaaaaaaaaaaaaaaaaaaaaaaggaaagaaaaaaaaaaaaaaaaaggaaag

SEQ ID NO: 33701 - DNA, 68 bp, Glycine max
  Clone ID: LIB3051-066-Q1-K1-C8
aaaaaaaaaaaaaaaaaaaaaaaaaaaaaaaaaaaaaaaaaaaaaaaaaaaaaaaaaaagaaggagga

SEQ ID NO: 33702 - DNA, 396 bp, Glycine max
  Clone ID: LIB3051-066-Q1-K1-G3-F2A
gaaaaaaataaaaataatttagctttagctattcaaacttttagtacaagaaatctaataatcaaatattacattttacggaagacgtaaagatgagttgagatgcttatggtgttgcacagcgttctcactacccaaagagctaaacaaaatctcaggacaggattcttatacacgcattgctcactccacaaaacttatgcagtttacaaacaaattacatatttcttggcttttttctcaacgccattgatggccattacgttcagttggtgagccaggttctataggaacaaaacccctgccaccaaaaacaggacgcatgaatgcatcatcaaacttacgccacaagcgatgaacagtgtgtgttggagtggaaagtaaagcacggatgct

SEQ ID NO: 33703 - DNA, 357 bp, Glycine max
  Clone ID: LIB3051-066-Q1-K1-G3-R2A
ctcagaccatgcctccgtggtctccatgaacttatttgtggcacttctttgtggttgtattgtccttggccatcttcttgaggagaatcggtggatgaacgagtctatcactgctcttttgattggtgtttgcactggcatagtcattttgctgtttagtggtggcaaaagctcgcatattcttgttttcagtgaagatcttttctttatataccttctgccgcctataatatttaatgccgggtttcaggtgaaaaagaagcagatttttgttaacttcatgaccatcatgttgtttggtgctattggcacattaatatcttgtaccatcataactttgggtgccacacaaatttt

SEQ ID NO: 33704 - DNA, 99 bp, Glycine max
  Clone ID: LIB3051-067-Q1-K1-E2
tccgactcgagcgccgactcctgtcaaaaacaaactaaaaacatatattatcctataaactaaaaaaaaaaaacattcccgagtagaagggaccatcga

SEQ ID NO: 33705 - DNA, 174 bp, Glycine max
  Clone ID: LIB3051-067-Q1-K1-H10
gaaaagaactacactagtataatacaatttgtaattgtatcagcttagatgtttagatttcgggtcaccaatatgtctcatcaatatcaggtcagcttggacataaaatggtaaatgcttagacgtacaatcgtgtataccttttattcttgttaactcaattttattgtttgt

SEQ ID NO: 33706 - DNA, 193 bp, Glycine max
  Clone ID: LIB3051-067-Q1-K1-H11
tcgcccacgcgttcgactaatataatacaaaatgaaataagaataaaaaataaatgttaaaaatttgaagtaaagtatatatctcataaaagaaaaggtcagcttggacataaaatggtaaattcttagacttacaatcgtctatacattttataattgttgactcaattttatcgttcataaaaaaaacatt

SEQ ID NO: 33707 - DNA, 100 bp, Glycine max
  Clone ID: LIB3051-068-Q1-K1-A9
gcactaatcactactacacagatcacacacacacacacagagttgcaagagaaagagagcgagattccgatggcgactctggattccgacgtgcctatgg

SEQ ID NO: 33708 - DNA, 54 bp, Glycine max
  Clone ID: LIB3051-068-Q1-K1-H5
cctccttgtactactatttgtttttatttaataataataataatttcatctggg

SEQ ID NO: 33709 - DNA, 148 bp, Glycine max
  Clone ID: LIB3051-071-Q1-K1-C10
gcgactcgttcgaaaaaacatacaaaatattaaaggaaaactctttcaaattaccacaaatcttcatacgactaaagagcggggtccgttcttgaggatgcaaactgaaactccccacccttctaagaggatcttttttcttaaggag

SEQ ID NO: 33710 - DNA, 267 bp, Glycine max
  Clone ID: LIB3051-071-Q1-K1-D5
gcgagcggcgccctttttttttttgttttttttttttgccatacgagtctttctttgggatgttttatttggatgtaagttatcatacatgcatccttagctttatcataaaagatataatgaagaagcttccattcttgtagtgcttatggttttggtggtttaagttcattaactaaaccatgctcaacattcatttttggtatgctggaaatgtgaacaagtgtattttgctgagattaatcaaattgggttgttggctctctc

SEQ ID NO: 33711 - DNA, 119 bp, Glycine max
  Clone ID: LIB3051-073-Q1-K1-F1
cttatttaaggatccatgctgacacatctcgtatcttgtcaagtacttgctgcaagcatgtcgtgtaaaacgatactagctatacatagatccgagcccataccacccaaaatggctaa

SEQ ID NO: 33712 - DNA, 71 bp, Glycine max
  Clone ID: LIB3051-074-Q1-K1-A8
aaaaaaaaaaacatagaaaaaaaaaaattcaaattgaaaggccggtcgctctaattcgaggctacgtgacc

SEQ ID NO: 33713 - DNA, 338 bp, Glycine max
  Clone ID: LIB3051-074-Q1-K1-D3
ttgcgtacgcctacgcgtttcggccgcccttatttttcttttttcagtttttattccaaaaattataagcgagctttggattcacagaaacaaacattgttacatcctcgggttgataacaatattctctctatatccatctaaatgatggcatgctactctcaagtctaaaccaaattacatgctacaacaaaaggacttacccaccccatggctactacagcatgccttgtctagttattatgatcaacaaccctttttcttcactacatgatactaatactaggtgagttacaacaaacctgccccctctctctctgcctgactccaacaatatg

SEQ ID NO: 33714 - DNA, 407 bp, Glycine max
  Clone ID: LIB3051-074-Q1-K1-E6
tctagatcgcgagcggccgctcgcgatctagaacgctatgcatatgcacttttgtcttctgggtttgtggatcttgttgttgagtctggtctgaagccatacgattttcttgcattgattcctgttattgaaggcgctggaagtgtcataactgattggaaaggagataaactggtttgggaagcttcttcactttcaatcggcacaagttttaatggtgtggctgctggtgacaaacagattcatcaacaagctctagattcattgcagtggaagtgatagcttgaattaatcttcagtgcaaataatcttctctgcaaatggtcttgattcacatgttcctaacgacatgtattaccgtaccattttctggcatttaagttgaaaaccatgtactcagaatcttg

SEQ ID NO: 33715 - DNA, 100 bp, Glycine max
  Clone ID: LIB3051-075-Q1-K1-F2
aaaaaaaaaaaaaaaaaaaaaaaaaaaaaaaacttaaaaaaataaaaaaaaaaaaaaaaaaaaaaaggacaaaatggaaaaaaaaaaaaagaaaaaaaaa

SEQ ID NO: 33716 - DNA, 317 bp, Glycine max
  Clone ID: LIB3051-077-Q1-K1-B4
gttcactgtttggagatcatttgttgcagaatccaaactatatgtgcattatttggaccagaagtctgtttgaggaagggatgggcttatgttagaactctatgaagggagattaatgtagaatgaaaactgttagcttcgttctcaaacgtacaagtttgaggctcaattacacattgattcattatataaatgttttaagaacctgagttagtaattcaacttgtatttataacatctaactttcagtgaaacaaaatccatggtatgataaactatgcagacctgtgacagaccttattcctcttataacaaaa

SEQ ID NO: 33717 - DNA, 399 bp, Glycine max
  Clone ID: LIB3051-077-Q1-K1-G7
tcacccttcttccctttctcacttaccactctcccccttctttccaaaacactcccttggccggtctattcacttcccctacccttccgtgatgatgtagatagagaataaaaagagaccagtgtgcagtgagaaagagattgctcacttcttgtgtgggtttgttttgttctttgtgttggaatttgttcatgggtgaagaaggagaagaggtgtcaagagagaaggaacaatacatgggagtttatggaaatgagtggttgtattgtggttgctctgcaaattggcgccgtttaagacaccagaattcctgttccatgccttttttcaagtgaaaaaaaaaacaattacttgttatctctcagcttttcttcttgagatcttaatatacattgactt

SEQ ID NO: 33718 - DNA, 89 bp, Glycine max
  Clone ID: LIB3051-077-Q1-K1-H8
aaaaaaacaaaaaaaaagaaaaaaaaaaaaaaaaaaaaaactttcaaataaaaaaatccaaacttacttctcgtgcattctaaacttaa

SEQ ID NO: 33719 - DNA, 107 bp, Glycine max
  Clone ID: LIB3051-078-Q1-K1-B12
tcaatggtataattacctttgatataggatcatatttatcccctctttcttcaatgctaaggtatggtttgatattagatcattgatatcgcactgagaaactagtc

SEQ ID NO: 33720 - DNA, 56 bp, Glycine max
  Clone ID: LIB3051-078-Q1-K1-C1
ggacgcaccctttatctgttcattaatcgcatcgggtgtgatggttacgcacaact

SEQ ID NO: 33721 - DNA, 402 bp, Glycine max
  unsure (1)..(402): unsure at all n locations
  Clone ID: LIB3051-078-Q1-K1-D4
atcgcgagcggcgcccttttttttttttttttgaaagaacttgtaaaaaaggataagcattgataaaatggcataataatttttatataaaaaagaattgtgctgcttaatcaatggcaaatactttgaggtccacttgctagagaaaatacatccatccacccgtagagaaaaggggggaataaattatactattatacaataaaataaaataaaattcagcatccttcttcgttcaacgtttctccaagtcttccctgacctagaagttggaactctccgttcaaatctctggattaacctgaactttgttctttgcaatatcatatctcatcctatccctaactataatattgngtaatgttgtggatagtagaagcagttcaaaatgaataaaataat

SEQ ID NO: 33722 - DNA, 309 bp, Glycine max
  Clone ID: LIB3051-078-Q1-K1-H7
gacacacatacggattctggttaaaagacagattgtgagaatggatcactgtccgttggtttgatctgaatgcagcctgctcctggctagatatgtcacgttcaacattcagttggttgtttatgccatctgttgtagagattgctatttcattcacataacatcactatttcattggtacttggcaaggctgaattcacttaacataatccttttcttcttcaaattaccgcaccgttgactcttggcaaacataccaattgggacaagtcatgtcaagttcttactagtataacagagacatgatac

SEQ ID NO: 33723 - DNA, 180 bp, Glycine max
  Clone ID: LIB3051-079-Q1-K1-A4
cccactcgtccggcaaagtccacaactggattctggagaagaaaaagctaagctgagtgggtgtttttcgcattcattttgataagttctcttattattcttctaaagtatttcttacaggatcactggtgagattgtaattgtgagtttgagggacaacaatagtgatcttctcccccc

SEQ ID NO: 33724 - DNA, 114 bp, Glycine max
  Clone ID: LIB3051-079-Q1-K1-B9
tcaaaacaaataacaaccaaaatataacatcatatttaaacaaaaaaaacatcaatactagcaaaagcttaaatataagggtcatagagatcgtaccaaaaaaactattcagca

SEQ ID NO: 33725 - DNA, 343 bp, Glycine max
  Clone ID: LIB3051-079-Q1-K1-E1
tctagatcgcgagcggcgccctttttttttttttttttttttttttttttttttggttggttttttttttttttttgtttttttttttttcatcaaaactcaatggaattttgcttcggttttttggaaaaacttacaaacatgatccccaaaagagaaacccagaaatgtaaaccaaagaaagggggcctataaatgggggggtattcaaacactaccagcttttgtctccatgattcacccaattttgaatttaaccaaggaaaaacatggggggatgtctgaaacctcccggtaaaaactttaacaccagtttgtgtcaccaaaagagcccgttaaaatt

SEQ ID NO: 33726 - DNA, 317 bp, Glycine max
  Clone ID: LIB3051-081-Q1-K1-D3
atggtttggcccttggggttgggccgcctttaaccaaaaagggggattggttgaaaagccgggggcagtagggaaccgaattggacatcaaggagtggtggccaatgataattaaggtccatgtcctgcgtgttgtgtgctcgtggtgatgttgttgctatgttggcgtgattgtgaatatgtttgcaaattgattggtgtggctcaatggtcattcatggctgcgtttaattttggttatttatatttttcggtgaattagtgctttgtttggaggcgggcacaaaaaaaaaaacttagtacaaatgtattgtgcg

SEQ ID NO: 33727 - DNA, 103 bp, Glycine max
  Clone ID: LIB3051-082-Q1-K1-D4
aaaaaaaaaaaaaaaaaaaaaaaaaaaaattaaaaaaaaaaaaaaaaaaaaaaaaaaaaagaaaaggtaaaaaaaaaaaaaaaagaaaaaaataaaaaaaaaa

SEQ ID NO: 33728 - DNA, 366 bp, Glycine max
  Clone ID: LIB3051-082-Q1-K1-G2
tcgccacgcgttcgtctagatcgcgagcggccccctttttttttattttttttttcgtttcgcgagggttgtttcattcgagcaacgcaataattaagttaattatacaaaatttgactgaattatatattctgcagtaatgtatgaaaattctgatatcattaaaaaattgtttcaattcttggtttcttctaatgggatttataattttgtgtttaaaggtaccaaattttaacatatggtattgcctcagttaatgtgtgaatgatttaacttctttggcttaatgctttattgatgagaaagttctccttcattgatcaccacgaggagcaatttccctgaggggcaagaatttatattctt

SEQ ID NO: 33729 - DNA, 67 bp, Glycine max
  Clone ID: LIB3051-083-Q1-K1-H8
tcgaaaaaaaaaaaaaaaaaaaaaaaaaaaaaaaaaaaaaaaaaaaaaaaaaaaaaaaaggaaaaag

SEQ ID NO: 33730 - DNA, 567 bp, Glycine max
  unsure (1)..(567): unsure at all n locations
  Clone ID: LIB3051-084-Q1-K1-A12.F1
gataacaataatcataatttcaatagttattaacatatacacgtctagcaccaaaggcttgaaaaacttctctctctaaggccaaagcgaagattaattgatgaggccctacctataacttatgaaataaaataaaaaattccacagtctcatatatgtcacaaaatgaacccaacttagaaaaacttggcatcatcaccacaaccaactaatttctcttggcaaccagcctcatcaagaagccatttctcaagcaaagagaatggcataatttctgcaccaataacatcaggcttgctttcatcttgcaaaacagtggcctcaggagacaatgaccgagagaattcatcagagtttgaagactccaaagactgatcaaaatcaaacaatgattcaaaattgttttcagacaattcagcactgcttggtggtccctttgctccaatactagaagcagtatcagcacctgcntgcagcaaagttgttgaaggagttctgagtcacagatgatgagtttgttcttgaggactttggtgggtttttcatccaaccctttagcattctagg

SEQ ID NO: 33731 - DNA, 543 bp, Glycine max
  unsure (1)..(543): unsure at all n locations
  Clone ID: LIB3051-084-Q1-K1-A12.F2
gataacaataatcataatttcaatagttattaacatatacacgtctagcaccaaaggcttgaaaaacttctctctctaaggccaaagcgaagattaattgatgaggccctacctataacttatgaaataaaataaaaaattccacagtctcatatatgtcacaaaatgaacccaacttagaaaaacttggcatcatcaccacaaccaactaatttctcttggcaaccagcctcatcaagaagccatttctcaagcaaagagaatggcataatttctgcaccaataacatcaggcttgctttcatcttgcaaaacagtggcctcaggagacaatgaccgagagaattcatcagagtttgaagactccaaagactgatcaaaatcaaacaatgattcaaaattgttttcagacaattcagcactgcttggtggtccctttgctccaatactagaagcagtatcagcacctgctgcagcaaagttgttgaaggagttctgagtcacagatgatgagtttgttcttgaggacttntggtgggttttt

SEQ ID NO: 33732 - DNA, 487 bp, Glycine max
  unsure (1)..(487): unsure at all n locations
  Clone ID: LIB3051-084-Q1-K1-A12.R3
ctccttcaacactttgctgcagcaggtgctgatactgcttctagtattggagcaagggaccccagcaggctgattgtctgaaaacattttgaatcattgtttgattttgatcagtctttggagtcttcaaactctgatgaattctctcggtcattgtctcctgaggccactgttttgcaagatgaaagcaagcctgatgttattggtgcagaaattatgccattctctttgcttgagaaatggcttcttgatgaggctggttgccaagagaaattagttggttgtggtgatgatgccaagtttttctaagttgggttcattttgtgacatatatgagactgtggaattttttattttatttcataagttataggtagggcctcatcaattaatcttcgctttggccttagagagagaagtttttcaagcctttggtgctagacgtgtatatgttaataactattgaaattatgatnntattgttatc

SEQ ID NO: 33733 - DNA, 70 bp, Glycine max
  Clone ID: LIB3051-084-Q1-K1-E7
aaaaaaaaaaaaaaaaaaaaaaaaaaaaaaaaaaaaaaaaaaaaaaaaaaaaaggggcaggcgatctaaa

SEQ ID NO: 33734 - DNA, 89 bp, Glycine max
  Clone ID: LIB3051-084-Q1-K1-F12
aaaaaaaaaaaaaaaaaaaaaaaaaataaaaaaaaaaaaaaaaaaaaaaaaagggaaagggaaaaaaaaaaaaaaaaaaaaaaaaaaaa

SEQ ID NO: 33735 - DNA, 165 bp, Glycine max
  Clone ID: LIB3051-084-Q1-K1-H7.R4
ggctgtcaattatatgactggagagctgtgccattaaagatcataaacactgggcggtagcatctgctatagaattaagagaaggctagacattacattcactacaacactactgaaccgccgataaatattatttctccagcttaaattgcgtccggcctaaat

SEQ ID NO: 33736 - DNA, 98 bp, Glycine max
  Clone ID: LIB3051-085-Q1-K1-A8
aaaaaaaaataaaaaaaaaaaaaaaaaaaaaaaaaaaaaaaaaaaaaaaaaaaaagaaaaactggtaaatatataaaaaaaaaaaaatgggcgtatga

SEQ ID NO: 33737 - DNA, 79 bp, Glycine max
  Clone ID: LIB3051-085-Q1-K1-G5
aaaaaaaaaaaaaaaaaaataaattaaaaaaaaaaaaaaacaaaaaaaaaaaaaaggaaaaaaagaaaaaaaaaaaaaa

SEQ ID NO: 33738 - DNA, 169 bp, Glycine max
  Clone ID: LIB3051-085-Q1-K1-H3
gcgatcgcgagggccgacctttttttttattctattttattctttttccagtggtaaatttatggggacaatacgtaaaaattacatacttaagttcatgatcctccttcaagtcccaattgcatgaacttggagactcttttgagttgaccttactacactgttccac

SEQ ID NO: 33739 - DNA, 65 bp, Glycine max
  Clone ID: LIB3051-086-Q1-K1-C1
gcgaaaaaagaaaaaaaaaaaaaaaaaaaaaaaataaataaacaaattataaaaataaaaataaa

SEQ ID NO: 33740 - DNA, 87 bp, Glycine max
  Clone ID: LIB3051-087-Q1-K1-F5
aaagaaaaaaaaaaaaaaaaaaaaaaaaaattaaaaaaaaaaaaaaaaaaaaaaaaaaaaaagaaaaataaaaaaaaaaaaaaaaaa

SEQ ID NO: 33741 - DNA, 82 bp, Glycine max
  Clone ID: LIB3051-087-Q1-K1-H7
aaaaaaaaaaaaaaaaaaaaaaaaaaaaatttaaaaaaaaaaaaaaaaaaaaaaaaagaaagaaaaaaaaggacgaccgttt

SEQ ID NO: 33742 - DNA, 220 bp, Glycine max
  Clone ID: LIB3051-088-Q1-K1-A2
ttcccgggcggacgcgtgggggcctccacattgatgacagatcttcaggaccgtatcctctaaaatgtgtatgctctgtatttaagagaatctttggagtttgttacatatgccagccaattatgtctcaaatgtaatagaagagttcaatatacaattctattagaaaataagatgctatattatcaggcttgtcataaactctaatataacattaaaa

SEQ ID NO: 33743 - DNA, 113 bp, Glycine max
  Clone ID: LIB3051-088-Q1-K1-D1
aaaaaaaaaaaaaaaaaaaaaaaaaaaaataaaaaaaaaaaaaaaaaaaaaaaaaaaaaaaggaaaaaaaaaaaaaaaaaaaaaaaaaaaaaaaaaaaataaaaaataaaaaa

SEQ ID NO: 33744 - DNA, 437 bp, Glycine max
  Clone ID: LIB3051-088-Q1-K1-E2
ctagatcgcgagcggccggcctttttttttttttttttacaaggccaactctagtcggcggatgacattaatattttgacatctattaaaccatattccccataaaacaacatttgactggctaccatactgtgaacaattgcactgcactattgcacaggacaacgtactagaactccatcgaactaatataaacgtttgctcaattcatggtatgcgccatgaagaacaacaaacaatatggctgtccaatgcagagtcctatagttaccacatatatagctttatcgacccctgatacgatgaacgatcttcgtgacaagggaacatatcttaatcacaacgaattcatagctgcaatgcttataaaaattactgatcacatccttgaacatgccatcgctggcactggtttatatgtgcttattcttgatgat

SEQ ID NO: 33745 - DNA, 293 bp, Glycine max
  Clone ID: LIB3051-090-Q1-K1-B3
ctagatcgcgagcggcaccttaaattttgtctgaaagccgagacctttaaggtcactttaatagcatttggtgatgaaaattgcgaccctatgcacttaaatatgctctggcaaaggaccgttgatatgaggattttctccaagtggagatccagatatgcatggaaaccccagaggatgagtggcagagcattccatggggttacacatccggtcccactgttaacccaaaggttgaggttttacatcaccgaggaacctatctaatgtctctgaatgaacctcttatttgg

SEQ ID NO: 33746 - DNA, 277 bp, Glycine max
  Clone ID: LIB3051-090-Q1-K1-C7
agatgataagccttctgacaaggtgcaacgatattgtgaataacctgacgagtttattaggggacgtgccctatcatccactttgataaatatggcaccgtactcaactgtagaccgaatccaatacaagaaaaaatgcgggctagttggattgtgaatgacttgctcgaggaaatgcatgaacctagaaatataatccttcaatagccgtttattttgagatttttgtatcttcacaatgtaaatgtactaccatattgatagtggcgtctcattt

SEQ ID NO: 33747 - DNA, 91 bp, Glycine max
  Clone ID: LIB3051-091-Q1-K1-A3
gcgaaaaaaaaaacaactatacttaaactgcgatcattttatgtcaagatgatcttacatgagggcatgggtttattcactaggtgaggaa

SEQ ID NO: 33748 - DNA, 168 bp, Glycine max
  Clone ID: LIB3051-091-Q1-K1-A7
cccacgcgtccgagttattctactaaaacctgagcattagacatataagtcggctgtgtggattttcaggggaaaaatgccggattgcatagacagcgttctgatttgagtgtacgacaagacccccctatatcatttgggttaatattacataattatgactttgct

SEQ ID NO: 33749 - DNA, 63 bp, Glycine max
  Clone ID: LIB3051-091-Q1-K1-D3
aaaaaaaaaataattatctacacacaccaaattcaattttaaagaaaaagaaataataaaagg

SEQ ID NO: 33750 - DNA, 229 bp, Glycine max
  Clone ID: LIB3051-091-Q1-K1-E8
gaatgtattagctgcggatgtataatgtactttgcgatgtaactatattagctgcattggacgttgggatgaagaatgtgagagattagcccctgaatcttcagaataggtcacaatgcattggaaaactcttgactttgtgcactcaaattgcgtggttatatgattttatcggtttgtttcactccgcaaaaaagaagaaaaaaaaagaacatataataaaaaaata

SEQ ID NO: 33751 - DNA, 266 bp, Glycine max
  Clone ID: LIB3051-091-Q1-K1-F8
cccacgcgtccggcgataatgcgctggcgaagggatccaaggaggaagtgctgcggtggtgatggtgtgggtggtgtcagagaaagaagggtgatcggagaccagtgcgagaagctcggaggagagagaaaaaagaaaaataatctcatattttttattttatctgatgtaaaaaatttcatcatatcttaatcaattttgaccgtttgattttctaattttaaaattgaacggatgcgatgcattttaaaattcaaaaaatacaa

SEQ ID NO: 33752 - DNA, 90 bp, Glycine max
  Clone ID: LIB3051-092-Q1-K1-A3
agttaatctagtgatgttaaatttgtcactaatctgaatatttttttataattaatcttgaacttattgataccatattctctttttcat

SEQ ID NO: 33753 - DNA, 530 bp, Glycine max
  unsure (1)..(530): unsure at all n locations
  Clone ID: LIB3051-092-Q1-K1-C4.F2
aaatcgcattttatttatataaattcttcctaatgcttgtaacagcaacacacagtttgacaagatgtcatttcctcagccaaataaaaaagagacaactgaaatttttttgtagaagagaaaatatatttcttggaaaagtaagtttcatagaggatgccataactgattcagtcttcatattctgtttcctcatcatcatcttcattgtttcctcctgcatatctccaaccatcttcaacattgtcacgatcctcttctgtttcttcgctatcttcttcatcgaaaggttcatctttcacgggccaagaatttttatttacagttaaagagggagtggacagtttgcgttttgcaattttggaaggaggcaacttgaggtttggtttaggcttactctgcttctgaattttaccattntgatcgtttcgcaacataggcatcatggtcacttgcttcatccatttcattgncaacattagcctgagcatgctctgcattttcatcagccataagccccggatgctccc

SEQ ID NO: 33754 - DNA, 251 bp, Glycine max
  Clone ID: LIB3051-095-Q1-K1-E6
tgaaaacatatacgatgggaacttacgtgccccacataagacggttagcaccaaagctagagacaacttgggacaagagaggagacaaatccagatgagaaaactgccctcttgacaacctgaaaaggccactaaatttcacaaatacctgtcaaaaattcgaaatttagtattcctcaagctgaagcatttactaataaaaacatttaagcatgctcctcttaggaggaaaaaaaaaaaaaaaaaaaata

SEQ ID NO: 33755 - DNA, 104 bp, Glycine max
  Clone ID: LIB3051-095-Q1-K1-E9
aaaaaaaaaaaaaaaaaaaaaaaaaaaataataaaaaaaaaaaaaaaaaataaaaaaatgtgggaatataaaaaaaggaaggggggggcctccccttttaaaga

SEQ ID NO: 33756 - DNA, 68 bp, Glycine max
  unsure (1)..(68): unsure at all n locations
  Clone ID: LIB3051-095-Q1-K1-H5
aaaaaaaaaaaaaaaaataaaactaanggtgtgtttatatgagctgaaaaaaaaaaaaaagaggtgca

SEQ ID NO: 33757 - DNA, 73 bp, Glycine max
  Clone ID: LIB3051-096-Q1-K1-B7
aaaaaaaaaaaaaaaaaaaaaaaaaaaaatttaaaaaaaaaaaaaaaaaaaaaaaaaaaagggaaaaaaaaaa

SEQ ID NO: 33758 - DNA, 348 bp, Glycine max
  Clone ID: LIB3051-096-Q1-K1-C8
ccagtttccagtgagacaactccccaagctgaaggaaattagaagtggaagctcaacagggagcatgttttcattgccaccgttgaaaataagtggttcagaagaaacatggaagaaaatcccggttctggaacaaacagccaagtaacctgctgggttacgttgagagcaatgtagtgggatgtggttattttcccatctatttttttcatttaaatcagatacctctgttatgcacgccttagatactaacacagatgtaagattctaaatgtaaagatggaattaattttatagaattataggttccatataataaaacctctggattttgaagaaaaaaatata

SEQ ID NO: 33759 - DNA, 51 bp, Glycine max
  Clone ID: LIB3051-097-Q1-K1-B5
ctgtaatgtatacgtattcatgaggtatgaatatttatatattggtcccct

SEQ ID NO: 33760 - DNA, 204 bp, Glycine max
  Clone ID: LIB3051-099-Q1-K1-H11
actaatggggaccctcacaacttataacaaaactttcttaaacttctttactaatttaagatttttcaataaaaaaaacttcattataaatatacttttaataaacaaccaactctctattatattgtgatataaaacaataatacttttatatatatattatcttatccttaaaaaacaaaaaaatatgcattccctataaaa

SEQ ID NO: 33761 - DNA, 136 bp, Glycine max
  Clone ID: LIB3051-100-Q1-K1-C1
gaagaagatgttcaatctcgagtttaattccagctctccgcgctcgttctcaagctccgtttctcggcgctgtcggcggtgacgttctctgacgaggttccgccgttggctgcgtcacggcgtcccggtctgggtc

SEQ ID NO: 33762 - DNA, 106 bp, Glycine max
  Clone ID: LIB3051-101-Q1-K1-A10
aaaaaaagtacatatactaataactagaaataacaaaaacaaccaacgtgcacataatgagtgaggatatatataaaaacaaaaagatacatgaggccatgcttgt

SEQ ID NO: 33763 - DNA, 327 bp, Glycine max
  Clone ID: LIB3051-102-Q1-K1-A4
gtttttgcaacatcaaacagcagaggtaccattgttgattctggaacaactttggcgtacgttgcggaagaggcttatgatccctttgtctctgcgattacagcttcaattccacaatctgtacacactgttgtttccaggggaaatcagtgttatttaatcacatccagtgtcactgaagtttttcctcaagtaagtctgaactttgctggtggtgcatctatgattttaaggcctcaggactacctgatacagcagaattccattggtggtgcagcagtgtggtgtattggctttcagaaaatccagggtcaagggataacaatt

SEQ ID NO: 33764 - DNA, 77 bp, Glycine max
  Clone ID: LIB3051-103-Q1-K1-B12
aaaaaaaaaaaaaaaaaaaaaaaaaaaaaaaaaaaaaaaaaaaaaaaaaaaaaaaaagaaagagcaaacgatctaac

SEQ ID NO: 33765 - DNA, 342 bp, Glycine max
  Clone ID: LIB3051-103-Q1-K1-H2
gcttcctggtatctgaaatgaagtacatggattaggttcaatcataacgctctctagttaattgtgtcactcaaagttcggcacaaagggcagaaatggagaaaaaggaaataagtgtcttccattctgggaggggtagggtttatcgtgatggtgtttcaattcaaaagtttgaaatttctttgtctttgatttcatgtttttgttaccctgattgatcatatttttttcatattaacaattgaaataatacatgtgctgtctttcttttcctcagaaaaaaacaagtatgagtactacaccacaagagaagtttgataggtttcacgattggaaataaaa

SEQ ID NO: 33766 - DNA, 210 bp, Glycine max
  unsure (1)..(210): unsure at all n locations
  Clone ID: LIB3051-104-Q1-K1-A1
gcgccctttttctataatgtatatttttgcacctaattcctatgtatacaaaacaatccagaganttgggtcaaaaggtatatgggggcactcctcatactttcatttattttcattcatctcttccaaacacaatgtataaaacgatattggatacatgaaactcaattaatgcgtattcagttgaatgcttcaaaaaaaaaaaacaat

SEQ ID NO: 33767 - DNA, 180 bp, Glycine max
  Clone ID: LIB3051-104-Q1-K1-E2
ggataagtctccaagcactctgttctcaacttaagttgccttccaatgtatccaatctttgctttcgtctttccttttcgcagataattgtgagacttatgatatatctgtatctcacttcatcaataataaattataataaagatgagcaatcattacaacttttgttaaaaaaaacaa

SEQ ID NO: 33768 - DNA, 56 bp, Glycine max
  Clone ID: LIB3051-104-Q1-K1-H5
accgactcgtccgcccacgcgtccggcttagcatatctatgattgtcttttcttgt

SEQ ID NO: 33769 - DNA, 300 bp, Glycine max
  Clone ID: LIB3051-105-Q1-K1-A9
gctatatgaacgacttgactggctctgaaacaacattgcaaacatggcgtatagatttgggagttaaacgcagggaagttgagtttacttcggccattatgatctccagtctctaattttcttgccctacttagattttcattacttgagcatgtatttttcttgaaaaagaacagcggtttgttactgaagaacaatttgaattttttttccatgtataaccaaatagcattgtttactatttgatttgttaagtcaattgaattatataaagcctcgtattatgtcaaaataataaag

SEQ ID NO: 33770 - DNA, 324 bp, Glycine max
  Clone ID: LIB3051-105-Q1-K1-E10
gtgatgcatcagcagagcatcagagtgctactgaagaagttggtggtgataaaagtgatgctgctcaagaccaaagctgccattagtagcaatggatttgacctataatttgcattttgacggtgactagagttgcttgtgctaaaaaaactagaagttggagttttgaagcagttgtaaccatgaattagataactcttcgcaagtatgggattatatgacgtgctaagattgcactatgagaccttgatctctcattcatttgcgaatgcacgattgtggcatttgtaacatttgacatctcataatataatcgtctacaat

SEQ ID NO: 33771 - DNA, 304 bp, Glycine max
  Clone ID: LIB3051-105-Q1-K1-F7
cccacgcgtccgctctctaagctaccagtaccaggagctccctatctacagtgtctctctgtctctgcaaaagcaacgaagctgtgttctgatccttcaaattaggttgtttgttatttttggagacttaaatggatgctaagccgtggattaggtcaatttgatctcaactgaaactttttagcttttctgatggactcgaaaactagttctagatctctcccgaaacaccatcagaagacagctgggattcgaacccctgagacgaaagatgcaaggtcttcttttcagaagatggggaaaa

SEQ ID NO: 33772 - DNA, 534 bp, Glycine max
  Clone ID: LIB3051-106-Q1-K1-A7.F1
ctcataaaataaaactttcaataaatttagtattgaatttagcgagctactaagaagtgaagaactgggcaatttgcaatgtacatcgacagagttttcatgtcattgccatcatagattacttgaaaacctatttttagcacattatactaagtaaaaaataaaaataaataatcgaaacgatgacaatatttacatgtcaatacttcgcaaatgttaaataattatccaaagtgcaacaataatagaaacaactatgcagctggaggcctgagctcatgatcatgtgatgtgtctctgacagattgaggaagatattgccacattgggatgtagccatagtttggatatacggccatcttgttcacccctgcttgatatgctgcagcgcaggcttacaggtggagccataaccctgctggtgcacgggcaaggccttcaactgcttctcaatcctttccttatctgctttcaggacaagtttctcttcgcggattcgggttttcgctgcctttaaacattttatttcctcta

SEQ ID NO: 33773 - DNA, 231 bp, Glycine max
  Clone ID: LIB3051-106-Q1-K1-B3
gttcctgagagagatgaatgtgatgtacagggtgttgatggctggtagtggcagtgtgtgtccctttgctcgacttgtaatcatttcttatggtggctgtattattgtaattaaaagtaatctcatcttctatgtttgctgctatatttttataattaaatctaatcatcgctatcctaaaaacataccgctttctttccattgttctaatacaagcggcggaccttctat

SEQ ID NO: 33774 - DNA, 71 bp, Glycine max
  Clone ID: LIB3051-106-Q1-K1-D11
aaaaaaaaaaaaaaaaaaaaaaaaaaaaaaaaaaaaaaaaaaaaaaaaaaaaaaaaaaaaaggaaaaaaaa

SEQ ID NO: 33775 - DNA, 404 bp, Glycine max
  Clone ID: LIB3051-106-Q1-K1-H11
ctcagattgatgcttttctgagaagtgaccagaatcgttgtgctagcaacctacttgctgcctacacagatggagatgttgaagaaatcaaacgtattgctcagtcaagtgttatttcacatcttgaccatgtgatcattaagcttgcgaggaaacttccaacaggcgatgtgagttcattgaaggctaacaaggctgaagatgaagaggagccactcgatgaaaatgacctcacttaacctggctctttttctatctgtgtctatttagtaggaatgttgatgaacccatttcaatttaatgagtgaattgaattgatcagttatagattggtttttgtataaaaaaaacagttcttttgtgatacatgtgcaatgcaggtaataagaggagcgctgttgttt

SEQ ID NO: 33776 - DNA, 352 bp, Glycine max
  Clone ID: LIB3051-107-Q1-K1-B1
gtgaaagagaagaagaataaagaagacaaagacatgaaggagaagaagaaaaaagttactgggagggacaagaccaaggatcttagcactctgaagcagaagcttgaaaaaattaacggaaaaatacaaccactccttgaaaagaaggctgatatagaaaggcagattaaagaagttgaagctgaaggtcatgtggtcaatgaggagaacaagaatgaggtacagtagctgttcaagatgttcaggacacacttatactatattgcataatatacaaactatgtatgatctttttatgttgttttgacttttgtgtaataaagatgtctttctatttgagtaaaaaaaacaa

SEQ ID NO: 33777 - DNA, 99 bp, Glycine max
  Clone ID: LIB3051-107-Q1-K1-G6
cccacgcgtccggcaacgtgcgccctcctcgggtcaagctcagtcagcactgcaccggagggttttctttgcccctttcgatgagtaacgccacagact

SEQ ID NO: 33778 - DNA, 56 bp, Glycine max
  Clone ID: LIB3051-107-Q1-K1-H6
acgcgttcgcgattctgccgaggatgctgcacgtgcctacgacaccgccgctcgga

SEQ ID NO: 33779 - DNA, 102 bp, Glycine max
  Clone ID: LIB3051-108-Q1-K1-A6
aaagaaaaaaaaaaaaaaaaaaaaaaaaaataaaaaaaaaaaaaaaaaaaaaaaaaaggaagaaaaaaaaaaaaaaaaaaaaaaaaaaaaaaaaaaaaaaaa

SEQ ID NO: 33780 - DNA, 53 bp, Glycine max
  Clone ID: LIB3051-108-Q1-K1-B11
tcggaaaaaaaaaaaaaaaaaaaaaaaaaaaaataggacaaaagataataaaa

SEQ ID NO: 33781 - DNA, 391 bp, Glycine max
  Clone ID: LIB3051-108-Q1-K1-H3
gaaagatgcaactcactgtcaacagtcaaatgaggatgctttactaaagataatagcagggcatatggaagtttcccaaaagacttgctatgctttgcccacataaaatttcttgctagatagcccatacataagtgcaggataaagtcactagcacaatcagagccaaattcccaaatttggatcaagtcctccatttgtatttgagtagattgaaaccttttgggtgagagtaactcagaaagccacgtctcacacttcaagagaagtgtctccactccaaaataaagcgcaccctcataaagaggaaggaaattatccagcgtaatatccaatacgcagccatacatatgcttaagaatttgcataaattccctcacctagatcgcga

SEQ ID NO: 33782 - DNA, 203 bp, Glycine max
  Clone ID: LIB3051-109-Q1-K1-F7
cccacacgttcggttctagatcgcgagcggctggctaacattggaaaatggggatcgaataaacaaccggggtcgggcgttctacatgctccacccttacgtacacatccatcccaacgactttctctcctattacgccacctaaattcaattgactagaccaccgttatacaaccaatgatacacaagaaaatcacaccaat

SEQ ID NO: 33783 - DNA, 109 bp, Glycine max
  Clone ID: LIB3051-110-Q1-K1-B12
tgagaatagaaggttttcttttgttaaatacatgttatttgtaaggtgtttattcattatgagatgtgatcatattattcataaggtatttatggatgtgattttgctt

SEQ ID NO: 33784 - DNA, 51 bp, Glycine max
  unsure (1)..(51): unsure at all n locations
  Clone ID: LIB3051-110-Q1-K1-D2
tccacgcgtncgaaaaaaaaaacaaataatttaataaaaaaaggacataaa

SEQ ID NO: 33785 - DNA, 152 bp, Glycine max
  Clone ID: LIB3051-110-Q1-K1-G9
atcgttcttaaagaagggtgtgaggcttcaaactgcactgcatgctccgctgtaccgtatcataccaggaacaggaactaccttatgcatcatgtatttctctcttcatgcaactttaatgtcagacttattattattatcaacaaacacaa

SEQ ID NO: 33786 - DNA, 75 bp, Glycine max
  Clone ID: LIB3051-111-Q1-K1-C10
aaaaaaaaaaaaaaaaaaaaaaaaaaataaaaaattaaaaaaaaaaaaaaaaaataaggaaaaaagtaaaagtca

SEQ ID NO: 33787 - DNA, 95 bp, Glycine max
  Clone ID: LIB3051-111-Q1-K1-C9
aaaaaaaaggaaaaacaaaaaaaaggtattaaaatttaaaaaaaaaaaaaaaaacccaggcgtcctgccacgcttccgctagttctagatcgcga

SEQ ID NO: 33788 - DNA, 178 bp, Glycine max
  Clone ID: LIB3051-111-Q1-K1-H10
ggaatttgtgttttctttcgcttgtttgtttgtttaattcaataaaggaaattaggcgtgactcttgttgagtatgctctgcctatttgaaaatttccacacctcttttaattgtcgtaatgatgtgtgaagtgtgtgttattttaaaaaaaaaaaaaacaaataaaaaaaaaataaa

SEQ ID NO: 33789 - DNA, 260 bp, Glycine max
  Clone ID: LIB3051-111-Q1-K1-H4
cccacgcgtccgggattgtggaaatccatggtgcaagtcactaccatacaaaggtaaatggttatatcatacttggagaaatttcagctgctcggacccattggaaaattcaagcagcaagtagtactgagaatattcactttatagtttatatatatgtataatcttgtatatttattgaattattaattgttacaaatattatatgtcaaatgtatataacgtgtccacattttattaaaatgtaacattcacagttt

SEQ ID NO: 33790 - DNA, 98 bp, Glycine max
  Clone ID: LIB3051-112-Q1-K1-E7
taaaaaaaaaaaaaaaaaaaaaaaaaaaaattttacaaaaaaaaaaaaaacaaactaaggaacgcatacatacaaaaataaataactataatataaaa

SEQ ID NO: 33791 - DNA, 574 bp, Glycine max
  unsure (1)..(574): unsure at all n locations
  Clone ID: LIB3051-112-Q1-K1-G10.F1
ctcataaaataaaactttcaataaatttagtattgaatttagcgagctactaagaagtgaagaactgggcaatttgcaatgtacatcgacagagttttcatgtcattgccatcatagattacttgaaaacctatttttagcacattatactaagtaaaaaataaaaataaataatcgaaacgatgacaatatttacatgtcaatacttcgcaaatgttaaataattatccaaagtgcaacaataatagaaacaactatgcagctggaggcctgagctcatgatcatgtgatgtgtctctgacagattgaggaagatattgccacattgggatgtagccatagtttggatatacggccatcttgttcacccctgcttgatatgctgcagcagcagggctacaggtggagccataaaccctgctggtgcaacgggcaaggccttcaactgcttctcaatcctttccttatctgctttcagaacaagtttctcttcgcgtattcgtttttctctgcctttaaacattttatttcctctagtaatttntcatttgtttttttgagctcctgggcttcg

SEQ ID NO: 33792 - DNA, 567 bp, Glycine max
  Clone ID: LIB3051-112-Q1-K1-G10.F2
ctcataaaataaaactttcaataaatttagtattgaatttagcgagctactaagaagtgaagaactgggcaatttgcaatgtacatcgacagagttttcatgtcattgccatcatagattacttgaaaacctatttttagcacattatactaagtaaaaaataaaaataaataatcgaaacgatgacaatatttacatgtcaatacttcgcaaatgttaaataattatccaaagtgcaacaataatagaaacaactatgcagctggaggcctgagctcatgatcatgtgatgtgtctctgacagattgaggaagatattgccacattgggatgtagccatagtttggatatacggccatcttgttcacccctgcttgatatgctgcagcagcagcagctacaggtggagccataaaccctgctggtgcaacgggcaaggccttcaactgcttctcaatcctttccttatctgctttcagaacaagtttctcttcgcgtagttcgtttttctctgcctttaaacattttatttcctctagtaatttttcatttgtttttttgagctcc

SEQ ID NO: 33793 - DNA, 142 bp, Glycine max
  Clone ID: LIB3051-113-Q1-K1-D7
aaataaaataacatacaaaaaaaatatatattaacatttaaaaaaaaaaaaaaaaaaaaaggaaaaaggtaaaaataaaaaggttggcccctctaaaagaatccatcttacataaacttacatacaactatataagctcaca

SEQ ID NO: 33794 - DNA, 151 bp, Glycine max
  Clone ID: LIB3051-113-Q1-K1-E5
taccaattcccaattcgagccacgcgtcacacatacgcctatcaacatcacaacatatattataaattaaacaaactaattaggcctatccggtatggagaatctaagttacagtacccttccttgcaactaatacgatatttataatgga

SEQ ID NO: 33795 - DNA, 237 bp, Glycine max
  Clone ID: LIB3051-114-Q1-K1-C10
aaaaagttctggcttgtacatctttatattattaatgttaatactttgtggggtccagaatagcttaacagatgtatctgtggctgcgacatagctcataattggctccgaagactcttgtgcatgtttagttgaaagggtatagctatggttctcacaattccttcttaaaaaaaaaaaaaaaaaaaatatgaaaaaataaagaacaaataaaaattaataaaaaataaacctatt

SEQ ID NO: 33796 - DNA, 110 bp, Glycine max
  Clone ID: LIB3051-114-Q1-K1-D6
cccacgcgtccgcccacgcgtccgatatatttaaaaaaaaaaaaaaaaaacaaaaagaaacgataaaaaaaaaaaaaaataaaaaaaaaataaaaaaaaataaaaaataa

SEQ ID NO: 33797 - DNA, 66 bp, Glycine max
  Clone ID: LIB3051-115-Q1-K1-F11
aaaaaacatacgaaaactcataaaaaaaaagcaaaaaaacaatataacctatacggaagggcaaag

SEQ ID NO: 33798 - DNA, 369 bp, Glycine max
  Clone ID: LIB3051-116-Q1-K1-B9
caagttgcaggataatatcgacctcttctgccacacaaggcacaatattaataccatggttaataatatgagtgagatgcctggcattatgagccaaatgccgccactgcaagttaccattaacgaggatcttgcaagtagtattctgcctaatagaacatagcgggcaaagtgctgactccatcaatatttccaacacaaatctaagtgcatcagtgtagagaggttcgcgttcttagctgcaactgttttggtgctagctacatgacattgaggagctagggagtatctcaggactttccagagtttctaatccatctttgatcttattgctccctgctgaaagaaaccttggaactcctgttgtat

SEQ ID NO: 33799 - DNA, 268 bp, Glycine max
  Clone ID: LIB3051-116-Q1-K1-D5
attgtatgcagggttctttctcatggcattaattagatgaggatatcgtggaaggctgaaacaatgttctcgacacatacaccaaaataaaaggaatatatgttttgcatctaagatttattaaataaagccgaatgttggttcttgtatcattaagattttttttttaattgtcgaagactttatgtattcatattcaccttgacttctacggtcaaatttttcataagtggaataaaagcaacttgttatacaagttttttttttt

SEQ ID NO: 33800 - DNA, 187 bp, Glycine max
  Clone ID: LIB3051-116-Q1-K1-H5
cccacgcgtccgggactttagttttcaaatcagagtaattttgttatcatatttggttgataatgcaagattatagaccaatttattgattttgatatcatcattattactatttatattataaatatcattaatgtatttcaggataatttttttcgatattgtgaatttgtgattggaaccttag

SEQ ID NO: 33801 - DNA, 303 bp, Glycine max
  Clone ID: LIB3051-117-Q1-K1-E3
gcgacggccgctcgcgatctagaacttcatttcaagcacgactaaaaacacctttttcctgtcacaccgacagtttcaagaagcaaggaggagaattcacataaatcatggtggagattcacgaagaaatcgacccctttgatcaagaagaacatgaagaggaagaaaccgactatgatcagctaaagaagcggatgcagaaggatcggatcctgctgcagcagatgaaggagaaacgccccaaagaagaggcaggccaacaagaaaaacaagaagcatctatgcggaagaagatgtcaagag

SEQ ID NO: 33802 - DNA, 380 bp, Glycine max
  Clone ID: LIB3051-117-Q1-K1-F1
gaaactttcagagctaggctttgtgccaagttcaaagccgatttctattaaggaagggaccatactggcacaaggtgctgtaggagttgtagttgctaccgcagtggtgatcctcagttacttgtatgaagttcgcaaaagagggaagtaaactggatttgttcatctcttggctgttacggttgcgtgaccctgaccctgacccatagtgtgcaaaacagggttcatttttgcagcttcagtttctgtttacttagtaacaataaagaataatgctacagacattcagacttttatatgaatagactaaaaacatccctgagtactcaaattgagagcaacttcattatacgtaaatacaaattttaacattcccagtt

SEQ ID NO: 33803 - DNA, 52 bp, Glycine max
  Clone ID: LIB3051-117-Q1-K1-H3
aaaaaaaaaaacactctacaatacaaaaaattaacctaaatgaataaacaaa

SEQ ID NO: 33804 - DNA, 482 bp, Glycine max
  unsure (1)..(482): unsure at all n locations
  Clone ID: LIB3051-011-Q1-E1-G5.F5
ccccccaggtctctgtcgcactcctctgtagtgcttcttctcttccgcgttcgggttactctgcgacaccgtttcggtaacctcgggctctccaaattggatccactcggtcttcttcgggagagagatttgcagcgacggccttcgactcgatttgcagcgtgtggttggaaaactgaattccaattgtggctcaattatttcgggttttggctcaaactcgaatgcagaaaactggttttgttctgtggaagaagtagtagtagttgggaaatcgaggaattcggagaagatttggtcaactgtggtgaatgaatcggaagttgaagattgggaacagagggaggnnttgtgtttggttcctgaaattgggtgaaggggagagagttctcctaaaagatgcagcttgatgcgattgagagcagagacttcaagagcgtttgccatgagatattgagaggagaaggagctttagaaatgtt

SEQ ID NO: 33805 - DNA, 681 bp, Glycine max
  unsure (1)..(681): unsure at all n locations
  Clone ID: LIB3051-035-Q1-K1-E3.F5
ttcttaacccatttgtgtcagtagaactnnnactcctatggtcgaaaaagagcataaagctgttagttcggtgaaggaagaatacagtttaatgtttgggaatgggatttgtggtgataatttggtgccatctcttgatgcttattggttacaactcgaagtcctgctcctggaagcagtggcaatgcaagaactactgtgaatctgaagcttaatgaggaaactgcaatggattcgactgtttcaactgttaaccatcatcactctgacccaaagtgccaaaattctgttaataggtcagctgcagtaagccctgtcaagtgctccttggtaagcagacaatttaataattatgggcacgcaaatgacgtagggttgcctatgaatttgtctttgcaaactaaaggcgaccaatctggttttggaaagtgcaaaggcagtttaactaatgattttgtgtacatgggttgctcctataaaccacagtcatatatntaattactatatgcatggtgatgttgctgcgtctgctgctgctaacctggccgttctttcttcagaggattctagatcagaaggtcatgtgtctggcaacttgnggaaagcaacatctggaaacacttatttgctagcaaaagcattctcccaaacagcttcacgcttcttttggccaagttctga

SEQ ID NO: 33806 - DNA, 394 bp, Glycine max
  Clone ID: LIB3051-035-Q1-K1-E3.F6
ccttcccaaaaccaaggatgtccggccaccacaaccacaacagcaatccccagcttctgtcttaatgactaatgacacagtaaaggaagctgcggatactgcagcctacagagttgctgatgctgaaagtaaatcactatctggctgcagaagcagtaaaggaggctgaaaaaatatcattgctggttgagacatagagattcactgttacagctagcaaaggatatatatgaacactgttcccgtggtgaaattatgctcttgggtaacgatggtctaagtgaggtctataggatagagtcgtgctgatgttggttactagatgaaaaattgtggagatacaatgaagtactattttaacttttccaaaaacaacaaactagcgggcggctct

SEQ ID NO: 33807 - DNA, 621 bp, Glycine max
  Clone ID: LIB3051-035-Q1-K1-E3.R5
catttgtgtcactagaactaactcctatggtcgaaaaagagcataaagctgttagttcggtgaaggaagatacagtttaatgtttgggaatgggatttgtggtgataatttggtgccatctcttgatgcttcattggttacaactcgaagtcctgctcctggaagcagtggcaatgcaagaactactgtgaatctgaagcttaatgaggaaactgcaatggattcgactgtttcaactgttaaccatcatcactctgacccaaagtgccaaaattctgttaataggtcagctgcagtaagccctgtcaagtgctccttggtaagcagacaatttaataattatgggcacgcaaatgacgtagggttgcctatgaatttgtctttgcaaactaaaggcgaccaatctggttttggaaagtgcaaaggcagtttaactaatgattttgtgtacatgggttgctcctataaaccacagtcatatattaattactatatgcatggtgatgttgctgagtctgctgctgctaacctgaccgttctttcttcagaggattctagatcagaaggtcatgtgtgctggagcttggaagaaagcaacatgctggaacacttatttgctag

SEQ ID NO: 33808 - DNA, 302 bp, Glycine max
  unsure (1)..(302): unsure at all n locations
  Clone ID: LIB3051-035-Q1-K1-E3.R6
aggcccgaatctatttatagaccttacttacaccatcttaagccaanaggataatttcaccacgggcaacattgttcatatatatcgttttgctagctgtaacattgaatcactatgttcaaccagcaatgatatttttttcaggctcctttactgcttgtgcagccagatatgatttactttgagcatgaggaactctgtaggctgcagtgtgcgcaggttcctttattgtgtcattggtgattgacacagaagctggggattgctggtgtgggtgcggggggcggcgcattctttggttg

SEQ ID NO: 33809 - DNA, 662 bp, Glycine max
  unsure (1)..(662): unsure at all n locations
  Clone ID: LIB3051-037-Q1-K1-C4.F5
tctatttatagaccttacttagaccatcttaagccaagaggataatttcaccacgggaacattgttcatatatatcttttgctagctgtaacattgaatcactatgttcaaccagcaatgatatttttttcagcctcctttactgcttctgcagccagatatgatttactttcagcatcagcaactctgtaggctgcagtatccgcagcttcctttattgtgtcattagtcattaagacagaagctggggattggctgttgtggttgtggtggccggacatcctttggttttggtgaaggtgattttgtccccgaggaggcttcctttttcaccttgtaaccattttgtaccttttcaagtttcccttgactaacaagcctcctcaactttgtacttaatgcccttctaaaattttggtttacctgaagattttttgctccatgaatttaatgatggcattcatgtcagatccattactatctttcagcgctgatagagcttcaaaaatcattgcattactaccttggaggggtttttgggcatcttggtcattctgagaagcatctgggggagtgacatcagaatgctgcgttttgcagagaggagncggcgttctgaggaagtggcggtaggagcangaggagcangnagggctntaagc

SEQ ID NO: 33810 - DNA, 379 bp, Glycine max
  Clone ID: LIB3051-037-Q1-K1-C4.R5
ctcctcgggacaaatcccttcccaaaaccaaggatgtccggccaccacaaccacaacagcaatccccagcttctgtcttaatgactaatgacacaataaaggaagctgcggatactgcagcctacagagttgctgatgctgaaagtaaatcatatctggctgcagaagcagtaaaggaggctgaaaaaaatatcattgctggttgaacatagtgattcaatgttacagctagcaaaagatatatatgaacaatgttcccgtggtgaaattatcctcttggcttaagatggtctaagtaaggtctataaatagattcgtcctgatgttggtttctaaatgtaaaattttgttgatacaatgaaatactattttaactttt

SEQ ID NO: 33811 - DNA, 674 bp, Glycine max
  unsure (1)..(674): unsure at all n locations
  Clone ID: LIB3051-040-Q1-K1-F12.F5
ggcgagcggnaggtggggcaccaccggcacagcaactcgatggacgggtcgtcgacgacgtcgtttgaggcggactcggcgatgataatggacggtgtgaagaaagcatggctcctgataaacttgctgaacttgctcttatggatcccaagagagctaagaggattcttgctaacaggcaatctgctgcaagatccaaggagaggaagattcgttacacaagtgagttggagaggaaggtgcagactcttcagactgaagcaactaacctttctgcacagcttaccatgcttcagagagacactacagatttgactacagagaataaggagctcaaactgcgtttagaggctttggagcaggaagcacagcttagagaagatctcaatgaggcattgaaggaagaactgcagcgccttagggcacaaagtactcgtttgggtgcttattggtggtaacccttcttttggtgggatattcaaccagttggcttcccaattagccatgcaacagttgtctaattctgcaccccatcagcagacacaacaccagccacaggttggcatgcctcctcctccctctggacagaaccaccctaacttcatggacttcaatcagcagaagtaactcataatagcagtagcagtaaatgattgatacatgaatgataactg

SEQ ID NO: 33812 - DNA, 372 bp, Glycine max
  Clone ID: LIB3051-040-Q1-K1-F12.R5
cttcccaaaccaaagttgtccggccaccacaaccacaacagcaatccccagcttctgtcttaatgactaatgacacagtaaaggaagctgcggatactgcagcctacagagttgcgtgatgctagaaagtaaatcatatctggctgcagaagcagtaaaggaggctgaaaaaatatcattgctggttgaacatagtgattcaatgttacagctagcaaaagatatatatgaacaatgttcccgtggtgaagttatcctcttggcttaagatggtctaagtaaggtctataaatagattcgtcctgaagatggttgctaaatgcagaattttgttgatacaatgaaatactattttaactcttaaaaaaaaca

SEQ ID NO: 33813 - DNA, 690 bp, Glycine max
  unsure (1)..(690): unsure at all n locations
  Clone ID: LIB3051-084-Q1-K1-A12.F5
ctccaaactgatatccaaatggcaaagagagccctcagtgaagctctttcaccagagaagccatcttgtaatttatctgcctcaaactcaaacccttcagatagtagcagctccttctcttccacaaaaccaacaacaacacaaactgtgtgctatgcctcaagtgctgacaacatagctagaatgctaaagggttggatgaaaaacccaccaaagtcctcaagaacaaactcatcatctgtgactcagaactccttcaacaactttgctgcagcaggtgctgatactgcttctagtattggagcaaagggaccaccaagcagtgctgaattgtctgaaaacaattttgaatcattgtttgattttgatcagtctttggagtcttcaaactctgatgaattctctcggtcattgtctcctgaggccactgttttgcaagatgaaagcaagcctgatgttattggtgcagaaattatgccattctctttgcttgagaaatggcttcttgatgaggctggttgccaagagaaattagttggttgtggtgatgatgccaagtttttctaagttgggttcattttgtgacatatatgagactgtggaattntttattttatttcataagttataggtagggcctcatcaattaatcttcgctttggccttagagagagaagtttttcaagccct

SEQ ID NO: 33814 - DNA, 618 bp, Glycine max
  Clone ID: LIB3051-047-Q1-K1-D12-r3
gagtgttgccatacttccgtcgctgtaaccctagtatcccactctgtgactgcctgttctcagctccatgctcagcactctcagcattgcaattgcctattgacattgcaagcccatcaaacccttttgatttcttcattaaaccctgatcagtatttccagataatttggttggtgattctatgcttgaatgagtcccaacagcaggtgaagatgaaactccttgaccatgtaagtgtggcccaatagcaactgcagggtgagtataaacccctccatgcgaataaaatgctgcataaggtggcccataaggtggcatcataggctgtggtggtccccacatgtatgggtgtggagcatgacctgaagccacagctgagttgaagtatggtggaatgttgactcttggcccataatactgcatggcagcccaatcaggatagacatgaatattaggttggttggtctgatcagttgttgcaggtgaagaagaagggcttccagtcttaacagatttctcatcctcactgtttcccatgaggcaagcaccaaaagaaaagcaccgagtcaaatatgtcccaacaagttattcaacttaaagacatcgaactctccttg

SEQ ID NO: 33815 - DNA, 413 bp, Glycine max
  Clone ID: LIB3051-016-Q1-E1-G10-f5
ccacttccctattatggtaacatggctgcaagcaagaagatgccaactcagccaaagtgatgtccttgattcggatagcccacattgcacttcattcgtggagcctgctgattcctctcatgcctttgaaccagaagaccactcagaagacttctcccaagatgaagaggataaccttagtgaaaaccttttgatgaccttcccttcttcttgttgcttacctaaggttgaagaacactgctatgacggccctcctgaaaactcttgtaattttggcttccaggttgaggatcaaaccttctgtttctggccctattgaaccaaaccaaccaaccaaccgctagcaatgttttaaaaaactttgcagttgtaaccatgtactagaaagcaataaaaatggtattgttacttct

SEQ ID NO: 33816 - DNA, 292 bp, Glycine max
  Clone ID: LIB3051-007-Q1-E1-E1-F2B
caagagaaacaagagctttttggaaatataaaagaaaggatattttctcaaaccgaagcggggtttaaaaaaggggcgcaaagtgtttcaccgggtttttgggggacgggtcaaaggtcatttgccatttgaaaaaaaaacaaggggtttgggaaaaacccattcattccgcgagggggggctttctcccctaaagggtgttccccacttggtataaaagccataaccgggggcccactgcggggggggaactttcggattttttttggcacttaaaagcctttcatttggg

SEQ ID NO: 33817 - DNA, 481 bp, Glycine max
  Clone ID: LIB3051-007-Q1-E1-E1-R2B
cccacgcgtccgcccacgcgtccgcaagcagtcaaaatgagtatgtacatataaaatttgattttcagattactgagagttctcagtcagacaaagcaatttcaacaatacattatagtagtaggaggcagtactacaacaatgaacctaaggagggcctgagcttcagcatgtgcaaaaagttggtacagatgatgcaagggaatatatggatatcaccgaactcccttggtttggtgcaaggcatgacacttcttctcaagtttcagataggaccatcacttggaaaatccatatttgcacctaaagattattcaagctcacagttcagaggccttaaggttttgttagccgaggatgatggtgtaaacaggaccgtgaccaagaagctacttgagaagcttggttgtcaagtaattgctgtttcatcggggtttgagtgcctgagtgctataagtgggggctggaactcattcagaat

SEQ ID NO: 33818 - DNA, 470 bp, Glycine max
  Clone ID: LIB3051-009-Q1-E1-A6-F2B
atcaagcaataaaaacataacaattttatacagaacaatttcaattatttacaagcaaaagaattgtgttagcgagcactttattacatcaaatcatttacaagcagcctctaggcttggcttctttttccttggcgtcgtcacttttttacatggttgataaacagagagacttcataaatatttattgaaagcagaaaaagaaaatgacactaataacaagtcagaaaccaaagcaccctcctcatccacatggctacttgctgctgacaacccctgaccctggcccttattattaaaaggagaagacagtttcagtttctggatggtgcttgtgctgcggcttaatctgctgatgggaccaataagcgtgggccactagaaccctgtccaaaagttcttggggaacaggttcacccctcctttgttgaggggatattcttgccgtgtgcaccagtgttttccattta

SEQ ID NO: 33819 - DNA, 470 bp, Glycine max
  unsure (1)..(470): unsure at all n locations
  Clone ID: LIB3051-009-Q1-E1-A6-R2B
ggaaaacgttactagcacagttaatttagattcttctgattatccaaagcatagtaatttcaagttacacggtgatacaagtaaaggaaaggatgagttgcataagtttgagaaggtgccaattggtagtgggattgacatgtgtagttttgaggaccctttggatgaaaatcctcctgcattgatcagtttaggtggcaatgccaaattgtctgggtataatgataggattccctgtagcttgttgtccaaaagtcgtgacaatgtaccagtagttagtagagatgatgatgaaaactcttatgggtgtactcaccctattaatactaaaaccaagtcctttaggctaaagactggtataggtgataatagaataagtaaaagactggcttctaactntcagaaagttgctgaanaaacanaggatcatacacattctaaacatgatggagattggaagcgaacttact

SEQ ID NO: 33820 - DNA, 335 bp, Glycine max
  Clone ID: LIB3051-015-Q1-E1-A4-F2B
aaaagccaagggggtattcagttattttaaaaaaaggcgcagggcactgaaatttttaacccccatagcgcaagagtatatatagagttaccctccatactgaaaaaacaaaaactacgttcctataaaccacccaaaaaaattttggaaaaaaaaaaaaaaaaacactgactaaatacattgacccagggcaaaaaaatccatgggggggcacaaaaagttaaaaaattgctctgcttacccacaaacaagagagttaattaaaaagggggcctcataaggtgaaggaaccgccccatctgggattgaaccaggtaaatgaaaaaagatgttat

SEQ ID NO: 33821 - DNA, 528 bp, Glycine max
  Clone ID: LIB3051-015-Q1-E1-A4-R2B
gttataaattagagggttagcaagagaaattcacaaacctagtccacattctcatactatggaagacggtggaagcttagtttcagaagatggatccaaaatagaagatacaacctcagagaaagttgagaaggtgaaagaagaagaagatattggcaaagaagagagtggtggtggccttatcaacaacttggtttccactttgatcacacccttgagtccaggcattgggaaagccactgaaaatgaaagtggtgctgatgctgatgaagatgaaggagagaatgaaggagggatcatcagcaaaatgggttctaatttcttccatcaaagtgaaggtgaaggtgtggtggaagctgaagaggacaaagaacaagaggaggaaatcatggctggtggtgaaaaaatcaaacgggttgaagacagagaatggaggcatcattcataacatcttttctcatttacctgcttcaatcccagatggtgcgggtcctacagctgatgaggccacttttttaattaactctc

SEQ ID NO: 33822 - DNA, 470 bp, Glycine max
  Clone ID: LIB3051-016-Q1-E1-F9-F2B
aattaaacgtaaaagatatcatagacatatatacaattgacactcaagaaataactaaattaatgagtggaatctcaatgagtatctaacaaggtgctacatattacacatacttagaaaccaaatatttctcacctcatgatcaccttaagtataataacacattaaaatgcaatatcccttcctacttggaaaatttcatgatatcatgggtggtgtcacagccaaggtaatgaaatgggaatttttgagcagaagtgcccacagcagttgcagcatgatgattagtaggagggttacatttgctttgatccatgccatggtgtgatgctagtagcttgtccaagaaagaccagtcaccactgaacctctcttcttgttgttgctgcataagattaagtccacagccagtggttgtgagcctcaacaggttttgagagcactcaaggatgtccatggcattcatggat

SEQ ID NO: 33823 - DNA, 494 bp, Glycine max
  unsure (1)..(494): unsure at all n locations
  Clone ID: LIB3051-016-Q1-E1-F9-R2B
gggacctcaaagataagtgtaggattggatcagggcctcagaatgagtggtatttcttcagccataaggacaagaaatacccaacaggaaccagaacaaatcgagcaactacagctggtttttggaaagcaactggaagagacaagtccatataccacactaattccaagaggattggcatgaggaaaaccctagttttctacactggtcgtgctcctcatggccagaagactgattggatcatgcatgagtatcgccttgatgaagatgatgctgatgttcaagaagatgggtgggtggtatgcagggtcttcaaaaagaaaaaccaaagccgaggtttccaacaagaacttgaagaagaagagcacttaaccacccacatgagagcaagtggtccatgccaggttctagagcagaagcatcttcacatgcaaggaggaccatatgatcattacaactttgatggggacatgcacctnccacagttgttcagt

SEQ ID NO: 33824 - DNA, 488 bp, Glycine max
  Clone ID: LIB3051-022-Q1-K1-H5-F2B
ggaagtagggtgacctattggaggctcccaacttatttccaatgaaagacctttttgttacaaaatttgaaagcaaagcaaattgtcaattacaaaattacaaaaaaaaagtcctcaattgtggttgaccccttgcttcttgactcaaattcttcaaggtatgacatcaatcctcctttccaattcccagaatgcttggatagtcaacagtcaagcaataaggatctagcatgcctacatcttagtaccttctacaaaacttgacattctagtagcaacggtcttcaactcttggtaaaatcctcaaccctagtcactggtcagcaaggatcccaaactcttgtaacatcctcaacccatgaattggaattgggtaactcagaattaaagctcggcattcctctttcaggtcccttgtcatcttcaacaacaattattgtacttttttccttagggatagatgcatttcaaaataaaccatgcatgac

SEQ ID NO: 33825 - DNA, 464 bp, Glycine max
  unsure (1)..(464): unsure at all n locations
  Clone ID: LIB3051-022-Q1-K1-H5-R2B
cggacgcgtgggcggacgcgtgggcagatggtgctctctgggatattttttggagacaggatgtccctaagttgcaggaatatctgaagaagaatttcagagagtttaggatgattgacttttggatgtataggtctttgcgcctttatcttattctgcaatgactctgtgagagaggaagaataaaagggaatggaagtttggaaaattttagactagaagaaagccaacttagagttgagctttttaagaacaaattctatctcaaaatcaattataagatgaacaagatttttaaaatttaaataaccaaatggtctagatctaaaaataagctctatttcacctagatatctagctttgatggttgccaccttagattttgggaaatttaattcatgtgccatangaaaaagaagaaaattattcatttgccaggttatttctaggtggtatgtttatct

SEQ ID NO: 33826 - DNA, 279 bp, Glycine max
  Clone ID: LIB3051-032-Q1-K1-H11-F2B
aaaaaaaaaaaaaaagctaaagggggtggaaaaaaaaaaaaaaaaaaaaaaaacggattgggaagaacaaaaaaaaaaagggaggagggggaaaaaactaaaaaacccaaaaagtggggaaaaaaaaaaaaaaacttttaaaaaactgaaaataaaaaaaagccgaaatcccctggaaaaaaaaataaaaaaaagggggggctgcccccttttccaattaaatccaaaaggcccgaaagggaagatccgattttgaattttgaaaagctggcaaagggg

SEQ ID NO: 33827 - DNA, 597 bp, Glycine max
  unsure (1)..(597): unsure at all n locations
  Clone ID: LIB3051-032-Q1-K1-H11-R2B
cccacgcgtccgcgggtgtattcctgatgataagtttggtgggttcaaagatgtgggcaccaatgtgtcttgtgttgtttcaaggagggacatggcaacccagatgagcccacaggggatgtgcaggtagatgaacacttaccgtgacaagatggtccaagaaacatagggccttattcactggctgaggctcagaacaagtcaaaagctggaaaaaagaaaaagtaagcactcaattgtcaacttgggatgtttctgaaacgccaaaacctgccccaaaggcaaaaagtgaggaagccaaaatctctgcatgggagaacttgcaaaaggcaaaagcggaggcagcaatacggaaactagagatgaaattggaaaagaggcgagcatcctctatggataagattatgaacaagcgtatattggcttagagaaaagctcangaaatgagaagntcagttccacacaaccaaactgatcgggttgtaagaacttcacacaaggcttcatgatttcttagaaaccagccagatgccttcttttgagtgggtggtttggactttgccatgcctttttaaacatttcttttcatggtttgag

SEQ ID NO: 33828 - DNA, 457 bp, Glycine max
  Clone ID: LIB3051-035-Q1-K1-F2-F2B
gtatatattacattgtttcttttccacattttgaaataaaatcagatttgaagttggtcattacatgattctctaacgtaactattatacacatttaaatgattacctaggtatttgatcaaaactacactgtaaaataccaacccataaaatattgctcaaatacaactaatgtacacaatcccccctctttccggattcaatgaccgagtggggaagttcaagcacaagtaatctgcctccgcttaaccatcttctcataattctcggaaaccattgcagtcaaattaggatctccataaccgatctgggcgccaagttttgggtcaagtacaagtttttgaacttctttgatggctgaacttgctgcataaagggagatcttcccaacctccaaaacttgaagctttgcttcatgttcattaggtacacagcgaatttcctctgccaatcttac

SEQ ID NO: 33829 - DNA, 457 bp, Glycine max
  Clone ID: LIB3051-035-Q1-K1-F2-R2B
gtaagattggcagaggaaattccctgtgtgcctaatgaacatgaagcaaagcttcaagttttggaggttgggaagatctccctttatgcagcaagtgcagccatcaaagaagttcaaaaacttgtacttgacccaaaacttggcgcccagatcggttatggagatcctaatttgactgcaatggtttccgagaattatgagaagatggtgtaagcggaggcagattacttgtgcttgaacttccacactcggtcattgaatccggaaagaggggggattgtgtacattagttgtatttgagcaatattttatggggtggtattttcagtggagttttgatcaaatacctaggtaatcatttaaatgtgtataataggtacgttagagaatcatgtaatgaccaacttcaaatctgattttatttcaaaatgtggaaaagaaacattgtggtatatac

SEQ ID NO: 33830 - DNA, 209 bp, Glycine max
  Clone ID: LIB3051-016-Q1-E1-G10-F1A
tctctttttttctcctccccttttcttcttctctttttagccctaccaataccccttttattgctttctagtccatggttacaactgccaagttttttaacaccttgctagcggctggtcgcgctggtttcgcccactcgggccagcaccaccacgtttgctcccccacctggccgccaacattacacgacttttccggcggcccgtca

SEQ ID NO: 33831 - DNA, 137 bp, Glycine max
  Clone ID: LIB3051-047-Q1-K1-D12-F1A
aaaaacccaaaaaaaaaaaaaagaaaaaaaaaaaaaaccgaaaaaaacaccaaagggggaaaaaacccagaaaaaaaagccccccccccacaaaaaggggggacggccaaaaaggaagtaaaccccagactcaaaaa

SEQ ID NO: 33832 - DNA, 58 bp, Glycine max
  Clone ID: LIB3051-063-Q1-K1-B11-F1A
cgcgccttctttttttttcttcttgaatcgaccagccacttatattgctacaacctta

SEQ ID NO: 33833 - DNA, 153 bp, Glycine max
  Clone ID: LIB3051-069-Q1-K1-A2-F1A
gaaaaaaaaaacccctgaggcttcccaaaaggcgaacggatcaaggggggaagagggggccctgccccccaagggtgccccaaattggggggcgtaaaaaaggggggggggggggggcgggaaggcgcccctaaaaaaagggggtctgggaaa

SEQ ID NO: 33834 - DNA, 242 bp, Glycine max
  Clone ID: LIB3051-115-Q1-K1-C4-F1A
gaataattcacataatacatcatttattgatattacaatcaagtaactctagcctaattaaactctaatttgtaaaatacaaaaatgttagagcattgctgttttccactaaaaagaaagaaagtcagtgtttcactacttgattacatgtgtacattacatatcattcattagcctttcgcattaccctcgctagtttctttgtcaatggattatgcctctagatcttgcagctggtgata

SEQ ID NO: 33835 - DNA, 586 bp, Glycine max
  Clone ID: LIB3051-066-Q1-F1-G3
gaaaaaaataaaaataatttagctttagctattcaaacttttagtacaagaaatctaataatcaaatattacattttacggaagacgtagagatgagttgagatgcttatggtgttgcacagcgttctcactacccaaagagctaaacaaaatctcaggacaggattcttatacacgcattgctcactccacaaaacttatgcagtttacaaacaaattacatatttcttggcttttttctcaacgccattgatggccattacgttcagttggtgagccaggttctataggaacaaaacccctgccaccaaaaacaggacgcatgaatgcatcatcaaacttacgccacaagcgatgaacagtgtgtgttggagtggaaagtaaagcacggatgctgcttggacgatgaatatcatggccatcaatatcgacttcagattcttgggcactcccaagaagtgggacagtgactgattttggacttggagtagatggatctgtggttatcgtgatgcttgattctttatgatgtggagtatggggcagtaaaagccttattaggggcttagtcaacagaccaaacacc

SEQ ID NO: 33836 - DNA, 561 bp, Glycine max
  Clone ID: LIB3051-066-Q1-F2-G3
gaaaaaaataaaaataatttagctttagctattcaaactttgagtacaagaaatctaataatcaaatattacattttacggaagacgtagagatgagttgagatgcttatggtgttgcacagcgttctcactacccaaagagctaaacaaaatctgaggacaggattcttatacacgcattgctcactccacaaaacttatgcagtttacaaacaaattacatatttcttggcttttttctcaacgccattgatggccattacgttcagttggtgagccaggttctataggaacaaaacccctgccaccaaaaacaggacgcatgaatgcatcatcaaacttacgccacaagcgatgaacagtgtgtgttggagtggaaagtaaagcacggatgctgcttggacgatgaatatcatggccatcaatatcgacttcagattcttgggcactcccaagaagtgggacagtgactgattttggacttggagtagatggatctgtggttatcgcgatgcttgattctttatgatgtggagtatggggcagtaaaagccttattag

SEQ ID NO: 33837 - DNA, 707 bp, Glycine max
  Clone ID: LIB3051-066-Q1-F3A-G3
acagtcttgatttggggagggtgttgtgaatgatgctacatcagtggtgcttttcaatgcaatccaaagctttgacctcaaccttatcgacccttcaattgctgggcactttttgggaaatttcttgtatctatttattgcaagcacaatgcttggagtgttgacaggtctacttagtgcttacattattaaaaagctgtacattggcaggcactctacagatcgcgaggttgctcttatgatgttaatggcatacctctcctacatgcttgctgaattgtcctatctgagtggcattctcactgtattcttttgtgggattgtcatgtctcattatacctggcataatgtgactgagagttcaagaatcactaccaagcattcttttgcaaccttgtcttttgttgctgagatctttatcttcctttatgttggtatggatgccttggacattgaaaaatggaaatttgtcagtgatagccctggaacatctgtagcaactagttcagtattgttgggtctaattcttcttggaagagcagcttttgttttccccttatccttcctatccaacttggctaaaaaatcaccaaatgagaaaatcagcttcagacagcaagttatcatttggtgggctagtcttatgagaggtgctgtttcaatcgcacttgcatataatcagttcaccatgtcggagcacacttcac

SEQ ID NO: 33838 - DNA, 312 bp, Glycine max
  Clone ID: LIB3051-066-Q1-R1-G3
ctcagaccatgcctccgtggtctccatgaacttatttgtggcacttctttgtggttgtattgtccttggccatcttcttgaggagaatcggtggatgaacgagtctatcactgctcttttgattggtgtttgcactggcatagtcattttgctgtttagtggtggcaaaagctcgcatattcttgttttcagtgaagatcttttctttatataccttctgccgcctataatatttaatgccgggtttcaggtgaaaaagaagcagttttttgttaacttcatgaccatcatgttgtttggtgctattggcac

SEQ ID NO: 33839 - DNA, 540 bp, Glycine max
  Clone ID: LIB3051-066-Q1-R2-G3
ctcagaccatgcctccgtggtctccatgaacttatttgtggcacttctttgtggttgtattgtccttggccatcttcttgaggagaatcggtggatgaacgagtctatcactgctcttttgattggtgtttgcactggcatagtcattttgctgtttagtggtggcaaaagctcgcatattcttgttttcagtgaagatcttttctttatataccttctgccgcctataatatttaatgccgggtttcaggtgaaaaagaagcagttttttgttaacttcatgaccatcatgttgtttggtgctattggcacattaatatcttgtaccatcataactttgggtgccacacaaatttttaagaggttggatgttggtccactggaattaggggatttcctagcaattggtgcaatatttgctgcaacggattctgtttgcacattgcaggtgctaaatcaggatgagacacctttgctgtacagtcttgtatttggggagggtgttgtgaatgatgctacatcagtggtgcttttcaatgc

SEQ ID NO: 33840 - DNA, 706 bp, Glycine max
  Clone ID: LIB3051-066-Q1-R3A-G3
gggacagtgactgattttggacttggagtagatggatctgtggttatcgagatgcttgattctttatgatgtggagtatggggcagtaaaagccttattagtggcttagtcaacagaccaaacaccactgtgctgaaaagcacaacagtgatggtgcttgtgatcatgattgcattgcttcttagtgaagtgtgccccgacatggtgaactgattatatgcaagtgcgattgaaacagcacctctcataagaccagcccaccaaatgataacttgctgtctgaagctgattttctcatttggtgattttttagccaagttggataggaaggataaggggaaaacaaaagctgctcttccaagaagaattagacccaacaatactgaactagttgctacagatgttccagggctatcactgacaaatttccatttttcaatgtccaaggcatccataccaacataaaggaagataaagatctcagcaacaaaagacaaggttgcaaaagaatgcttggtagtgattcttgaactctcagtcacattatgccaggtataatgagacatgacaatcccacaaaagaatacagtgagaatgccactcagataggacaattcagcaagcatgtaggagatgtatgccattaacatcataagagcaacctcgcgatctgtagagtgcctgccaatgtacagctttttataat

SEQ ID NO: 33841 - DNA, 655 bp, Glycine max
  unsure (1)..(655): unsure at all n locations
  Clone ID: LIB3051-008-Q1-E1-A6.F3
ttttatttggcgtctcanatttgttggttcctctccttccctgttggtgtgcccctcactttcattcttagaatcttgaatgtttcccnaggaaaggactgccaagaaaaagctgttcccatgaaccatcatcaggtaaatctggtaggagaaatggagaatgattttctaacggagacaatttttcatccagaagtactttcaagaattcagaactgatgcacaagtctttcagcccatcagcagaaagctcaggttctggttgattttcgaaaccaggagatagaggaactacgggctttagtttttcacctacaggtggtttatactttattatcatcccatcagaagcaactggcttgtcatcttgtttatcttgatccaatctattccatgattcagccaaacgccaattattttccttaggatgaagaagctgaaccatgaacccagggctttgcacaaccatgactaagaatgacaacatctgctgctgatgcttttccattccttgaaggcgatcactcaggagcagcaacttactctcagcagaatcctgatgttgcctaagtttgaccaattcctgtgtgagcgaatttttatcaaagtttaaattctcaacttctttccaaagccatnatttggtgcttcttgg

SEQ ID NO: 33842 - DNA, 540 bp, Glycine max
  Clone ID: LIB3051-008-Q1-E1-A6.F4
gattttcgaaaccgtgagaagaggaactcgggctttagtttttcacctacaggtggtttatactttattatcatcccatcagaagcaactggcttgtcatcttgtttatcttgatccaatctattccatgattcagccaaacgccaattattttccttaggatgaagaagctgaaccatgaacccagggctttgcacaaccatgactaagaatgacaacatctgctgctgatgcttttccattccttgaaggcgatcactcaggagcagcaacttactctcagcagattcctgatgttgcctaagtttgaccaattcctgtgtgagcgaatttttatcaagttttagattctcaacttctttccaaaggccatgatttggtgcttcttgggatggttcatcacaattgtcttgctgtggcaatgccttttgctgatctgcactgtgtggatgtttccttctatgtatattcttcaacaaatgcttttgacccctaacaaagttttcattggcaaattcccaggaatccgtatcaattttc

SEQ ID NO: 33843 - DNA, 179 bp, Glycine max
  unsure (1)..(179): unsure at all n locations
  Clone ID: LIB3051-008-Q1-E1-A6.R3
tacatggtgcgctgtcttataaatatatcctcaaattttttcatatgaggctagtctcatnactagagctaatggagctttagattctgaaactaacaacatatagggaaggaagtaataatgttcatcagatattttntcaagctagagctgtcttcacatnnattacttcaacacta

SEQ ID NO: 33844 - DNA, 729 bp, Glycine max
  unsure (1)..(729): unsure at all n locations
  Clone ID: LIB3051-008-Q1-E1-A6.R4
cttctggatgaaaaattgtctccgttagaaaatcattctccatttctcctaccagatttacctgatgatggttcatgggaacagctttttcttggcagtcctttcctgggaaacattcaagattctaagaatgaaagtgaggggcacaccaacagtggaatggagatggaaccaacaatatctgagactccaaatgaaaattctcgaacttttgaatcgatgatcgtagagatggagaaaactcgagaataagttggagttgtatgcacatggtgggctgtcttcataaaataatatccatcaaatatttttcatatgggctgtctcatactgagctaatggagctttagattctgaaactaacaacatatagggaaggaagtaataatgttcatcagatatttttcagctgagctgtcttcacatattacttcaacactataattatatcatagtattaagtcgcaattattttctctcccatcttccttcagcagttgttagatcctcatctaaaatccttattttggcatcttgatacatggtgtcggagaccaggagtcgtatgttagtgcactagtgcggctacctatatataatggatcaaatatttcttattttggagaactgcaagggaaaacggcaancttatttttttgtgccacattaaacagtggcacttgccttcatatatatnataaaatttcataaaattcatgcttcgtttgc

SEQ ID NO: 33845 - DNA, 656 bp, Glycine max
  unsure (1)..(656): unsure at all n locations
  Clone ID: LIB3051-034-Q1-K1-E1.F3
cttgagaactgctacatgactggtccaagatgccactagggtccacaccactataccatttttcaagtgatgccaatggcatatctgcatgatcatgatcatccattctgagaagttggtgtcctttgtcctcagatttctcaacaccccttatgatgctattctcattttggtcatctgagtacacacctattctctcctccaaaccctcatcatttgaaaaccttggtttttttgcttcaggcttccaactgctgtatccactgcctgagccaccatcttctatgctgttttctttgccatccttgtcttcccttccaccatcttgagatgtcaccaccaaatcacttagcttctgcaactctaattgcaaagagtccttctctttctttagggactcaaaccttgatgctaaattgtcatattcatctttgagttttctgtactcttgctctatgcgctttgatttccaccttgcccttctgttttggaaccatatggcaacttggcgaggctgaaggccaagatctcttgccagttgcatcttcttccttggctcaagctttgactctgactcaaatatgcattcttagtgatctttatctgttcatcactaaacctcctcttgttntctatcttcttgcttttcttccttg

SEQ ID NO: 33846 - DNA, 521 bp, Glycine max
  Clone ID: LIB3051-034-Q1-K1-E1.F4
ccttgctcttctgttttggaacctatggcaacttggcgaggctgaaggccaagatctcttgccagttgcatcttcttccttggctcaagctttgactctgactcaaatatgcattctagtgatcttatctgttcatcactaaacctcctcttgttttctatcttcttgcttttcttccttggtgcctccaagctggtgaagctttccacattttttccctttgttgatgcttgaatattctcatctccttccatcatacacatatggctggtgagacaaaggaaggtattttacgggtgaatttggaattggatacacaataaaaaaaaaaaagaattgtgtgatttaaaagtcttgtgaggggggatcgggttcagaatatatagctagccataaaagaaagtgtctcaaagccatttctatcacgttattgcaacttctaatggaaggatcatggtgacctatgggataagataccgtatggctcttactatctttttgttaagtaggaagaaattatc

SEQ ID NO: 33847 - DNA, 455 bp, Glycine max
  unsure (1)..(455): unsure at all n locations
  Clone ID: LIB3051-034-Q1-K1-E1.R3
gatgccttttgtttcctccagnanaagaaggaacaaagattggttgattggttggttggctcttgtgctgccaacaagttcaaaactcaaaatattccagcctagccaagaaactcgagggaagttttgtaggcttgatttgataggggagagaattaagatagtctcactcaattcaattgtgtagagatttggaaaaacaaataatgtgcaatgtctctgtttgttcatgcttgcatgcctttttcctttcccatccctttgtttgtgttctttcttcttcttttcttttcccacttcaaggggttagttaatctagaacctctttatatttcataaaggggtctcttttttatcactttagcttatttccatattaacaagtgtgatccttatagtacgaccaggacacacaaaaataaaatgaatgaaaggtgtgaatgagatattgctcg

SEQ ID NO: 33848 - DNA, 706 bp, Glycine max
  unsure (1)..(706): unsure at all n locations
  Clone ID: LIB3051-034-Q1-K1-E1.R4
ttgagtccctaaagaaagagaggactctttgcaattagagttgcagaagctaagtgatttggtggtgacatctcaagatggtggaagggaagacaaggatggcaaagaaaacagcatagaagatggtggctcaggcagtggatacagcagttggaagcctgaagcaaaaaaaccaaggttttcaaatgatgagggtttggaggagagaataggtgtgtactcagatgaccaaaatgagaatagcatcataaggggtgttgagaaatctgaggacaaaggacaccaacttctcagaatggatgatcatgatcatgcagatatgccattggcatcacttgaaaaatggtatagtggtgtggaccctagtggcatcttggaccagtcatgtagcagttctcaatggctagatttctggacttgaaaaaggagccacactttgtgctgcatctgcatgtgtgatgttttttgtttcctccaagagaagaaggaacaaagattggttgattggnttggttggctcttgtgctgccaacaagttcaaaactcaaaatattccagcctagccaagaaactcgagggaagttttgtaggcttgatttgataggggaagagaattaagatagtctcactcaattcaattgtgtagagatttggaaaaacaaatatgtgcaatgtctctggttgttcatgcttgcatgcccttttc

SEQ ID NO: 33849 - DNA, 656 bp, Glycine max
  Clone ID: LIB3051-061-Q1-K1-D12.F3
cgatggaagtactcagctatggccagaaacaccttgctgcttgacgcgttgttaggatctggtgcagacggtgaatggtttggtgcctctgattatcagcctgtctcacgaaaccttcaagagtggagagcttgttcatggctacagccatctgtcccatatagttagccatattgggaggataactaagagaatctgatgttatagtgtctgagagagattgattaagagcctcgagcccttgggagagagcctcttctgcttcttgtgtagattgttgcaatccacatatgcccaatatttgttgctccgtgagaggctcaatttgacgcacaataatcttgatgagttcagatggcctgaaaccaccgatccacatgaagcaacgttcagctggggtcttccacgtgccagaaacaagatggaacacatctgttttggccactaagctcttgaggttcatcacttgatcataatgcgccaaacaattgtccacaaacagtctaagctcgttttcagggaaggtgctcttgcactgcagctcttagctcacacactatggcggtgggtgctcctcttgccatctagcatattctacgtcaaacattgcagcctccgtgctaatagtattcatagtgacaggaaagccttgctct

SEQ ID NO: 33850 - DNA, 217 bp, Glycine max
  Clone ID: LIB3051-061-Q1-K1-D12.F4
tctcgcttgcaggtttgggtggctgaggggcagaagcagtttcgtttcgagggttggccaactccatcgacggctctgatggcctctttgatccacttgtttgtggagaaactagctctatgttagccttggccttggatgatgatggctctacatgcataggcttagaggggaaaatgttgagagttggaggcctcattcctgatgatgagttttg

SEQ ID NO: 33851 - DNA, 165 bp, Glycine max
  unsure (1)..(165): unsure at all n locations
  Clone ID: LIB3051-061-Q1-K1-D12.R3
atatgctatgcccttaacttatatantatagcttcttaatttctctttaattataaattaaatgttatatctctcttcatcactcctctctcccactgcatcatgggctgtatagatacagtgatatatagacagatcattaatatagaatttaatgttaacaac

SEQ ID NO: 33852 - DNA, 653 bp, Glycine max
  unsure (1)..(653): unsure at all n locations
  Clone ID: LIB3051-061-Q1-K1-D12.R4
cttgctcagaatagagaggcagctaggaaagcaggcttaggaaaaggcatatgttcaacaactagagtcgagtaggattaggctgaatcagctggaacaagagctacaacgtgctagaactcagggcatgttcttgggtggaggcgcacttttgggtggagagcaaggccttcctgtcactatgaatactattagcacggaggctgcaatgtttgacgtagaatatgctagatggcaagaggagcaccaccgcatagtgtgtgagctaagagctgcagtgcaagagcaccttcctgaaaacgagcttagactgtttgtggacaattgtttggcgcattatgatcaagtgatgaacctcaagagcttagtggccaaaacagatgtgttccatcttgtttctggcacgtggaagaccccagctgaacgttgcttcatgtggatcggtggtttcaggccatctgaactcatcaagattattgtgcgtcaaattgagcctctcacggagcaacaaatattgggcatatngtggattgcaacaatctacacaagaagcagaagaggctctctcccagggctcgaggctcttaatcaatctctctcagacactataacatcagattctcttagttatcctnccaatatggctaactata

SEQ ID NO: 33853 - DNA, 356 bp, Glycine max
  Clone ID: LIB3052-012-Q1-N1-D8
ctgagctgtttgaaagtcttggaattgcacaaccaaggggtgtcctgctctatgggccacctggtacaggaaaaacattgttggctagggcagtggctcatcatactgactgtacattcatcagggtgtctggttctgaattagttcagaaatacattggagaaggttctagaatggtcagggaactttttgttatggccagggaacatgctccatcaattatcttcatggacgaaattgacagtattggatctgctcggatggaatctggaagtggcaatggtgatagtgaggtacagcgtactatgctggaacttctcaatcagctggatggatttgaagcttctaacaagatc

SEQ ID NO: 33854 - DNA, 360 bp, Glycine max
  Clone ID: LIB3052-001-Q1-B1-H7
aagagaggacccttctcttgcatagttcaagtgagtgagagtgccaaaaaatgggaagggctccttgttgttccaaagtggggttgcacaaaggtccatggactcctaaagaagatgcattgcttaccaagtatatccaagctcatggagaaggccaatggaaatcactacccaaaaaagcagggcttcttagatgtggaaaaagttgtagattgagatggatgaactatctgagaccagacataaagagagggaacatagcaccagaagaagatgatcttataatcagaatgcattcacttttgggaaacagatggtccctcatagcaggaaggttaccagggagaacagacaatgaaa

SEQ ID NO: 33855 - DNA, 357 bp, Glycine max
  Clone ID: LIB3052-002-Q1-B1-A9
gcaacataaatacttccaatagaacgaaaactgatgctcggagaacaccatcgcgggaatccgacggtcctcatgccaccgtggccagcccactacgatccgacggctgagatgtactccgcgttcgtaacacacgacatcactgctggtgagtactctccgtaccatcttcaggaagcactaacggcgctgcagcgttttctgccgtcaaacgaaacggacgcagactcggactcctcggaggcggctcagcccgacactgcggtggacgcgtacacgtgcgaccatttccgcatgtacgagttcaaggtccgtcgatgcgcacgtggcaagtcacacgactggaccgactgtccg

SEQ ID NO: 33856 - DNA, 327 bp, Glycine max
  Clone ID: LIB3052-015-Q1-N1-G5
atcggcaaggtaaggcaattgaagttgtgaaatggagactgtctgctctgcattggtgttcccatctttcagaatcacaacttcagctttctccaaatgtggcatcagggcttccattgccgttgagcaacaaacttcgcagactaaggttgctctcctcaaaattggtaccagaggaagtccactagctctggctcaggcatatgagaccagagacaagctcatggcatcacatccagagctagcggaagaaggggctattcagattgtgataatgaaaacaactggtgacaaaatactatcacagccacttgcagacatcggcgg

SEQ ID NO: 33857 - DNA, 385 bp, Glycine max
  Clone ID: LIB3052-012-Q1-N1-A11
ctttgaacttagtgttgggccaaataatttgggcgttttcgtctctctcgcctgttgcttgaggacttggaaaaatccgattacccttcaaagcgcttgatcatcgttggttcaatatcacggaacacacacacattggctggtaatgtacctcccaaggctaaccttggtgacttgaggggacttcaaggtggtttgaatgggcttaacagctcagccatgattgatggtggagacttcgatggtgccaaggcgtacaaggacagcaaagtctgcaatatgctcacaatgcaagaattccacagacgatttcatgaggaaaactgaatcacatttgctttcctttaaccccggtgcattgccacaacaggcctgttcagagagc

SEQ ID NO: 33858 - DNA, 312 bp, Glycine max
  Clone ID: LIB3052-001-Q1-B1-C5
tgaacaagggtttctctttctctttctctgtctgcttcttcactttctctcgtttcaatcgagggaaatcatgggcagaaaattcttcgtcggtggcaactggaaatgcaatgggaccactgatgaggtgaagaagattgttactactttaaatgaagctaaagtccctggagaagatgttgtagaagttgttgtgagcactccttttgtgttccttccgtttgtaaaaagtttgctgcgccctgatttccatgtctcggcccaaaattgttgggtacgcataggtgatgcttagactggagaagttagtgc

SEQ ID NO: 33859 - DNA, 276 bp, Glycine max
  Clone ID: LIB3052-004-Q1-N1-D8
ctcaagtccaacctacccctttttcttctcccacgcaacttgaccgtcttcttcctcgatcatgtctcacttcaagggcaagtaccatgatgagcttattgccaatgctgcttacattggcactcctggaaagggtattcttgctgctgatgagtcaacagggacaattggcaagcgtttggccagcatcagtgtagagaatgttgaatccaacaggcgtgctcttatggagctgcttttcaccgctcccggtgctcttaaatatctcagtggtgt

SEQ ID NO: 33860 - DNA, 381 bp, Glycine max
  Clone ID: LIB3052-014-Q1-N1-E1
cgcgtacgcatgctggggcttgggattcagctcgagctctttgccatcccaatgcgccttaaagagacttggggtgacagaattctctggggtgagatccacttcatgtgtcacatatgctaacagtgctagagaatcttgcttttttgatcttgtagcttcccaactcactcccaagaccaatggatcaactactgtgaggggagagacagtggccaagttgaaggtggcaatcaatggtttcggacgcattggtagaaacttccttcgctgctggcacggccgaaaagactcaccccttgaagtcggtggtgtcaacgacagtggtggtgtcaggaatggctcgcacctgctgaaatatgattctatgctgggaacctt

SEQ ID NO: 33861 - DNA, 418 bp, Glycine max
  Clone ID: LIB3052-014-Q1-N1-E5
ctctttcccaacccaatgcgccttaaagagacttgaggtgacagaattctctgggcttagatccacttcatgtgtcacatatgctaacagtgctagagaatcttccttttttgatcttgtagcttcccaactcactcccaagaccaatggatcaactcctgtgaggggagagacagtggccaagttgaaggtggcaatcaatggtttcggacgcattggtagaaacttccttcgctgctggcacggccgaaaagactcaccccttgaagtcgttgttgtcaacgacagtggtggtgtcaagaatgcttcgcacctgctgaaatatgattctatgctgggaacctttaaggcagatgtgaaaatactagacaatgaaaccatcactgttgatggtaagtccatcaaggttgtttcaagc

SEQ ID NO: 33862 - DNA, 322 bp, Glycine max
  Clone ID: LIB3052-001-Q1-B1-C6
caccgttaaggacgagaagacccttctcttcggtgacaagccagtcactatttttggacacagaaaccctgaagagatcccatgggggtcaactggagctgacatcattgttgagtccaccggagttttcaccgataaggacaaggccgccgcacatttgaagggtggtgcaaagaaggttattatttctgcccccagtaaggatgcccccatgtttgttgttggtgtcaacgagcacgagtacaagccagagcttgatattatttccaatgctagctgcacaaccaactgccttgccccacttgccaaggttatcaatgac

SEQ ID NO: 33863 - DNA, 324 bp, Glycine max
  Clone ID: LIB3052-002-Q1-B1-H2
cttgctggttgccacactacaccgatatttccaccaaacccgtttgcgttgttgtttgcgaataaatggcaactaagaggagcgtgggaacgttgaaggagggtgatttgaaggggaagagggtattcgtgagggtcgatctgaacgtgcctttggatgacaaccttaacatcaccgatgacactagagtccgtgctgctgttcccaccatcaagtacttgactggttatggtgctaaagtgatcctttctagccatttgggacgtccaaaaggtgtaacacctaaatacagtttgaagcctcttgtgccaaggctgtctcaac

SEQ ID NO: 33864 - DNA, 359 bp, Glycine max
  Clone ID: LIB3052-011-Q1-N1-E8
ctgtttttttgctgagaagagagaatggctgtggcgtggtcatcatcccttatcacgttgaaggtgaaaccttgcattttcgggtctcctcggagatccgcggtggatcggaattgtgcgaagtcaacggcggggacaatatcgacgagttggagcctggacagttggagggcgaagaaggcgcttcagcttccggagtacccagatgcggaaagatgaattggacctagtccttcaaaccctatgttcttttcccccaatcgtcttcggcggcgaggcgaggaatctggaggagaagctagctcaggctgccatggggaacgcttatctgcttcagggcggtgattgcgccgagagct

SEQ ID NO: 33865 - DNA, 340 bp, Glycine max
  Clone ID: LIB3052-017-Q1-N1-H1
gttgcatcatcatcttcattgcaaaaccctaaacttcacctgcaaccgtgaccacacaagtaccaccacacagtgtccaagtccacacaacaacacaccgctacgaagctggcgtcgtcccccccggagcccgtttcgaaccgccgcgttatgaagccggcgtcaaagcgccctccatttaccattccgagagaggtccaacgacttcccaggtcctcgccgtcctcgccggcctcccggtcggtggcatcctgctcctcctggcgggattgaccctggcaggaaccctcaccggaacttgcagttgccacgccgctcttcgtcctcttcagcccggtgc

SEQ ID NO: 33866 - DNA, 407 bp, Glycine max
  Clone ID: LIB3052-017-Q1-N1-H10
gattatcctaagtctttgggaatagtgctgcaatggcttcgagtcaggaggaggtgacccttttgggagctactggaagcccatttgtgtgcagggttcatattgccctcaagttgaagggagttcaatacaaatatgtcgaagaaaatttgaggaacaagagtgaactgcttctcaaatccaacccagttcacaagaaggttccagtgtttattcacaatgagaagcccatagcagagtctcttgtgattgttgaatacattgatgagacatggaagaacaaccccatcttgccttctgatccttaccaaagagccttggctcgtttctggtccaaattcattgatgataaggtttttggtgctgcatggaaatccgttttcacagctgatgagaaagagcgtgag

SEQ ID NO: 33867 - DNA, 413 bp, Glycine max
  Clone ID: LIB3052-017-Q1-N1-H11
gggtaaggaaaaggttcacatcagtattgtggttattggccatgttgactctgggaagtccactaccactggccacctgatctacaagcttggaggcattgacaagcgtgttattgagagatttgagaaggaagctgctgagatgaacaagaggtctttcaagtatgcctgggtgcttgataagcttaaggctgagcgtgaaagaggaatcacaattgatattgccttgtggaagtttgaaaccaccaagtactattgcacagtcattgatgcccctggacacagggatttcatcaagaacatgatcactgggacatcccaagctgactgggctggtcttatcattggttccactactggtgggtttgaagctggaatttcaaaggatggacagactcgtgaacatgctctgc

SEQ ID NO: 33868 - DNA, 377 bp, Glycine max
  unsure (1)..(377): unsure at all n locations
  Clone ID: LIB3052-017-Q1-N1-H12
cccaaacacaacaagtgtctccagagttgcaatagcgagagagactcgtacaggaaccaagcatgccacgctcgttgcaacctccttaaggtggagaaagaagaatgtgaagaaggtgaaattccacgaccacgaccacgaccacaacacccggagagggaacctcagcaacccggtgagaaggaggaagacgaagatgagcaaccacgtccaatcccattcccacgcncacaacctcgtcaagaagaagagcacgagcagagagaggaacaggaatggcctcgcaaggaggaaaaacgcggagaaaagggaagtgaagaggaagatgaggatgaggatgaggaacaagatgaacgtcaattcccattcccacgccc

SEQ ID NO: 33869 - DNA, 326 bp, Glycine max
  Clone ID: LIB3052-017-Q1-N1-H2
gcatctttctgttcttttatttcaccgccattcatttcatggacgtatagggcttgcgtatcattgttgctgttcttcttcctttctctgcttgcagttgttgcagttgttgcagttgcagaggtaggagggcggcgctgattgtgttgtgtggtttagaggatgaaggatttcaattcggatctatttgacccgggaatggtgatggattcttcctcctccgattactctcgcagtgcttcctcttccgacgccgatttcgggttcgctttcaatgacagtaatttcttcgacaggatcctccgaatcgagatcatgggggaccc

SEQ ID NO: 33870 - DNA, 349 bp, Glycine max
  Clone ID: LIB3052-017-Q1-N1-H3
cccctcacctctctctccgaaatccccaaattgcctgtgaatgctagaaaccctaggcacgttcgatttgatgctctcccatttgcaatcaagggcgagcgcattcggttcttgcacgcaaggctggtactaccgctgcatcggcctcgatccctgaattcatcattctttctcgcaccatctttttctattccgattcgatttgttgttgttgttgttgttgttgtgtttttgtttccttccttgacgaatcatcacgatgttgatgagcaagcagaagaagagccagatccagaacgcgaagaggttgttgataagcatcaatgtgctggggagcgcggggcccatt

SEQ ID NO: 33871 - DNA, 388 bp, Glycine max
  Clone ID: LIB3052-017-Q1-N1-H4
gttacgccatggacgattcctctcaactcctccaagcagcggctgattttgttcactacccagggcctcacagcgatgattcctccagggactttctcaatcgtttccctctcccagtcatcatcaatgcattacagactcagttagatgtgcctggcctagaaaatactcttgttgcatgccttgaaaggttattcaatacgaagttgggtgcttctctgatcccacagtatatgccttttgttcaagttggtctgcaggcagattctcaagcagtcagatccttagcttgcaaaacagttacatcccttctggagaatctagacaatgatcacaaagttgctgctagtgcttgtctaattaaagacttcaacatatatcctctttt

SEQ ID NO: 33872 - DNA, 398 bp, Glycine max
  Clone ID: LIB3052-017-Q1-N1-H5
caataattccttcacttgcagaacttagttctctgttgcagcatcatcatcttcattagtgttagccctaaacttcaccttcaaccatgaccacagtgccaccacacagtgtccaagtgcacacaacaacacaccgctacgaagccggcgtcgtcccgccggctcgttttgaggcgccgcgttacgaagccggcatcaaggcgccctcttccatttaccattccgagagaggtccgacgacctctcaggttctcgcagttgtcgccggccttccggtcggcggcatcctcctgctcctggcaggactgaccctggctggaactctcaccgggctggtggtggcaacaccgctcttcatcatcttcagcccggtgctgattccggccacggtcgcaatt

SEQ ID NO: 33873 - DNA, 418 bp, Glycine max
  unsure (1)..(418): unsure at all n locations
  Clone ID: LIB3052-017-Q1-N1-H6
ataaaattcttccaccaagttatgggcttccttggggtgcggcttttatccctcttaggtctctctactaattccagcatatcaactcatcgatccatattggaccttgacctaaccaagtttaccacacagaaacaggtgtcttcactgttccaactatggaagagtgagcatggacgtgtctaccataaccacgaagaagaggcaaagagacttgagattttcaagaataacttgaactatatcagggacatgaatgcaaacagaaaatcaccccattctcatcgcttaggattgaacaagtttgctgacatcactcctcaagagttcagcaaaaagtacttgcaagctcccaaagatgtgtcgcagcatatcaaaatggccaacangaaaatgaagaatgaacaatattcttgtg

SEQ ID NO: 33874 - DNA, 412 bp, Glycine max
  Clone ID: LIB3052-017-Q1-N1-H7
cttgctccatccatcatctcttggcactgctccaacctctgcaaacaacaaaccaactccaccacttccccgaacttaaaccctcccaacctctccttaaactcactcaccctcacgcgcacctcaacttccacgacaccccaatcctcacgcgccagcttcacaatctcctccactaacccgttgttcccgtagacgttgttgggctcgggcctcttgcaaatcccttcaaccagagccaccaaggagtcaaactcggtcaacaagtccgcgttgaccagacccgacaccctgtcttctctgtcggtcggggttccgaggaagaatcccaggatcctggaagtgcacaggagctgctcgatgtgcttcgcgaaccatcggacccaggacgagagttcccatgatgtggggt

SEQ ID NO: 33875 - DNA, 420 bp, Glycine max
  Clone ID: LIB3052-017-Q1-N1-H8
tagttcaatatcctagtataccttaataaataatggaagagactatgatgagagcacggttcccattactgttgctgggacttgttttcctggcttcagtttctgtctcatttggcattgcttactgggaaaaagagaaccccaaacacaacaagtgtctccagagttgcaatagcgagagagactcgtacaggaaccaagcatgccacgctcgttgcaacctccttaaggtggagaaagaagaatgtgaagaaggtgaaattccacgaccacgaccacgaccacaacacccggagagggaacctcagcaacccggtgagaaggaggaagacgaagatgagcaaccacgtccaatcccattcccacgcccacaacctcgtcaagaagaagagcacgagcagagagaggaacaggaatggc

SEQ ID NO: 33876 - DNA, 413 bp, Glycine max
  unsure (1)..(413): unsure at all n locations
  Clone ID: LIB3052-017-Q1-N1-H9
gaaaaacaaaagagtagtggcctttaggtggtgaagaacaagagctcaaatcaaatcgaatcgaaaaaagaaagaaagatcatattcatggcgatggcaagcctggctcgacggaagggttacgccgtcgttttgtcgtcgaggtcgtcgttttgtctgacaagctggaggggattcgcgtccggatctgacgaaaacgacgtcgtcgtcatcggcggcggtcccggcggctacgtggccgccatcaaagccgcgcagctcggtctgaaaaccacttgcatcgaaaagcgtggcactctcggcggtacctgcctcaacgtcggatgcatcccttccaaggcacttctgcattcttcccacatgtatcatgaggctaaacatgcatttgccaaccatggngtcaagttttcatc

SEQ ID NO: 33877 - DNA, 412 bp, Glycine max
  Clone ID: LIB3052-017-Q1-N1-G9
cttcaataaccagcttgatcaaacccctagggtatggtaccgtgctgggaacccagatatagagtacccagagaccatgcaacaacaacaacagcagaaaagtcatggtggacgcaagcaggggcaacaccagcaggaggaagaggaagaaggtggcagcgtgctcagtggcttcagcaaacacttcttggcacaatccttcaacaccaacgaggacatagctgagaaacttcagtctccagacgacgaaaggaagcagatcgtgacagtggaaggaagtctcagcgttatcagccccaagtggcaagaacaacaagatgaagatgaagatgaagacgaagatgatgaagatgaacaaattccctctcacccttctcgccgaccaagccatggaaagcgtgaacaagacgag

SEQ ID NO: 33878 - DNA, 401 bp, Glycine max
  Clone ID: LIB3052-015-Q1-N1-G9
cattatttttttgtgaaatagattaattaatctattggatgtaacatatatccgttttgtagtaattattagaatttgtagtaattattataagtattagaagcagcaattcttatttatttcagattaatacttgataacctaaacaatatatctatatatagaatatagatagatatatatataatagaacgtaaaaaaaaaaaagaataataaatagaaaaaggagcatgttgattatatagaaagtaaagggcaacaatcatttttgtttaccatgggtaaggacaccatcgctgacataataacctatataagaaatgctgacatgaataaaaaaggaatggttcaaataccatttactaacataacagaaaacattgtaaaaatacttttacgcg

SEQ ID NO: 33879 - DNA, 399 bp, Glycine max
  Clone ID: LIB3052-015-Q1-N1-H10
atgagagtgcggtttcctttgttggtgttgctgggaactgggttcctggcatcagttggtgtctcattaaaggtgagagaggatgagaataaccctttctacttgagaagctctaacagcttccaaactctctttgagaaccaaaacggtcgcattcgtctcctccagagattcaacaaacgctccccacaacttgagaaccttcgagactaccggattgtccagtttcagtcaaaacccaacacaatccttctcccccaccatgctgacgccgatttcctcctctttgtccttagcgggagagccatacttaccttggtgaacaacgacgacagagactcctacaaccttcaccctggcgatgcccagagaatcccagctggaaccacttactatttg

SEQ ID NO: 33880 - DNA, 404 bp, Glycine max
  Clone ID: LIB3052-015-Q1-N1-H11
ctcatgacatggtgccacagtcgccggggttgatttgcagcgaggattcgccgcagtggttgctgaagctggtggaggggtggtttccgtggtgttacttgcacgttggagaggagttgcagttggaccataagaaatccccgtttctcaaccctgacggggatgcttcctgcgcccataacttggaggctcacttgcacttgctagatgggtgagttatagtacattaatagttagaaaaaattatatttttggtctatccctttatctctaattttaaatttaattcccactaatttaattcataaatttcatctttctattttgtgaaattgtgcaatattaacacaattaaatattgattattaataagtgatgttgataatcacatgtcacctttttat

SEQ ID NO: 33881 - DNA, 404 bp, Glycine max
  Clone ID: LIB3052-015-Q1-N1-H12
gaaaggaagcagtgattgaattggggatttagggattgggtacagtaacaatgaatgtcaagatggattccgatagcgcgaagctgttcgtaggaggcatttctcgcgacactaccgaacacgttctcaaactccacttcgccaagtacggcgtcgtttcggactccacaatctccgtagaccgcaccacccgaagccctagaggttttggcttcgtcaccttctccgacctctccgcagctgataaagccctccaagacacccacgtcatcctcggaagaacggtagaagtgaaaaaagcaattcccaggagtgaacaacatcaacaccaaaacccattacagagtagaaggggtggttattattataataataataataataataatgatgataataataat

SEQ ID NO: 33882 - DNA, 406 bp, Glycine max
  Clone ID: LIB3052-015-Q1-N1-H2
gtagcctcgagaagcgtggcaacgcctgggtactaacccgcgacggcgacgacggcgacgtgcaacaccgcctcaacccaaccctaattgattccctcctctcaacgcttaaccgtctcgcatctcaagccactcccggctccgtcctcgtcaccaccgccaccggcaaattcttctccaacggcttcgacctttcctgggcgcgcgccgccgcttccgcctccgccgccaccgaccgcctccagttcatggtggactccctcaagcccgtcttggcggcgatcatgtcccttcccatgcccaccatcgtcgccatcaacggccacgcctccgccgccgggttcctcctcgcggtcagccacgattacgtcctcatgcgcagcgaccgcggcgtgctctacatgcc

SEQ ID NO: 33883 - DNA, 372 bp, Glycine max
  Clone ID: LIB3052-015-Q1-N1-H3
atatatacatatatacgagagagtgagtaatcgagaaagagaagaagcatatatatcaaagtggctgcagagatggagagggagtcattgataactgaagctcctaatgcaccagttactgcacagagaagggtcagaaatgacttagaaaattctctaccaaaaccatacttgccaagagcattgaaagctcctgatacgggtcacccaaatggaacagcaggccacaggcaccacaacttatctgttcttcagcagcattgtgctttttttgatcaagatgacaatggaatcatttacccttgggaaacttacatggggctgcgttctattggatttaaaggtggtgcctctggtaataaggctaatggt

SEQ ID NO: 33884 - DNA, 410 bp, Glycine max
  Clone ID: LIB3052-015-Q1-N1-H4
cttaattattaacacttccttagttcaatatggtgaagcggttcgctctctctctatcttgcgtatgcttgctactcttgtcgagtgcatgctttgctattagctccagcaagctcaacgagtgccaactcaacaacctcaacgcgttggaacccgaccaccgcgttgagtccgaaggtggtttgattcaaacatggaactctcaacaccctgagctgaaatgcgccggtgtcactgtttccaaactcaccctcaaccgcaatggcctacacttgccatcttactcaccttatccccggatgatcatcatcgcccaagggaaaggagcacttggagttgcaattccaggatgtcctgagacgtttgaggagccacatgaacaatcaaacagaagaggctcaaggtcgcat

SEQ ID NO: 33885 - DNA, 407 bp, Glycine max
  Clone ID: LIB3052-015-Q1-N1-H5
cggctcgagcggctcgagcggctcgaggtttcgtctggtgcgtctttactcttgtggggaccgaagcgaaaaagaaaaggcttgacttgagagaaatagagcttcgaatcgaaactcagaattagaaaaaaacacaaatcacaatcacaatggcaaggtacgaccgagcaatcaccgttttctcccccgacggccacctcttccaggtcgagtatgccctcgaagccgtccgcaagggcaacgccgccgtcggcgtccgcggcaccgacaacgtcgtcctcggcgtcgagaagaaatccaccgccaagctccaagactccaggtgtaaaccaaaaaaaaacgacgtcgtttcaaattaaacactgatttggtgtggtcggtttcgcaggtcggtgaggaagattgtg

SEQ ID NO: 33886 - DNA, 391 bp, Glycine max
  Clone ID: LIB3052-015-Q1-N1-H6
gcgtcttcgagtttcacagcgaagtcgtaggagggtttcagaagatggagaacatgcagagcttctggcaattgggcgatgaactccgtggacactcaaaagcatcggaggatcacaaatggttaatggttgcttcgaaattggcggaacagacaagattgaagggggagcgtgtgaacaaccttgatctttcaaagggccccattgaaacaaggtcaagggataaatttgggttccaggaagagaacaaatttgattctcttaacttaagcatgttgaacctggactctaaatttactgagaatgtgagcaaaagctcgcttcgaaatggtgtttatggtatgaatgcagtgtatcagaaaaacaatgcaaacttggtgagtaatgtgat

SEQ ID NO: 33887 - DNA, 417 bp, Glycine max
  Clone ID: LIB3052-015-Q1-N1-H7
catattgttatgtggaagtagaccattttgggcacgcacggaatcaggaattttccggtctgtcttgagagcgaatcctaactttgatgattcaccttggccatccatatcacctgaagctaaagactttgtgaagagacttctgaacaaggaccacaggaaaaggatgactgctgctcaagctttagctcacccatggttgagaaacgaaaaaaatgctattcctttagatattttgatatacaagttagtaaagtcatatgtgcgtgcctcacctttgagacgtgcagcattgaaggctcttgcgaaagcattgaccgaagacgagctaatataccttagagcgcagtttaacctcttggagcctaaagatggctgcattttacttgagaattttagagttgctctcatgaaaaa

SEQ ID NO: 33888 - DNA, 386 bp, Glycine max
  Clone ID: LIB3052-015-Q1-N1-H8
gtttgttgttcaatctaacaaacttctctatatcggttactttttcaacacaccttagacacttctttatttgagcctttcatataaatatcatggcttcgagggtggtttcggttttggtgatagcgatgatgttgtttgccatgaactgtaactgcactagtgttggccacatgccttcaaccaaagaggaaggtcacgattttcaggaggctaaagccaagacaacacaaactgcgaacaaggccatggaaactggtaaagatgggaaagaagccgcagagtcatggacagaatgggctaaagagaaactcactgaaggtcttggcttcaaacatgatcaagaatccaccactaagaaagtctctgactatgccggtgatgct

SEQ ID NO: 33889 - DNA, 404 bp, Glycine max
  Clone ID: LIB3052-015-Q1-N1-H9
atttccgcagagttcgaggcgtagatatgaagaatgattgggcctttgttgaatttagtgatcctcgagatgctgatgatgctagatacaacctggatggtcgtgatgttgaaggaagtcgtattattgtggaatttgccaaggggggtcctcgtggttcccgggaccgggaatatatgggtcggggtccacctcctggatctgggcgatgctttaactgtggcattgatggtcattgggcccgagattgcaaagccggggattggaagaacaagtgttaccgttgtggggaaagaggtcatatagaaaagaactgtaagaacagtcccaaaaagttgagccaacgtggacggagtctttcacgttcaccagtaaggtcacgttctcctcgtcgtggaagaagc

SEQ ID NO: 33890 - DNA, 361 bp, Glycine max
  Clone ID: LIB3052-016-Q1-N1-A11
gctgactggttagagttagctgatcagactcggataatcacgttcacttatgagctgactgctgatgaagctaaaatacatgcaattgcaacaacagctaactctctacactcaggaacaaaatatggacaagagagaggaaattgcatgaaagctgattaattatgatctgatcattccttaatgaagtacatgcacatccacttgagtgatgaacctctgccgaaggacaacgggatttggatattgaaaacaaaagagttgtatatcatccgagatacaacttgcctagccattaataagattctatgaatacctatagcttaccaaggtcaatatacagaattgcagacataatatc

SEQ ID NO: 33891 - DNA, 410 bp, Glycine max
  unsure (1)..(410): unsure at all n locations
  Clone ID: LIB3052-016-Q1-N1-A2
gagaagcccgagggcgaccctacccgcgatgacatcatcgatagctacattaaaaccttggccaaggtcatcggaagtgaagaggaggcgaggatgaagatatattcggtttcgactaggcactactttgcgtttggggctcttgtgtctgaagagctttctatcaagcttaaagaattgcctggagttcggtgggtgcttcctgattcttacttgaatgttaaggaaaaggattatggaggtgagccctttattaacgggcaagcagttccctatgatcccaagtatcacgaagagtgggttagaaacaatgcacgtgccaatgagagaaacaggcgcaatgacaggcctcgtaatgctgacaggtcaagaaactttgaaagganganggaaaatgtggtgaacagaga

SEQ ID NO: 33892 - DNA, 177 bp, Glycine max
  Clone ID: LIB3052-016-Q1-N1-A3
atactacttttaaacattttaactcatccttcatacctaccgataatgatcactccccacaggaccagcaaactccttcctcacaaactgcttcaaactacaacacctccttccacaaccaaattcccaatcttaaacaccacaatttcaaaatcaacatcctcctataccaccctc

SEQ ID NO: 33893 - DNA, 381 bp, Glycine max
  Clone ID: LIB3052-016-Q1-N1-A4
attagtgttcatgaatacgtcaagccttactttagtggttgtaaattgaaaagctttctagctggtcataatatcaccattactgatggtattgacaagactagtgcaactttgcaatttagaaagttagcagattgtgattttctcaagagaaactttaagcagatgtctaatgttttgtgggtagctcctgaggacaaggcgagtttatggtcacaacttcattatgtttcgtgtaataatctggaaatgcaagaagcttatcttgtcaatctcgtaaatgtgttacgagaattgtatttgcacagtccagaggaagctcgccaattgagaaggaaagctctctctcgtattgaatggctgcaaaaagctgatgtgcct

SEQ ID NO: 33894 - DNA, 374 bp, Glycine max
  Clone ID: LIB3052-016-Q1-N1-A5
tgaaagggtacaaggtttggaactcaaccttcatacctttgaataataatctctccccaaattaccccttaaccccttcttccaatacggcttcaaactacaccctatccttccaaaaccaaggcccaaatcttaaagctcaaattttaaaaccccacatttttatatgcgcctctgtgcccagtccgcaggcaagcagcgtttccacggttcaagctgaggaccaagaggttgaaattgcaaggggttacactatgacacaattttgtgacaaaatgatagatttctttttgaatgaaaaaactaaatcaaaagaatggaagaagtacctgatatttagagaggagtggaaaaaatacagtgatagatttttc

SEQ ID NO: 33895 - DNA, 275 bp, Glycine max
  Clone ID: LIB3052-016-Q1-N1-A6
attagagaacatgaatactataagccttactttagtggatctaaattgaaaagctatctagctggtcataatatcaccattactgatggtattgacaagactagtacaactttgcaatttagaaagttagcagatcgagattctcacaagagatactctaaacagatgtctaatgtgttgaatgtagactcttgaggacaaagcgaatgtacggtcacaatggcattatatttcttgtaacaatcaggctaagccagatgcttatcatggcaatg

SEQ ID NO: 33896 - DNA, 381 bp, Glycine max
  Clone ID: LIB3052-016-Q1-N1-A7
atcctactaaaaaacattgcccttgttctttcaaagttaccggacacaagtacacaacacaacagcaacatatggcgtctgaacaattgggttcgcagagaggacaacaacaaccggaaaggaaatcacggtgagaaacacaaggttcccaagatgggcaaccactttgagcaccttgcggagcaagctaaagaatctgacatcaccgctgggaaagatactccgcaaggtagcatagaagccttgcaagctggaaagaaggtcaaagatcatgcaggaaaagccatgggagatattggtggacgtgggaaagccagagagactcacgagctgggtgcacactttgaatccctggctgacaaagtaactgaccatgcagca

SEQ ID NO: 33897 - DNA, 419 bp, Glycine max
  Clone ID: LIB3052-016-Q1-N1-A8
cttccatagctccccaaaaatgaagagcaccatcttctttggtctctttctcttgggtgccttcaccacctcatacctaccttcagccatcgctgatttcgtgctcgataatgaaggtaaccctcttgaaaatggtggcacatattatatcttgtcagacataacagcatttggtggaataagagcagccccaacgggaaatgaaagatgccctctcactgtggtgcaatctcgcaatgagctcgacaaagggattggaacaatcatctcgtccccatatcgaatccgatttatcgccgaaggccatcctttgagccttaagttcgattcatttgcagttataatgctgtgtgttggaattcctaccgagtggtctgctgtggaggatctaccagaaggacctgctgttaaaattggtg

SEQ ID NO: 33898 - DNA, 360 bp, Glycine max
  Clone ID: LIB3052-016-Q1-N1-A9
atgaaaaagttttgcgttaaaggacacattcgctgctgactgtggagatcaaggatggcaatatgtgctaaagatgtttggagagtataatgtggaatcccttttctatttacactcacagttatttgcaatagcatttctaatgagatgctcattagatatagctatgaaaaattactgcgccaggctatagctacaagtatgtttttacaatactttaataattatggatctctgtgagtgtatggtgatgataacttaattagtgatcatgaatatgtcaagccttactttagtgggtctaaattgaaaagctttatacctggtcataatatcaccattactgatggtattgacaaa

SEQ ID NO: 33899 - DNA, 412 bp, Glycine max
  Clone ID: LIB3052-016-Q1-N1-B1
atagcatctcctttaccaccattctagatatcagagaactgtgcagctctcttaggtttttaaaaaacaccacgcaaacagcaagatggccacttccgacagtaacatgctactaaattatgttccagtttatgtgatgctcccactcggagttgtcaatgttgacaatgtttttgaagacccagatggccttaaagaacagctcttgcagcttcgagctgcgggtgttgacggggttatggttgatgtgtgggtggggatcatagaactgaaggggcctaagcagtatgattggagagcctaacagagtttgtttcagctggttcaagaatgtggcttgacactgcaagctattatgtcattccatcaatgtggagggaacgtaggagatatagttaacatcccaattccc

SEQ ID NO: 33900 - DNA, 384 bp, Glycine max
  Clone ID: LIB3052-016-Q1-N1-B11
ctcatcccggacctcgtaattagcctcgagggcttgacctcatctgattccaacaagctcggcaaggggaccgagattaccccagaggagaaccctcagcttctggacttggatgtcttcctcactgttgtctatatgaacgagggagctctttttctgccacacttcaattcaaaggccatactggtactagtgattaatgaaggagaaacaaacattgaacttgatggcattaaagaacaacatcacaggcagcaacaggaagagcaacctttggaagtgcggaaatataaagctgaattgtctgaaccagatatatttgtaatcccaacaggttatccagttgtggtcaacgctacctcagatctgaatttctttgctttt

SEQ ID NO: 33901 - DNA, 403 bp, Glycine max
  Clone ID: LIB3052-016-Q1-N1-B12
tgcgcatcgctttctctctcgcgcgcgccgcttttctctcgggcgcgctgcacggttttgcgtgatttagctctttttctacgaccacaatgggtaaagctaaaaagggaccaaagtgtgctgatatgatgaagatcgtcacttccaaagcaatctacagctacatagaacaggttttgatcccagcagagaagaatcttatgatggaaaagttacccactaatgttctcaactcattcttaagcgctttgatttcaatacatcattgaactgggaccccattatatgaacaggtggacaccaacttcatcaatttctcgatccacattaaattggatctggagatacggatgatggactgcttatatgtcgaatgcacctcctgtattacggacttggtgat

SEQ ID NO: 33902 - DNA, 294 bp, Glycine max
  Clone ID: LIB3052-016-Q1-N1-B2
cttcaattctttcgttttgttagtgaatatggaaggtggtttggaacgatttaaaggcaccgtttttgtcaagtaatagtggtgagctcagtgaagtcactcgtctcaaatgcgattttttctccaaattgcctgataaagttcggtgtggtctcgatcctgatctctcttttcacattgactactcaaaggcaactggcttaacagaaggggagaaagagtattacgaaaggcaattttccaccctaaagtctttcgaggaggttgattcaactgaatcttccaatgtcattg

SEQ ID NO: 33903 - DNA, 428 bp, Glycine max
  unsure (1)..(428): unsure at all n locations
  Clone ID: LIB3052-016-Q1-N1-B4
aagccttactttagtggttctaaattgaaaagctttctaggtggtcataatatcaccattactgatggtattgacaaaactagtgcaactttgcaatttagaaagttagcagattgtgattttctcaagagaaactttaagcagatgtctaatgttttgtgggtggctcctgaggacaaggcgagtttatggtcacaacttcattatgtttcgtgtaataatctggaaatgcaagaagcttatcttgtcaatctcgtaaatgtgttacgagaattgtatttgcacagtccaaaagaagctcgccaattgagaaagaaagctctctctcgtattggatggcttcaaaaagctgatgtgcctaccatagcacagattgaaaagttccattcgatgcanaggatgatgaatgctcctgattcaaatgataa

SEQ ID NO: 33904 - DNA, 386 bp, Glycine max
  Clone ID: LIB3052-016-Q1-N1-B5
gttcctcactgaccaagccatggcgatgagaagcaaagtttctttagctatctttttcttttttcttttagccttattttcaaacctagcctttggcaaatgtaaagaaaccgaggtagaagaagaagaccctgagctcgtaacatgcaaacatcaatgccaacagccacagcaatacactgagggtgacaagcgggtatgcttgcaaagatgtgacaggtatcatcgtatgaagcaagagcgagagaaacaaatccaagaggaaactcgtgagaagaaagaggaggaaagccgtgaaagggaagaagaacaacaagagcagcatgaggaacaagatgaaaatccctacatttttgaggaagataaggattttgagaccagagtcg

SEQ ID NO: 33905 - DNA, 424 bp, Glycine max
  Clone ID: LIB3052-016-Q1-N1-B6
agagcgaagagaatggctcccaagggtttaatctttttggctgtgttatgcttctcagcactgtcactgagtcgttgtcttgcggaggataatggacttgttatgaacttctacaaggaatcatgccctcaggctgaagacatcatcaaagaacaagtcaagcttctctacaagcgccacaagaacactgctttctcctggctcagaaacatcttccatgactgtgctgttcagagttgtgatgcttcactgttgctggactccacaagaaggagcttgtctgagaaggaaacagatagaagctttgggttgagaaatttcaagtacattgagaccatcaaagaagctttggaaagggaatgcccaggagttgtttcctgtgctgatatcctcgttctctctgccagagatgggcattgttcgc

SEQ ID NO: 33906 - DNA, 411 bp, Glycine max
  unsure (1)..(411): unsure at all n locations
  Clone ID: LIB3052-016-Q1-N1-B7
ctgattttgaatcttagtggaaaaacttcaaaaaatagaaagaaaacatcataccgattcttcattagaaaaacccaagtacaacgagagaaatcttgtatagatgtgacaaaataaaaataatctaatttggaatagactcaattgggaccccaaatattggagtgaactaagacaaaaggtaacgcatcacccttattgacatgagagccataactgatacgagtatgtttacctagttgacacgactcgcatggaaaggacttaaaattagaatgattgggaactaatacatgcaaatgcagatgagacacaaacaacccgaggtgtaagttgatataatcctncagactcatatcctgctccaatcatccattcagtgcgtcgatcttgtacaagaacgaaattact

SEQ ID NO: 33907 - DNA, 353 bp, Glycine max
  Clone ID: LIB3052-016-Q1-N1-B8
gatttaatattgacgctctacaaaatcccaatggttgtgagtctgataatgagttgagtgatgccttctgggaaaacttgagtgtctgtgaatatgcactgtacaacgttgatgcaagactatatgttgatcagagatgcttgtatttgcaaaagcctcttcttgagtctgcaactctcggagccagatgcaatacgcagatggtaattgcccacctgacagaaaactatagtgcattaatagatccacctgagaaacaggcaccaatgtgcactgtacactcatttacacacaatattgaccattgcttgacatgggcgcgaactgagtttgagggtttgcttgacaaaact

SEQ ID NO: 33908 - DNA, 340 bp, Glycine max
  Clone ID: LIB3052-016-Q1-N1-B9
aagaaaacgttttctaataattagaaacatagaacagaagatgtgacttaattgagcgttgaggatgcatcgaggaaagaaagcggcagagtccattaaggaaacagctacaaacattggtgcttctgccaaggctggcatggagaagaccaaggccactgtccaagagaaggcagaaagaatgacagcacgtgatccggtgcaaaaggagttggcaacccaaaagaaagaggcaaagatgaaccacgcggagctggacaagcaagcagcgcgtcagcataacacggcggccaaacagtccgtcaccacggctgggcacatgggacatggccaccacacc

SEQ ID NO: 33909 - DNA, 355 bp, Glycine max
  Clone ID: LIB3052-016-Q1-N1-C1
aagagagttttttttgttcctcactgaccaagccatggcgatgagaaccaaactttctttagctatctttttcttttttcttttagccttattttcaaacctagcctttggcaaatgtaaagaaaccgaggtagaagaagaagaccctgagctcgtaacatgccaacaccaatggcaacaggcacaggaattcactgtgggtgacacagcgggtattcctggcagatatgacacgggtttaatcgtgtgacgcgagagcgagagacacatatccgaggggaaactcgtgaaaaaaaaaggaggggaaagccgtgaaaggggaagaagaacaacaagagcatcatgaacaacatga

SEQ ID NO: 33910 - DNA, 268 bp, Glycine max
  Clone ID: LIB3052-016-Q1-N1-C10
aataactccttttacttccacgtcaattacttaaccataatgactttttttaacgcaatcatgctcatcacacatccattctcgctaatcattctctaacaactactatcctctcaatagcaccatcatatctattaccctacatatcatactgtcacactcttcatacacacattctcctatcaccaaaccatacttattctacacatactcaccaaattccatactctactcaacatcataccatcctacttaatctcttcaatca

SEQ ID NO: 33911 - DNA, 419 bp, Glycine max
  unsure (1)..(419): unsure at all n locations
  Clone ID: LIB3052-016-Q1-N1-C12
caagagagagatagaaggtttggaagaatcgcgatggaggagtangagggaggaggcataatgctgagcaagcgaatcgcaaacggagaggttgactacaagacgaaatccggcaccgactggagccactcctatctcaaccagaagccatggcaccctctttcttaccccaaccaacgccgcaagtggatcgccgaacagacccacgccaatcgccaacgccgcaccgaagaggtttctcgcgagttcgctcaggagcaagagttctttcgccaaaccgctctcatctccaaaaaagagaatgaaaaggtggagctcatgcaagctgttagtttcatgtacgttcgtcctccgggctacaacgccgagagtgccaaagctgctgaaatgaacgacgagaagaaaaaagaggacatgag

SEQ ID NO: 33912 - DNA, 308 bp, Glycine max
  Clone ID: LIB3052-016-Q1-N1-C2
cgatttgtggttcgctttagcaacaaggacattgttgcacagataatgtctgctagcattgccggcgatttagttcttgctacagcatattcacatgagctgccacgatatggtcttgaagtaagacttacaaattatgcagcagcttattgcactggtctcctgttggcccgaagagtcctcaaaacacttgaaatggatgaggagtatgaaggaaatgttgaggctactggagaggattattcagtggaacctgcccagagcaagaggccatttcgtgcactccttgatgttggtcttgttaggac

SEQ ID NO: 33913 - DNA, 297 bp, Glycine max
  Clone ID: LIB3052-016-Q1-N1-C3
gacaatactataaccaccaagcttgttggcccatcgggcgggatcgaatgcttagatggaaaagatgtttctctatcgcaaataaggaagttgactggtgctaatattccaattttgcctagagacgagctacctctctgtgatgcagaaactgatgaactggtaccgatcgctagagagattaaagcaagccgagatgctgttgttgatgtgacttcaagattaaggagttacttgtacagggattactctcacagggacacaggaccactaccagctcccttacctggtgcggcg

SEQ ID NO: 33914 - DNA, 345 bp, Glycine max
  Clone ID: LIB3052-016-Q1-N1-C4
ctggattcttcaaatcaaatggcacgtatgtcactgagaaagggaagttcttcttgacctggtattctaacaaattgctgaatcatggtgatcaaatactagatgaagccaacaaagctttcctgggctgtaaagtcaaattagcaatcaaagtatctggaattcactggtggtacaaagttgaaaatcatgctgcagagcttactgctggatattacaaccttaatgatagagacggataccgccccattgcaaggatgctgtctcgccatcatgccattttgaactttacatgtcttgagatgagggactcagagcaaccctcagatgccaaaagtggaccac

SEQ ID NO: 33915 - DNA, 406 bp, Glycine max
  Clone ID: LIB3052-016-Q1-N1-C5
atacgttcatgacttgttgctctaaacccaaaaacacctcagaaatatttagttagaactattacattgatccatgcactcacaaaagatgtacctaaatgactaagttggtatatatatcaaatacattcatataattcatggctatggctattgtatattaagaagttgacatagaaatgaaataattgacccatctctagtcaggtcgattgttttaatacattacaaatagtttttactaacatatgctactatgttttggatttcttttcttgtttgcaggaaaactttgccggtggaagaaatcttgaccattgacattaaacccggttggaaaagggggacaaagatcacattccctgaaaaaggaaatgagcagccaaatgttattgctttcgatctt

SEQ ID NO: 33916 - DNA, 428 bp, Glycine max
  Clone ID: LIB3052-016-Q1-N1-C7
aatctgcttttgatttgaatttcacaccccgtgagtttgatgagcttggatgaagttcatggactctattcaggcggaattaagctgccaacagatataatcagcaagattagtccactacccgtgcttaaggaaatcttccgaactgatggtgaacaggcccttaagtttcctcctcctaaagtaattcaagtgagtaagtctgcatggatgactgatgaagaatttgcaagagaaatgcttgctggtgtaaatccaaacttgattcgttgtcttaaggatttccctccacgaagcaagctagatagccaagtctatggtgatcatactagtcaaataaccaaagaacacctagagcccaacttagaagggctcactgtagatgaggcaattcaaaacaagagattgttcctactagatcatcatga

SEQ ID NO: 33917 - DNA, 330 bp, Glycine max
  Clone ID: LIB3052-016-Q1-N1-C9
tacctacagctcggaactcagatttagactcgaggcttttaccttatctattacaacaagctaaacaaggtttaggttattacgccacacgggaaccctcatcttctgaacttgcatgtctctctgagagatgtggatatgaacgagggagctctttttctgccacacttcaattcaaaggccatagcgatactagtgattaatgaaagagaagcaaacattgaacttgttggcattaaagaacaacaacagattcagcagcaagaagagcaacctttgtaaatgcggaaatatacagctgaattgtctgaacaagatatatgtgtaatc

SEQ ID NO: 33918 - DNA, 239 bp, Glycine max
  Clone ID: LIB3052-016-Q1-N1-D10
ccccactagctattacttcactctcagcactgatgcatcatgatcttgattgcaggaccctaaacttcaccttcaaccatgaccacacaagtaccaccacacagtatccaactccacacaacaacacaccgctacgaaactggcaatctcccccccagagcccgcttctaaccgcctaattatgaagccagcgtcaaagcgccctacatttaccatacctagagaggtccaactacttc

SEQ ID NO: 33919 - DNA, 269 bp, Glycine max
  Clone ID: LIB3052-016-Q1-N1-D11
ggtcaagttgcttcagactgcgctcttcaatggccacccttggtgttgataaccaggcttcttctgctcaagatgctgacgctctcctacacgctttacaaggacgtgcggctgatcacaccgccataatcgctctactgcgtcacagagatgatcatcagacgcaagaaatcattttagcttatgtcgcgatatatccagaggatctcatcatacgccttgagttcgacatctctagtgactattacagagctttgtaccgctggatg

SEQ ID NO: 33920 - DNA, 132 bp, Glycine max
  Clone ID: LIB3052-016-Q1-N1-D12
tatctctcgcttccacttcctagcccataatcatcatccactgtctccgtcaacagggcctcacggtctttcaccactctcatttccactgctcacaacgatctggatcccaacatttacaactcccatccc

SEQ ID NO: 33921 - DNA, 393 bp, Glycine max
  Clone ID: LIB3052-016-Q1-N1-D2
gaaatatcattttccgagacaatcccatcttccatttccatggtcagtgatttcttctcatcgagaagcttcgcgaacgaaaacaaagaaccctagacagatccattccatagccatgtcaggtgttggccctctatctcaggattgggaacccgtcgtcctccgcaagaaggctcccaccgtcgccgtcaagaaggacgagaaagccgtcaacgccgcccggcgctccggcgcggaaattgaaaccctaaaaaagtataatgctgggacaaataaagcagcatctagcagcacttcattgaacactaagaagctggatgatgatactgagaatctagctcatgagaaggtaccaactgaacttaagaagggctatatgcaagctaggatgga

SEQ ID NO: 33922 - DNA, 323 bp, Glycine max
  Clone ID: LIB3052-016-Q1-N1-D3
gatattctcttgggaatttctcaagattttgaaattgctgggaatactcttatgccagctttttctgttccacaggctactgccagatcttctgaaaatgcggaatcctctgcatgatctggaatttgtgttttctttcgcttgttcgtttgtttaattcaataaaggaaattaggcatgaccctcttgttgagtatgctctgcctatttgaaaatttccacacctcttttaattgtcgtaatgatgtgtgaagtgtgtgttattttaaaaaaaagaactcatgaaaaatgatatgagtggttcaacaacaattttaggaaca

SEQ ID NO: 33923 - DNA, 399 bp, Glycine max
  Clone ID: LIB3052-016-Q1-N1-D5
gagagagagagagaaactgagagaaattcgcaaaccctaatttcggaaagatcggcgatggctgcctccaaggatcgcgagaacttcgtctacatcgccaagctcgccgaacaggccgagcgatacgaagagatggtggaatcaatgaagaacgttgcgaatctcgacgttgaactgactgtggaggagcggaatttactttctgttgggtacaagaatgtgattggtgctcggagagcatcgtggaggatcctgtcttccattgagcaaaaggaagaaacaaaagggaacgagttgaatgcgaagcggattaaggagtacaggcagaaggttgaattggagctttcaaacatctgtaatgatgttatgacagtgattgatgagcaccttatcccttcg

SEQ ID NO: 33924 - DNA, 206 bp, Glycine max
  Clone ID: LIB3052-016-Q1-N1-D6
cgatccatctacacggtcaaaaagaaaatcgtttgccttgggaaaatacggacacagagacagagagagggagagagagaaggaaatggaaagcccaaagttctaatggttggtaatggggttcttggcattgtccttgggaccatccaggcctggggttaataaggtagttaagaatgaaaagaaggccaaccttttgcaagcaa

SEQ ID NO: 33925 - DNA, 411 bp, Glycine max
  Clone ID: LIB3052-016-Q1-N1-D7
tgtgctcacaccaggggtgttggcagaagaggcagctaagagtgcttctacctacagtgatgttttcactgctaaaatattaaatgccgagcaatgtgctgaattaaaaatgggatcctatctgggtgttgctgcagcctcggaaaatcctcctcattttatccatctatgttacaaacctctgagtggacctgtcaatgtcaagttggctttagttggcaaaggtttgacttttgacagtggtggctacaacatcaagactggacctggctgttcaattgaactcgtgaaatttgatatgggtggttcaacaacagttttaggaacaacgaaagctcttggtcaaatcaaacctctaggggttgaggttcattttattgttgcaacctgtgagaatatgataagtggaac

SEQ ID NO: 33926 - DNA, 345 bp, Glycine max
  Clone ID: LIB3052-016-Q1-N1-D9
cacaactacattaaagaacttgcttataaccaaaaccaacaggacctatggcaaggtatcagaagcactacgatgatcacggttgcatggtcgacgagtatggcaatgttgctaggcaaactgacgaatatggcacacccgcttcatgccactagtgtcacttatgtagccaccaaaagagtaggtggctacaatgatgacgctcataagcaacatgatattactggtgtctatgctgagatagacacctgtagacatcattctggtcgtggttactaccgtgacactaacaagcaacatgatgctactggtgtttatccacgtaatagacattggtagaaatca

SEQ ID NO: 33927 - DNA, 416 bp, Glycine max
  unsure (1)..(416): unsure at all n locations
  Clone ID: LIB3052-016-Q1-N1-E1
gatgtgacaggtatcatcgtatgaagcaagagcgagagaagcaaatccaagaggaaactcgtgagaagaaagaggaggaaagccgtgaaagggaagaagaacaacaagagcagcatgaggaacaagatgaaaatccctacatttttgaggaagataaggattttgagaccagagtcgaaactgaaggtggcagaattcgggttctcaagaagttcactgaaaaatccaagcttcttcagggcattgagaacttccgtttggccattttggaagctagagcacacacgttcgtgtctcctcgccactttgattccgaggttgtttttttcaacatcaaggggcgagccgtacttgngttggtgagtgaaagtgaaacaganaaaatcacccttgaacctggggacatgatacacata

SEQ ID NO: 33928 - DNA, 407 bp, Glycine max
  Clone ID: LIB3052-016-Q1-N1-E10
ctgtttctgttatctggaacaagttcgtgccgaagcaaccagtcatgggcctacgaggagacgctgttgtgacctcctcgggaaagttacaactcaataaggttgacgaaaacggcaccccaaaaccctcgtctcttggacgcgccctctactccacccccatccacatttgggacaaagaaaccggtagcgttgccagcttcgccgcttccttcaacttcaccttctatgcccctgacacaaaaaggcttgcagatgggcttgccttctttctcgcaccaattgacactaagccacaaacacatgcaagttatcttggtcttttcaacgaaaacgagtctggtgatcaagtattcgctgttgagtttgacactttccggaactcttgggatccaccaaatccacac

SEQ ID NO: 33929 - DNA, 338 bp, Glycine max
  Clone ID: LIB3052-016-Q1-N1-E12
atcaacaagcgttcgatgtcgagaaatcgcgtcttacccctgtttgtgcactaagtgtatgtggatataccatgacggacaatgtctactcagctgtgccaagagtgcaggtgctggtttctttagaatctactatgttgcgagtagtgatgcacttaaacgtgcatcccttgatctgctattatcctgcatgttaatgatagtaagtaattaagtattattacttttttgatcgtagctattacgatggatgctaactatgtctgtggcataacttctcttgaaacataactgtattcttctctaggtacttccttaccctctatctactctttttc

SEQ ID NO: 33930 - DNA, 354 bp, Glycine max
  Clone ID: LIB3052-016-Q1-N1-E2
ggctcactgagaaaacaatttttacttgcagagatttggacgtcttggttgtttattatacaatagcaactcaatttagaaaatttctaccgcattacattaggtggcatctgtacaccttgttgatctacattctcccatcttttctcactgctgaaattaaatataagcggaatttgagtaatattcatatttccggcttattttacgacggcagatacaaattctggactaaacacgagaaaaatcttgctttgacagaagaggaaaagatggaggtgattagaaatagaggcattcctgctggaggtctttgcaaacgagctcatgaatttggaaaacatggtgctcatg

SEQ ID NO: 33931 - DNA, 398 bp, Glycine max
  Clone ID: LIB3052-016-Q1-N1-E5
cacacacaactactacaagtacttacttacgatcaagaccggcaacagctatggcgagttatcaaaagcactacgatgatcagggtcgcaaggttgacgagtatggcaacgttgagaagcaaaccgacgaatacggcaaccctgttcatgctgctagtgtcacctatgtagccaccagaactgctgctggtggttacagtgatgacattaataagcaacatgataccaccaatgcctacggcgtagacactggtagacagcattctagtggtggctacgatggtgacactaataaacatcatggaactactggtggctataatgatgacaccaatagacatcatggaactacccgtgtctatggtatagacaccgataggcaacaacatgggactact

SEQ ID NO: 33932 - DNA, 387 bp, Glycine max
  unsure (1)..(387): unsure at all n locations
  Clone ID: LIB3052-016-Q1-N1-E6
aaccttgctctatactacacagtacacacactagaggaatagtggcttccatcctccactactctttagccctctctctttcttgctcttttcttttcttcttatccgactcagtcacccctacgaaaccaataaaccttgttgttctacccgttcaaaatgatggttccacagggctccattgggccaaccttcaaaaaagaacccctctaatgcaagtaccagtcctggtggacctcaatggaaatcacttgtgggttaactgtgaacagcaagactcatccaaacgtacccagcacnctttctgcactcaacccaatgctctagagccaacacccaccaatgcctcatttgccccgcgcatcaggccagggtgccacaaaaaca

SEQ ID NO: 33933 - DNA, 245 bp, Glycine max
  Clone ID: LIB3052-016-Q1-N1-E7
tcttatccgactccgtccccattccccaacaccacactaacgctaccaaacctataaaccttctggttctacccgttcaaaatgatgcttccacagggctccattgggccaacctccaaaaaaggacccctctaatgcaagtaccagtcctggtggacctcaatggaaaccacttgtgggttaactgtgagcaacactactcatccaaaacataccaagcacccttctgccactccacccaatgc

SEQ ID NO: 33934 - DNA, 275 bp, Glycine max
  Clone ID: LIB3052-016-Q1-N1-E9
cgtctcgaggtttttgaacactcatcaccatggccaagcttgttcttgtccttaggttacttctgctcagaggctgcttctctctgagagagcaagcacagcaaaatgagtgccagattcaaaagctgaatgccctcaaaccggataaccgtatacagtccgacggtgggttcattgagacctggaaccctaacaacaagccattacagtgtgccgacgttgccctctctctgtgcacccttaaccgaaatgcccttcgtacacattcctacacc

SEQ ID NO: 33935 - DNA, 319 bp, Glycine max
  Clone ID: LIB3052-016-Q1-N1-F1
aagaacttccttataaccaaaaccaacaacaactatggcaagttatcagaagcactacgatgatcagggtcgcaaggtcgacgagtatggcaatgttgagaggcaaactgacgaatatggcaacccggttcatgccactagtgtcacttatgtagccaccaaaagtgttggtggctacaatgatgacgctaataagcaacatgatattactggtgtatatcccgagagagacaccggtagacatcattgtggtcgtggttacgacggtgacactaacaagcaacatgatgctactggtgattatcccggaatagacatt

SEQ ID NO: 33936 - DNA, 406 bp, Glycine max
  Clone ID: LIB3052-016-Q1-N1-F10
gtgctattgactaacagcaacagtacttaccattatgatgcgtgtcagttaacaggatcgtaaccacattcctgagaatcgatcttcccaatataagtatgctgtcctaataatggatctgaaatgcggatatctgagtggtcaaaataaacttcatggcatctagagtttccttattgacaatcccaaacagtatacagattacgacattctcttgcgaatttctcacgatttctaaattgctgacaatactcttatgccagctatttctgtttcacatgctactgccagatcttctgaaaatgctacaatcctctgtatgatctgcacttagtgacatctttcatttgtccgtttgtataattcaatcaccgaaattaggcatgaccctactgctgaatattct

SEQ ID NO: 33937 - DNA, 410 bp, Glycine max
  Clone ID: LIB3052-016-Q1-N1-F11
gttcaatatcctagtataccttaataaataatttacgatgcggtgatgagagcacggttcccattactgttgctggcacttgttttcctggcttcagtttctgtctcatttggcattgcttactgggaaaaagagaaccccaaacacaacacgtgtcttcagagttgcaatagcgagagagactcgtacaggaaccaagcatgccacgctcgttgcaacctccttaaggtggagaaagaagaatgtgaagaaggtgaaattccacgaccacgaccacgaccacaacacccggagagggaacctcagcaacccggtgagaaggaggaagacgaagatgagcaaccacgtccaatcccattcccacgcccacaacctcgtcaagaagaagagcacgagcagagagaggaaca

SEQ ID NO: 33938 - DNA, 404 bp, Glycine max
  Clone ID: LIB3052-016-Q1-N1-F12
tgtatactgtttctgaccaatgttatcctgagtgggctccagttaattgtcgaggtcatcgacttccaattcacatcacttaaggaaattatatcagaaagcaagatgtcagcattgaatatgatgcatgtacaattccaaatgatattggatcattggttgatgccaatgttgctaaatcacaaacatatagttgctttccatgttgctgtaagcatatgaagactgtgatatgcatcattgataccatatgtttagccagtagttcatgctctaagtgctgaagtttactttgacttcttcactgaggagcatgattgtcaagacatagttgctcacattggtgaattgaaatctagtgtctatgttccactgcctacaaaaactaatactattgaatctcc

SEQ ID NO: 33939 - DNA, 279 bp, Glycine max
  Clone ID: LIB3052-016-Q1-N1-F3
gcttcactactaaccacaacaccaataccccctccgctaccgtaacgatccacaccaacaaacccgttcctccacccaccaggtcgtcaaggccgtcaccgccgtcacagcgggcggctccctcttgatcctcgcctcgttgatcctcgccgacaccgtcattgccctcaccatcgtcacccctctgttcgtcattttcagtccggttctcgatcccgccgtaatcaccgttgcgctcctgagcctggggtccctcgcctcgagtgagttcggtgtggc

SEQ ID NO: 33940 - DNA, 328 bp, Glycine max
  unsure (1)..(328): unsure at all n locations
  Clone ID: LIB3052-016-Q1-N1-F4
aaaaagttgtattgaaattttcacaagaggaatttcttacagcttggtcaactcaggtgcgtcctgcaacaactctgttggctgatgggtgcccatatttgtatgctatggtgcatgatagttcagtgtctacaataccaggtgattttgtcattggtgttaagttgacaaccataaacaatatgtgtgcatatgggctcaatcctggtatttcaggttctcgtcttttgggcaccattcctcagtccatttcacagcaaactggtttggaatcaaatggcaacagtgagaacaccattgaattntgattctagcaagcagagctttt

SEQ ID NO: 33941 - DNA, 215 bp, Glycine max
  Clone ID: LIB3052-016-Q1-N1-F5
cggctcgagctccattggtccttaaacactcatcagtcatgagcatggccaagctagttttttccctttggtttctggttttcaatggcttctggtttcctttcaagtccaaaaaaccaccctaggcaaaccaattgcaaaacccaaaacttaatggccttaaaccggattacccgattgagtccgaaagaaggctcattgggaaactggaaccc

SEQ ID NO: 33942 - DNA, 346 bp, Glycine max
  unsure (1)..(346): unsure at all n locations
  Clone ID: LIB3052-016-Q1-N1-F6
gaggaagatgaggatgaggatgaggaacaagatgaacgtcaattcccattcccacgcccacctcatcagaaggaagagcgaaagcaagaggaagatgaggatgaggagcagcagcgagagagcgaagaaagtgaagattctgagttacgaagacataagaataagaacccttttctcttcggctctaacaggttcgaaactctcttcaaaaaccaatatggtcgcattcgcgtccttcagaagttcaaccaacgcttcccacaacttcagaatctncgagactaccgcattttggagttcaactncaaacccaacacccttcttttccccaaccatgctgacgctg

SEQ ID NO: 33943 - DNA, 407 bp, Glycine max
  unsure (1)..(407): unsure at all n locations
  Clone ID: LIB3052-016-Q1-N1-F7
tttgaagaacaacatggtggtgctaaaggtgtgtttgttgcttcttttccttgtgggggttacagctgcacgcatggaactgagcttcttcaaaagtgatcagtcatcaagttatgatgatgatgagtattcaaaaccatgctgtgatctctgcatgtgcacacgctcaatgcctcctcaatgcagctgtgaagatattaggctgaattcatgccactcagattgtaagagctgtatgtgcacacgctcacagccaggacagtgtcgttgtcttgacaccaacgacttctgctacaaaccttgcaagtccagagatgactagaaaaactaatagctctctcaaatggacgaagcccctttaagctttgnttggtatgttaggggagaccaattaaaccaggaattaa

SEQ ID NO: 33944 - DNA, 122 bp, Glycine max
  Clone ID: LIB3052-016-Q1-N1-F9
ggcatcaatattgggctttgcgctatatcacaagcggtatcggtacagtgcaagctggttggttgcctaactgtgcgcacggcttgctatggtgtcttgaagtttggtatggaaaatcgtgc

SEQ ID NO: 33945 - DNA, 393 bp, Glycine max
  Clone ID: LIB3052-016-Q1-N1-G1
ttcttaggacagagacagactaccaaggttttcattgtgcagtgcaaggctaaaatcatcatgcatttccatggacttgcattatggtatcctcactttgtgactcgtgagatcattccaaaagtgatgaagtgtattcgttgacatgctgtgatctcttcatattcacacgctcagtgcctcctcaatgcagctgtgaagatattacgctgaattcatgccactcagattgtaagagctgtatgtgcacacgctcacagtcaggacagtgtcgttgtcttgacaccaacgacttctgctacaaaccttgcaagtccagagatgactagataaactaatagctctctcaaatggacgaaacccctttaggctttggttgttatgttaggggag

SEQ ID NO: 33946 - DNA, 169 bp, Glycine max
  Clone ID: LIB3052-016-Q1-N1-G10
ctctaaccgttcattattaacacttccttagttcaataagggcaagcgcttcactctctctctctcttacctcagcttgctactcttgacgagtgcatgctccgctattagctccagcatgctcatcgagtgccaactcaacatcctcaacgcgtcgaaaccctacctc

SEQ ID NO: 33947 - DNA, 378 bp, Glycine max
  unsure (1)..(378): unsure at all n locations
  Clone ID: LIB3052-016-Q1-N1-G2
gcagcacctttaaacgccgaaggttcatccaatctccgaaggccttcaccggattgcaaccatgtcgaggagaaaggttagagagccaaaggaggaaaacgtgactctgggcccagctgttagagatggtgaacatgtttttggagtcgctcgcatctttgcctccttcaatgacaccttcattcatgtcactgatctgtctgggagggaaacacttgtccgcatcactggcgggatgaaggttaaagctgacagagatgaatcatctccatatgctgctatgcttgctgcgcangatgttgctgctagatgcaaggaactgggcataactgctcttcatatcaagctccgtgccacaagtggaaaccagacaaaaac

SEQ ID NO: 33948 - DNA, 398 bp, Glycine max
  Clone ID: LIB3052-016-Q1-N1-G3
cttaaacactcatcagtcatcaccatggccaagctagtttggtccctgtgttttctgcttttcagtggctgctgcttcgctttcagttccagagagcagcctcagcaaaacgagtgccagatccaaaaactcaatgccctcaaaccggataaccgtatagagtcagaaggagggctcattgagacatggaaccctaacaacaagccattccagtgtgccggtgttgccctctctcgctgcaccctcaaccgcaacgcccttcgtagaccttcctacaccaacggtccccaggaaatctacatccaacaaggtaagggtatttttggcatgatatacccgggttgtcctagcacatttgaagagcctcaacaacctcaacaaagaggacaaagcagcag

SEQ ID NO: 33949 - DNA, 367 bp, Glycine max
  Clone ID: LIB3052-016-Q1-N1-G4
cttcaaagttgaaaacccagaatgtggttgtatctctctccgtaaccttaaccttggtactggtgctactgaccagcaaggcaaactcagcggaaactgtttctttcagctggaacaagttcgtgccgaagcaaccaaacatgatcctccaaggagacgctattgtgacctcctcgggaaagttacaactcaataaggttgacgaaaacggcaccccaaaaccctcgtctcttggtcgcgccctctactccacccccatccacatttgggacaaagaaaccggtagcgttgccagcttcgccgcttccttcaacttcaccttctatgcccctgacacaaaaaggcttgcaaatgggcttggcttctt

SEQ ID NO: 33950 - DNA, 415 bp, Glycine max
  Clone ID: LIB3052-016-Q1-N1-G5
ctcgagccggacgggttgagactggtgtcttgaagcctggaatggtggtgacttttgcaccaactggactgacaaccgaagttaagtctgtggaaatgcaccatgaagctctcacagaggctcttcccggtgataatgttggattcaatgttaagaatgttgctgttaaggatctcaagcgtggttatgttgcctcgaactcaaaggatgatcctgccaaggaggctgctaacttcactgcccaggttatcatcatgaaccatcctggtcagattggaaatggctatgcccctgttcttgactgccacactttccacattgctgtcaagtttgctgaactcatgaccaagattgacaggcgatctggcaaagagcttgagaaggaacccaagtttttgaagaatggtgatgctgg

SEQ ID NO: 33951 - DNA, 354 bp, Glycine max
  unsure (1)..(354): unsure at all n locations
  Clone ID: LIB3052-016-Q1-N1-G6
aattagagagagaaaggtgtgagtgtttgtttttgagagagagaaagagtgtgagtgttgtgttgagtgcagtttctttctcacatggcctctatgccgttggggccgcagcaacagcttccaccgccgccgccgcaacaaccgtcgccagcggagaatgacgcgatgaaagtggactctcgcggcggctccgacgccggcaccgaaaaggaaatgtcagctcctgtcgcagatggtaatgatgcactcactggtcacataatctcaaccacaattgcaggcaaaaatggcgaacctatacaaaccatcagttacatggccgaacgtgttgttggcactggatcattnggcatt

SEQ ID NO: 33952 - DNA, 417 bp, Glycine max
  Clone ID: LIB3052-016-Q1-N1-G7
ctctccattggtccttaaacactcatcagtcatcaccatggccaagctagttttttccctttgttttctgcttttcagtggctgctgcttcgctttcagttccagagagcagcctcagcaaaacgagtgccagatccaaaaactcaatgccctcaaaccggataaccgtatagagtcagaaggagggctcattgagacatggaaccctaacaacaagccattccagtgtgccggtgttgccctctctcgctgcaccctcaaccgcaacgcccttcgtagaccttcctacaccaacggtccccaggaaatctacatccaacaaggtaagggtatttttggcatgatatacccgggttgtcctagcacatttgaagagcctcaacaacctcaacaaagaggacaaagcagcagaccaca

SEQ ID NO: 33953 - DNA, 351 bp, Glycine max
  Clone ID: LIB3052-016-Q1-N1-G9
gcctttcagattctgatggcctattcaggtggttacattttgtaatacgattgtgcagattgaaccagacatgaattcaaggtttcagcttttgagtaccactaccaatggtgattttgttcaaggaaaagatctcgcaatggttaaagttaatgtagcatgtgctgcttttggcttgacatcaagttacactccaacttcattgttggaatctggtttgcataaagactgaaggttaattgtggaatattttggaaggctgtcttacgttgctcataacgttaatcagccataagagtaagatttgttggaggcatataattcctttgatattaaatctcgctctagatt

SEQ ID NO: 33954 - DNA, 405 bp, Glycine max
  Clone ID: LIB3052-016-Q1-N1-H10
tgaacatgctttacaccatttagttgtaggttccctagtctgagtccgctctcaagacagtgggatgagaggatgctggttcatagcttctgtcattaagaagaataaagatcaagtcaaggtgcaatatcaagatattcacgatgctgtcgatgaaaccaagaagcttgaggaatgggttttagcttccagaattgcagtgcctgacaacctgggtcttcgaatgcgtgggaggaccatggtccggccagctccaccatccaacaaacgagaactatcgtgggtcagcgatgttggttttgttgttgatgcttggtggcatgatggatggtgggaaggcattgttgttcaaaaggactctgaatctaattgtcatgtttatttcccagcggaaaaaagtggtgt

SEQ ID NO: 33955 - DNA, 265 bp, Glycine max
  Clone ID: LIB3052-016-Q1-N1-H11
taaaaaaggtttacaaataaagtaacatcaatattataatttgtttccagttaaaagtatattaagtccactaacaataaaacaaactggtctacacgcttacaagcaatctctatcaccctataattaaattcgaaccggaacctgctggcatacaaaatatccctataatgaatccctttaaaccttatcatcttaatgctcatcgttgtttactgattaaaattgatattcccttacaattccacaaaacctacaactacta

SEQ ID NO: 33956 - DNA, 310 bp, Glycine max
  Clone ID: LIB3052-016-Q1-N1-H12
tatgacgtctgatgcacacagtctcggaactcggctctagcttcaagcgctctgactatttgtcgctaaatattatattctgtgtctgggactctgtcataggcgcccgtttccctctcataatatgcaaactagatcgaaacttgaactcgacaagagtttaaagtaagcacttcgcgaccagcgctctacaaaccctaaataccaagtcactgcttaataattgccagctatatgacaataacgctccacgtgcattcaaaatttccatcccttacctagatatgttatgcatcatgagtacattcat

SEQ ID NO: 33957 - DNA, 333 bp, Glycine max
  Clone ID: LIB3052-016-Q1-N1-H3
cttgcaagtacaggtacctcagcaacagcatgggttggtgagtctggaggtgcctacaatagtggccatcatcttgtatccgatgcatttgtttacagtttctggtatttggatcagcttggcatgtcagctgcttatgacactaaaacatattgcagacagagtttgataggaggaaactatggtttactcaatactacgaattttctgccaaatccagattactatagtgctcttctttggcaccgactcatgggaagacatgtcctctcaactaccttctctgggacaaacaagattagagcttatgcacactgtgcaaagcaatccaaa

SEQ ID NO: 33958 - DNA, 282 bp, Glycine max
  unsure (1)..(282): unsure at all n locations
  Clone ID: LIB3052-016-Q1-N1-H4
agcaaagcaatggctacttcaaagttgaaaacccagaatgtggttgtgtctctctccctaacgcttaaccttggtactggtgctactgaccagcaaggcaaactcagcggaaactgtttctttcagctggaacaagttcgtgccgaagcaaccaaacatgatcctncaaggagacgctattgtgacctcctcgggaaagttacaactcaataaggttgacgaaaacggcaccccaaaaccctcgtctcttggtcgcgccctctactccacccccatccacat

SEQ ID NO: 33959 - DNA, 410 bp, Glycine max
  unsure (1)..(410): unsure at all n locations
  Clone ID: LIB3052-016-Q1-N1-H5
gcaaaattgatgcgtgaaaggacacacctgctgttggcttgttgttcaaggatggcaatttgtaagaaagatgtttggagagttgaatgtggaatcccttctggatttccgctcacagttatttgcaatagcatttttaatgagatgctcattagatatagctatgaaaaattactgcgccaggctagagctccaagcatgtttntacaatccttcaaaaattntgtttctttgtgtgtgtatggtgatgataacttaattagtgttcatgaatatgtcaagccttactttagtggttctaaattgaaaagctttctagctggtcataatatcaccattactgatggtattgacaaaactagtgcaactttgcaatttagaaagttagcagattgtgattntctcaagag

SEQ ID NO: 33960 - DNA, 416 bp, Glycine max
  Clone ID: LIB3052-016-Q1-N1-H6
ctcttctgcatcgcccacacttgcagcgcctccagatggcggcaccagcaagatagctgccgcaagcagctccagggggtgaacctcacgccctgcgagaagcacatcatggagaagatccaaggccgcggcgatgacgatgatgatgatgacgacgacaatcacattctcaggaccatgcggggaagaatcaactacataaggaggaacgaaggaaaagacgaagacgaagaagaagaaggacacatgcagaagtgctgcacagaaatgagcgagctgagaagccccaaatgccagtgcaaagcgctgcagaagataatggagaaccagagcgaggaactggaggagaagcagaagaagaaaatggagaaggagctcattaacttggctactatgtgcaagtttggacccatgat

SEQ ID NO: 33961 - DNA, 425 bp, Glycine max
  Clone ID: LIB3052-016-Q1-N1-H7
ttgaaaggaaacttcccagaagaagaggtgcagatgatgggatacttagcgaaggagtgtttgctgctggatcctgacactcgaccaaccatgagcgaggtcgttcagattcttttgagtatttccccgggaaaatctaggaggagaagaaacattccagccagcctctttcaggaaccagaggatgcagaaaagcaaaggcaatctacacccagtaaatttccaacacatagttcattgccaatatataatgatcacaatctttctgttgagaacaaaaacaaagcagaagatgcagtttcagctgagaatatggagagtttgatcctcttgacttcgaaatctgacggttctcgtgcatcagaagaggaaatagtagacctgactgagcctaggtttgaatcattttgcatcacaaatggcaa

SEQ ID NO: 33962 - DNA, 404 bp, Glycine max
  unsure (1)..(404): unsure at all n locations
  Clone ID: LIB3052-016-Q1-N1-H9
ggtgaaatgctacgaccacgaccacgaccacaacacccggagagggagcctcagcaacccggtgagaaggaggaagacgaagatgagcaaccacgtccaatcccattcccacgcccacaacctcgtcaagaagaagagcacgagcagagagaggaacaggaatggcctcgcaaggaggaaaaacgcggagaaaagggaagtgaagaggaagatgaggatgaggatgaggaacaagatgaacgtcaattcccattcccacgcccacctcatcagaaggaagagcgaatgcaagaggaagatgatgatgangagcagcagcgagagagcgaataaagtgaagattctgagttacgaagacataagaataagaaccctnttctcttcggctctaacaggttcgaaac

SEQ ID NO: 33963 - DNA, 383 bp, Glycine max
  Clone ID: LIB3052-017-Q1-N1-A1
tgagaaacatttaaaggaaataattgatctttgaaaatgcaggaagggttgtgatagagagtgagaagaaggagaaagagagagagttggcttctgatagagccaggtctggaaatatagttaaggaggacaaagaggttgaagaaggaagaagaggaaaagaaagtggtggtggtggtggtgttcagcatgagaggaagtttgaaacgaaagttgaagagaagaagggttttggggaaaaggctgaactcgagggaataacaagagtggtggtgggaagagagtgcagcaaagaggagaaacaaggaagaacaagagagaaagtagaagcagagaaagcaagatcaatggagaaaactagagatgaagcttaaggaagagaa

SEQ ID NO: 33964 - DNA, 408 bp, Glycine max
  unsure (1)..(408): unsure at all n locations
  Clone ID: LIB3052-017-Q1-N1-A10
ctcgatccgataaaattcttccaccaagttatggggttccttgtgttgcttcttttctccctcttaggtctctcttctagttccagcatatcaactcatcgttccatattggaccttgacctaaccaagtttaccacacagaaacaggtgtcttcactgttccaactatggaagagtgagcatggacgtgtctaccataaccacgaagaagaggcaaagagacttgagattttcaagaataacttgaactatatcaaggacatgaatgcaaacagaaaatcaccccattctcatcgtttaggattgaacaagtttgctgacatcactcctcaagagttcagcaaaaagtacttgcaagctcccaaggatgtgtcgcagcaaatcanaatggccaacaagaaaatgaag

SEQ ID NO: 33965 - DNA, 420 bp, Glycine max
  Clone ID: LIB3052-017-Q1-N1-A11
agttgccccgcggcatcaaggccagggtgccacaagaacacgtgtggcctcatgtccactaatcccatcacccaacaaaccggtttaggtgaactaggagaagacgttcttgcaatccacgccacacaagggtcgacccaacaacttggcccattggtcacagtcccacaattcctcttttcttgtgcaccttccttccttgttcaaaagggtcttcctagaaacactcaaggtgtggctgggttaggccatgcaccaatttctcttccaaaccaactcgcttcccactttggcctacaacgccaattcaccacttgcctttctcgctaccctacttcaaagggtgctataatattcggggatgcacctaacaacatgcgacagtttcaaaaccaagatattttccacgatttggccttc

SEQ ID NO: 33966 - DNA, 401 bp, Glycine max
  Clone ID: LIB3052-017-Q1-N1-A12
gaaagaagatgtcacagtcattcttagaagaagaggaggaggtgatttggaacaaaaccacagtaaatggatatcaactatccagtcctccccagatatcattgagatgactttctgtcctataactgatctccttgacgaagtacctgccaaggagcatttgactcgtgccattagtctttatcttgaatataaacctccaatagaagaacttagatatttcctagagtttcagattccttgtgtatgggctcctttacaggacaggattcctggtcaacaaaggaaggaacctgtatgcccatctttgcaattcagcataatgggccagaaactttacattagtcaagaacagattacagtcggacgtaggccagtaactggcttatgtctttgtctag

SEQ ID NO: 33967 - DNA, 408 bp, Glycine max
  unsure (1)..(408): unsure at all n locations
  Clone ID: LIB3052-017-Q1-N1-A2
ctcgagccgaatcggctcgagtcaatatcctagtataccttgagtaaagaatttaagatactatgatgagagcacggttcccattactgttgctgggacttgttttcctggcttcagtttctgtctcatttggcattgcttactgggaaaaagagaaccccaaacacaacaagtgtctccagagttgcaatagcgagagagactcgtacaggaaccaagcatgccacgctcgttgcaacctccttaaggtggagaaagaagaatgtgaagaaggtgaaattccacgaccacgaccacgaccacaacacccggagagggaacctcagcaacccggtgagaaagaggaagacgaagatgagcaaccacgtncaatcccattcccacgcncacaacctcgtcaagaagaag

SEQ ID NO: 33968 - DNA, 397 bp, Glycine max
  Clone ID: LIB3052-017-Q1-N1-A3
gaattctccagagagaagaagaaacttaatcgatcatcactgcactggactaatacatcatggcagacgagacccagaacaagtatgagagctctgaggttgaggtccaggatcgtggtgtttttgactttctcggtaagaaaaaggatgaagaagacaagcctcatcctcaggaggaggtcatcgccaccgagtttcaaaaagtcactgtctcagaccaaggagagaacaagcacagcctcttagaaaagcttcaccgatctgacagcagctctagctcttcaagtgaggaggaaggagaagatggagagaaaaggaagaagaagaagaaggaaaagaaagggcttgaagagaagatcgaggagaaaatagagggtgatcatcatcatcacaagga

SEQ ID NO: 33969 - DNA, 372 bp, Glycine max
  Clone ID: LIB3052-017-Q1-N1-A4
caatttccgtctctccctttcactactgacgtgtgccttgggaacccacctcattataataatacttttccctaaccaacatttaataatattataacattatgcaataaaaaaatcatttccctattaaaaaacattaaatttatcattaaaaaaactaaaggtgaggctctcaaggcaaaggaagaaccaggtgacacacactgccacacacatgagacccccctcatctgctactaccccccctttttttacaatctaaccccttataaatactacccctcaccccctcatgcttttctcagtgattcagtctctcagtaaattcattcaccacccgcagttactctctttaccttcttaattagttct

SEQ ID NO: 33970 - DNA, 417 bp, Glycine max
  unsure (1)..(417): unsure at all n locations
  Clone ID: LIB3052-017-Q1-N1-A5
gggaattagaatggctctccttggatcaaacataacaagcgaggttggactccgtttgctcctttgtcctcttggttccaacgttgtaattagaacagcatgctgtactgtgggagttgctttgcctgtgtactctacgttcaaggcaatagaaagtaaagatcaagatgctcagcataagtgtcttctctactgggcagcctatggttcattcagtctcgctgaagtgttcacggacaagcttatttcttggtgtcctatctactatcacctgaagtttgcatttcttgtttggcttcaacttccatctaccagtggtgcaaaacaaatatatgcaaaccacttgcgccccttcttgttgaagcatcaagcacgagttgatcaagtcttgggttttgcatattgngaagtgataaa

SEQ ID NO: 33971 - DNA, 262 bp, Glycine max
  Clone ID: LIB3052-017-Q1-N1-A6
gttgatcattgatttgttgggtttacaaggagcaggtaaagcttttccaaacaagattgtttttgatgataagcttgtgttggctaacacacaagaattctttgatggaaattttccagtggattcttggttaccaatttttgtgaattgtctttatcctgtaagtcaattaccttcagaagctgtcgttgtaaatgttacatgtggtagtggacgtggtggtttacccaccactgcttggattagttctgcagttaacaat

SEQ ID NO: 33972 - DNA, 410 bp, Glycine max
  unsure (1)..(410): unsure at all n locations
  Clone ID: LIB3052-017-Q1-N1-A7
ccttgctctatactacacagtacacacactagaagaataatggcttccatcctccactactttttagccctctctctttcttgctcttttcttttcttcttatccgactcagtcacccctacaaaaccaataaaccttgttgttctacccgttcaaaatgatggttccacagggctccattgggccaacctccaaaaaagaacccctctaatgcaagtaccagtcctggtggacctcaatggaaatcacttgtgggttaactgtgagcagcagtactcatccaaaacgtaccaagcacccttctgccactccacccaatgctctagagccaacacccaccaatgcctcagttgccccgcggcatcaaggccagggtgccacaaaaacacgtgtggcctcatgtncactaa

SEQ ID NO: 33973 - DNA, 324 bp, Glycine max
  Clone ID: LIB3052-017-Q1-N1-A9
tattctcgtcgaaattgcccgtgcatttgcggatgaggagagtggtgggaacagagaaagcttgaataatttttttcagatggttgctggacactttactggggaaactccacatatgataagtgcagcagccaaagggttagcccgtttggcttatgagttctctgatcttgttttaacttccttcaaattgctccctggcacacttactctcctgaggagtgataacaaagagataatcaaggccaatcttggttttttgaaggtattagtagccaaatcacaagcagaagggttgcaaatgcacttgaaaagcatggtgga

SEQ ID NO: 33974 - DNA, 396 bp, Glycine max
  Clone ID: LIB3052-017-Q1-N1-B1
cacacaactactacaagtacttccttacaatcaaaaccaacgacaactatggcaagttatcaaaagcactacgatgatcagggtcgcaaggttgacgagtatggcaacgttgagaagcaaaccgacgaatacggcaaccctgttcatgctgctagtgtcacctatgtagccaccagaactgctgctggtggttacagtgatgacattaataagcaacatgataccaccaatgcctacggcgtagacactggtagacagcattctagtggtggctacgatggtgacactaataaacatcatggaactactggtggctataatgatgacaccaatagacatcatggaactaccggtgtctatggtatagacaccgataggcgacaacatgggactact

SEQ ID NO: 33975 - DNA, 411 bp, Glycine max
  Clone ID: LIB3052-017-Q1-N1-B10
cagcatataaacttggattacccattttggtggttgtccctgtgtcattggaaccatggaaattgttgatttgagtgtctaaggtaagtccgaggtatgagtgcagcctatgctgtatctgctttgtaactcaagatttacggaccatggaagccaatggaatcgctcatgatagtagtagcctaggagcggggagaagggataagagagaggtgggagacaaaatggtggaagatttaagtaaatatgcacacagccctgctcacttggcagttgccaggcgcgaccatgcttccctaaggcgcattgtttccgccctacctaggcttgctaaggctggtgaagtccacacagaagcagaatctattgctgctgaacttcaagctgatgaggtatcttcttttattgatc

SEQ ID NO: 33976 - DNA, 412 bp, Glycine max
  Clone ID: LIB3052-017-Q1-N1-B11
gccgcgaccccatctattccaacaagcttggcaagttgtttgagattaccccagagaaaaaccctcagcttcgggacttggatgtcttcctcagtgttgtggatatgaacgagggagctctttttctgccacacttcaattcaaaggccatagtggtactagtgattaatgaaggagaagcaaacattgaacttgttggcattaaagaacaacaacagaggcagcaacaggaagagcaacctttggaagtgcggaaatatagagctgaattgtctgaacaagatatatttgtaatcccagcaggttatccagttgtggtcaacgctacctcagatctgaatttctttgcttttggtatcaatgccgagaacaaccagaggaacttccttgcaggttcgaaagacaatgtgat

SEQ ID NO: 33977 - DNA, 386 bp, Glycine max
  Clone ID: LIB3052-017-Q1-N1-B12
caaaaccaaaacactcaagttaacttcaacaccttgaatttgctgaacgaaattcagccacagaatatcaaagggagcgaagatgagtcaggagcagccaaggcgcccccaaggccaagaccccatcaaatacggcgacgtttttgacgtctacggtgaccttgcacagatgcccattgcaccggaagatgctgccatgatgcaaagcgcggaagctcgagtactcggaaaaacccaacccggcggagcttcttccgtcatgcaatccgccgccacaaggaatgaacaagctggtcttgtcggtcaccaggacgtcaccgacatcaccggcgaccatggcgtcacagtcacagaaactacattccatggaagacgcataataaccg

SEQ ID NO: 33978 - DNA, 389 bp, Glycine max
  unsure (1)..(389): unsure at all n locations
  Clone ID: LIB3052-017-Q1-N1-B3
ccgagctagctagctagcaagcaagcacagagatggaggcgaagcgaggccatgccctcatgtgcttggcacgtgtttcactcttcctctgcgctctaaccctatccgctgctcacggaagcaccacggttcaagacatcgcgagaaagttgaaactcggggacaacgagcttctgcgcacggagaagaagttcaaggttttcatggagaattacgggaggagctactccacagaggaggagtatttgcgccgtttggggattttcgcccagaacatggtcagagcggcggagcatcaagcgctggaccccaccgncgtccacggcgtcacgcagttctccgatctcaccgaggacgagtttgagaagctctacactggcgtcaatggc

SEQ ID NO: 33979 - DNA, 392 bp, Glycine max
  Clone ID: LIB3052-017-Q1-N1-B5
cgtctgtgtaacaaacacttcaacaatctactctgtacccgatttacaagatgagttcatttagccaaaatccctatgttttagttctgttcctcgttctcactgtgtggatatcccgtgtaatgtctcgcgggctcattacatctgagagacatgagaaatggatggcacaatatggtaaggtttacaaggatgctgcagagaaggagaaacgtttccaagtattcaaaaacaatgtgcagttcattgagtcattcaatgctgctggggacaaacctttcaaccttagcattaaccaatttgcggaccttcatgatgaagaatttaaggctttactaaacaatgttcagaaaaaggcaagtagggtggagacagcaacagaaacatcgttt

SEQ ID NO: 33980 - DNA, 409 bp, Glycine max
  Clone ID: LIB3052-017-Q1-N1-B6
gaaaagttagggttcacaacttttccttttccttttgcttgcgaatctgaatcaaataatcaatcatccattcattattcatcatgtcgtcggcgaagaaaatcacgctgaagagttcggacggcgaggctttcgaggtggaggaggcggtggcgctggagtcgcagacgataaagcacatgatcgaggacgactgcgccgacagcggcatccctctgccgaacgtgacgagcaagatcctggcgaaggttatcgagtactgcaagaagcacgtcgaggccgcgaatcccgaagacaaaccctccgaggacgatctcaaggcctgggacgctgaattcgtcaaggtcgaccaggccacgctcttcgatctcatcctggctgctaactacttgaacatcaagagcctgct

SEQ ID NO: 33981 - DNA, 408 bp, Glycine max
  Clone ID: LIB3052-017-Q1-N1-B7
attcttccaccaagttatgggtttccttgtgttgcttctttggtccctcttaggtctctcttctagttccagcatatcaactcatcgttccatattggaccttgacctaaccaagtttaccacacagaaacaggtgtcttcactgttccaactatggaagagtgagcatggacgtgtctaccataaccacgaagaagaggcaaagagacttgagattttcaagaataacttgaactatatcagggacatgaatgcaaacagaaaatcaccccattctcatcgtttaggattgaacaagtttgctgacatcactcctcaagagttcagcaaaaagtacttgcaagctcccaaggatgtgtcgcagcaaatcaaaatggccaacaagaaaatgaagaaggaacaatattc

SEQ ID NO: 33982 - DNA, 333 bp, Glycine max
  Clone ID: LIB3052-017-Q1-N1-B8
tcttcacacaaacatctctctctctctctctctctggcatgggtgccagacacaatcgccaagacacacaaacactacacatgacaggcccacactgaacgcaacaacgaccaacacctactactgccagcccgccaggacactaacccgccatagccaaagagacccagctccggcacaccaacctcaactataccacgcaaaaccacaaccaactgcactgcctgactcacacaacagaatacagcaccacacaagacgcccacaaacccaagaacatcgaacaaccacacagagtgcacatataccagacccaaaacaaggtacccacat

SEQ ID NO: 33983 - DNA, 405 bp, Glycine max
  Clone ID: LIB3052-017-Q1-N1-C1
acaagaatggaatttactctccacattggaatctgaatgcgaacagtgtgatctatgtgactcgaggacaaggaaaggttagagttgtgaactgccaagggaatgcagtgttcgacggtgagcttaggaggggacaattgctggtggtaccacagaacttcgtggtggcggagcaagccggagaacaaggattcgaatacatagtattcaagacacaccacaacgcagtcactagctacttgaaggatgtgtttagggcaattccctcagaggttcttgcccattcttacaaccttcgacagagtcaagtgtctgagcttaagtatgaaggaaattggggtcctttggtcaaccctgagtctcaacaaggctcaccccgtgttaaagtcgcataaatgacaagca

SEQ ID NO: 33984 - DNA, 384 bp, Glycine max
  Clone ID: LIB3052-017-Q1-N1-C10
aggatggggatatacatagccaaatcatggtactagatggagaccctctgagtgtaagctcagatggtgatattcctcctttggagcctataaatgtgaattcatcagagccaataagggttgctcctttctctattgtatttgctcatttacctgatgctgttgtttcagcttgcggctaagtactaagtggcactaggggagaccaaaaaaattggtttcactaggtggtttggcaaattacatggaaaataaaatgtgttagtttccataagagaatgccaattatttagtttgagaactaggatgttggtggttttattatatgcttttactagtgcatgttcccgtgcatcatgagcaaattatgtgtgaggagtatta

SEQ ID NO: 33985 - DNA, 389 bp, Glycine max
  Clone ID: LIB3052-017-Q1-N1-C2
cgtgaatagcgtaaccagcgttgggggaattattggtcaaggtctcgacttagttggctcaacactcgatactcttactgccttcttgggccgatccgtgtctctccagcttattagtgctaccaaagctgatgccaacggaaaagggaaacttggaaaggctacctttttggaaggtatcattacttcattgccaactttgggagcaggccaatctgcattcaaaattaattttgaatgggatgatgggagtggaattcctggagcattttatatcaagaattttatgcaaactgagtttttccttgtgagtttgacttttgaagacattccaaaccatggaagcatccactttgtttgcaattcgtggatttacaatgccaaactct

SEQ ID NO: 33986 - DNA, 393 bp, Glycine max
  Clone ID: LIB3052-017-Q1-N1-C3
tgggtttccttgtgttgcttcttttctccctcttaggtctggcttctagttccagcatatcaactcatcgttccatattggaccttgacctaaccaagtttaccacacagaaacaggtgtcttcactgttccaactatggaagagtgagcatggacgtgtctaccataaccacgaagaagaggcaaagagacttgagattttcaagaataacttgaactatatcagggacatgaatgcaaacagaaaatcaccccattctcatcgtttaggattgaacaagtttgctgacatcactcctcaagagttcagcaaaaagtacttgcaagctcccaaggatgtgtcgcagcaaatcaaaatggccaacaagaaaatgaagaaggaacaatattctt

SEQ ID NO: 33987 - DNA, 293 bp, Glycine max
  unsure (1)..(293): unsure at all n locations
  Clone ID: LIB3052-017-Q1-N1-C4
agctggtgcatagaatgctattctcatgaatatgccaaatgctgttctttcaatgtggagatattttgttggagatctcgtctttgaagtttctaagatgacttctccctacattaaatgtacagtctctttcttcatagcatttggaaatttggctgatgataccatcaattttgaggcttttccccacaagctggtgcagtttggagagattcaggaaaaagttgtattgaaattttcacaagaggaatttcttacagcttggtcaactcangtgcgtcctgcaacaactc

SEQ ID NO: 33988 - DNA, 415 bp, Glycine max
  Clone ID: LIB3052-017-Q1-N1-C5
gaagagtactatcttctttgctctctttctagttggtgccgtcaccatctcatacctgccttcagccaccgctcagttcgtgctcgacactgatgatgatcctcttcaaaacggtggcacatactatatgttgccagttatgagaggaaagggcggtggaatagaagtagattcaactggaaaagaaatatgccctctcactgttgtgcaatcacccaatgagctcgataaggggattggactagtctttacatctccattacatgccctttttatcgccgaaggctatcctttgagcattaagtttggttcatttgcagttataacgctgtgtgccggcatgcctactgagtgggctattgtggagagagagggtctacaagctgttaaacttgctgcacgcgatacagtagat

SEQ ID NO: 33989 - DNA, 358 bp, Glycine max
  Clone ID: LIB3052-017-Q1-N1-C7
ctcgagccgcttctctccccagggaaatgaagatgggacaggaaagaatcgaggctgacataagactggtaacccttccttttcccccaatccctacttgcgtacaatttgtcctctggtaatgtgccaataacgctgtcatcagagaatcagattacgaatgaatgctatgctgctaatctccatgtgccagccttacatcaaatactgcaagctcgtcacactgagtccaatattggagaatgcaacatgccttccaatggttatccccttactaaattggcatttagaccatggcgaacttctacgacactggactatcagcctaaacttatggctactgtcatactatcttctg

SEQ ID NO: 33990 - DNA, 378 bp, Glycine max
  Clone ID: LIB3052-017-Q1-N1-C8
ccactccccactcacaatgcaagcccttcaccgtctcgcatgctccacgcaccgcgtggccgcgtcgtcgctccgtcacggcagcctcctctcccgaaccacttccagaatcctctcattctccaccgattcgcccgccgggggaggctccttcgacgcagcatgggagagctcctcctcgtggtcgacgggccttgccggcgaccacttcaacggccagtccccctcggaggtcctctcaaacctccaggacacggaggacaggctcttccagctggaggcggagaaccgcagagggaaagcctactgtgacagctggaggagtcgcttggaggagacgacggtgctgctgaagcaggttcaggagcccggcgcgcg

SEQ ID NO: 33991 - DNA, 407 bp, Glycine max
  Clone ID: LIB3052-017-Q1-N1-D1
tgaggagcatgacaaagagagccaagaaagtgaaggttctgggtctgagagagaaccacgaagacataagactaagaacccttttcacttcaactctaaaaggttccaaactctcttcaaaaaccaatatggccacgttcgcgtcctccagaggttcaacaaacgctcccaacagcttcagaatctccgagactaccgcattttggagttcaactccaaacccaacacccttcttctcccccaccatgctgacgctgattacctcatcgttatccttaacgggactgccattcttaccttggtgaacaacgacgaccgagactcttacaaccttcaatctggcgatgccctaagagtccctgcaggaaccacatactatgtggttaaccctgacaacgacgagaatc

SEQ ID NO: 33992 - DNA, 411 bp, Glycine max
  unsure (1)..(411): unsure at all n locations
  Clone ID: LIB3052-017-Q1-N1-D10
ctgaccctgtacctctggaagaaaatcatagtgaatcaccctgggaagctatggcaggctaggcacgacatttgttgtcagaatattccaataaaaaacatgcatatgcaatttgtgctgaggtcttcagagttgtttatgctgccatccaaaaggctggtgaccaaggattaagcatgggagaaatttcccaggttattaacttgccaggagcagagatagatgtcttgattgttgatgctcttcaagcatttgggcaagccttaaaggttaatgcttatgatactgtccgtgttgttgatgtcttataccgtcacaagtactttttgacacctatgtctgattntcatcttcgtgttgtacaaccttcctcatcaaaaaccatcgagaaaagtgatcatacatgtgagc

SEQ ID NO: 33993 - DNA, 411 bp, Glycine max
  Clone ID: LIB3052-017-Q1-N1-D11
gtgctgcaagctgcgctccaaaccccaaaaggaaagttagaaaagctttttgatcaacagaacgagggaagtattttcgcaataagcagagaacaggtgcgtgcgttggcccctaccaagaaaagctcttggtggccattcggtggcgaatccaagcctcaattcaatattttcagcaagcgtcccactatctccaacggatatggtcgtttaactgaagttggtcctgacgatgatgaaaagagttggcttcaaagactcaatctcatgcttacctttaccaacttcacccagagatctatgagtactattcactacaactcacatgcaacgaagatagcactggtgatcgatggcagagggcatcttcaaatatcatgtccacacatgtcatcaaggtcgtcacactcg

SEQ ID NO: 33994 - DNA, 392 bp, Glycine max
  Clone ID: LIB3052-017-Q1-N1-D12
gttggtgcaatgcttttggttgatacttatcatacgaatcgtgaaaatgcagttcgtagtatttttgttgcgcctttcagaggcggaaggcccattcgggtggttacatttccgaataccattgtgcagattgaaccaaactggaattcaaggtttcagcttttgagtaccactaccaatggtgattttgttcaagggaaagatctcgcattggttaaagttaatgtaccatgtgctgctgttggcttgacatcaagttacactccaactccattgttggaatctggtttgcaaaaagacagagggttaattgtggagtattttggaaggatgtcttacgttgctcataacgttaatcagccccaagagaaagatttgttagagggaaattt

SEQ ID NO: 33995 - DNA, 323 bp, Glycine max
  Clone ID: LIB3052-017-Q1-N1-D2
cctctcttcaggtcaccatctagactgcaatcatggctgagggaccgcagcatccatcagttgttcagaagctagctggacagtcttacctggtgtccaggcttagccccaactttaactctcggaattattctgcatctggttcttacgtcaatggcggaatgcactcgcctgggttggctgttgtgtcacccgtatctacagttactgtgcatgctccagcagagaatggagtgagtggctatctagaggattttctgatgggtggagtattctgcgctgtatcgaatacagcttctgctatcattgaacgtgtcaaattg

SEQ ID NO: 33996 - DNA, 355 bp, Glycine max
  Clone ID: LIB3052-017-Q1-N1-D3
gatctcgcaatggttaaagttaatgtagcatgtgctgctgggggcttgacatcaagttacactccaactccattgttggaatctggtttgcaaaaagacagagggttaattgtggaatattttggaaggatgtcttacgttgctcataacgttaatcagccccaagagaaagatttgttggagggaaatttttcctttgatattaaatctcgctctagattggaaaaagtttcctctacaaaagcacaatttgttagtggaaaaaccttcaaatatgatataattggtgctggttcacattcttcagatgattttcctgaaaaggaagatcaagaaaaacccaaaaagattgatg

SEQ ID NO: 33997 - DNA, 374 bp, Glycine max
  Clone ID: LIB3052-017-Q1-N1-D4
ctccattggtccttaaacactcatcagtcatcaccatggccgagctagttttttccctttgttttctgcttttcagtggctgctgcttcgctttcagttccagagagcagcctcagcaaaacgagtgccagatccaaaaactcaatgccctcaaaccggataaccgtatagagtcagaaggagggctcattgagacatggaaccctaacaacaagccattccagtgtgccggtgttgccctctctcgctgcaccctcaaccgcaacgcccttcgtagaccttcctacaccaacggtccccaggaaatctacatccaacaaggtaagggtatttttggcatgatatacccgggttgtcctagcacatttgaagag

SEQ ID NO: 33998 - DNA, 392 bp, Glycine max
  Clone ID: LIB3052-017-Q1-N1-D5
gaaattttgatagacccgggatcacagggctggcgacgcttagacctggaaacaacacgcactcgttacttgatggcatgagtctctcaatttgacactacttctatgtgtacgaattcttaagggatagaaaatcactctctgagctggccacagactccgtgaatcaatttcttttacactctcagtttatttgctgaacactctcctattagatataagactgcgtgttatacttaaactccttctgtctctgtcttaaccctctgatataatataagtgcaacctggtgacattcttgcattagatgctcccactctggtatatcgtataggactccgtgggatgactgtcctattgcgctccttaatttcactctcttattctgact

SEQ ID NO: 33999 - DNA, 394 bp, Glycine max
  Clone ID: LIB3052-017-Q1-N1-D6
atctccgagactaccgcattttggagttcaactgcggaccggacacccttcttgtcccccaccatgctgacgctgattacctcatcgttatccttaacgggactgccattcttaccttggtgaacaacgacgaccgagactcttacaaccttcaatctggcgatgccctaagagtccctgcaggaaccacatactatgtggttaaccctgacaacgacgagaatctcagaatgataacactcgccatacccgttaacaaacccggtagatttgagagtttcttcctatctagcactcaagctcaacagtcctacttgcaagggttcagcaagaatattctagaggcctcatacgacaccaaattcgaggagataaacaaggttctgtttggtag

SEQ ID NO: 34000 - DNA, 399 bp, Glycine max
  Clone ID: LIB3052-017-Q1-N1-D7
cttagttctctgttgcatcatcatcatcttcattagggttagccctaaacttcaccttcaaccatgaccacagtgccaccacacagtgtccaagtgcacacaacaacacaccgctacgaagccggcgtcgtcccgccggctcgttttgaggcgccgcgttacgaagccggcatcaaggcgccctcttccatttaccattccgagagaggttcgacgacctctcaggttctcgcagttgtcgccggccttccggtcggcggcatcctcctgctcctggcaggactgaccctgactggaactctcaccgggctggtggtggcaacaccgctcttcatcatcttcagcccggtgctgattccggccacggtcgcaattggcctggccgtggccgggttcctg

SEQ ID NO: 34001 - DNA, 411 bp, Glycine max
  Clone ID: LIB3052-017-Q1-N1-D8
gcttatcttgtcaatctcgtaaatgtgttacgagaattgtatttgcacagtccagaggaagctcgccaattgagaaggaaagctctctctcgtattgaatggctgcaaaaagctgatgtgcctaccatagcacagattgaagagttccattcgatgcagaggatgatgaatgctcctgattcaaatgataatattgatctactgttgagcattgatttgttgggtttacaaggagcaggtaaagcttttccaaacaagattgtttttgatgataagcttgtgttggctaacacacaagaattctttgatggaaattttccagtggattcttggttaccaatttttgtgaattgtctctatcctgtaagtcaattaccttcagaagctgtcgttgtaaatgttacatgtggt

SEQ ID NO: 34002 - DNA, 250 bp, Glycine max
  Clone ID: LIB3052-017-Q1-N1-D9
tctccattggtccttaaacactcatcagtcatcacggtggccaagctagttttttccctttgttttctgcttttcagtggctgctgcttcgctttcagttccagagagcagcctcagcaaaacgagtgccagatccaaaaactcaatgccctcaaaccggataaccgtatagagtcagaaggagggctcattgagacatggaaccctaacaacaagccattccagtgtgccggtgttgccctctctcgct

SEQ ID NO: 34003 - DNA, 397 bp, Glycine max
  Clone ID: LIB3052-017-Q1-N1-E1
cccacgcccacaccaacctcatcaaaaggaagaggaaaagcgcgaatggcaacacaagcaggaaaagcaccaaggaaaggaaagtgaagaagaagaagaagaccaagacgaggatgaggagcaagacaaagagagccaagaaagtgaaggttctgagtctcaaagagaaccacgaagacataagaataagaacccttttcacttcaactctaaaaggttccaaactctcttcaaaaaccaatatggccacgttcgcgtcctccagaggttcaacaaacgctcccaacagcttcagaatctccgagactaccgcattttggagttcaactccaaacccaacacccttcttctcccccaccatgctgacgctgattacctcatcggtatccttaacggg

SEQ ID NO: 34004 - DNA, 395 bp, Glycine max
  Clone ID: LIB3052-017-Q1-N1-E10
caatatcctagtacaccgtattaaagaatttaagatatactgtgatgagagcgcggttcccattactggtgctgggagttgttttcctggcatcagtttctgtctcatttggcattgcctattgggaaaagccgaaccccagtcaccacaagtgccttccaagttgcgattgccagaaagacttctaccggaaccaagcatgccacgcttgttgcaaccttcttaaggtggaggaagaagaagaatgcgaagaaagtgaaatttcacgagcacgaccacaacacccggagagggaacgttagcaacaccgtgagaaggaggaagaccaaggtgagcagacacgttcattcccatttcacgcccacgccaacctcatcaagaggaagagcacgagc

SEQ ID NO: 34005 - DNA, 282 bp, Glycine max
  Clone ID: LIB3052-017-Q1-N1-E11
ctcgcatagaatcacggtcgatgcacaatctaacggacttcggtatatcgataactttttcaacacaccttacacacttatgtattggagcctctgatattagtatgatggataggacggtggtgtcggttttggtgatagcaatgacgttggttgacatgaactgtaactgcactagtgttggacacatgccgttaaccaaggcggacggtcacgatttgcacgaagctagctcacggagcacacaaactgggatcaaagccatctaaactgtataagatg

SEQ ID NO: 34006 - DNA, 396 bp, Glycine max
  Clone ID: LIB3052-017-Q1-N1-E2
caaaataattgcaatatgtttgttgcatcagcccgtcagttggctaaagccttagaagtaccattggttaatgatttaggatatacaaagagatacgtgcgctgcctacagatatcagaagtggtaaatagtatgaaagacttgatagattacagcagagaaactgggactggacctatggagagcttagcaaaattccctcggagaacaagtggttcatctggacctcgtggtcaagcacaacagcatgaagaacaattacaacagcagcaacaacaacagatggtggcccataactcaaatggtgatcaaaactcaatacaagcttgtgccatgcaaattgcttctagcaatggtatggttagtgtaaataacactgtcaacccagcattcaca

SEQ ID NO: 34007 - DNA, 346 bp, Glycine max
  Clone ID: LIB3052-017-Q1-N1-E3
ctttttctgccacacttcaattcaaaggccatagtggtactagtgattaatgaaggagaagcaaacattgaacttgttggcattaaagaacaacaacagaggcagcaacaggaagagcaacctttggaagtgcggaaatatagagctgaattgtctgaacaagatatatttgtaatcccagcaggttatccagttgtggtcaacgctacctcagatctgaatttctttgcttttggtatcaatgccgagaacaaccagaggaacttccttgcaggttcgaaagacaatgtgataagccagatacctagtcaagtgcaggagcttgcgttccctgggtctgcaaaag

SEQ ID NO: 34008 - DNA, 143 bp, Glycine max
  Clone ID: LIB3052-017-Q1-N1-E4
tttcaattattttgcatcaatcttcgtctctgatccatgtcgtacgtggagctaggtgttgtctaatcaaatcgatcaatatgtccacttaatacaatcacctatcttctctgttccattgtttacttcataggcgtatactt

SEQ ID NO: 34009 - DNA, 394 bp, Glycine max
  Clone ID: LIB3052-017-Q1-N1-E5
cacaactacaagaaagaacttccttataaccaaaaccaacagcaactatggcaagttatcagaagcactacgatgatcagggtcgcaaggtcgacgagtatggcaatgttgagaggcaaactgacgaatatggcaacccggttcatgccactagtgtcacttatgtagccaccaaaagtgttggtggctacaatgatgacgctaataagcaacatgatattactggtgtctatcccgagaaagacaccggtagacatcattttggtcgtggttacgacggtgacactaacaagcaacatgatgctactggtgtttatcccggaatagacattggtagagatcatgggactaccggtgtttatggcctaaacaccgacagacatcatggaacttc

SEQ ID NO: 34010 - DNA, 389 bp, Glycine max
  Clone ID: LIB3052-017-Q1-N1-E8
ccttgtagctgatgtagaaaggtaactgggtaagagtgttctagcttgcattttttatgggcattgtacatattttttttttcttcaatagttcgataaaacttactggctccatctggctatcatcctcctactcttcttactgacactagaggtattgctacgaaaataaaattgtattctaaatttctacttgcatgtgcggatagagtaataaagacagaagaggactaccaaaaaatgttcaaaggagaaaaggaaacaaataaagaggcaagatattttgacatgtttacaacgatcaaagtcttttctaccgagaagaacgatgcaagcatatttatttgttacttataaaaattcaaaactcgtgtaaattgaataccact

SEQ ID NO: 34011 - DNA, 407 bp, Glycine max
  Clone ID: LIB3052-017-Q1-N1-E9
ataaatggcatatgagaagactaaagatgacaagggtctttgacggtgtactacatatgctatgatttggttactttggctgtagagaaaaatatcaaatatttcaaggataattccagagttacctctacattaggattttggctagtgactgttaactttttttcattgaatattgaaagcttggcatgcattgctgaaatgatgtgttttttgtttttctctctgtaataggatatcttatcctagtctcttataaatttcttttgctaaatataatgaggtgatgattattcttgattaatacggtagcattaaaggaaagtaaattacaatatactaaaatagtgactaggatatagaaatggtaattatccaagtatatgtacttctagtaccactggtac

SEQ ID NO: 34012 - DNA, 417 bp, Glycine max
  Clone ID: LIB3052-017-Q1-N1-F10
caactactacaagtacttccttacaatcaaaaccaggaacagctatggcaagttatcaaaagcactacgatgatcagggtcgcaaggttgacgagtatggcaacgttgagaagcaaaccgacgaatacggcaaccctgttcatgctgctagtgtcacctatgtagccaccagaactgctgctggtggttacagtgatgacattaataagcaacatgataccaccaatgcctacggcgtagacactggtagacagcattctagtggtggctacgatggtgacactaataaacatcatggaactactggtggctataatgatgacaccaatagacatcatggaactaccggtgtctatggtatagacaccgataggcaacaacatgggactactggtggctatgccggtgacactggta

SEQ ID NO: 34013 - DNA, 414 bp, Glycine max
  unsure (1)..(414): unsure at all n locations
  Clone ID: LIB3052-017-Q1-N1-F12
ggttttggaaccacttctggagttgttgtgttggcaggaacaaataggcctgatatcttagacaaagctcttcttaggcctgggcgatttgaccgccagataacaattgacaaacctgatattaaaggtcgtgaccagatatttcagatctacttgaagaaaatcaaacttgatcacgagccttcatattattctcaaaggcttgcagcccttacacctggatttgctggagcagacattgctaatgtctgcaatgaagctgctctgattgctgcaagaggtgaaggaacacaagtgacaaaggaacattttgaggcagccattgataggatcattggtggcttggaaaagaggaacagggtaataagcaagctggaaaggcgtactgttgcctaccatgaagcangccatgct

SEQ ID NO: 34014 - DNA, 388 bp, Glycine max
  Clone ID: LIB3052-017-Q1-N1-F3
tttgaagaacaacatggtggtgctaaaggtgtgtttgttgggtcttttccttgtgggggttacagctgcacgcatggaactgagcttcttcaaaagtgatcagtcatcaagttatgatgatgatgagtattcaaaaccatgctgtgatctctgcatgtgcacacgctcaatgcctcctcaatgcagctgtgaagatattaggctgaattcatgccactcagattgtaagagctgtatgtgcacacgctcacagccaggacagtgtcgttgtcttgacaccaacgacttctgctacaaaccttgcaagtccagagatgactagaaaaactaatagctctctcaaatggacgaagcccctttaggctttgtttgttatgttaggggagac

SEQ ID NO: 34015 - DNA, 405 bp, Glycine max
  Clone ID: LIB3052-017-Q1-N1-F4
gaaccagagaagaagaaaaaagcagcaagtaacggaaatggcggttctcagaatggtaactcaatgcactatgggaccctggttggggaagtgaaagctaatttgaagaaaggtattggagcgaatgaattgctgtcccatctttcagcacatcctgcacctgctcaagaaaagatgagtgctctggttgaagctctattcgagggaactgagaaaggttttgctaaagaagctgataagaagaagaactactttgctgctgctgttgccgaagagggatcccagctgttattgcttcatgctattgaagaattttcttgcaagtctacttccaatgctttgaaggaggttgccctggttctaaaggcactctatgatgctgatgtgttggaggaagagcacata

SEQ ID NO: 34016 - DNA, 414 bp, Glycine max
  Clone ID: LIB3052-017-Q1-N1-F5
ggaaaaagtaatagaaaccaggctgtttcttatgtgcatcagccacttgaaaattttgacaatcacagtgcaaagaaaaggaataagagccattctcggtatccaagattatccagagcccaatctggcagtaaaggtcttggccaggtggtcaaaaaatacaaacgtggcaggaagttgagagaacaagctttttatctggagatggtcaagacatacttaattcttcaaaatcacatataaattctgaggagtccagtgatgatgctgatatggaaagtttgggtagactttatagtggagcagctgcctcctcttctgcctactctatttctaaatcagaatcttgtagtttgtctgttggtcccctgaaaaattcctctgctgtagattccttttacaagttgagatgtg

SEQ ID NO: 34017 - DNA, 414 bp, Glycine max
  Clone ID: LIB3052-017-Q1-N1-F6
ctttacttagttcaatatggggaagcccctcatgagtctcgatcattattacctttgcttgctactcttgccgagtgcatgctttgctattaccttcagcaagttcaacgagtgccaactcaacaacctcaacgcgttggaacccgaccaccgatttgagtacgaaggatgtcctattgaaacatgaaactctcaacaccctgagctgcaatgcgcacgtgacactgtttccaaacgcaccctcaaccgtaactgcctgcacttgccatcttactcaccttatccccaaatgatcattgacgttcaaaggaaaggagcaattggatttgcatttcctggatgtcctgagacgttcgagaagccacaacagcaatcaagcagaacaggcttcaagtcgcagcagcgactacaaga

SEQ ID NO: 34018 - DNA, 395 bp, Glycine max
  Clone ID: LIB3052-017-Q1-N1-F7
cggctcgagcaaaaccaaaacactcaagttaacttgaacacctttaattttctgaacgaaattcagccacagaatatcaaagggagcgaagatgagtcaggagcagccaaggcgcccccaaggccaagaccccatcaaatacggcgacgtttttgacgtctacggtgaccttgcacagatgcccattgcaccggaagatgctgccatgatgcaaagcgcggaagctcgagtactcggaaaaacccaacccggcggagcttcttccgtcatgcaatccgccgccacaaggaatgaacaggctggtcttgtcggtcaccaggacgtcaccgacatcaccggcgaccatggcgtcacagtcacagaaactacattccatggaagacgcataataaccg

SEQ ID NO: 34019 - DNA, 402 bp, Glycine max
  Clone ID: LIB3052-017-Q1-N1-F8
ggtggatgtacaacaatgaagacactcctgttgttgccgggtctattattgacaccaacagcttggagaaccagctcgaccagatgcctaggagattctatcttgctgggaaccaagagcaagagtttctaaaatatcagcaagagcaaggaggtcatcaaagccagaaaggaaagcatcagcaagaagaagaaaacgaaggaggcagcatattgagtggcttcaccctggaattcttggaacatgcattcagcgtggacaagcagatagcgaaaaacctacaaggagagaacgaaggggaagacaagggagccattgtgacagtgaaaggaggtctgagcgtgataaaaccacccacggacgagcagcaacaaagaccccaggaagaggaagaagaagaag

SEQ ID NO: 34020 - DNA, 366 bp, Glycine max
  Clone ID: LIB3052-017-Q1-N1-F9
gtcaacaataggggtctttgcgctatagcacaggctgagtctctccgctacaagctccttggtggcctagctgtgcgcagggcttgctatggtgtcttgaggtttgttatggagagtggtgctaagggatgcgaggtcattgtgagtggaaaattgagagcccagagagccaaatctatgaagtttaaggatggttacatgatttcttctgggcaacctgtcaaagattacattgactctgcagtgagacatgtgctcctgagacagggtgttcttggcatttaagtgaagatcatgcttgattgggatcctaaggggaaacagggtcctaaaactcccctccctgatcttgtcacaatccattct

SEQ ID NO: 34021 - DNA, 417 bp, Glycine max
  unsure (1)..(417): unsure at all n locations
  Clone ID: LIB3052-017-Q1-N1-G1
ctccccacaacttcagaatctccgagactaccgcattttggagttcaactccaaacccaacaccctccttctccccaaccatgctgacgctgattacctcatcgttatccttaacgggactgccattctttccttggtgaacaacgacgacagagactcctacagacttcaatctggtgatgccctgagagtcccctcaggaaccacatactatgtggtcaaccctgacaacaacgaaaatctcagattaataacactcgccatacccgttaacaagcctggtagatttgagagtttcttcctatctagcactgaagctcaacaatcctacttgcaaggattcagcaggaacattttagaggcctnctacgataccaaattcgaggagataaacaagttctgttagtagagaggaag

SEQ ID NO: 34022 - DNA, 408 bp, Glycine max
  Clone ID: LIB3052-017-Q1-N1-G10
cagccatcttcagaataagcggcgtaaggagaatagcggtagcagtattagcagtgcacttcaggcacagtttccggatcctagtgtccagaacaaccagaatacacaaagtggttcattttcacctgaatcaaacgcttgtttcaacaaccagacaccgtggttgagtcctcaaacttttgcaacagatcaggctcctctcatggtgcctccacagcaatttcaacaacccatggttgggtatgtgggtgacccttacactagtggtgctgcttcaaataacatcacaacttctcataatcataacagcaacaacccctatcaacctggtgcagaacaatatcacatgttggagtcggcacattcatggcctcattctcagttcaatgttgcttgtcactatagcca

SEQ ID NO: 34023 - DNA, 403 bp, Glycine max
  unsure (1)..(403): unsure at all n locations
  Clone ID: LIB3052-017-Q1-N1-G11
gaaaaatcaaaggacggtggtgagtgctgcttctgcttcatgatcatcagagaagaatggcggctactgtgtcttctgcgtggtcaaagcccggcgcgtgggctctcgattccgaggaacacgaagccgaactccttcaacagaacaacgacaagccactcgccgacttcccctccctcgccgccgccgctgccaagcccaagaagaagaaggcccagacctactccctcgccgaattcaccgccaaacccgacacctcctttgccgaccaagatcccgtcgtcctccccaccggcccccgccagcgcaccgccgaagagctcgaccgcacccgcctcggtggcggcttccgcaactacggcgaaccgcccaacaggaacaactncggcggcggcgacgagtc

SEQ ID NO: 34024 - DNA, 261 bp, Glycine max
  Clone ID: LIB3052-017-Q1-N1-G12
ctctccgctcactccaccgccgcatgcacacttggatcgtgcgccacttcatggctgcggcggagcccataataagctcatccaacacgcgcgtgggctggatcggcaccggcgtcatgggccagtccatgtgcgcccacctgatccgtgccgggtacaccctcaccgtcttcaaccgcaccccctccaaggcccagcccctgctcgacctcggagcccacttcgccctctccgctcacgccgtcgacgccaactccgacg

SEQ ID NO: 34025 - DNA, 412 bp, Glycine max
  Clone ID: LIB3052-017-Q1-N1-G2
gccttctttctttttttcaatttccaaatcacgaaactcaagaagatggagaaagcgatcaacagacagaagattttgcttcatcatctcaacccttcatcatccacccaccccaacgaatcatcctccctccatgcttcagcatgtgtggcgggggatagcgctgcttatcaaaggacatcgacattcggggacgatgttgtgatcgtggctgcttatcggactgctcattgcaaagctaaacgaggtggtttcaaagacactcttcctgatgatctactggctcctgttttgaaagctgtaattgagaaaaccaatgtgaacccaagtgaagttggggatattggtgtaagtagtgtattggctcctggagctcaaagagctagtgaatgccgaatggctgcattttatg

SEQ ID NO: 34026 - DNA, 413 bp, Glycine max
  unsure (1)..(413): unsure at all n locations
  Clone ID: LIB3052-017-Q1-N1-G3
gcgggaaaagcataaataaaagaagaaattccacaagggtagatagttactatacccgttattctacacttaacaaagggcatctaagcctttgtttcttttattcattcttatttactgctaccagcactagctagagcccaaaaggacaaaagtgtggtagcacatgcaaaaagggctctctaagccacagctctcctctgagactcctgaggtggaaccaggaagctgaaagggttgttgttcttcacctgcctggcctgctggctctttaggttaaaagtgtgctgctctctctgtctctctctctctagacttagattttgtgaatggctgaagtggaagagggacaggtcatcggcgtccacaccgttgatgagtggaagctgcaactccagaatgcanaagactcc

SEQ ID NO: 34027 - DNA, 410 bp, Glycine max
  unsure (1)..(410): unsure at all n locations
  Clone ID: LIB3052-017-Q1-N1-G4
gcatcttcggcgggcgcaatggagcaagagaattacaaaaggaaggcagtgaatttgcttcgaagcagaatctgtgatcccaaattcatcttcatcaatgaatctccagaaagcaaccacagcaagctgaaattcatgatatcgagttcggtgacggaggcgtgcaacaattctattcttcttctcggtccccgcggctctggcaagaatgcggttttggaacttgtcattcaagatttgctgcaagaatatccggactcgatctcagtgatgaagttgaacgggcttttacatagtgatgacatctctgcgttcaaggaaatagctaggcagttatgcatggagcatcaattgctattctcaaaagcggcatcatttgatgacaactnccaatttatggtggccatgct

SEQ ID NO: 34028 - DNA, 399 bp, Glycine max
  Clone ID: LIB3052-017-Q1-N1-G5
ttgggattggagggattgacgctgcgtctcttcctgttctgtttcgatccatccctcattcctaatcctccaatccaaccacctcagcctcacactcacatatacacatatctgaacgcgtatcgtccctcctatggcttcaaagcgcatcctcaaggagctcaaggacttgcagaaagacccaccaacttcttgcagcgctggtccagtagctgaggacatgttccattggcaagcaacaataatgggtcctgctgatagtccttatgctggaggtgtattcctagtcactattcacttccctccggattatcctttcaagcctcctaaggttgcctttaggactaaggtgtttcacccgaacatcaatagcaatggtagcatttgtcttgatatcct

SEQ ID NO: 34029 - DNA, 397 bp, Glycine max
  Clone ID: LIB3052-017-Q1-N1-G6
aaaattcttccaccaagttatgggtttccttgtggggcttggtttctccctcttaggtctctcttctagttccagcatatcaactcatcgttccatattggaccttgacctaaccaagtttaccacacagaaacaggtgtcttcactgttccaactatggaagagtgagcatggacgtgtctaccataaccacgaagaagaggcaaagagacttgagattttcaagaataacttgaactatatcagggacatgaatgcaaacagaaaatcaccccattctcatcgtttaggattgaacaagtttgctgacatcactcctcaagagttcagcaaaaagtacttgcaagctcccaaggatgtgtcgcagcaaatcaaaatggccaacaagaaaatgaag

SEQ ID NO: 34030 - DNA, 409 bp, Glycine max
  Clone ID: LIB3052-017-Q1-N1-G7
agaatttccattgcatgcaaagcaaatacgcattatattactagttttaatttgttttgtcgtttgcttctttctttgattaatgatgactagctttaaggttgcatgtgtggttgcgatgatgtgcatggttgtggccatgagtgttacacccatggcacaggccgcaatcacgtgcgggcaggtcgccggcgacgtgtctccgtgcctcagttatcttcgaagcggcggaaaaccgtcggacgcctgctgcaacggagtgaagtcgctcagcggcgcggcgaagaccaccgccgaccgccaggcagcctgcaattgcctgaaaaaccttgccaataatatgggacagagtttgaatgccggcaacgcagcctctctccctggcaaatgtggcgtcaacatcccttac

SEQ ID NO: 34031 - DNA, 410 bp, Glycine max
  Clone ID: LIB3052-017-Q1-N1-G8
tgggttgcaaagatgcttgggggtcttctccataggggtcataagataaaagggacagtggtgttgatgcgcaagaatgtgttggacgtgaatagcgtaaccagcgttgggggaattattggtcaaggtctcgacttagttggctcaacactcgatactcttactgccttcttgggccgatccgtgtctctccagcttattagtgctaccaaagctgatgccaacggaaaagggaaacttggaaaggctacctttttggaaggtatcattacttcattgccaactttgggagcaggccaatctgcattcaaaattaattttgaatgggatgatgggagtggaattcctggagcattttatatcaagaattttatgcaaactgagtttttccttgggagtttgactcttga

SEQ ID NO: 34032 - DNA, 402 bp, Glycine max
  Clone ID: LIB3052-015-Q1-N1-G8
gttacaattcctgattataagcctgctccccgggtgggtgatttttcatcaagagggccttcattgattacaagcaatgttctcaagcctgatattgcagccccgggagttaacattctcgctgcatggtttggaaatgacacatcagaggttccaaaaggaagaaagccctcactatatcgcatactctcaggaacttccatggcactccacatgtttcagggcttgcatgcagtgtcaaaagaaaaaaccccacttggagtgcctccgcaatcaaatctgccatcatgacttcagcaattcaaaatgacaatttgaagggtcccataacaacggattcagggttgatagccacaccttatgactatggagcaggggcaattacaacatctgaaccattgc

SEQ ID NO: 34033 - DNA, 406 bp, Glycine max
  Clone ID: LIB3052-013-Q1-N1-G4
cttctctggttggttccggtctagagtcttcaatttcttcctggtggtcctcgctttcctggtttcaatttcgattctttcgttaatttaataagatgtttgggagggcaccgaaaaagagcgattatacgaggtactacgaaatcctcgcgtcttcagaacgctttgcacgatgatctgaagaagcttacaagaaagccgccattaagaatcaccccgacaagggcggtgatcccgagaagtttaaagagctggcgcaagcttatgaggttctgagtgaccctgagaagcgtgagatatatgatcagtatggtgaagatgcgcttaaggaaggaatgggtggtggcggtggccatgatccatttgatatcttttcatctttctttggcggtggggagttcctttg

SEQ ID NO: 34034 - DNA, 362 bp, Glycine max
  Clone ID: LIB3052-013-Q1-N1-G5
cttcacttgttgctcgtcttagtttctgtgttgtgtcatttttattgctatatcctaattaaacttcaccctcaaaatgagtgatcccacactagcacaaccacacctagtcgaagtccacacaacactcgaaaccgttgttaccacacacaaccataaccatagaccctaaataaatgcctcaggtgaaaagaagaaaattgtgggggtgttctacaaagggaatgagtatgctaaattgaaccccaatttcgtggggtgtgttgaaggagcattgggtatacgtgagtggctggaatcacagggtcatcagtacattgtcactgatgacaaagaaggaccagattctgaacttgagaaac

SEQ ID NO: 34035 - DNA, 350 bp, Glycine max
  Clone ID: LIB3052-013-Q1-N1-G7
accatccttttcttgaaagatgatggcaccttaaagccattggccatcgaattaagtttgccacatcctaggggagatgagtttggtgccgttagtagagtcgtcttgcccgcagaccaaggtgctgaaagtacaatttggctaattgccaaggcatatgttgttgtcaatgactcctgctatcatcaactcatgagccactggttaaatactcatgctgtgattgaaccatttgtcatagcaacaaacaggcatcttagtgtgctccaccctatttataaacttttgttgcctcactatcgtgacaccatgaacatcaatggactcgcaagacaatcactcatcaatgc

SEQ ID NO: 34036 - DNA, 355 bp, Glycine max
  unsure (1)..(355): unsure at all n locations
  Clone ID: LIB3052-013-Q1-N1-G8
gtcaaattcacccgctaccttttcccgtgtacgaacgaatccaatccaccaaatcggcggcgacgcctncgctctgtctcgaaaccacagatctgcggcggaaccgccgtctccgactatctccgattgatcttccggtaaagtggaccggagatgccggttgccgcttccgccatttacttcctcaacctccgcggcgacgttctcatcaaccgcctctatcgcgacgatgtcgggggaaatatggtggatgcttttaggacgcatattatgcaaacgaaggagcttggtacttgcccagtgaggcagattggtggatgctctttcttttacatgaggatcagtaatgtctaca

SEQ ID NO: 34037 - DNA, 278 bp, Glycine max
  Clone ID: LIB3052-013-Q1-N1-H1
aactcatctcatgagctgcaagatcaggtcatgcccctgaacctgttgatgttggacgcatattgcaagtcgatgttatatcagaaagcgagcacgtcacactttcaaccgctggtccaatagatccagttaagagattgaaacgtgttctgcaatcatgtcgagcttaaatttctttcgtactctcatgcagctgctggtttgggaacctatgtacaggcactaatgcgcaaacatgacactgaattcaacgtggtagtaacacacatgaatggttc

SEQ ID NO: 34038 - DNA, 375 bp, Glycine max
  Clone ID: LIB3052-013-Q1-N1-H11
ttctggccttaatggccgggccttgcgccttgcttgcaattgtgcctaaactgccaaatggccctgttgggttccacctgggttggccacgtaccattgctctggtggcattttctaacaggagggtgtaacggaattggcgcgtgggtcttcaattccgtgctcaacggtgctattttgttgctgtttcttaatttttacgtgaggatgtatttagcagggaggaggaagcgtaagggtgtcgtcattgatcatcggtgtgagaatgataataacattgctcgcttctctgtcttgggcgctggaaaagaaccacttagtaataaagtgaagtccaattaaagcacagatatatattttgaggttgagtcatgg

SEQ ID NO: 34039 - DNA, 387 bp, Glycine max
  Clone ID: LIB3052-013-Q1-N1-H3
tagaacagctatgacgtatgatgcacgcgttcagctggtagtacggctccaggagaactgattcatacatatacatgatctctcatcacttctcggaatcgtaagctatgggaaagtcttacccaactgtgagtgctgattaccagaatgccgttgagaaggcgaagaagaagctcagaggctacatcgctgagaagagatgcgctcctctaatgctccgtttggcatggcactctgctggaacctttgacaagggcacgaagaccggtggacccttcggaaccatcaagcaccctgccgaactggctcacagcgctaacaacggtcttgacatcgctgttaggcttttggagccactcaaggcggagttacctattttgagctacg

SEQ ID NO: 34040 - DNA, 400 bp, Glycine max
  Clone ID: LIB3052-013-Q1-N1-H5
aacagaaccaaactcagaaccaaactcagaaccaaactcgccaaaactagggttttgcattgatggcactgtgcaaccgcgtcagatcgggaatctctctcttcaccaaatccacgttccttacttcccagcgatccagtctccaacgatccctcgttgcccctttcatttccctcgcctccagaaattacgccaacgtgccggggcaaaaggaaaccaaagttaaggtccctctggctatgattggaggttcaggaaactatgcctatgctttgtatattgcatctgtgaaagccaatgcagtggaaaaggttgagactgagcttctgcaattgttgaggcagtaaagaatagtcccatatttcacagttaataagggactcgtctgtggctaaggatg

SEQ ID NO: 34041 - DNA, 354 bp, Glycine max
  unsure (1)..(354): unsure at all n locations
  Clone ID: LIB3052-013-Q1-N1-H6
gatgattccttcttatctaccactcaagcccaacagtcctacttgcaaggcttcagccataatattctagagacctccttccatagcgaattcgaggagataaacagggttttgtttggagaggaagaggagcagaggcagcaagagggagtgatcgtggaactctcaaaggaacaaattcggcaactgagcagacgtgccaaatctagttcaaggaaaaccatttcctccgaagatgaaccattcaacttgagaagccgcaaccccatctattccaacaactttggaaagttctttgagatcacccctgaganaaacccacagcttcgggacttggatatcttcctcagttct

SEQ ID NO: 34042 - DNA, 260 bp, Glycine max
  Clone ID: LIB3052-013-Q1-N1-H7
aagacctataacctcttgcatgttagcctgtgtcaccggaaaccaaacatactctaaaaggtaaaaagacgggcacttattgaaaagatgcattcttgaggggtcaaaatgcgatcccataaaaggatttcattaatcccgcggcctccatctttattcgtctttctcatacctcttcaacgacgctctctcccattccttgcgcacaataacatcgtgaacgctccttctccgaccagagatcaatggtggcttggtct

SEQ ID NO: 34043 - DNA, 157 bp, Glycine max
  Clone ID: LIB3052-013-Q1-N1-H8
ctcgagccgtttatatagataatcggagttgtgtatgtgagggtggtatttctgatctgttcttatgttttactatgtgatgtgggattatggatttcagaacattgcgtgttatttgctttgaagacaaatatgaaaacagttcaatggacctcct

SEQ ID NO: 34044 - DNA, 392 bp, Glycine max
  Clone ID: LIB3052-014-Q1-N1-A1
caacaacaactatggcaagttatcaaaagcactacgatgatcagggtcgcaaggttgacgagtatggcaacgttgagaagcaaaccgacgaatacggcaaccctgttcatgctgctagtgtcacctatgtagccaccagaactgctgctggtggttacagtgatgacattaataagcaacatgataccaccaatgcctacggcgtagacactggtagacagcattctagtggtggctacgatggtgacactaataaacatcatggaactactggtggctataatgatgacaccaatagacatcatggaactaccggtgtctatggtatagacaccgataggcaacaacatgggactactggtggctatgccggtgacacttgtaggcaacat

SEQ ID NO: 34045 - DNA, 406 bp, Glycine max
  Clone ID: LIB3052-014-Q1-N1-A10
cttgcaagctcccaaggatgtgtcgcagcaaatcaaaatgggcaacaagaaaatgaagaaggaacaatattcttgtgaccatccacctgcatcatgggattggaggaaaaaaggtgtcatcacccaagtaaagtaccaagggggctgtggaagcggttgggcgttttctgccacgggagccatagaagcagcacatgcaatagcaacaggagaccttgttagcctttctgaacaagaactcgtagactgtgtggaagaaagcgaaggttgttacaatggatggcactatcaatcgttcgaatgggttttagaacatggtgggattgccactgatgatgattatccttacagagctaaagacggtagatgcaaagccaataagatacaagacaaggttacaattgac

SEQ ID NO: 34046 - DNA, 410 bp, Glycine max
  Clone ID: LIB3052-014-Q1-N1-A12
tagtagaagagggaattaccaagtttccaagctttcctttagagtagaagcaaagaggtaaagtgtcataaaaagctgtaggcttccttcaatgggtgctcctaagcagaaatggactgcggaagaagaagcggcactgaaagctggtgtactcaagcatggggcaggaaaatggcgcaccatacttacagatcctgagttcagtgccattttgcatatgcgttcgaatgtagatcttaaggataaatggaggaatataaacgtgacagcgatatggggatcccggcagaaggcaaagcttgctcttaaaaggaacctgccagcccccaaaattgacaataaccatatggccttgagtaccgtagttcgacatgatgaagttcttgatactaaacccttggcagtttctg

SEQ ID NO: 34047 - DNA, 401 bp, Glycine max
  Clone ID: LIB3052-014-Q1-N1-A2
gtaacaaacctgtggcaatttcttgacatgattcccgcaggtttgtgaaggtgatgaaggtttccagatacggtcgtttgttctaaattgttagcttgagctgactttgcacacagtttgggatgaatatcttattcattgatacaaatttgtcgatgacctaataataccattaagcgttcattagtgccatctgagatgtatttctattgctgaagtgcggggagaaaaaaaagaattaaaaaagcatgatgattttgcccccccccaaaaaaaaaaatgaaacatggtgattgatttgttttgtattctttaatgtatgcatagcgtatgaatgctagaaactggaggaaagatttgacatggagctaattgactccctgtgagttccataatcaagc

SEQ ID NO: 34048 - DNA, 253 bp, Glycine max
  Clone ID: LIB3052-014-Q1-N1-A3
agaaagtcttccatagccccccaaaaatgaagagcaccatgttctttgctctctttctgttttgtgccttcaccacctcatacctaccttcagccatcgctgatttcgtgctcgataatgaaggtaaccctcttgaaaatggtggcacatattatatcttgtcagacataacagcatttggtggaataagagcagccccaacgggaaatgaaagatgccctctcactgtggtgcaatctcgcaatgagctcga

SEQ ID NO: 34049 - DNA, 359 bp, Glycine max
  Clone ID: LIB3052-014-Q1-N1-A5
ctctagccgctcgagcgacattcattcatctatggctacgcttattgctcccagcgaccactctccccaagaagacgctgaggctctcacaaaggcttttgaaggatgggggactgatgagaaaactgtcatagtaatattgggtcatagaactggttatcagaggcagcaaatcagaagagtctatgaggaaattttccaggaggatcttgtgaaacgcctagagtctgagatcaaaggagactttgagaaagccgtgtaccgatggatactagaacctgcagatcgtgatgctgttttggccaatgttgccatcaagaatggcaaaaactacaatgccattgtggaaatcgccacta

SEQ ID NO: 34050 - DNA, 254 bp, Glycine max
  Clone ID: LIB3052-014-Q1-N1-A7
aaaccgcacaaaacaaaaacaaaacaaaacagtggctttgattacgagagagagagaacaaaacaatcaacacaatggcttctgagcaaatgcctcgcagagagaacaacagcaatagggtgatagagagagaagttcacgttgagacacacagaaaagagtccctccctgataagggaagggttgtgatagagagtgagaagaaggagaaagagagagagttggcttctgatagagccaggtctggaaatata

SEQ ID NO: 34051 - DNA, 330 bp, Glycine max
  Clone ID: LIB3052-014-Q1-N1-A8
aaacactcatcagtcatcaccatggccaagctagttttttgcctttgttttctgcttgtcagtggctgctgcttcgctttcagttccagagagcagcctcagcaaaacgagtgccagatccaaaaactcaatgccctcaaaccggataaccgtatagagtcagaaggagggctcattgagacatggaaccctaacaacaagccattccagtgtgccggtgttgccctctctcgctgcaccctcaaccgcaacgcccttcgtagaccttcctacaccaacggtccccaggaaatctacatccaacaaggtaagggtatttttggcatgata

SEQ ID NO: 34052 - DNA, 343 bp, Glycine max
  unsure (1)..(343): unsure at all n locations
  Clone ID: LIB3052-014-Q1-N1-B1
ttgaagaacaacatggtggtgctaaaggtgtgtttgttgcttcttttccttgtgggggttacagctgcacgcatggaactgagcttcttcaaaagtgatcagtcatcaagttatgatgatgatgagtattcaaaaccatgctgtgatctctgcatgtgcacacgctcaatgcctcctcaatgcagctgtgaagatattaggctgaattcatgccactcagattgtaagagctgtatgtgcacacgctcacagccaggacagtgtcgntgtcttgacaccaacgacttctgctacaaaccttgcagtccagagatgactaganaaactaatagctctctcaaat

SEQ ID NO: 34053 - DNA, 406 bp, Glycine max
  Clone ID: LIB3052-014-Q1-N1-B10
ctttggaagtgcggaaatatagagctgaattgtctgaacaggatatatttgtaatcccagcaggttatccagttgtggtcaacgctacctcagatctgaatttctttgcttttggtatcaatgccgagaacaaccagaggaacttccttgcaggttcgaaagacaatgtgataagccagatacctagtcaagtgcaggagcttgcgttccctgggtctgcaaaagatattgagaacctaataaagagccaaagtgagtcctactttgtggatgctcagcctcagcagaaagaggaggggaacaagggaagaaagggtcctttgtcttcaattttgagggctttttactgaataagtatgtagtactaaaatgtatgctgtaatagctcatagtgagcgaggaaagt

SEQ ID NO: 34054 - DNA, 407 bp, Glycine max
  unsure (1)..(407): unsure at all n locations
  Clone ID: LIB3052-014-Q1-N1-B11
ctctctcgctcttcttctcatccagcaccgagtcacagacgtgagcgatcttccgattccctttcgtcttggtttatgagctcgaaggagagacccactcttggtggcacgcggattaagacccgcaaacggaatattgctgcgccgctggaccctgcagcattctcggatgcagtggtccagatttatttggataatgctggtgatctggaacttattgctaagagcattgaatcttcagaccttaacttttcaagatacggcgataccttttttgaggttgttttcactgggggtcgtacacaacctggaactaccaagcctgatgagggggaccgncatccatactctataatagagtgtgagcctaagcgggaagtcattttaccatctgtaatctacataca

SEQ ID NO: 34055 - DNA, 407 bp, Glycine max
  unsure (1)..(407): unsure at all n locations
  Clone ID: LIB3052-014-Q1-N1-B12
aagaaggcttttttttgccaacaccagttgcaaaactaatatcgtttcaaacggatttgatctacaatggcctggtttctctcttttcctctatccactctcttttttccgtggctacagagtcctaccaccgtgctgaggagaccaaagacagtgttgaatcagcagtgcaacgtgctccttctcaaagcactcatggcagcgcactcttgctgaagaaactgggactttgcttcctgagtgttgcgtatgtgtgcatggttatgattttggctctcattctggctgctgtggtgggtgttgctttggttcggttgtgggtggaggaacccgtgtctgtcaaggaaaatctgcattntgattacactgaaactcaccctacggctgtgttnntattcaatggagtt

SEQ ID NO: 34056 - DNA, 407 bp, Glycine max
  unsure (1)..(407): unsure at all n locations
  Clone ID: LIB3052-014-Q1-N1-B3
ggcatgcaagaagagagaggaatcgtactacacaagtttcggactgcccctcatttttgtactgcatttgggactcttcactcttctccacaccttcatctttgtcaagtttccatagcatagagacaaaaccgggtgggtttaattggctttcttttcctttccctcggattcttcttttttttcactctctggttttcatgcctcatctcactaattgtgccctttagctgctttttttcacttggagttggtacactcattcactcatctttcaatggcataaaaaaagtttttttttttttttttttttaattcacttttgcatttggagtttatggggtggaatgaaatgatggctttggcttccaataataatggtttcttcatttggcatgttntttttt

SEQ ID NO: 34057 - DNA, 374 bp, Glycine max
  Clone ID: LIB3052-014-Q1-N1-B4
cagaagctgtcgttgtaaatgttacatgtggtagtggacgtggtggtttacccaccactgcttggattagttctgcagttaacaatcgctcctcagatatcaacaaaaagattcgcacagcacttgggaaaggtaagaaaattgtttttcttactagagttgatccttttccagtagctttactggctgttctttttggcgttaagaatgaaattctgagttctaacgccactaatcctatgctgacgcgacttcttgagaactgtaggagtctcaaatatctggttgacgagtgtccttttgcatttgtgaactagtatgtaatattttattcacttaaataaagcgcattactatgtgcaatgagtgtgttt

SEQ ID NO: 34058 - DNA, 296 bp, Glycine max
  Clone ID: LIB3052-014-Q1-N1-B5
gaggaattttagtggacaaaactggagattggatgacacgtatacaaaattcttcaatgagtaacttgttgagagttgctgcttggaagaaaggctgtttaatggttaagattgtgatgtctgggaatgcatcagtcaaaaggagtgattgggccttattggtacaagtgtttttaacaaacagcaacagtacagatgatttagatgcatgtaagtggacaaaatctgaaccacattactgggaattgatcctcccaatagaatgatgcgggcctaataatggttttgaaatgtgg

SEQ ID NO: 34059 - DNA, 417 bp, Glycine max
  unsure (1)..(417): unsure at all n locations
  Clone ID: LIB3052-014-Q1-N1-B6
atcaccaccgtcaccgacgctcaagccaaggccgccggcgggcgtggccgtgcctacgtcaccttcctcgccggaaacggtgactatgtgaaaggtgtcgttggcttggccaaaggtctgaggaaggtgaaaagcatgtaccctctggtggttgcagtgttacccgatgttccagaacatcaccgaaacattctcacctcccaaggttgcattgttagagaaattgaacccgtgtaccctcctgagaatcagacgcagttcgccatggcatattacgtcatcaactattccaagctacgtatttgggagtttgtggagttcagcaagatgatatacctagacggtgatatacaagtgtttgacaatattgaccacttgtttgacttgcctgataactactnttatgcggtgatggac

SEQ ID NO: 34060 - DNA, 313 bp, Glycine max
  Clone ID: LIB3052-014-Q1-N1-B7
attggatcggagcgtaccgcggaggccagagaagcagggactggtgcgacccttcatcaccattcactgatttgtgggaccctcgtcgtgtcggtgacgctgatgatatcacctcctctctcgcccatgctcacgttgactggcgtgagactgataaagctcatatcttccgtgctgatcttccaggggtgaagaaagaggatctgaaggtgcaggtggaagagaataagatcctgcagataagcggggagagggtgaaggagaaggaggaccagaacgacaagtggcaccgcgtcgagaggcagtgcggaag

SEQ ID NO: 34061 - DNA, 393 bp, Glycine max
  Clone ID: LIB3052-014-Q1-N1-B8
aaaggatccaaagacaagaaggccatgaggagagctgagaaggagagacagaaggaaggtgaattagctgatgaggaacagaagaaagtgaagaaagaggttaagaagaaaggctcttcatcttctaaggatggcactgctaaatcaacctcttctaagaaaaaagcaagtggctctgatgaagaccacacttcacctactcacagtcaaattgacgagaaagaggaggctccagatgaagatgatgacgacgacgtgcaatggctgacagatacatcacttgatgctgcccgtcaacgtatccaagaacagttaagtgctgtgacaactgatatgggtatgctttctacagatgaaccagagaagaagaaaaaaacattaagtaacagaaat

SEQ ID NO: 34062 - DNA, 407 bp, Glycine max
  Clone ID: LIB3052-014-Q1-N1-C1
tcacacacaactacaagaaagaacttccttataaccaaagcgcaacaacaactatggcaagttatcagaagcactacgatgatcagggtcgcaaggtcgacgagtatggcaatgttgagaggcaaactgacgaatatggcaacccggttcatgccactagtgtcacttatgtagccaccaaaagtgttggtggctacaatgatgacgctaataagcaacatgatattactggtgtctatcccgagaaagacaccggtagacatcattttggtcgtggttacgacggtgacactaacaagcaacatgatgctactggtgtttatcccggaatagacattggtagagatcatgggactaccggtgtttatggcctaaacaccgacagacatcatggaacttctggggtg

SEQ ID NO: 34063 - DNA, 384 bp, Glycine max
  Clone ID: LIB3052-014-Q1-N1-C10
ccaaagaggataagaaggaagaagagaagaaagaggagccagcagcggaaatagtgctgaaagttgatatgcattgtgaggcctgtgcaaggaaagttgcaaaagcattgaaaggattccaaggagtggaagaggtgagtgctgatagcaggacaagcaaagtggtagtgaaaggaaaggcatcagaccccataaaggtgtgtgagaggctacaaaagaaaagtggtaagaaagtggagctgatttcacccttgccaaaacctccagaggagaaagaagaaccacccaaagaagaaccaccaaaagaggagaaaaaatatgagcctcctcctgtggtaacagttgtcctaaaagttcgaatgcattgtgaagcatgtgctcaag

SEQ ID NO: 34064 - DNA, 400 bp, Glycine max
  unsure (1)..(400): unsure at all n locations
  Clone ID: LIB3052-014-Q1-N1-C11
gaacaacagctccttgactgtgacaacaagtgtgacataagaggaaagacttcatgtgacaatgggtgtaatggaggtcttatgacaaatgcctacaattatttgctcgagtctggtgggttggaggaggagtcttcatatccctacactggggagagaggtgaatgcaagtttgatccagagaaaatagcagttaagatcacaaatttcaccaatatccctgctgatgagaaccaaattgccgcatatttagtaaaaaatggtccacttgctatgggcgtgaatgcaattttcatgcaaacatacattggtggtgtctcatgccctctcatatgtagcangaaaaggctgaaccatggtgtgttacttgtgggatatggtgcataaggcttctcaattc

SEQ ID NO: 34065 - DNA, 341 bp, Glycine max
  Clone ID: LIB3052-014-Q1-N1-C12
gtgaagttttttctttgagaagtaaaagatcttagtgcaagtagttaacatggaatctcagcaagcaaaccgtgaagaacttgatgagaaggcaaggcaaggtgaaactgttgttcctggaggaactggtgggaagagtcttgaggctcaagaacatcttgctgaaggaaggagccgtggagggcagacgaggaagcagcagctagggtcacaggggtatcatgaaatggggaccaaaggagggcagacaaggaaggaacagatggggagagaagggtaccaagagatgggacgcaaaggaggactcagcaccatggacaagtctggtggagaacgtgctg

SEQ ID NO: 34066 - DNA, 418 bp, Glycine max
  Clone ID: LIB3052-014-Q1-N1-C2
ctagttcaatatcctagtataccttaataaataatttaagatactatgatgagagcacggttcccattactgttgctgggacttgttttcctggcttcagtttctgtctcatttggcattgcttactgggaaaaagagaaccccaaacacaacaagtgtctccagagttgcaatagcgagagagactcgtacaggaaccaagcatgccacgctcgttgcaacctccttaaggtggagaaagaagaatgtgaagaaggtgaaattccacgaccacgaccacgaccacaacacccggagagggaacctcagcaacccggtgagaaggaggaagacgaagatgagcaaccacgtccaatcccattcccacgcccacaacctcgtcaagaagaagagcacgagcagagagaggaacaggaat

SEQ ID NO: 34067 - DNA, 377 bp, Glycine max
  Clone ID: LIB3052-014-Q1-N1-C3
ttcacttgcagcactgttgcatcatcatcttcattgcaaagccctaaacttcaccttcaaccatgaccacacaagtaccaccacacagtgtccaagtccacacaacaacacaccgctacgaagctggcgtcgtcccccccggagcccgtttcgaaccgccgcgttatgaagccggcgtcaaagcgccctccatttaccattccgagagaggtccaacgacttcccaggtcctcgccgtcctcgccggcctcccggtcggtggcatcctgctcctcctggcgggattgaccctggcaggaaccctcaccggactggcagttgccacgccgctcttcgtcctcttcagcccggtgctggttccagccacggtcgccatc

SEQ ID NO: 34068 - DNA, 420 bp, Glycine max
  Clone ID: LIB3052-014-Q1-N1-C4
attttgggacctgataagttatatatgatgtattcacatgcgtgagtatttctgaacttttggaaattttacaacttttgattttgggacctgataagttgtatatgatgtattcttggggcttaaaatagacattgacataagtgattttaccatggtccagtcccttagatcttatgtataaaggaccctgaatctggctgaaaacccccagattttttacttcttttgaatagtattttgctagagagaacccaatgatcttcaatagtagaagtactcaagaacttttgtgaaaatttctgcactataatgtgttctctatttagcaaatagtttatattaactgctctaaactatccatcctaatagttcatattgactgctctaaaccatccatcctaatagttcatattgact

SEQ ID NO: 34069 - DNA, 408 bp, Glycine max
  Clone ID: LIB3052-014-Q1-N1-C6
taagcacaaaaaaggcagtgagtggagtgagagaaagagagaaatcatggcagtttctgtaaccattttagtcctcatcatcgctctgcatctcatagccttcgtcttcgccgttggcgccgaacgacgtcgtagcgaggccaaagtggtccccgacgagtacgacgaccaaaccttctgccattacaccaccgacgcctccaccgtctacggcctctccgccgtcgccctcctcctcctcagccacaccgtccttaacggcgtcacgcgatgcctttgctgcggcaaaggcctcgtctctggctgctccgccaccttcgccgtcatctccttcatcctctcatggattagttctttggcggcagaggcgtgtctgttagcagggtctgcaaggaatgcataccacac

SEQ ID NO: 34070 - DNA, 393 bp, Glycine max
  unsure (1)..(393): unsure at all n locations
  Clone ID: LIB3052-014-Q1-N1-C9
ctggtgggttggaggaggagtcttcatatccctacactggggagagaggtgaatgcaagtttgatccagagaaaatagcagttaagatcacaaatttcaccaatatccctgctgatgagaaccaaattgccgcatatttagtaaaaaatggtccacttgctatgggcgtgaatgcaattttcatgcaaacatacattggtggtgtctcatgccctctcatatgtagcaagaaaaggctgaaccatggtgtgttacttgtgggatatggtgcaaaaggcttctcaattcttaggcttggcaacaaaccatactggatcatcaagaattcgtggggggagaaatggggagaagatggctattacaagctctgcanagggcatggcatgtgtggaa

SEQ ID NO: 34071 - DNA, 416 bp, Glycine max
  Clone ID: LIB3052-014-Q1-N1-D1
gatgagtttgaagaacaacatggtggtgctaaaggtgtgggtgttgcttcttttccttgtgggggttacagctgcacgcatggaactgagcttcttcaaaagtgatcagtcatcaagttatgatgatgatgagtattcaaaaccatgctgtgatctctgcatgtgcacacgctcaatgcctcctcaatgcagctgtgaagatattaggctgaattcatgccactcagattgtaagagctgtatgtgcacacgctcacagccaggacagtgtcgttgtcttgacaccaacgacttctgctacaaaccttgcaagtccagagatgactagaaaaactaatagctctctcaaatggacgaagcccctttaggctttgtttgttatgttaggggagacaaattaaacaagaaataaaagc

SEQ ID NO: 34072 - DNA, 395 bp, Glycine max
  unsure (1)..(395): unsure at all n locations
  Clone ID: LIB3052-014-Q1-N1-D10
gtagctattatactctctagagtaattgcggaatctgctggaagtttctaataatggcgaaagacgttgagcaggtcacagagcaaggtgaatactccgcgaaggactaccatgaccctcctccggcaccgttgatcgacccagatgagctcacaaagtggtccttgtacagagccgccatagctgagttcatagcaacactcctttttctttacatcaccgtgttgaccattattggctacaagagacagagtgacaccaaaatccccggtaacaccgaatgtgacggcgttggcattttgggcatcgcttgggccttcggtggcatgatcttcatccttgtttactgcacttgccgaatctctggnggacacatcaacccctgcgtgacattc

SEQ ID NO: 34073 - DNA, 169 bp, Glycine max
  Clone ID: LIB3052-014-Q1-N1-D12
aatcggtggagaacgcgcacgatgattcggtgtgggcggtcacctgggtacccgcaaccgccaaccgaccaccgctcctcctaaccggttccctcgacgagaccgtcaggctctggcgctccgacgacctcgttttggaccgcaccaacaccggccactgcctcggcgt

SEQ ID NO: 34074 - DNA, 313 bp, Glycine max
  Clone ID: LIB3052-014-Q1-N1-D2
aaaattcagatttctaaattttgcatatcaaactgcggtgagagcatagaacggacgccctattgagtaaaacaaaacttagaagaagattattgaaacgcccatcataaagcaacccgcagcttgatatgcaaaattcagatttctaaattcaaattatttgcagatctacaaaatgagagcttgtacttttgatttcattggagcccctgaaatcatagagttagctatctattttttttcgttgttgaaacgaattggagtttttgccattaatccccaagtttattacatggaattcgaatttctagct

SEQ ID NO: 34075 - DNA, 398 bp, Glycine max
  Clone ID: LIB3052-014-Q1-N1-D3
caaaatgctctgtactgttgctgtttgtaagtggacaaaagcagaaccacattcctgggaattgatcttcccaatagaggtatgtggtcctaataatggttttgaaatgtggagttctgagtgggcaaatcaaacttcatggcatttgagtttccttattgacaatcccaaacagtctacagtttttgatattctcttgggaatctctcaagattttgaaattgctggtaatactcttatgccagctttttctgttccacaggctactgccagatcttctgaaaatgcggaatcctctgcatgatctggaatttgtgttttctttcgcttgatcacttgtttaattcaataaaggaaattacgcatgaccctctagttgagtatgctctgcctatttg

SEQ ID NO: 34076 - DNA, 399 bp, Glycine max
  Clone ID: LIB3052-014-Q1-N1-D4
gttcaatatcctagtacaccgtattaaagaatttaagatgtgactatgatgagagcgcggttcccattactgttgctgggagttgttttcctggcatcagtttctgtctcatttggcattgcgtattgggaaaagcagaaccccagtcacaacaagtgcctccgaagttgcaatagcgagaaagactcctacaggaaccaagcatgccacgctcgttgcaacctccttaaggtggaggaagaagaagaatgcgaagaaggtcaaattccacgaccacgaccacaacacccggagagggaacgtcagcaacacggtgagaaggaggaagacgaaggtgagcagccacgtccattcccattcccacgcccacgccaacctcatcaagaggaagagcacgag

SEQ ID NO: 34077 - DNA, 353 bp, Glycine max
  Clone ID: LIB3052-014-Q1-N1-D5
tgcaaacattgaacttgttggcctaaaagaacaacggcaggagcagcaacaggaagagcaacctttggaagtgcggaaatatagagccgaattgtctgaacaagatatatttgtaatcccagcaggttatccagttgtggtcaacgctacctcaaatctgaatttctttgctattggtattaatgccgagaacaaccagaggaacttcctcgcaggttcgcaagacaatgtgataagccagatacctagtcaagtgcaggagcttgcattacctgggtcttcacaagctgttgagaagctattaaagaacccaaagagaatcctactttgtggatgctcagcctaagaagaaa

SEQ ID NO: 34078 - DNA, 393 bp, Glycine max
  Clone ID: LIB3052-014-Q1-N1-D7
gcttttccccacaagctggtgcagtttggagagagtcaggaaaaagttgtattgaaattttcacaagaggaatttcttacagcttggtcaactcaggtgcgtcctgcaacaactctgttggctgatgggtgcccatatttgtatgctatggtgcatgatagttcagtgtctacaataccaggtgattttgtcattggtgttaagttgacaaccataaacaatatgtgtgcatatgggctcaatcctggtatttcaggttctcgtcttttgggcaccattcctcagtccatttcacagcaaactgtttggaatcaaatggcaacagtgagaacaccattgaattttgattctagcaagcagagcttttgtcaattctctattgatcttcttggt

SEQ ID NO: 34079 - DNA, 423 bp, Glycine max
  unsure (1)..(423): unsure at all n locations
  Clone ID: LIB3052-014-Q1-N1-D8
ctcgagccgctaatagtgagagtaggagcaatgatgtttatcttccaagagatgaggcttttggacacttgaagtcatctgactttcttacttatggactaaaatccgtatctcaaaatgttcttccattattgcaatctgcttttgatttgaatttcacaccccgtgagtttgatagctttgatgaagttcatggactctattcaggcggaattaagctgccaacagatataatcagcaagattagtccactacccgtgcttaaagaaatcttccgaactgatggtgaacaggcccttaagtttccttcttctaaagtaattcaagtgagtaagtctgcatggatgactgatgaagaatttgcaagagaaatgctngctggtgtaaatccaaacttgattcgttgtcttaaggatttccctc

SEQ ID NO: 34080 - DNA, 412 bp, Glycine max
  unsure (1)..(412): unsure at all n locations
  Clone ID: LIB3052-014-Q1-N1-D9
cttccttagttcaatatggggaagcccttcactctctctcgttgttccctttgcttgctactcttgtcgagtgcatgctttgctattagctccagcaagctcaacgagtgccaactcaacaacctcaacgcgttggaacccgaccaccgcgttgagtccgaaggtggtttgattcaaacatggaactctcaacaccctgagctgaaatgcgccggtgtcactgtttccaaactcaccctcaaccgcaatggcctccacttgccatcttactcaccttatccccggatgatcatcatcgcccaagggaaaggagcacttggagttgcaattccaggatgtcctgagacgtttgaggagccacangaacaatcaaacagaagaggctcaaggtcgcagaagcagcagctacagg

SEQ ID NO: 34081 - DNA, 382 bp, Glycine max
  Clone ID: LIB3052-014-Q1-N1-E10
gtgcagaagagcgtcgcagtcgcaaccctaatcagaagaagcgcgagcttcaagcgagtgacagccaccagccatgggtcgtatgcacagccgcggtaagggtatatcctcttctgctttgccctacaaaaggacacctcctagctggctcaagatctcttcgcaagatgtcgaagaaaatatctgcaagtttgcgaagaaaggtttgaccccgtctcagattggtgtcattctcagagattctcacggtattgctcaggtcaatagcgtcactggcagcaaaatccttcgcatcctcaaagctcacggacttgcgcctgaaattccagaggacctgtaccatttgattaagaaagcagtttcaattaggaagcatcttgag

SEQ ID NO: 34082 - DNA, 412 bp, Glycine max
  unsure (1)..(412): unsure at all n locations
  Clone ID: LIB3052-014-Q1-N1-E11
gcacaagttgaacttcgtgacgagcatgggaacccagttgaactaacagatgcatatgggaatccggtttggttaacggacgagaaaggcaacccggtgcacctcacggctgtggcaaccaatgcacacaaatctatgcttcagaatgacaccccacaagagcttcctcactccaagagttcaagctcgtctgaggatgaagggcatggagagaggatcaggaagggactgaaggataacatagaagaaaagttaccagctggagaaggagtagtgaaggagaataaacacaccacaattgctgcttctacttctacaacagatactagtgatgctaatcaccacccaaccactgagcatgagaagaagagtatcatagacaagattaaagaaaaattccaatanatcagca

SEQ ID NO: 34083 - DNA, 395 bp, Glycine max
  Clone ID: LIB3052-014-Q1-N1-E12
aagcccttcactctctctctttcttccctttgcttgctacgctggtcgagtgcatgctttgctattagctccagcaagctcaacgagtgccaactcaacaacctcaacgcgttggaacccgaccaccgcgttgagtccgaaggtggtttgattcaaacatggaactctcaacaccctgagctgaaatgcgccggtgtcactgtttccaaactcaccctcaaccgcaatggcctccacttgccatcttactcaccttatccccggatgatcatcatcgcccaagggaaaggagcacttggagttgcaattccaggatgtcctgagacgtttgaggagccacaagaacaatcaaacagaagaggctcaaggtcgcagaagcagcagctacaggacag

SEQ ID NO: 34084 - DNA, 374 bp, Glycine max
  unsure (1)..(374): unsure at all n locations
  Clone ID: LIB3052-014-Q1-N1-E2
gctcgaagtcgattgcccctgcgtcactcccgaaatcgttctcaaggcctctgggcacgtggacaaattcaccgatctcatggtcaaagacgagaagaccggcacgtgctaccgcgccgatcacctgctcaaggacttctgcaacgacaagctccagcgtgaccttgcgttgtcttctgataaggttgcggagcttaagcacgtgcttgccatgctggatgatttctctgctgaagagcttggtgccaagattaaggactatgggattgtttctcctgagactaagaactctctctctgatccctaccctttcaatttgatgtttcagacttccattggtccctccggcttcagccctggctntatgagacccg

SEQ ID NO: 34085 - DNA, 421 bp, Glycine max
  Clone ID: LIB3052-014-Q1-N1-E3
aattattaacacttccttagttcaatatggggaagcccttgactctctctctttcttccctttgcttgctactcttgtcgagtgcatgctttgctattagctccagcaagctcaacgagtgccaactcaacaacctcaacgcgttggaacccgaccaccgcgttgagtccgaaggtggtttgattcaaacatggaactctcaacaccctgagctgaaatgcgccggtgtcactgtttccaaactcaccctcaaccgcaatggcctccacttgccatcttactcaccttatccccggatgatcatcatcgcccaagggaaaggagcacttggagttgcaattccaggatgtcctgagacgtttgaggagccacaagaacaatcaaacagaagaggctcaaggtcgcagaagcagcagctaca

SEQ ID NO: 34086 - DNA, 404 bp, Glycine max
  Clone ID: LIB3052-014-Q1-N1-E4
ctagtataccttaataaataatttaagatactatgatgagagcacggttcccattactgttgctgggacttgttttcctggcttcagtttctgtctcatttggcattgcttactgggaaaaagagaaccccaaacacaacaagtgtctccagagttgcaatagcgagagagactcgtacaggaaccaagcatgccacgctcgttgcaacctccttaaggtggagaaagaagaatgtgaagaaggtgaaattccacgaccacgaccacgaccacaacacccggagagggaacctcagcaacccggtgagaaggaggaagacgaagatgagcaaccacgtccaatcccattaccacgcccacaacctcgtcaagaagaagagcacgagcagagagaggaacaggaa

SEQ ID NO: 34087 - DNA, 408 bp, Glycine max
  unsure (1)..(408): unsure at all n locations
  Clone ID: LIB3052-014-Q1-N1-E7
ctgaagaaaacctaagcttagaattagaaacaaagaaaagaagaaaggaaagaattgatcgttgaaaatgcagggaggaaagaaagcgggagagtccattaaggaaacagctacaaacattggtgcttctgccaaggctggcatggagaagaccaaggccactgtccaagagaaggcagaaagaatgacagcacgtgatccggtgcaaaaggagttggcaacccaaaagaaagaggcaaagatgaaccaggcggagctggacaagcaggcggcgcgtcagcataacacggcggccaaacagtccgccaccacggctgggcacatgggacatggccaccacaccaccggaaccgggactggaaccgncacgtattccaccaccggggaatatggtcagcccatgggggc

SEQ ID NO: 34088 - DNA, 389 bp, Glycine max
  unsure (1)..(389): unsure at all n locations
  Clone ID: LIB3052-014-Q1-N1-E8
gcagctgttaaggttgttgacattgttgacacattcagacttcaggagcaacccgcattcgataagaagcagtttgttaccttcatgaagaggtttatcaagaatttgactcccaagctcgatgcagagcaacaggagttgtttaagaagcacatcgagggagcaactaaatacctgctctctaagattaaagatttccaattttttgttggtgagagcatgggtgatgatgcttgcttggtctttgcctactacaaggacggcgctgctgatccaacattcctgtactttgcatatgccttaaaggaggtcaagtgctaagtgacttaatgtaccgagctatctactcattntatctagttntttttttacgttctgtcctaagttac

SEQ ID NO: 34089 - DNA, 409 bp, Glycine max
  Clone ID: LIB3052-014-Q1-N1-E9
actagttagagcttcttcccacttcctccgccgccaccgggaccaccaccgatggcggatccgaaagcctactggtgccacgagtgcgacatgagcgtgtccctgacgctcccaccctcccctctcctctgcccgcactgccacacccacttcctcgagctcatggactccccaaccctctcccaaaacgacaccgaatcctccctcttcgacgtcgttttccaagacgctctcttactcctcaaccccccttcctcaaaaccccgcccgctcccctgccttcacgttaccccctacgttctatactccctcgaccccaacggcggagctcgctgcgccgtctgcaaagaccaaattacccgccacgccgaaaccaaacaattaccctgtcaacacttataccactccg

SEQ ID NO: 34090 - DNA, 424 bp, Glycine max
  Clone ID: LIB3052-014-Q1-N1-F1
caagagcagaaaacggtgcgtttcacacgcgttaagctggtgcggcctaatgagactctcaaccttggccatgcttacaggcttatcaccactcaagaggtcatgaaggtgttgaaagctaagaagcatgcaaagacaaagaagccactggctgaggccgccgagaagccgcatagggtgcagtcggagaagcagagttcagctagtgaggcacacacagcaggagagtctacacatcagggaatgagagcagagagacacaggccaaggacggcttcagcaaatcctgctgtagtgaggtcaaaatcctggcgcccttccttacagagcatttctgagtcagcaagttgatttattggtgcaaactgcaaagttgtgacatgtatagtggctcatagaatattatatgattagcctctatgat

SEQ ID NO: 34091 - DNA, 362 bp, Glycine max
  Clone ID: LIB3052-014-Q1-N1-F10
taaaattcttccaccaagttatgggtttccttgtgttgctggtggtctccctcttagggctgtcttctagttccagcatatcaactcatcgttccatattggaccttgacctaaccaagtttaccacacagaaacaggtgtcttcactgttccaactatggaagagtgagcatggacgtgtctaccataaccacgaagaagaggcaaagagacttgagattttcaagaataacttgaactatatcagggacatgaatgcaaacagaaaatcaccccattctcatcgattaggattgaacaagtttgctgacatcactcctcaagagttcagcaaaaagtacttgcaagctcccaaggatgtg

SEQ ID NO: 34092 - DNA, 411 bp, Glycine max
  Clone ID: LIB3052-014-Q1-N1-F11
aaaaaagagaagaagatgggtttgaagaacaacatggtggggctaaaggtgtgtttggtgctacttttccttgtggggggtactactagtgccagcttgaggctgaatgagcttggcctgctcatgaaaagtgatcatcatcaacactcaaatgatgatgactcttcaaaaccatgctgtgatcaatgcgcatgcacaaagtcaaaccctcctcaatgccgctgttcagatatgaggctgaattcgtgccattcagcttgcaaatcttgtatttgcgcattatcgtatcctgcacagtgttcatgtgttgacataacggatttctgctatgaaccttgcaagcccagtgaggatgacaaggaaaactactaatgaacaagtgttatgcatgtaagctctctctccaatggg

SEQ ID NO: 34093 - DNA, 343 bp, Glycine max
  Clone ID: LIB3052-014-Q1-N1-F12
gtggtgataacagcttgtgtcaaaatgttggtttattaatgcaccgtataattagtatgccatgcagtggtgataacagcttgtgtctaaatattccttagtctttgatcactgttacttcactgcatgttcaaagagtgttactacaacactttgaatacattctccatgaaccacgtagataccaggttatattggtgccatattttttacgtgtaaactgacactgatcattgcagaatatatatagtgatttatgaaacaaccagttaaaaggaaaaaggctataatgatgacaccaatagacatccatggactaccggtgtctatggtatagacacaa

SEQ ID NO: 34094 - DNA, 406 bp, Glycine max
  Clone ID: LIB3052-014-Q1-N1-F2
taagaaccaaatgatccagctgaaatgcgctgcttgtggggttgcgtctgatgttgatatgagagacaagctgactaccttcatcattaagaaccctccagaggttaagaaaggatccaaagacaagaaggccatgaggagagctgagaaggagagactgaaggaaggtgaaatggctgatgaggaacagaagaaagtgaagaaagaggttaagaagaaaggctcttcatcttcaaaagatggcactgctaaatccacctcttcaaagaagaaagcaagtggctctgatgaagaccgcacttcacctactcacagtcaaattgatgagaaagaggaggctccagatgaagatgatggtgatgatgacgtgcaatggctgacagatacatcacttgatgctgctcgt

SEQ ID NO: 34095 - DNA, 378 bp, Glycine max
  Clone ID: LIB3052-014-Q1-N1-F3
ttcagatcttagtttctgaactgaaagatgctactttagtgtatgttgatatttataccattaagtatgacctcatcacaaatgccgcgaaatatggtttctcgaatccgttgatggtatgttgcggctatggagggcctccttacaattttgacgtaagggtgacatgtggtcaacctggttatcgggtttgtgatgaaggggctcggtatgtgagttgggatggaattcatcaaactgaggctgcaaatacattgatagcttctaagatactttccatggcttattccacaccacggacaccttttgatttcttctgccaccaatgattatgcacactgagtgtgcaaaacagtgaatccactgttagttcattag

SEQ ID NO: 34096 - DNA, 363 bp, Glycine max
  Clone ID: LIB3052-014-Q1-N1-F4
cgtgtgtcactcttgctctgcgctctaaccctatccgctgctcacggaaacaccacgggtcaggacatcgcgagaaaattgaaacttcgggaccaccaaccttttccccccggggaaaaatttcagggttttaatggaaaataccggaggaagttattcaccagagaagaatatttgggcccgtttgggaattttggcccaaacaatggtcaaaccgccgagacatcaggcgctgtaccccaccgcggtccacggcgtcacgcagttttccgatctcaccgaggacgagtttgagaagctctacactggcgtcaatggcggcttcccgtcatcgaataatgccgccggcggtattgcgccgcc

SEQ ID NO: 34097 - DNA, 405 bp, Glycine max
  Clone ID: LIB3052-014-Q1-N1-F6
ctcctttagtcctttgtctccgttccgtcgtcaaccctagctttggatctgcgtttggccttcaggttttgaagtccgaaggacgaagaagaagagattcctgacagcgtaatcatgtttggtgtcgtaaggcgaagggttgcttctggcagcccgtctccttggttgctaggtcagtcagctcagaaaatccggtctggcccatcagtttctgctagagcttcttccattgtggaaaaagagattgtatttcgttcaggcggatgtggatttgtccagaacttcagtcatataactcctggaagctggattaattcaaagcctatgagggtggtcattcatccagaggcaactgttcgaacttgggggcgtctattttcttcagaaagtggagacacggttgat

SEQ ID NO: 34098 - DNA, 424 bp, Glycine max
  Clone ID: LIB3052-014-Q1-N1-F8
ggaaaaatggtttcgctgaaactgcagaagcggctcgcagccagcgtcctcaagtgtggcagaggaaaggtttggcttgaccccaatgaagtcaacgaaatctccatggctaattctcgccaaaacataaggaagctggttaaggatgggtttattatcaggaagcccaccaagattcactctcgctcacgtgcccgccgaatgaaggaagccaagaggaaaggacgtcactctggatatggggtgcaaaggcaggaattgcatgattacttatagtgcttgcctgaatgctactagggaatctaagaagattgacaagcacatgtatcatgacatgtacatgaaggtcaagggtaacgttttcaagaacaaaagagttttaatggagagcattcataagtccaaagccgagaaggcaagagag

SEQ ID NO: 34099 - DNA, 405 bp, Glycine max
  unsure (1)..(405): unsure at all n locations
  Clone ID: LIB3052-014-Q1-N1-F9
ctcgagccgattcggctcgagcaacaggggtctgactctggatcctcacaggaatcatcatcatcatcatcatcttctgcagcaacaacaacaaccacctcatcatcctcatcctcaaaatctgattctaaattcaataagacatgtaacagaccaagaaggagaaaaccaagaagaccaagaatctcattctcatcctcaccaattccatatccaattccaacctcttcatcatcaacaagaacaacaacaacaacaatcttacacaggtttagacacggagatcttaaacccactccaaccaccgaagaaacggtcttgcctaccgcctcttccgccgncaccaccgncgncttcgtcgcttgcttcatccgaacatgcaagaaaaatgggagagctacaaca

SEQ ID NO: 34100 - DNA, 398 bp, Glycine max
  Clone ID: LIB3052-014-Q1-N1-G1
ctgcaacgtcgctatgtcggactccaccgccaaacccctggaccagcacgccaccacgggctctgaccctactgcgccagcggttcacatcgtgtacaccgagagaccacagaacgaggagcctgaggcctaccacatcagaaccctcacttcagtccttggcagtgaggaggctgcaaaggaagctttgttgtatagttacaagtctgcagccagtgggttctcagctaagcttactccggagcaggttgaacagatttcaaagctaccaggtgttcttcaagttgttcctagcaggacatatcagctccatggaccaaataacctgcagtagagaatgttcacctaaagttgtatcggttaaaccgttatctatgccatgtataaactaaactagt

SEQ ID NO: 34101 - DNA, 384 bp, Glycine max
  Clone ID: LIB3052-014-Q1-N1-G11
cttaataaataatttaagatactatgatgagagcacggttgccattactgttgctgggacttgttttcctggcttcagtttctgtctcatttggcattgcttactgggaaaaagagaaccccaaacacaacaagtgtctccagagttgcaatagcgagagagactcgtacaggaaccaagcatgccacgctcgttgcaacctccttaaggtggagaaagaagaatgtgaagaaggtgaaattccacgaccacgaccacgaccacaacacccggagagggaacctcagcaacccggtgagaaggaggaagacgaagatgagcaaccacgtccaatcccattcccacgcccacaacctcgtcaagaagaagagcacgagcagagag

SEQ ID NO: 34102 - DNA, 409 bp, Glycine max
  Clone ID: LIB3052-014-Q1-N1-G12
ctccctatggagtttaatcttgtggtccgtcaaaagttttgaaattttgtgaggttcattatgaagaaaagggacaaacttagttgtcaagttggaatcaacccatactccatggaatggactggtttggccaatagattactgagtaagggcaatgatattctgtgttgcgattatgctagttttgatggtttgattaccaagcaagttatgagcaagatggcagaaatgataaacagtctttgtggtggtgatgaaaaattgatgcgtgaaaggacgcacctgctgttggcttgttgttcaaggatggcaatttgtaagaaagatgtttggagagttgaatgtggaatcccttctggatttccgctcacagttatttgcaatagcatttctaatgagatgctcatta

SEQ ID NO: 34103 - DNA, 420 bp, Glycine max
  Clone ID: LIB3052-014-Q1-N1-G2
aaaatgaccaagcttacaattctcctcatcgctcttctcggcatcgcccacacctgctgcgcctccaaatggcaacagcaccagcaagagagctgccgcgagcagctcaaggggatcaacctcaacccctgtgagcacatcatggagaagatccaagctggccgccgcggcgaggacggcagcgacgaagatcacattctcatcaggaccatgccgggaagaatcaactacatcaggaagaaggaaggaaaagaagaagaagaagaaggacacatgcagaagtgctgcagcgaaatgagcgagctgaaaagccccatatgccagtgcaaagcgctacagaagataatggataaccagagcgagcaactggaggggaaggagaagaagcagatggagagagagctcatgaacttggctatt

SEQ ID NO: 34104 - DNA, 415 bp, Glycine max
  unsure (1)..(415): unsure at all n locations
  Clone ID: LIB3052-014-Q1-N1-G3
caagaagcttatcttgtcaatctcgtaaatgtgttacgagagttgtatttgcacagtccagaggaagctcgccaattgagaaggaaagctctctctcgtattgaatggctgcaaaaagctgatgtgcctaccatagcacagattgaagagttccattcgatgcagaggatgatgaatgctcctgattcaaatgataatattgatctactgttgagcattgatttgttgggtttacaaggagcaggtaaagcttttccaaacaagattgtttttgatgataagcttgtgttggctaacacacaagaattctttgatggaaattttccagtggattcttggttaccaatttttgtgaattgtctttatcctgtaagtcaattaccttcagaagctgtcngtgtaaatgttacatgtg

SEQ ID NO: 34105 - DNA, 277 bp, Glycine max
  Clone ID: LIB3052-014-Q1-N1-G5
tgtaattgtagtagtagacagtagcaccatgagccaggaacagctcaagaaacctcaaggggagcaggaccccatcaaatacggcgacgttttcaaagtctccgacgaactcgctttcaaacccatcgcgccaagagacgcagctctcatgcaagccacggagaaccaagcattgggccaaactcaaaaaggaggtcccgcctcggtgatgcaatccgccgcaaccgaaaacctgcgcgccggcgtcgtgggccgtcaagacatctacgacgtggcg

SEQ ID NO: 34106 - DNA, 423 bp, Glycine max
  Clone ID: LIB3052-014-Q1-N1-G6
atgagatgctcattagatatagctatgaaaaattactgcgccaggctaaagctccaagtatgtttttacaatccttcaaaaattttgtttctttgtgtgtgtatggtgatgataacttaattagtgttcatgaatatgtcaagccttactttagtggttctaaattgaaaagctttctagctggtcataatatcaccattactgatggtattgacaaaactagtgcaactttgcaatttagaaagttagcagattgtgattttctcaagagaaactttaagcagatgtctaatgttttatgggtggctcctgaggacaaggcgagtttatggtcacaacttcattatgtttcgtgcaataatctggaaatgcaagaagcttatcttgtcaatctcgtaaatgtgttacgagaattgtatttgc

SEQ ID NO: 34107 - DNA, 424 bp, Glycine max
  unsure (1)..(424): unsure at all n locations
  Clone ID: LIB3052-014-Q1-N1-G8
acaccgtattaaagaatttaagatatactatgatgagagcgcggttcccattactgttgctgggagttgttttcctggcatcagtttctgtctcatttggcattgcgtattgggaaaagcagaaccccagtcacaacaagtgcctccgaagttgcaatagcgagaaagactcctacaggaaccaagcatgccacgctcgttgcaacctccttaaggtggaggaagaagaagaatgcgaagaaggtcaaattccacgaccacgaccacaacacccggagagggaacgtcagcaacacggtgagaaggaggaagacgaaggtgagcagccacgtgcattcccattcccacgcncacgccaacctcatcaagaggaagagcacgagcagaaggaggaacacgaatggcatcgncaggaggaaaacac

SEQ ID NO: 34108 - DNA, 411 bp, Glycine max
  Clone ID: LIB3052-014-Q1-N1-G9
cagataactcaggagtatgatcagcatttgggggctgtgagtaccatcacctttgttgataacaacaggaggtttgttacttccagtgatgacaagtccctcagggtctgggaattcggtattcccgtggttataaagtatattagtgagccccacatgcactccatgccttccatttcgcttcaccccaatgccaattggctcgccgcgcagagcttggataaccagatacttatttatagcacaagggagaagttccaacttaacaagaagaagagatttgggggacatattgtggctggatatgcgtgtcaggtcaatttttctccagatggacgatttgtcatgtcgggggatggtgaagggaagtgttggttctgggactggaagacttgcaaggtctacagaact

SEQ ID NO: 34109 - DNA, 411 bp, Glycine max
  Clone ID: LIB3052-014-Q1-N1-H1
cccccctccacttagctgaacataattcaccacttcaccagcaatttcccctccaatgtcccatttatgatccatttggcatttcatcatatttcaccacttgtcctactccacttggatgatttcctaacgtattgttttcacaaatccttgttcttcatcagctaatagtttgagtccaacgaattcagcaacactatagatatatgctatatcttcctttccctatacattttccttccaaagtatctctagttctctacaaatcaacgtggcacattttttagcctaagaaaagctttagctgcaactcaaattcaaagtgtaagcctttcttgtttttattagtttatcttcaccaatggaagagaactttaagtgtgaacaagttggtctcattgatgagctaat

SEQ ID NO: 34110 - DNA, 399 bp, Glycine max
  Clone ID: LIB3052-014-Q1-N1-H11
ataaaattcttccaccaagttatgggtttccttgtgttgcgtcttttctccctcttaggtctctcttctagttccagcatatcaactcatcgttccatattggaccttgacctaaccaagtttaccacacagaaacaggtgtcttcactgttccaactatggaagagtgagcatggacgtgtctaccataaccacgaagaagaggcaaagagacttgagattttcaagaataacttgaactatatcagggacatgaatgcaaacagaaaatcaccccattctcatcgtttaggattgaacaagtttgctgacatcactcctcaagagttcagcaaaaagtacttgcaagctcccaaggatgtgtcgcagcaaatcaaaatggccaacaagaaaatgaag

SEQ ID NO: 34111 - DNA, 432 bp, Glycine max
  Clone ID: LIB3052-014-Q1-N1-H2
aaaaaattgattctctcataatcattaatatcaaaataacgacctataaaagggatcagtagtagaagagggcaacgagtccctactcagttcacagagaaagatggctgcggaaaacgttgtagagttcacagacttacccgtcaagagacctagagaagaagaagaagaagaacaaaccaatggagtctccaacgacgccgtttcaacgctacccaatgaccctcaataccctggtatctctgctgttattcccggttggttctcagaaatcagcccaatgtggcctggggaggcgcactccttgaaggtggaaaagattttgtttcaagggaagtctgactatcagaatgtcatggtcttccagtcatcaacatatggcaaggttcttgttttggatggagtcattcagctcacagaaagggatgagtg

SEQ ID NO: 34112 - DNA, 372 bp, Glycine max
  Clone ID: LIB3052-014-Q1-N1-H3
ggcaaagttacctagaggtgtgttgctggtgggtcctcctggaactgggaagacactacttgcgcgtgcagtggcaggggaagcaggtgtaccctttttcactgtatctgccagtgagtttgtggagttgtttgttggaagaggggcagctagaatcagagaccttttcaatgcagcaagaaaatttgcaccatcaatcatattcattgatgaacttgatgcagttggaggcaagcgtggaagaagtttcaatgatgaacgtgaccagacgttaaatcagttgctgacagaaatggatggatttgaatccgagatgagagtggttgtcattgcagcaactaatcggcccgaaaccttggatccagccctatg

SEQ ID NO: 34113 - DNA, 416 bp, Glycine max
  Clone ID: LIB3052-014-Q1-N1-H4
cggctcgagctcgagccgaatcggctcgaggcaccatgtggctgtgggccctctttgtaatcgccctcaccgcttcatatctcagcttccaaggcttcgttgattccggcagccgctacctctccgcctcctggggcgggatccagtgggagaagcaggtccgcacctccgcccagatccaccgtcaaggcggcatgtccgtcctcgtcaccggcgctgccggcttcgtcggctcccacgtctccctctcgttaaaacgacgcggagacggcgtcgtcggactcgacaacttcaacgactactacgatccgtctctgaaaaaagcccgcaagtccctcctcgccaagcatgacgtcttcatcgtcgatggcgacctcaacgacgccaagctcttggcaaagctcttcgatgtggtc

SEQ ID NO: 34114 - DNA, 289 bp, Glycine max
  Clone ID: LIB3052-014-Q1-N1-H5
ccaaaacattggtcagaattcatcacctgacatctagaacgctcaagctggtagcatgacaaccgccaccagccttgacttcccagccctctggcttctcaaactcagtgcccagtatggatcactccgcaagaatgctatgttcgtgccacactacaccctgaacgcgaacagcataatatacgcattgaatgggcgggcattggtacaagtggtgaattgcaatggtgagagagtgtttgatggagagctgcaagacggatgggtgctgatcgttccacaaaacttt

SEQ ID NO: 34115 - DNA, 141 bp, Glycine max
  Clone ID: LIB3052-014-Q1-N1-H6
cacgtcaccctcctaacaacctcctctgaccctttcaacaactacaacgctactatcgtcacataacgacaccaagaccacaacaccctgctagccaacgtcacccactccttcaaaacgactaagactaaagttcacagg

SEQ ID NO: 34116 - DNA, 406 bp, Glycine max
  Clone ID: LIB3052-014-Q1-N1-H7
cgaccacaacacccggagagggaacgtcagcaacacggtgagaaggaggaagacgaaggtgagcagccacgtccattcccattcccacgcccacgccaacctcatcaagaggaagagcacgagcagaaggaggaacacgaatggcatcgcaaggaggaaaaacacggaggaaagggaagtgaagaggaacaagatgaacgtgaacacccacgcccacaccaacctcatcaaaaggaagaggaaaagcacgaatggcaacacaagcaggaaaagcaccaaggaaaggaaagtgaagaagaagaagaagaccaagacgaggatgaagagcaagacaaagagagccaagaaagtgaaagttctgagtctcaaagagaaccacgaaaacataagaataagaacccttttc

SEQ ID NO: 34117 - DNA, 407 bp, Glycine max
  unsure (1)..(407): unsure at all n locations
  Clone ID: LIB3052-014-Q1-N1-H8
tcctagtataccttaataaataatttaagatactatgatgagagcacggttcccattactgttgctgggacttgttttcctggcttcagtttctgtctcatttggcattgcttactgggaaaaagagaaccccaaacacaacaagtgtctccagagttgcaatagcgagagagactcgtacaggaaccaagcatgccacgctcgttgcaacctccttaaggtggagaaagaagaatgtgaagaaggtgaaattccacgaccacgaccacgaccacaacacccggagagggaacctcagcaacccggtgagaaggaggaagacgaagatgagcaaccacgtncaatcccattcccacgcccacaacctcgtcaagaagaagagcacgagcagagagaggaacaggaat

SEQ ID NO: 34118 - DNA, 403 bp, Glycine max
  Clone ID: LIB3052-014-Q1-N1-H9
aacaacaactatggcaagttatcaaaagcactacgatgatcagggtcgcaaggttgacgagtatggcaacgttgagaagcaaaccgacgaatacggcaaccctgttcatgctgctagtgtcacctatgtagccaccagaactgctgctggtggttacagtgatgacattaataagcaacatgataccaccaatgcctacggcgtagacactggtagacagcattctagtggtggctacgatggtgacactaataaacatcatggaactactggtggctataatgatgacaccaatagacatcatggaactaccggtgtctatggtatagacaccgataggcaacaacatgggactactggtggctatgccggtgacactggtaggcaacatgggaacatcggt

SEQ ID NO: 34119 - DNA, 416 bp, Glycine max
  Clone ID: LIB3052-015-Q1-N1-A1
ggaacaatcatctcgtccccatatcgaatccgttttatcggcgaaggccatcctttgagccttaagttcgattcatttgcagttataatgctgtgtgttggaattcctaccgagtggtctgttgtggaggatctaccagaaggacctgctgttaaaattggtgagaacaaagatgcaatggatggttggtttagacttgagagagtttctgatgatgaattcaataactataagcttgtgttctgtccacagcaagctgaggatgacaaatgtggggatattgggattagtattgatcatgatgatggaaccaggcgtttggtggtgtctaagaacaaaccgttagtggttcagtttcaaaaacttgataaagaatcactggccaagaaaaatcatggcctttctcgcagtgagtg

SEQ ID NO: 34120 - DNA, 403 bp, Glycine max
  Clone ID: LIB3052-015-Q1-N1-A10
gtcaccaggcgtgctaggaaaccaaccagacattgtcatggacagcttggctgtacatggccttggcctagtgcacccaaagaaggttttcaatttctacaacgagctccatgcttacttagcttcttgtggagtagatggagtgaaggttgatgtgcagaacattattgagacccttggtgcgggacatggtggccgagtgtcacttactcgcagctatcatcacgcgcttgaggcttccattgctagcaattttactgataacggatgcattgcgtgtatgtgtcacaacactgatggactttatagtgctaagcagactgctattgtgagagcttctgatgatttttaccctcgtgatcctgcttcccataccatccatatttcttctgttgcatacaac

SEQ ID NO: 34121 - DNA, 340 bp, Glycine max
  Clone ID: LIB3052-015-Q1-N1-A11
caaaatatgatttctgagtacagatttcaagataaagaacgatatttcaaaaaatgaatccccccaccccctcaagggaactactgcatacacatgaatgaatttgtttgcttgcaagctttgtgatgatcttgagttgcaaatgtatgctaatacaatgccttttcaggttacaacgataataatatagtaacacgatatccaacccagtcattgattccaaactccagctcccggaatcagttcgatagctcattatatgtgtcgaatgaccaattaatcaggcatgctcaccaaacccaaagcactagtaatgatcattgcaccgttgggttagctc

SEQ ID NO: 34122 - DNA, 383 bp, Glycine max
  Clone ID: LIB3052-015-Q1-N1-A12
ctaaagccgagcagcgagagagagaaaccctagcaaaaaggccggctggtcacggtttgagatcccgcaccagagattccttctctcgtcccttcaggaagaagggtaccatcgccctcaccacatacctcagaacctaccacgtcggcgattatgtcgacgtcaaggttaacggcgccgtccacaagggaatgcctcacaagttctaccatggccgcaccggtcgcgtctggaatgtcaccaaacgtgctgttggggtcgaagtcaacaagcaggtcggcaacagaatcataaggaagaggattcacgtgcgtgtggagcatgttatgccatcaaggtgcactgaggagttccgccttaggaagatcaagaatgatcagctc

SEQ ID NO: 34123 - DNA, 406 bp, Glycine max
  Clone ID: LIB3052-015-Q1-N1-A3
cggctcgaggtgggggtttctcatttctctgccgttccatggatcgggaaggaggatccaacggcggatcttgctactactccgttctcgggattcgtagggacgcctccttctctgatattcgcactgcctaccgcaaactcgctatgaggtggcacccggacaagtgggctcagaatcctgcaaccgctggcgaagccaagcggcggtttcagcaaatccaagaagcctactcagttctctccgatcagtctaaaaggtcaatgtacgatgcggcgctctacgatcctttggaggaagaagaccaagacttttgtgacttcatgcaagagatgatctcaatgatgaacaatgtgaaagacgagggggacagtttggaggacctacagaggatgttcgtggagat

SEQ ID NO: 34124 - DNA, 386 bp, Glycine max
  Clone ID: LIB3052-015-Q1-N1-A4
aacgtgacaatggtggcgacgaacgtgaaggcagaaaccgtgtgctgatggacaagcgcagcgccttggaggctgagatgaactccatcatcgcccgcctctcccagcccggcgctcctggcctctccggaaatctcgtcgactctgagggttttccccgttccgatatcgacatccccgttgttcgagccgaacgacgtcgcctggcagagctgcgcagtgaccacaacgaagtaactgagaaaattaacctaaatattcagattctccattcggcaagactcggaaataggtcattgcccttcaagaattcaggtaacgatgatggttcagatactcagatctcatcaaatatggacactgttgcatcaacaccatcacaaaat

SEQ ID NO: 34125 - DNA, 416 bp, Glycine max
  Clone ID: LIB3052-015-Q1-N1-A5
tgagagtgcggtttcctttgttggtgttgctgggaagctgggtcctggcatcagtgggtgtctcattaaaggtgagagaggatgagaataaccctttctacttgagaagctctaacagcttccagactctctttgagaaccaaaacggtcgcattcgtctcctccagagattcaacaaacgctccccacaacttgagaaccttcgagactaccggattgtccagtttcagtcaaaacccagcacaatccttctcccccaccatgctgacgccgatttcctcctctgtgtccttagcgggagagccatacttaccttggtgaacaacgacgacagagactcctacaaccttcaccctggcgatgcccagagaatcccagctggaaccacttactatctggttaaccctgacgaccac

SEQ ID NO: 34126 - DNA, 413 bp, Glycine max
  Clone ID: LIB3052-015-Q1-N1-A6
gtttgtttcttcaggtgcactcgcatgttgatgtggtggatttcagcagcaacaagtgggtagatcagattaaaatgccaaaggaaatggctcattcacatttgggcatagcatctgatgggaggtatatatacattatctcaggacaatatggtatccaatgcagtgggcctactaccgcatccttttcgttagacactgcaacaaagaaatggaaacctttgccaccattgccagcccccaggtatgctcctgcaactcaattatggaaaggaagactccatgtcatgggtggtagcaaggagaatcgccatacacctggaatagatcattggagtttggctgtgaaggatggtgaagcattggagcaacaatggcgggacgaagttcccattccacgcggtggaccacat

SEQ ID NO: 34127 - DNA, 415 bp, Glycine max
  Clone ID: LIB3052-015-Q1-N1-A7
gtgaaagtaaaacattgtgcaattaatcatcaactgcaaggagccagtgcataagatcaatggcgtcaagacagcaattcaaggaagacagagccgaggcagctgcaaaactcgcagcgaaagacatcggcgacatcaacagaacaaacgagcgcgacgaggggtacgacttgcacgacgaagccaacttcaagcaagcacgagctgaagcagctgcaaagctggcggccaaggatctggaggacgctaacagattaagagacaacactttcaacacatggaaagagcaacatcagcatgatgagaacaaacccggtgtgatagggtccatgtttagagccgccaaggaagccgtggttgggaagcctcaccacgaggaagtttatgcaaaggaaacaaagatgggtgaatattc

SEQ ID NO: 34128 - DNA, 345 bp, Glycine max
  Clone ID: LIB3052-015-Q1-N1-A9
atttgcatgcactgttcttcatacaatggcattacgcgagcttcttatgatggggatattgctgctggtatgtcttgctaaggtttcatctgatgttaacatgcaaaaggaagaagatgaagaacttcgctttcctaatcaccctcttatcgtgagagacgggaacagaaggctaatgcaagacatagattgcggaggattgtgcaagacaaggtgcagtgcccattcgaggccaaacgtgtgcaacagggcttgtggcacgtgttgtgtgaggtgcaagtgtgttcccccaggaacttcaggcaacagggagctctgtgggacctgctatactgatatgatcac

SEQ ID NO: 34129 - DNA, 423 bp, Glycine max
  Clone ID: LIB3052-015-Q1-N1-B1
aagtctccgcctctccttccattccaacagattgaagaaggcaattcgtgtattcttcttctgctttggaacatggctgatagtattgttacctccagcaattcttctacgtcctcgctgaaccctactcggataatctgtcacgtatgtcagaagcagttttcccagtacacgtgtcctcgatgcaattcgcgatactgctccctccaatgttacaaatctcatagtctccgttgcactgaatccttcatgaaagaaaatgtagttcaggaacttcaccaaatgcagcccgatgaacaaactaaaaataagatgttggacatactgaaaagatttcattcacaagaggaaatggatgagaattattcaactttatccgaggagacaatggaaaattttttgtctggacaggaaatcagcttt

SEQ ID NO: 34130 - DNA, 403 bp, Glycine max
  Clone ID: LIB3052-015-Q1-N1-B10
caacatcaagggaaagtgaaaaagaaaggtatatttgatcggggatatggcaactcgaagatatgagtttggaaggatgaatgaggctagccacccagactccatcagagctgccttggctgaattcctctccacttgcatctttgtctttgctggagaaggctctgcccttgctttgcgacaaatttacaaggaaccagggtcatcagcgggtgagctagtggtaattgcactagctcatgcatttgctctatttgctgctatttctgctagcatgcatgtgtctggtggacacgtcaaccctgccgtcacttttggcgctcttcttggtggaaggatctccgtccttagagcagtttactattgggttgctcaacttctaggttctatagtggctgctctc

SEQ ID NO: 34131 - DNA, 404 bp, Glycine max
  Clone ID: LIB3052-015-Q1-N1-B11
aaaattcttccaccaagttatgggtttccttgtgttgcttcgtttctccctcttaggtctctcttctagttccagcatatcaactcatcgttccatattggaccttgacctaaccaagtttaccacacagaaacaggtgtcttcactgttccaactatggaagagtgagcatggacgtgtctaccataaccacgaagaagaggcaaagagacttgagattttcaagaataacttgaactatatcagggacatgaatgcaaacagaaaatcaccccattctcatcgtttaggattgaacaagtttgctgacatcactcctcaagagttcagcaaaaagtacttgcaagctcccaaggatgtgtcgcagcaaatcaaaatggccaacaagaaaatgaagaaagaac

SEQ ID NO: 34132 - DNA, 394 bp, Glycine max
  Clone ID: LIB3052-015-Q1-N1-B12
cggctcgagtaaaccgcgatcacaggttgccgcaccttagggccggaaacaaaagcagtcgttacttgatttcaagaatctctcaatttcttcctacttctttgtgtacgatttcttaagggaaagaaaatcactctctgtgctggccacagacttcgtgaatcattttcttttccactcttagtttatttgctgaacactctcctatttgatataggacttcgtgtcagatttaaacttcttctgtttctttctcagttctctgcttaatttcaagttcaagctggtgaaatcttggattagtgctctcactcttctatctggtataggacttcgtgggtagacttttccatttctctcctttctttcactctcttcttctcactgatccgca

SEQ ID NO: 34133 - DNA, 166 bp, Glycine max
  Clone ID: LIB3052-015-Q1-N1-B2
ctcgagccgtgttgacgtaatttcacagttagatcagaggtggtgggtattgcttctgcatcttctggtaaatggacgtggttgcccatgtatctactgtgtttccaaacatagttaggcgtcacaaatacagtgagagggagaaataaaattttctttttacatg

SEQ ID NO: 34134 - DNA, 408 bp, Glycine max
  Clone ID: LIB3052-015-Q1-N1-B3
gtcgctgctcatcctccataacctccgagctctacaccgaggaaggaagccatggggaagacacatggaatgggagctgctcgcaagctcaagtctcaccgcaggaggcaaaggtgggctgataagtcatacaagaaatcccatcttgggaatgaatggaagaaaccttttgccggttcatcccatgccaagggaattgtccttgaaaagataggtattgaagctaagcagcccaactctgctattcgtaagtgtgccagagttcaacttatcaagaatgggaagaaaattgcagcttttgtccctaatgatggttgcttgaactacattgaagagaatgacgaagtcttgattgctggatttggacgaaagggtcatgctgtgggagatattcctggtgtcagattt

SEQ ID NO: 34135 - DNA, 404 bp, Glycine max
  Clone ID: LIB3052-015-Q1-N1-B5
gacaaaatgctcaagctgaatgagttgcaaaggtcagctggggatgaagttgctggagttagaagtactattactaatatccatgaagacttgggttatttgcaacaaacagtggaaacattggattataggttagctgaattgagttctaagcaggattatgcaaattatggattgtcatatctcatcgactatgtacacggaaaaagccagaaaaagcccgaattgttgcaggagcaactgaaactttcagggaagtcccctaatttgatcacatataaaggaactccaaatctaatgggtcttaaagacattgcagaaacattgtctggtttagacatgtctgcttcagatagtgtcatgccagatggcggggataaacgagagcaacagcgaaggccatt

SEQ ID NO: 34136 - DNA, 382 bp, Glycine max
  Clone ID: LIB3052-015-Q1-N1-B6
ctagttcaatatcctagtataccttaataaataattgaagatactatgatgagagcacggttcccattactgttgctgggacttgttttcctggcttcagtttctgtctcatttggcattgcttactgggaaaaagagaaccccaaacacaacaagtgtctccagagttgcaatagcgagagagactcgtacaggaaccaagcatgccacgctcgttgcaacctccttaaagtggagaaagaagaatgtgaagaaagtgaaattccacgaacaacaacacgaccacacaaccggagagggaaccttaacaaacccgttgagaaggaggaagacgaagatgagcaaccacgtccaatcccattcccacgcccacaccctcgtc

SEQ ID NO: 34137 - DNA, 378 bp, Glycine max
  Clone ID: LIB3052-015-Q1-N1-B7
atatccactacacgcaaagcaaaacacacctccacgatgtcagccttagtcctcactcagcaaacaaattagccatgagcaccaaggagtgctgccaccacgacgaggagcggcgtcagctcccccgccgcgtattcgccgcgatcctcggcttcatcctactcatcctcctggtgatcttcctcatctggatcatcctccggcccaccaaaccccgcttcatcctgcaagacgccaccgtctacgccttcaacctctactgcaccggcgacaccccttcccccattaccccaacccccaacaccctcaccgttaccatgcaggtcacgctcgccgtcttcaaccccaaccagcgcatcggagtttactacaccaaac

SEQ ID NO: 34138 - DNA, 414 bp, Glycine max
  Clone ID: LIB3052-015-Q1-N1-B8
ctgaaagaaacagtttccgctggaacaagttcgtgccgaggcaaccaaacatgatcctccaaggagacgctattgtgacctcctcgggaaagttacaactcaataaggttgacgaaaacggcaccccaaaaccctcgtctcttggtcgcgccctctactccacccccatccacatttgggacaaagaaaccggtagcgttgccagcttcgccgcttccttcaacttcaccttctatgcccctgacacaaaaaggcttgcagatgggcttgccttctttctcgcaccaattgacactaagccacaaacacatgcaggttatcttggtcttttcaacgaaaacgagtctggtgatcaagtcgtcgctgttgagtttgacactttccggaactcttgggatccaccaaatccacaca

SEQ ID NO: 34139 - DNA, 390 bp, Glycine max
  unsure (1)..(390): unsure at all n locations
  Clone ID: LIB3052-015-Q1-N1-B9
gcttgttcctcggctagcattgtttggcttaagaacacaaacaggagaactgttgatgttattgcatccagactgtatttttactattcgtatagctatgagcttacaggagatcttgctgaaattcggggcaacctccttgcattgcaccgatttgcgactctccgccatgatgagctgggacaggaaacacttcttaatttgttacttcgaaactaccttcactacaacctatatgatcaggctgagaagttgaggtccaaggctcctcgatttgaagcacattcaaaccagcagttttgtcgttatctcttctaccttgggaaaattcggacaattcagctggagtatacagatgcaaaagagtctcttctgcnaggccgccggaaa

SEQ ID NO: 34140 - DNA, 411 bp, Glycine max
  Clone ID: LIB3052-015-Q1-N1-C1
cacagagtgacaacttcgagtatgtgtcattcaagaccaatgatacacccatgatcggcactcttgcaggggcaaactcattgttgaacgcattaccagaggaagtgattcagcacactttcaacctaaaaagccagcaggccaggcagataaagaacaacaaccctttcaagttcctggttccacctcaggagtctcagaagagagctgtggcttagagccctttttgtatgtgctaccccacttttgtctttttggcaatagtgctagcaaccaataaataataataataataatgaataagaaaacaaaggctttagcttgccttttgttcactgtaaaataataatgtaagtactctctataatgagtcacgaaacttttgcgggaataaaaggagaaattccaatg

SEQ ID NO: 34141 - DNA, 182 bp, Glycine max
  Clone ID: LIB3052-015-Q1-N1-C10
ttgcagtacatgcaaaggccccaccgttagaaaagggtcggcaaggttatcctgggccaagggccccctttccaagtccaccaaaacccgtttcgaaaaaaattggcccgttgccgaaaaagcccaagacttcactttttaagcttccgacaagcccagaattccggttgcacaaccgccaa

SEQ ID NO: 34142 - DNA, 340 bp, Glycine max
  Clone ID: LIB3052-015-Q1-N1-C11
caagagatggcttctcctcttcttactccttacaagatgggcaaattcaatctgtcccatagagttgttttggcaccgctgaccagacagaggtcttacgacaacgtcccacaaccccatgccatcctctactactcccagagaacttccaacggaggccttctcattactgaagccactggcgtctctgacacggctcaaggctatccgcaaacccctggcatatggactaaagaccatgttcaagcttggaaacccattgtctatgccgtccacgccaaaagcggtgttttcttctgtcagatttggcacgttggaagagtttcagattcagtttatc

SEQ ID NO: 34143 - DNA, 405 bp, Glycine max
  Clone ID: LIB3052-015-Q1-N1-C12
ttccttagttcaatatggggaagcccttcactctctgtctttcttccctttgcttgctactcttgtcgagtgcatgctttgctattagctccagcaagctcaacgagtgccaactcaacaacctcaacgcgttggaacccgaccaccgcgttgagtccgaaggtggtttgattcaaacatggaactctcaacaccctgagctgaaatgcgccggtgtcactgtttccaaactcaccctcaaccgcaatggcctacacttgccatcttactcaccttatccccggatgatcatcatcgcccaagggaaaggagcacttggagttgcaattccaggatgtcctgagacgtttgaggagccacaagaacaatcaaacagaagaggctcaaagtcgcagaagcagcagc

SEQ ID NO: 34144 - DNA, 378 bp, Glycine max
  unsure (1)..(378): unsure at all n locations
  Clone ID: LIB3052-015-Q1-N1-C4
ccaagtgcacaatcctcctcatctctgttctcttctgcatcgcccacacttgcagcgcctccaaatggcagcaccagcaagatagctgccgcaagcagctccagggggtgaacctcacgccctgcgagaagcacatcatggagaagatccaaggccgcggcgatgacgatgatgatgatgacgacgacaatcacattctcaggaccatgcggggaagaatcaactacataaggaggaacgaaggaaaagacgaagacgaagaagaagaaggacacatgcagaagtgctgcacagaaatgagcgagctgagaagccccaaatgccagtgcaaagcgctgcagaagataatggagaaccagagcgaggaactggangaga

SEQ ID NO: 34145 - DNA, 392 bp, Glycine max
  Clone ID: LIB3052-015-Q1-N1-C7
agagtctttactctctctctctctctctctctctcgctcgctcttcgtaaatcgcgtgttccaccaatcagatggcaatgccggagacaatccctcccactactcccagtgctcaagttgtcggcaatgcctttgtggagcaatattatcacattctgcatcaatccccagaattggtgcacagattttatcaggattcaagtttcttaaccagatcagacagcaatggtgtgatgacaactgtgacaactgtacaagaaatccatgaaaagattatttccctgaaatatgaagattatacagcagaaataaaaactgcagacgctcaggagtcacataagggaggtgtgatagttttagtaactggatgcttaactgggaaggataatgtg

SEQ ID NO: 34146 - DNA, 396 bp, Glycine max
  unsure (1)..(396): unsure at all n locations
  Clone ID: LIB3052-015-Q1-N1-C8
ggagcagccatatacataaaaagggacctgaaagtctcggacgagcaaatcgagatcctgctcggaatcatcaacctatactctctgataggctcatgtctcgccggcagaacctccgactggataggtcgccgttacacgattgttttcgccggcgccatcttctttgtcggagcacttctcatgggtttctcccccaattattcctttctcatgtttggccgtttcgtcgctggcattggcatcggctacgccctcatgatagcccccgtctacaccgncgaggtctccccggccttctctcgtggctttctcacttccttccctgaaggaattattaatggagggattttaaatgggatacatatcaaactatgcattttcgaagctgacact

SEQ ID NO: 34147 - DNA, 347 bp, Glycine max
  Clone ID: LIB3052-015-Q1-N1-C9
actcactcttcactcaaaactctgtctttcattttgaagatcccacactatggctgagcttcactaccaacaacatcaccaataccctcaccgaaccctaatgatccatacgaacaacagactactctccactcagtcgtcaaggcggcaccgccgtcaccgcggcggtccctcttgatcctcgcctcgtagaccttagccggcaccatcatgccctcaccatcgtacaccaccgctcgtcatcttcagtccgttctcgtccccgcggtgacaccgtccgctgctgacctggggtccttgcctccggcggtcggtgtggcggcgatcacgtgctggcgtggatctac

SEQ ID NO: 34148 - DNA, 421 bp, Glycine max
  Clone ID: LIB3052-015-Q1-N1-D1
gcagccatgttcttaaccagaagcgcgctttttcgctttggaaagtctctcccttatgcccgttcactctcccttaaaccctccatggtcaccttctcctctactcccaattcaggctggagaaatgcagcagaaggaggaagaagagacggaagaaccaattggacgtatgattctgccgaggcaagacgcgaggcagatgaaatgtctgagagtgccaaagaaacgatgaatgaaggctatgacagggccaaggatcaagcgcgggaagccaaagacagaacaaaggatttcgcacacgacgcaaaggagaagacgaaggacgctgcggggtcgatgagggacagggcggagagtgcggcggagaagacgaaagagtatgcttacgacacaaaagagagtgccaaggacgcggcgggaa

SEQ ID NO: 34149 - DNA, 239 bp, Glycine max
  Clone ID: LIB3052-015-Q1-N1-D10
gtgcggtttcctttgttggtgttgctgggaactgttgtcgtggcatcagtttgtgtctcattaaaggtgagagaggatgagaatatccctctctacttgagaagctctatcagcttccaaactctctttgagaaccaaaacggtcgcattcgactgcttcagagattcaacaaacgctgcccacaacttgagaaccttcgagactaccggattgttcagtttcagtcaaaacccatcac

SEQ ID NO: 34150 - DNA, 248 bp, Glycine max
  Clone ID: LIB3052-015-Q1-N1-D12
cctgaacatcctgcattggggtggcagtccatccagtgagacaaatgattggtttatttcctctcaggaatgtgttcccaggacttattgtgttttaaatccacaaaatccttttgtgttaaataggtggatggggaaactgactttcccccagggcacttaccgaaatgttaagagaatgcctctttctataaggggaggagctggtgcatagaatgctatcctcatgattatgccaaatgctgttc

SEQ ID NO: 34151 - DNA, 386 bp, Glycine max
  unsure (1)..(386): unsure at all n locations
  Clone ID: LIB3052-015-Q1-N1-D2
cttcatcatctgcttcttcttttgatcataatatctgttgagtgatctttcatagagagagagagagagagatggagaggtgtgacaaggtgatgaaccaacgcaacatgcatgattgtcctaaaacaggtcctggctatccttcacccctggcagccatgtctggtcccaaagagactctcctttatgtcactgctatctactcaggaacaggaagggataagcctgactttctggccacagtggatgtggatccaagctctccaacgtattcaaaagttatccataggttacctgtaccttatttaggtgatgaactgcaccattttgngtggaattcatgcagctcttgctatggagatccatcagcagttcggcgatatctg

SEQ ID NO: 34152 - DNA, 422 bp, Glycine max
  Clone ID: LIB3052-015-Q1-N1-D3
aacaaagaagagtgttcccacattacatggcctccttgcggttggggcaccaccaccatcaccaaccggcggcggcgactatacacccgtcgcaaccgccgcagtgtcagccgcaacccgaagttcctcgccggagctccgatatggagaccgataaggatatgtcagctactgtcattgaggggaatgatgccgttactggccacataatctccaccacaattggaggcaaaaatggggaacctaaacagaccatcagttacatggcagaacgtgttgttggcactggatcatttggagttgttttccaggcaaagtgcttggagactggagaggcagtggctattaaaaaggtcttgcaagacaagcggtacaaaaatcgtgaattgcagttaatgcgcttaatggatcacccaaatgta

SEQ ID NO: 34153 - DNA, 389 bp, Glycine max
  Clone ID: LIB3052-015-Q1-N1-D4
aatggcttcaaccgacaagtcaccggacccaacgcctgcgagagggtccggatccaactccggggaagccgatgagtgttggtcagcacgtgatcgacaagagtgcaatgatggtgcagtcgctggaccccattaagcagatgagtcagcacgtgtgctccttcgctatctacagccatgacatgtctcgccagatagagacacatcactactgctccagactccaccagaacttcatacaatgtgctgtctatgattccgatgaatccaaagctcgtctcctcggcgtggagtacatcgttcctgctgatgtctttgaagcctttcctccggaggagcagaaactttggcattctcatgcttatgagattaaatcaagcctgttggtg

SEQ ID NO: 34154 - DNA, 418 bp, Glycine max
  Clone ID: LIB3052-015-Q1-N1-D5
gaaaaggagaaaaactgcgtctaatagttttagatgctggggaggaagagaaagatacgttgtaactagcaaaggatacgccctgtttggcgtaatccttaaacgtagcattagtgttaacgttgtaggttgtgaagccaaccttgtgatccccttctgcgcctttagcatagcctttgaaagtatccgaaccagggttaaaagaattcccgtagtttttgaaatccagtttggtcctttctttggtgttcttagcataagattgaaacgagtcatcagctatgttagcctggtctatgtaattagcaaaactctcagtgctagcgtgagttctaacagcgtagctcttgaaagtcacttctggaacgttcatctcaacgccataatttatgaaagccaacgtggcaacgttggagtt

SEQ ID NO: 34155 - DNA, 415 bp, Glycine max
  Clone ID: LIB3052-015-Q1-N1-D6
tatatacgacatgctacaagtgaagtgaccatatcttagtgtcaaatcataaaattcttccaccaagttatgggtttccttgtgttgcttcttttctccctcttaggtctctcttctagttccagcatatcaactcatcgttccatattggaccttgacctaaccaagtttaccacacagaaacaggtgtcttcactgttccaactatggaagagtgagcatggacgtgtctaccataaccacgaagaagaggcaaagagacttgagattttcaagaataacttgaactatatcagggacatgaatgcaaacagaaaatcaccccattctcatcgtttaggattgaacaagtttgctgacatcactcctcaagagttcagcaaaaagtacttgcaagctcccaaggatgtgtcgc

SEQ ID NO: 34156 - DNA, 418 bp, Glycine max
  unsure (1)..(418): unsure at all n locations
  Clone ID: LIB3052-015-Q1-N1-D7
gttcacaatcctcctcatctctcttctcttctgcatcggcgacacttgcagcgcctgcaaatggcagcaccagcaagatagctgccgcaagcagctccagggggtgaacctcacgccctgcgagaagcacatcatggagaagatccaaggccgcggcgatgacgatgatgatgatgacgacgacaatcacattctcaggaccatgcggggaagaatcaactacataaggaggaacgaaggaaaagacgaagacgaagaagaagaaggacacatgcagaagtgctgcacagaaatgagcgagctgagaagccccaaatgccagtgcaaagcgctgcagaggataatggagaaccagagcgaggaactggangagaagcagaagaagaaaatggagaaggagctcattaacttggctact

SEQ ID NO: 34157 - DNA, 356 bp, Glycine max
  unsure (1)..(356): unsure at all n locations
  Clone ID: LIB3052-015-Q1-N1-D9
tgaaaccagttaatggcatgctcgaaacatatgatgatttgaatgatgataccatggatgccaacggggaagctagattgattaatggttctgtctccaaaagagtttctcagttccttaatgcaaatatgaagaagcccaaggtggtttctggtgatgatgatttaccaaagagagatgatattggtgaaagacgaaggaaacatgagcttcgggtgttggctggtgctggaattaggactgangatgatgatgatgatcaaatggctgatcttggacctaatgaggttaccgatgaanaggaagatggtggaagtgggactcagaaaatgaatttacanacaagtggaacaact

SEQ ID NO: 34158 - DNA, 283 bp, Glycine max
  Clone ID: LIB3052-015-Q1-N1-E1
ccaaaggctgaatgcaaaaaaaaaaaaaaaaaaaaaaaaagaaaaaaaaaaaaaaaaaaaaaaaaaaaaaaaaaaaaaaaaaaaaaaaaaaaaaaaaaaaaaaaaaaaaaaaaaaaataaaaaaaatataataagaacataataagataataaacaaagtcaaggaaataacatattatgataataaagacgaaaaataaattcttttgaccattgcgttgaagaatcaactacataaagtggaactaatgttaaaacgaagaacaagaataatacggaaaca

SEQ ID NO: 34159 - DNA, 396 bp, Glycine max
  Clone ID: LIB3052-015-Q1-N1-E10
gctactcagaagactaaggactatgcaagtgatgcaactgatgctgcaaaaaagactaaagattatgctgctcagaagaccaaggattatgcaagtgatgcaactgatgctgcaaaaaagactaaggattatgctgcgcagaagaccaaggactatgccagtggtggtgcgcagaagaccaaggactatgccagtggtgctgcgcagaagaccaaggactatgcaagtgatgctgcgcagaggaccaaggaccatgcaagtgatggtgctcaaaagagcaaagaatatgcgggtgatgtagcacagaatgccaaagattatgctcaaaagagcaaagattatgcgggtgatgctgtacagaatatcaaagattatgcaaatgatgcagcgcacaag

SEQ ID NO: 34160 - DNA, 262 bp, Glycine max
  Clone ID: LIB3052-015-Q1-N1-E12
ctcgagccgattcggctcgaggtttctttgagattggaagagcctgaagtaaggcgtggccaagggcactgtaagctttgtgacaacagaatttcttgcagaactgcagtaagcaggtctatggtatacagacctgcaatgctctcaatggtggcaatagcggcagtctgtgtctgtgtggcccttctgtttaaaagctcacctgaagtcatatgtatgttccgacccttcagatgggaaaatttggacttttgaacaagct

SEQ ID NO: 34161 - DNA, 344 bp, Glycine max
  unsure (1)..(344): unsure at all n locations
  Clone ID: LIB3052-015-Q1-N1-E2
ttacttcccctatggctcgtcactccttgctcttagccctgctcgtcttcgccgccgtggccaccgccgcgatggcggtggccgcgtccgacgccgacgacatcctgatccgtcaggtggtgccagatgttggcgaagccgaagaggaggacaacctgctgaacgccgagcaccacttcgcgagcttcaaggccaagttcgccaagacctacgccaccaaggaggagcacgatcatcgcttcggcgtcttcaagtccaacctccgcagagccaggctgcacgccaagctcgacccctccgncgtccacggcgtcaccaaattctccgatctaactccggccgag

SEQ ID NO: 34162 - DNA, 409 bp, Glycine max
  Clone ID: LIB3052-015-Q1-N1-E3
ctctacaattgtgatcttcacaaatcaacaacgtctctctgtgtgactctgaaagtaggtgaccatggagcatcatcttcatatgtgtgccatgatcattttgatgggtgcaattttcttgttcagttttgatcctgtgccttatttttttgtggagttttatattattattattattattattattattattattattattattattattacaagtgctagtatgttgatctcattcttggtagttagatcgtgttttttgtacggatattgatataaagattgggttttctgtctttctttcggggtcttacttagattagttagtgcagccaccttatttttttatatgattggagctgtaacccattttttaatgctaatatagtgatccaattgtgagtagtag

SEQ ID NO: 34163 - DNA, 410 bp, Glycine max
  Clone ID: LIB3052-015-Q1-N1-E5
ggaagagcaacctttggaagtgcggaaatatagagccgaattgtctgaacaagatatatttgtaatcccagcaggttatccagttgtggtcaacgctacctcaaatctgaatttctttgctattggtattaatgccgagaacaaccagaggaacttcctcgcaggttcgcaagacaatgtgataagccagatacctagtcaagtgcaggagcttgcattccctgggtctgcacaagctgttgagaagctattaaagaaccaaagagaatcctactttgtggatgctcagcctaagaagaaagaggaggggattaagggaagaaagggtcctttgtcttcaattttgagggctttttactgaataagtatgtactaaaatgtatgctgtaatagctcatagtgagcgagga

SEQ ID NO: 34164 - DNA, 412 bp, Glycine max
  unsure (1)..(412): unsure at all n locations
  Clone ID: LIB3052-015-Q1-N1-E8
gcctcatacgacaccaaattcgaggagataaacaaggttgtgtttggtagagaggaggggcagcaacaaggggaggagaggctgcaagagagtgtgattgtggaaatctcaaagaaacaaattcgggaactgagcaaacatgccaaatctagttcaaggaaaaccatttcttctgaagataaacctttcaacttgagaagccgcgaccccatctattccaacaagcttggcaagttgtttgagattaccccagagaaaaaccctcagcttcgggacttggatgtcttcctcagtgttgtggatatgaacgagggagctctttntctgccacacttcaattcaaaggccatagtggtactagtgattaatgaaggagaagcatacattgaaacttgtggcattaaagaacaac

SEQ ID NO: 34165 - DNA, 403 bp, Glycine max
  Clone ID: LIB3052-015-Q1-N1-E9
gcattattggtgcttacgatgctgtgtctgagaacgccgtgttgtctgagtttctctgccaccaaacacctccgtcaaatacaggcgcggccgtccagatcttgcatcaagatggcgtcaactaaaacggtggagcacattgtcctgttcaaggtgaaggaggaaacggagccgtcaaaggtgagtgacatggtgaacggactcggctctctggtgtcgctggacccggttctccacctcagcgtgggcccactcctccgcaaccgatccttcgccctaaccttcactcacatgctccacagccgctacaagtccaaggaggatctcgaagcgtactcagcacaccctagccacgtcagcgtcgtcaagggatacgtgctccccatcatcgacgacatcatgt

SEQ ID NO: 34166 - DNA, 413 bp, Glycine max
  Clone ID: LIB3052-015-Q1-N1-F1
cctcccaaacctcagctctcaattctactccagaaatttatattacaacaaaaaaaaaaaaaaaaaacggcaagtctcaaaaataaggctggcccaacaaaaacaacaacaaaaaaacaacaaaaaatcataccaaaaaatcacaaaaaaaaaaaaaaaatgccctcccccccctattaccctttccacccctcaaattaattcctacccctaaccttcatcctacccacctttcccaaaattaataccaattaaaactttcccaaaatattccaatacctatcccccttttaaaaatttcacccccccccaattccccacaaaatacaaccccaaatcctaaatttaaaacccccatatcccaaaaaaattacccaacccccctaaattcctttccccccacttcccccttt

SEQ ID NO: 34167 - DNA, 404 bp, Glycine max
  Clone ID: LIB3052-015-Q1-N1-F10
ccagaacaagccccccagcgagcagtccactaccgagactgagcacgagcgcgaagctggtggcggaggcggcgcagtcggctctgaagagcgacagcgacaaagtggacaaggccaaggtggctgacgctgccggcgatcttctcgacgcggcggggaagtatggaaaacttgatgacaaacaaggcatagggcaatatgttgacaaggctgctgattatctgcataattaccagggtgataataccactgctccttcacagcctgcagagtctaaaggtgaagaaagtggtggtgggttaggtggtcttgcaaacttggctggaggcttcttcaaaaagtagttacaaagcaactaaataagaccttaattgagtccttattctcggtctagtagtggggtt

SEQ ID NO: 34168 - DNA, 367 bp, Glycine max
  Clone ID: LIB3052-015-Q1-N1-F12
aaaaccaacaacaactatggcaagttatcaaaagcactacgatgatcagggtcgcaaggttgacgagtatggcaacgttgagaagcaaaccgacgaatacggcaaccctgttcatgctgctagtgtcacctatgtagccaccagaactgctgctggtggttacagtgatgacattaataagcaacatgataccaccaatgcctacggcgtagacactggtagacagcattctagtggtggctacgatggtgacactaataaacatcatggaactactggtggctataatgatgacaccaatagacatcatggaactaccggtgtctatggtatagacaccgataggcaacaacatgggactactggt

SEQ ID NO: 34169 - DNA, 408 bp, Glycine max
  Clone ID: LIB3052-015-Q1-N1-F2
caacatttcccttcttcctacctccgactggctgcacaccgtgttgctcaacactacaacatgcaaacaatggttcaagataatggcttagatggccagggaagtaaaattctggtgaggaagttaccagaaagcaagtatcctgtggttcgattatctgaaatacctgctaagcagttggaaaatgataaatctgagctgaaaaaatttgttattagacctaggcccaatagaaacagtttgaatgatgccaacggagttgggacgaaaggaaatcctgtaagaagtgtggaagaaaggaaagaagaatatgaccgggcgcgggcacgtatctttagtagccctagaagctctgaatcaggcgatacctcatccatggttccaatggacgggagaaattcttctact

SEQ ID NO: 34170 - DNA, 423 bp, Glycine max
  Clone ID: LIB3052-015-Q1-N1-F3
acaggatgtggggaactgtgaaaggaggaggaaatgatgagagatggtttaaggactttgaacattagccaatgcactgcactcaccccatctgctgttcaagctgtttgtgactcattcccttctctccacacatgctcagggaggcactcactcatcatgagtggctgcctcaacttgacatcagtgcattgtgcctgtgctgtccatgcgcaccgtgcattcaccactttcccttatcctgcccattaagaagctcatgcttttgatgttgaacacacttcgaggatgtgccccttgaaagggctcagagaagtgaaagaagtgaaatccaccccccttgtagatgtatgcctgcataagagagacttgaatctagctgattatgtacatcttttcttcaactttatgtcttaaactcgg

SEQ ID NO: 34171 - DNA, 343 bp, Glycine max
  Clone ID: LIB3052-015-Q1-N1-F4
tgtacctaacactgctgatggatataatagttccacatccgggtgttgctacgttaactctgtggataaacatttggtgaaaggaaagatcgttctgtgtgacggaaacgcgagtcctaaaaaagttggggatttgtctggggcagctgggatgcttcttggagccactgatgtaaaagatgctccattcacttatgcactgcccacagctttcattagtttaaggaactttaaactaatacattcttacatggtttcattgagaaattcaacggccacaatatttaggagtgacgaagacaacgatgattcacaaacccctttcatagtttcattttcatct

SEQ ID NO: 34172 - DNA, 419 bp, Glycine max
  unsure (1)..(419): unsure at all n locations
  Clone ID: LIB3052-015-Q1-N1-F5
gtggagatcatgcgccacttgccgcagcatccgaacgatcgggaccttgaaggatacctacgaggacgacaatgccgtgcatctcgtcatggagctctgcgagggtggggagctcttcgaccgcatcgtggcccgaggccactacaccgaacgcgccgccgccgccgtcaccaagaccatcgtcgaagtcgttcagatgtgccacaaacaaggtgtgatgcatagggatctcaagccggagaactttttgtttgcaaataaaaaggaaaccgcagctctgaaagctatagnatttgngttgtcggtgttctttaaaccaagggaaagatttaatgagatagttggaagtgcatattacatggctcctgaggtattgaagagaaatatgggccagaagtggacatctggagtgctggagt

SEQ ID NO: 34173 - DNA, 393 bp, Glycine max
  Clone ID: LIB3052-015-Q1-N1-F6
ttgcagaccgagctagctagctagcaagcaagcacggagagggatgcaaagcgaggccatgccctcatgtgcttggcacgtgttacactcttcctctgcgctctaaccctatccgctgctcacggaagcaccacggttcaagacatcgcgagaaagttgaaactcggggacaacgagcttctgcgcacggagaagaagttcaaggttttcatggagaattacgggaggagctactccacagaggacgagtatttgcgccgataggggattttcgcccagaacatggtcagagcggcagagcatcatgcgctggaccccaccgtcgtccactgcgtcacgcagatctccgatctcaccgaggacgagtttgagaagctctacactgccgtcaat

SEQ ID NO: 34174 - DNA, 342 bp, Glycine max
  Clone ID: LIB3052-015-Q1-N1-F7
aactaagaaagtcttccatagccccccaaaaatgaagagcggcatcttctttgctctctttctcttttgtgccttcaccacctcatacctaccttcagccatcgctgatttcgtgctcgataatgaaggtaaccctcttgaaaatggtggcacatattatatcttgtcagacataacagcatttggtggaataagagcagccccaacgggaaatgaaagatgccctctcactgtggtgcaatctcgcaatgagctcgacaaagggattggaacaatcatctcgtccccatatcgaatccgttttatcgccgaaagccatcctttgagccttaagttcgattc

SEQ ID NO: 34175 - DNA, 386 bp, Glycine max
  Clone ID: LIB3052-015-Q1-N1-F9
gtgatttcagtgagtgatcggtgttcacttgatctcagcgtgaatcgtcagcgtgaattgaagaagatgccgatcagaaacatcgccgtcggaaggcctgaagaggcgactcaccccgacacgttgaaggcggctttggctgagttcatctcaaccttcatcttcgtgttcgccggctcacgctccggcatcgcctacaacaagctcaccgacaacggcgctgccacccctgccgggctcatctgcgcctccatcgcccatgcattcgccctcttcgtcgccgtctccgtcggcgccaacatctgcggcggtcacgtcaaccccgtcgtcaccttcggcgccttcgtcggctgcaacatcaccttactacggggcatcggctacgt

SEQ ID NO: 34176 - DNA, 415 bp, Glycine max
  Clone ID: LIB3052-015-Q1-N1-G1
gtatttcgtttgttgttcaatctaacaaacttctctatatggtggactttttcaacacaccgtacacacttctttatttgagcctttcatataaatatcatggcttcgagggtggtttcggttttggtgatagcgatgatgttgtttgccatgaactgtaactgcactagtgttggccacatgccttcaaccaaagaggaaggtcacgattttcaggaggctaaagccaagacaacacaaactgcgaacaaggccatggaaactggtaaagatgggaaagaagccgcagagtcatggacagaatgggctaaagagaaactcactgaaggtcttggcttcaaacatgatcaagaatccaccactaagaaagtctctgactatgccggtgatgctgctcagaaatcaaaggactatg

SEQ ID NO: 34177 - DNA, 405 bp, Glycine max
  unsure (1)..(405): unsure at all n locations
  Clone ID: LIB3052-015-Q1-N1-G10
gggagctcttcttctaccacacttcaattcaaaggcgatggtgatactggtaattaatgaaggagatgcaaacattgaacttgttggcctaaaagaacaacaacaggagcagcaacaggaagagcaacctttggaagtgcggaaatatagagccgaattgtctgaacaagatatatttgtaatcccagcaggttatccagttgtggtcaacgctacctcaaatctgaatttctttgctattggtattaatgccgagaacaaccagaggaacttcctcgcaggttcgcaagacaatgtgataagccagatacctagtcaagtgcatgagcttgcattccctgngtctgcacaagctgttgagaagctattaaagaaccaaagagaatcctactttgtggatgctca

SEQ ID NO: 34178 - DNA, 405 bp, Glycine max
  Clone ID: LIB3052-015-Q1-N1-G11
gtggattcttggttaccaatttttgtgaattgtctttgatcgtgtaagtcaattaccttcagaagctgtcgttgtaaatgttacatgtggtagtggacgtggtggtttacctaccactgcttggattagttctgcagttaacaatcgctcctcagatatcaacaaaaagattcgcacagcacttgggaaaggtaagaaaattgtttttcttactagagttgatccttttccagtagctctactggctgttctttttggcgttaagaatgaaattctgagttccaacgccactaaccctatgctgacgcgacttcttgagaactgtaagagtctcaaatatctggttgatgagtgtccttttgcatttgtgaactagtatgtaatattttattcacttaaataaag

SEQ ID NO: 34179 - DNA, 406 bp, Glycine max
  Clone ID: LIB3052-015-Q1-N1-G12
gaaagatgtttggagagttgaatgtggaatcccttggggagttccgctcacaggtattggtaatagcatttttaatgagatgctcattagatatagctatgaaaaattactgcgccaggctaaagctccaagtatgtttttacaatccttcaaaaattttgtttctttgtgtgtgtatggtgatgataacttaattagtgttatgaatatgtcaagccttactttagtggttctaaattgaaaagctttctagctggtcataatatcaccattactgatggtattgacaaaactagtgcaactttgcaatttagaaagttagcagattgtgattttctcaagagaaactgtaagcagatgtctaatgttttgtgggtggctcctgaagacaaggcgagtttatggt

SEQ ID NO: 34180 - DNA, 397 bp, Glycine max
  Clone ID: LIB3052-015-Q1-N1-G2
gaaagtcttccatagccccccaaaaatgaagagcaccatcggctgtgctctctttctcttttgtgccttcaccacctcatacctaccttcagccatcgctgatttcgtgctcgataatgaaggtaaccctcttgaaaatggtggcacatattatatcttgtcagacataacagcatttggtggaataagagcagccccaacgggaaatgaaagatgccctctcactgtggtgcaatctcgcaatgagctcgacaaagggattggaacaatcatctcgtccccatatcgaatccgttttatcgccgaaggccatcctttgagccttaagttcgattcatttgcagttataatgctgtgtgttggaattcctaccgagtggtctgttgtggaggatcta

SEQ ID NO: 34181 - DNA, 382 bp, Glycine max
  Clone ID: LIB3052-015-Q1-N1-G3
ggaagaggagcagaggcagcaagagggagtgatcgtggagcgtctgaaaggaacaaattcgggaactgagcagacgtgccaaatctagttcaaggaaaaccatttcctccgaagatgaaccattcaacttgagaagccgcaaccccatctattccaacaactttggaaagttctttgagatcacccctgagaaaaacccacagcttcgggacttggatatcttcctcagttctgtggatatcaacgaaggagctcttcttctaccacacttcaattcaaaggccatagtgatactagtgattaatgaaggagatgcaaacattgaacttgttggcattaaagaacaacaacagaagcagaaacaggaagaggaacctttgga

SEQ ID NO: 34182 - DNA, 414 bp, Glycine max
  Clone ID: LIB3052-015-Q1-N1-G4
taaaattcttccaccaagttatgggtttccttgtgttgctgcttgtctccctcttaggtctgtcttctagttccagcatatcaactcatcgttccatattggaccttgacctaaccaagtttaccacacagaaacaggtgtcttcactgttccaactatggaagagtgagcatggacgtgtctaccataaccacgaagaagaggcaaagagacttgagattttcaagaataacttgaactatatcagggacatgaatgcaaacagaaaatcaccccattctcatcgtttaggattgaacaagtttgctgacatcactcctcaagagttcagcaaaaagtacttgcaagctcccaaggatgtgtcgcagcaaatcaaaatggccaacaagaaaatgaagaaggaacaatattctt

SEQ ID NO: 34183 - DNA, 400 bp, Glycine max
  Clone ID: LIB3052-015-Q1-N1-G6
caaacctaagacgcgctgcttcactattctccctatggaggttaatcttgtggtccggcagaagtttttaaattttgtgaggttcattatgaagaaaagggacaagcttagttgtcaagttggaatcaacccatactccatggaatggactggtttggccaataggttactgagtaagggcaacgatattctgtgttgcgattatgctagttttgatggtttgattaccaagcaagttatgagcaagatggcagaaatgatcaacagtctttgtggtggtgatgaaaaattgatgcgtgaaaggacacacctgctgttggcttgttgatcaaggatggcaatttgtaagaaagatgtttggagagttgaatgtggaatcccttctggatttccgctcaca

SEQ ID NO: 34184 - DNA, 396 bp, Glycine max
  unsure (1)..(396): unsure at all n locations
  Clone ID: LIB3052-015-Q1-N1-G7
cacgtatactacaattgcatagtgctgcgatcgccgtttgttctctgaaacaaacacaccgacaccaatcactctctttgatccattccgtttagacgattagcttttacgatggccagccataactacaaagtcttcagctgcttcaacaggaagttcaccgtcaccgagccgggcccaccgccggacgtccaaaaagcgttttctgaatttgccgacggagcctcctccctgtccggcgatcacctcctccgatttctggcgaagcaccagggcgaagtggactgcaccgcagtggattcggagcggatcctncagcaatcgcggaaagaggatcggaaagtggactggatctncacgacttcttncgtttcctgctacatgacgatttcaata

SEQ ID NO: 34185 - DNA, 396 bp, Glycine max
  unsure (1)..(396): unsure at all n locations
  Clone ID: LIB3052-013-Q1-N1-G2
gggaaagaggcttctcaccaaagagtaagacatgggttccattgatgatgatacaccgcttctggaagagggtctccttcaggatgatgaagggagtgagcaattcacaggagatggctcagttaactttagaagagagcctgctcttaagaagggtaccggcaattggagggcttgtccttttatcctaggcaatgagtgttgtgaacgtttggccttcttcggaattacaacaaatcttgttacctatcttaccaccaaattccatgaaggaaacgtttctgctgcaagaaacatcagcatctggcaaggcacttgttatctcactcctatcattggagctgttctagcagatggttactggngtcgatactggacaattgctgntttctctgc

SEQ ID NO: 34186 - DNA, 327 bp, Glycine max
  Clone ID: LIB3052-011-Q1-N1-F5
attcacgcgaagatagtatacaccttgatcaggcctgatggaaccaggaaggcctatgtcaggttgtcacctgattatcacgccttgtatgcggtcaacaagattggaattatctaaactaatatatggtcttaccaaagtagattcgtgtttagatggtagtttgctatggagtgtagaggggagacatttgaagcaacattaagttatttaaaaatgctcggttgggtatctgctgtattctagatcaatcggaattatatttactcatgttacattaccaaaaggacatctgaaggccacaaaccctatatgggactcgttgat

SEQ ID NO: 34187 - DNA, 373 bp, Glycine max
  Clone ID: LIB3052-011-Q1-N1-F8
gttcaatatggggaagcccttcactctctctctttcggccctttgcttgctactcttgtcgagtgcatgctttgctattagctccagcaagctcaacgagtgccaactcaacaacctcaacgcgttggaacccgaccaccgcgttgagtccgaaggtggtttgattcaaacatggaactctcaacaccctgagctgaaatgcgccggtgttcccaactgtttccaaactcaccctcaaccgcaatggcctccacttgccatcttactcaccttatccccggatgatcatcatcgcccaagggaaaggagcacttggagttgcaattccaggatgtcctgagacgtttgaggagccacaagaacaatcaaacag

SEQ ID NO: 34188 - DNA, 327 bp, Glycine max
  Clone ID: LIB3052-011-Q1-N1-F9
tgcagaccgagctagctagctggcaagcatgcacagaaatggaggcagggcgaggccatactctgatgtgcttggcacgtgttttactcttcctctgagctctaaccctatgcgctgatcacggaagcaccacggttcaagacatggcgagaaagtcgaaactcgtcggcaacgtgcttctgagcacggagaagaagttcaaggcattcatggagaattactggaggagctactccacaaaggatgtgtatctgcgccgattcaggattctctaccagatcatagtcacagcgtcggagcatcagactctggaccccatcgtcgatc

SEQ ID NO: 34189 - DNA, 389 bp, Glycine max
  Clone ID: LIB3052-011-Q1-N1-G1
gaacaccattgaattttgattctagcaagcagagcttgtgtcaattttctattgaccttctcggtggaggaattttagtggacaaaactggagattggatcacacttatacaaaattctccaattagtaacttgttgagagttgctgcttggaagaaaggttgtttaatggtcaagattgtgatgtctgggaatgcagcagtcaaaaggagtgattttgggggcctcattggtacaagtgtttttaacaaacagcaacagtacagagcattttgatgcatgtaagtggacaaaatcagaaccacattcctgggaattaatcttcccaatagaggtatgtggtcctaataatggttttgaaatgtggagttctgagtgggcaaatcaaac

SEQ ID NO: 34190 - DNA, 371 bp, Glycine max
  Clone ID: LIB3052-011-Q1-N1-G11
ctcattgtccaactacatttcttccacctactgataaaatcctcatatgtgctcccaaaagcttgattgtgagaatggctttgggtgaattgagattcccacctcaacaacaacgaacacatcctgggaaggagcatgctatgaatccagtaccccaattcactagccctgactacaagccttcaaataaacttcaaggaaagatagcattagtgactggcggtgactctgggattggacgagcggtgtgtaacttgcttgccttagaaggtgctaccgtgggcttcacatatgcgaaagggcatgaggacaaggacgcgagggacacgttggaaatgatcaagagggctaatacttcggatgctaaagat

SEQ ID NO: 34191 - DNA, 349 bp, Glycine max
  Clone ID: LIB3052-011-Q1-N1-G2
caatactttcaccatctcgtggcatgctgtgcattgcggtggcaggacatattgagactctcttctagttgcagcatatcatctcaacggatcatattggaccgcgacgcatcaaaggggacgacacagaaactggtgtactcagtgactcaactgtagtaaagatagcatgtacttgtctagcatagacactagacaatagtcatgacagactatgtgaaatttatatgaagaataacttgaactatgtaaagctcatgaatgcatacagaatatcactccattttaatagattaggattgaacaagtgtgctgacattacttctcaggagatcagcaaatagtactt

SEQ ID NO: 34192 - DNA, 174 bp, Glycine max
  Clone ID: LIB3052-011-Q1-N1-G3
ctttattctctctatctctatatatgctgtgcattctggtggcatgacagattgagacacacttctaattagccgcctacttatctcaattcatctactttctcttcaattcttcaaaagggtcgactccaattcttcaaaacggtgtaactttgctggagtaaagatgggtgg

SEQ ID NO: 34193 - DNA, 149 bp, Glycine max
  Clone ID: LIB3052-011-Q1-N1-G4
ctcgagccgctcgagccgttaaaataacacacacttcacacatcattacgacaattaaaagaggtgtggaaattttcaaataggcagagcatactcaacaagagggtcatgcctaatttcctttattgaattaaacaaacgaacaagtg

SEQ ID NO: 34194 - DNA, 380 bp, Glycine max
  unsure (1)..(380): unsure at all n locations
  Clone ID: LIB3052-011-Q1-N1-G5
ctcgagccgattcggctcgaggcaagcagagcttttgtcagttttctattgaccttctcggtggaggaatcttagtggacaaaactggagattggatcacacttatacaaaattctccaattagtaacttgttgagagttgctgcttggaagaaaggctgtttaatggtcaagattgtgatgtctgggaatgcagcagtcaaaaggagtggnaaattgggcctcattggtacaagtgtttttaacaaacagcaacagtacagagcattttgatgcatgtaagtggacaaaatcagaaccacattcctgggaattgatcttcccaatagaggtatgtggtcctaataatggttttgaaatgtggagttctgagtgggcaaa

SEQ ID NO: 34195 - DNA, 374 bp, Glycine max
  unsure (1)..(374): unsure at all n locations
  Clone ID: LIB3052-011-Q1-N1-G9
atcctncacgacgaccaagccatggaaagcatgaacatgacgaggacgaggacgaagaagaagatcaacctcgacctgatcaacctacacagcgaccaagcaggccccaacaacaagaaccacgtggaaaaggatgtcagactagaaatgtggttgaggaaaatatatgcaccatgaagcttcacgagaacattgatcgcccttcacgtgctgactactacaacccacaagctggtcgcattagcaccctcaacagtctcaccctgacagccctatgccaattcggactcaacgcccaatatgctgtcctatacaggcatggaatttactctccacattagaactagaactcgtacagtgtgatctatgtgact

SEQ ID NO: 34196 - DNA, 262 bp, Glycine max
  unsure (1)..(262): unsure at all n locations
  Clone ID: LIB3052-011-Q1-N1-H1
agcgactcactgaccaaggcatggtgatgagcaccaagctctatgtacctagccggtgcgggtgtctgaaagccttataggcagacctaggcttcggcaaatgtaaggaaaccgaggtggaagaagaagaccctgagctcgggacatgcagacaccaatgctctcagtcacagcaatacactgagggtgacaagctggtatgcttgcaaagatgtcgcnaacatgattcatggtctgacgcatgacctagagagacacatcc

SEQ ID NO: 34197 - DNA, 176 bp, Glycine max
  Clone ID: LIB3052-011-Q1-N1-H10
ctcaatgtctagcatcgcttgctcaaagtcctgaaaatagggttatctgcgctgccacatgcatgagagcgcgacaggttttggctaaattgagactccctccatctcaaccgcgctcacctggtgaaaaggttcatgctctgcatcctctatcgcatctaaccatgcataactac

SEQ ID NO: 34198 - DNA, 173 bp, Glycine max
  Clone ID: LIB3052-011-Q1-N1-H11
ctcagagtcgttcatcgctaccccagagcgctaaaaatatggctaaatgcgatggcacatgcatgagtgagtgacaggttgagggtggcttgagactcgcgccacccggccgcactcacatcgtgtacaggtgcaatctctgaagactatatcgaatctgaccaggcatagct

SEQ ID NO: 34199 - DNA, 369 bp, Glycine max
  unsure (1)..(369): unsure at all n locations
  Clone ID: LIB3052-011-Q1-N1-H2
gcaaaatgaccaagttcacaatcctnctcatctctctggtcttctgcatcgcccacacttgcagcgccttcaaatggcagcaccagcaagatagctgccgcaagcagctccagggggtgaacctcacgccctgcgagaagcacatcatggagaagatccaaggccgcggcgatgacgatgatgatgatgacgacgacaatcacattctcaggaccatgcggggggggaagaatcaactacataaggaggaacgaatgaaaagacgaagacgaagaagaagaaggacacatgcagaagtgctgcacagaaatgagcgagctgagaagccccaaatgccagtgcaaagcgctgcagaagataatggagaac

SEQ ID NO: 34200 - DNA, 369 bp, Glycine max
  unsure (1)..(369): unsure at all n locations
  Clone ID: LIB3052-011-Q1-N1-H3
cgttcatttctacacatccctagctctgtcgttccgtcgttgacggtggcgtttcgggtgcgaagccctgacctccgctctctctttcttctctctctcttgtccatcgcttccgccaatgtcttcttcgaagagcgtttcgatgacgggtgggaaaatcgatgggttaaatcacattggaaaaaagatgagaacgtggctggtgagtggaaccgaccccacctctggtcaatggaatggagacgctaatgacaaaggtattcaaaccagtgaggattacagattctatgctatttcagctgagtaccctgaattcagcaacaagggtaagacactagtctntcaattttctgttaagcacgaacagaa

SEQ ID NO: 34201 - DNA, 133 bp, Glycine max
  Clone ID: LIB3052-011-Q1-N1-H4
cgatggtatcacgatcgccacacatgcttcgaattgaagtgaaatgacacattgcgagtccatgctagatgcagcgtcacagctgcattggacggattaaagagaaatgcatccgatgggacgaccagtaaac

SEQ ID NO: 34202 - DNA, 323 bp, Glycine max
  Clone ID: LIB3052-011-Q1-N1-H5
gggctaaagagaggcttattgaatgccaaggcttgagacttgatcatgacttgaccgctaattacgtctataactatgccggggaaacggctcatatgtcagtggactatgccggtgacactgctcagaataccaaagactatgccggtgacactgctcataaaaccatggactatgccagtgacacatgcacatacgtcaagggactaatgttccccggtgatgctgttcagaagtcactggctcatgtccgtgatgctgcacataagaccagcgaatataatggtgatgctgctcataacaccattgattataccactgat

SEQ ID NO: 34203 - DNA, 380 bp, Glycine max
  unsure (1)..(380): unsure at all n locations
  Clone ID: LIB3052-011-Q1-N1-H6
attccactataggagaaagttctaataatctcgatgaaagtcaaaaatataagcatttgtggcttgaatgcgaaaattgttatggattaaattataaaaaattttttaaatcaaaaatgaatatttgtgaatactgtggatatcatttgaaaatgggcagttcagatagaatcgaacttttgattgattcgggtacttggaatcctatgggattngggaagacatggtttctctggatcctattgaatttcattccgaagaggaaccttataaagatcgtattgattcttatcaaagaaaaacgggattaactgaggctgttcaaacaggtactggtcaactaaatggtattcctgtagctattggaattatggattttc

SEQ ID NO: 34204 - DNA, 331 bp, Glycine max
  Clone ID: LIB3052-011-Q1-N1-H7
gccacagggtggagtgctgcacattattctactgagaggactgtggagggaaccaaggctgcaacaaatgttgttaagggagttgctgaatatgcaggacagaaggcttctgagcttgcagctatgtcagtggatactgcgaaaggtttagctgctgctgcagctggggagaatgccaaggagtacactgcaaggaagaaggtggaagcctttggagatggatttggaggccaaaagggaagctcaaaatcaggaatcgaaggagtggccatcagcaaaatccaccactgagagcattcaaagaggacaaggacaacaagaacagcatgag

SEQ ID NO: 34205 - DNA, 359 bp, Glycine max
  unsure (1)..(359): unsure at all n locations
  Clone ID: LIB3052-011-Q1-N1-H8
gccacagggtggagtgctgcacattattgtactgagagaactgtggagggaaccaaggctgcaacaaatgttgttaagggagttgctgagtatgcaggacagaaggcttctgagcttgcagctatgtcagtggatactgcgaaaggtttagctgctgctgcagctggggagaatgccaaggagtacactgcaaggaagaaggtggaagctgaaagnaatggatttggaggccaaaagggaagctcaaaatcaggaatcgaaggagtggccatcagcaaaatccaccactgagagcattcaaagaggacaaggacaacaagaacagcatgagcaaggagaaaaatgggaacatggtgcac

SEQ ID NO: 34206 - DNA, 379 bp, Glycine max
  Clone ID: LIB3052-011-Q1-N1-H9
ctaactctgtatagcccgaacgaaagaaagaaggaaatggggatcacagccttcaacggaaccggcttcggatatggcttctgcataggttgcgagttcggtatcggatggggtttcggcggtatgccattgaactcagtgggtcttggtgcaggtagatgctgtcgcgtaggactaggacttggttgatcatttggtgctgcctttggtagcaagtatcgatccttacgggtcacatttacaggagtggactgtgatatgaaggagcaagttatcagcacggtaatgtgcattcccggatcacaagttacaagattacgggcacgtttggacaatgtagaactctagttggcctatggatacacattgaatgtgaact

SEQ ID NO: 34207 - DNA, 332 bp, Glycine max
  Clone ID: LIB3052-012-Q1-N1-A12
cacacccattcatctccatcacaacacaacatacatacgagccaggtgaagctcaggttcttcttcctcctcacttcccttttccattttcattttcctctataaacccctcctctctctctctctctagatccaaccgcaccgatggaaacacaatgatccaaccctaatccaagcgcctcttacctccaagttttgtgattgaagctgcgatggaggaggagacctccgatgcaatgaaccttgatttgaatctgggcccaggcccagagcccgaaactgggcccaatgagcaatggagctgtgaacttggacgatgggataggggagcc

SEQ ID NO: 34208 - DNA, 61 bp, Glycine max
  Clone ID: LIB3052-012-Q1-N1-A2
gcttcatgtcattatctgtgcatgcgctatgcttatgctgacaatctcgctaatgagtcac

SEQ ID NO: 34209 - DNA, 332 bp, Glycine max
  Clone ID: LIB3052-012-Q1-N1-A3
ccaatgtctatacattcattatatttctgtgtaaatggaggaaagactcgatggaaaaatggtggtttaattctatgttgtttaataggaagttagaatacaagtgtgaattaagtatatcaatggatagtcttggtcctattgaaaatacctgtctaagggaagaccctaaaattttaaccgatgtagaaaaaatgattcacagggatttggattatttagaaatggaaggtgttttttctagcgatctgaatactgtttctaacaatgatgactatcattacatgtattagacttaatttagatgtaacaatgattttactagtttcatt

SEQ ID NO: 34210 - DNA, 357 bp, Glycine max
  Clone ID: LIB3052-012-Q1-N1-A4
gattgatagagaatcgttcgagactgcaaaatccaaagccgatacgcaacacatcacagcattcggcattcaccgtcttgtctcgtcttcttctgtctccgaacacggaatctctctgaatcgcgggattaagagaggaatatgctacagaggcttaagttgcagcaacaacatcaagccctcatgcagcaagctttgcttcaacagcagcagatgtaccaccctggcatgctcgccgctgctatgtctcagatggagcctgttccaagtggaaatttgcctcctgggtttgatacgtgtgcatgccgtaacgtttatgtaggaaatattcatgtgaatgtcaccgatgaacttctt

SEQ ID NO: 34211 - DNA, 325 bp, Glycine max
  Clone ID: LIB3052-012-Q1-N1-A5
gcagattgaaccagacatgaattcaaggtttcagcttttgagtaccactaccaatggtgattttgttcaagggaaagatctcgcaatggttaaagttaatgtagcatgtgctgctgttggcttgacatcaagttacactccaactccattgttggaatctggtttgcaaaaagacagagggttaattgtggagtattttggaaggatgtcttacgttgctcataacgttaatcagccccaagagaaagatttgttggagggaaatttttcctttgatattaaatctcgctctagattggaaaaagtttcctctacaaaagcacaa

SEQ ID NO: 34212 - DNA, 364 bp, Glycine max
  Clone ID: LIB3052-012-Q1-N1-A6
cacttatacaaaattctccaattagtaacttgttgagagttgctgcttggaagaaaggctgtttaatggtcaagattgtgatgtctgggaatgcagcagtcaaaaggagtgattgggcctcattggtacaagtgtttttaacaaacagcatcagtacagagcattttgatgcatgtaagtggacaaaatcagaaccacattcctgggaattgatcttcccaatagaggtatgtggtcctaataatggttttgaaatgtggagttctgagtgggcaaatcaaacttcatggcatttgagtttccttattgacaattccaaacagtctacagcttttgatattctcttgggaatctctcaagattt

SEQ ID NO: 34213 - DNA, 372 bp, Glycine max
  Clone ID: LIB3052-012-Q1-N1-A7
gcacgacgtgagagagattgtgaagtagaaatcggtgcaagaaattctccactttatctaaaaaaattcggtgagtttgtgaagacaaaaaatcactagctactcaaaaatggccacagtaggaaggaacgttgcagctcctttgctgtttcttaacttgatcatgtattttattgttcttggctttgctagttggtgcctcaacaggttcatcaatggccaaacttaccaccctagttttggtggaaatggtgcaaccatgtttttcttaaccttctccatactagcagctgttctgggcatcgtgtccaaacttttgggtgggaatcacatgaggacattgaggagtgacactttatcatctgcaggagc

SEQ ID NO: 34214 - DNA, 359 bp, Glycine max
  Clone ID: LIB3052-012-Q1-N1-A8
cctcagtattggggatatgaacgagggagctcttctgctaccacacttcaattcaaaggcgatagtgatactggtaattaatgaaggagatgcaaacattgaacttgttggcctaaaagaacaacagcaggagcagcatcaggaagagcaacctttggaagtgcggaaatatagagccgaattgtctgaacaagatatatttgtaatcccagcaggttatccagttgtggtcaacgctacctcaaatctgaatttctttgctattggtattaatgccgagaacaaccagaggaactttctcgcaggttcgcaagacaatgtgataagccagatacctagtcaagtgcaggagcttgcat

SEQ ID NO: 34215 - DNA, 326 bp, Glycine max
  Clone ID: LIB3052-012-Q1-N1-A9
cttaaacactcatcagtcatcaccatggccaagctagtttgttccctttgttttctgcttttcagtggctgctgcttcgctttcagttccagagagcagcctcagcaaaacgagtgccagatccaaaaactcaatgccctcaaaccggataaccgtatagagtcagaaggagggctcattgagacatggaaccctaacaacaagccattccagtgtgccggtgttgccctctctcgctgcaccctcaaccgcaacgcccttcgtagaccttcctacaccaacggtccccaagaaatctacatccaacaaggtaagggtatttttgg

SEQ ID NO: 34216 - DNA, 319 bp, Glycine max
  Clone ID: LIB3052-012-Q1-N1-B1
ctttgaacactcatcaccatggccaagcttgttctttgcctttgggtccttcttttcagtggctgcttcgctctgagagagcaggcacagcaaaatgagtgccagatccaaaagctgaatgccctcaaaccggataaccgtatagagtcggaaggtgggttcattgagacctggaaccctaacaacaagccattccagtgtgccggtgttgccctctctcgctgcacccttaaccgcaatgcccttcgtagaccttcctacaccaacggtccccaggaaatctacatacaacaaggtaatggtatttttggcatgatat

SEQ ID NO: 34217 - DNA, 399 bp, Glycine max
  Clone ID: LIB3052-012-Q1-N1-B10
accgtattaaagaatttaagatatactatgatgagagcgcggttcccattactgttgctgggagttgttttcctggcatcagtttctgtctcatttggcattgcgtattgggaaaagcagaaccccagtcacaacaagtgcctccgaagttgcaatagcgagaaagactcctacaggaaccaagcatgccacgctcgttgcaacctccttaaggtggaggaagaagaagaatgcgaagaaggtcaaattccacgaccacgaccacaacacccggagagggaacgtcagcaacacggtgagaaagaggaagacgaaggtgagcagccacgtccattcccattcccacgcccacgccaacctcatcaagaggaagagcacgagcagaatgaggaacacgaa

SEQ ID NO: 34218 - DNA, 398 bp, Glycine max
  Clone ID: LIB3052-012-Q1-N1-B12
cttacactctatgttactatctcactcacatgcagtatttgtgtagttcattcttttatggctgatgacaccagacaggatttacctgctcaagactatgatggaacacccatctatccagcatccgaccatgatacgtcattttacgatcatgcatcctaacaaagagcatctaaatctactgatccacctgaagctggctcgatcacagcgaccacttggcatttgtctgccatgtctggctcacatcaatgatccaagcatcaaggaatagcatgaccagatagcaactgatccatgattaagccagattgctgaaccgctgccgactactgaccaaggcgatgcacaagacactatgcctaactgtgatcatcaaccatatatttactccatgc

SEQ ID NO: 34219 - DNA, 344 bp, Glycine max
  Clone ID: LIB3052-012-Q1-N1-B2
ctactgttgatcattgatttgttgggtttacaaggagcaggtaaagcttttccaaacaagattgtttttgatgataaacttgtgctggctaacacacaagaattctttgctggaaattttccagtggattcttggttaccaatttttgtgaattgtctttatcctgtaagtcaattaccttcagaagctgtcgttgtaaatgttacatgtggtagttgacgtggtggtttacctaccactgcttggattagttctgcagttaacaatcgctcctcagatatcaacaaaaagattcgcacagcactttggaaaagtaagaaaattgtttttcttactagagttga

SEQ ID NO: 34220 - DNA, 394 bp, Glycine max
  Clone ID: LIB3052-012-Q1-N1-B3
gtggagagagaaatagagagagaggggaaacagatgggttaggctgaaaagggagttggtataacattgttggtttggtttagtttagtttcctcggtagagagggctcttttttttattttggtggtgatggaagtgggaaaattgaatggcaggaactttttcaagaggctgaagcaagtttcagagtggtggcagttgcacaagcaacaagaagagaagaagagtggaaagaaacatagctgggagtgcaaggaatcaacaacccattaggaataagtgcaaagcttcattaaaagctggaagaggaaaatcacaacaggggtctgactctggatcctcacagggatcatcatcatcatcatcatcttttgcagcaacaacaacaaccacc

SEQ ID NO: 34221 - DNA, 359 bp, Glycine max
  Clone ID: LIB3052-012-Q1-N1-B4
caagatcgttccttttcttgggacgcatgtcgtgtttgtcttgttgtggctgctgacactatcatagttttttgttaggtgaaatcaagcccactaatgtgtgtacgcattagagaagggcattgaaacaaagtgtgatttctggtggagcttgattagtcatcttctatgctgtcttttgtaacagaaaacatgggcttactctgtagcagaaatcgccggtataatgatgctgatgctgaagaaagtgcacagactgcagagattgaaagaagaatagaattagaaacgaaggctgaaaagcatattcagaaacttctactacttggagctggagagtcatggaagtccacaatatt

SEQ ID NO: 34222 - DNA, 307 bp, Glycine max
  Clone ID: LIB3052-012-Q1-N1-B5
cgcaggtgatgctgcacagaatgtcaaagattatgcaagtgatgcagtgcagaagagaaaagagtattctggtgatgcttctcacaagagcaaagaggcttctgattatgccagtgagacggctaagaagaccaaagattatgtcggtgatgctgctcagagaagcaaaggggctgctgaatatgctagtgatgcggctcagaggaccaaagagtatgctggtgatgctaccaagagaagcaaagaggcttctaatgatcatgccaatgacatggctcagaagaccaaagactacgccagtgacact

SEQ ID NO: 34223 - DNA, 400 bp, Glycine max
  Clone ID: LIB3052-012-Q1-N1-B6
gggaggataagagctgctttgatggtgtgtaggcatatgccaaggatgaatgtggtggcatggaatgccatgctttgtgggttggccatgcatggtatgggtaatgttgaggtggacatgtttgctggcatgctggaagacgtgaatgctgatgctgtgactcacatagcttagtgaagttgtcgcagccattcgggtctagatgaacatgattagcagtcttaccatgaactttagcgttcttataggatcaggccatatattgagcactatgctttcaatactaatattcttggtcgagctagacgtctgaaagaagcttacgaattacattagaacatggcagattctccaaatgaaatttttatgaggtacatcaatggtgcttggtatacacact

SEQ ID NO: 34224 - DNA, 333 bp, Glycine max
  Clone ID: LIB3052-012-Q1-N1-B7
cagaatcggcttcattacgtgattcctccttttctcttctcttctcttggttcaagttattacagtgttaaatttgaggggagtcatatttcttggttctgaaggccaccattatatggctgtacatacaaaattccgtcttattacttactcacaagagattgtagatggacagcctatttttgtctcttcaaactgtcttcctatcaaggctttgaaatttgaacctgcaggtcattctttccattctgctgcacttaaacttcttggtgttcaagaagattacaaagatgctgatgataaaaaagtggttgatgataaagaacaaacata

SEQ ID NO: 34225 - DNA, 322 bp, Glycine max
  Clone ID: LIB3052-012-Q1-N1-B8
aaaaaagaaagcacgttgaagattgtaacttgtaacgacaactatggctagcgatggcagcgaagagttcaggctagtgtcaccggcgttcaaaaacggggggaagttaccgaggcactacaccgacgatggtcagggtacgaagaagaacatatcccctccattggagtggtataaccttccggaggggacgaagactcttgccctcgtggtggaggatattgatgcgaccgattctggtgggcccatggtgccatggactcactgggtcgtcgcaaacatattggccacagtgaaaggcttttcggagggatttttcggc

SEQ ID NO: 34226 - DNA, 405 bp, Glycine max
  Clone ID: LIB3052-012-Q1-N1-B9
tagcgccagactgagaggaagagagagggagattctttgtttgctaccttctctcggaaaaatggttacgttcaggtttcaccagtaccaggtggttgggagggctcttcccacggaagcagatcagcaccccaagatctaccgaatgaagctctgggccaccaacgaggttcgcgccaagtccaagttctggtattttctgaggaaactgaaaaaggtgaagaagagcaatggccaagtgcttgccatcaacgagatttttgagaagaacccaaccaaaattaagaactatggtatatggttgcggtatcagagtaggactggttaccacaacatgtacaaggagtaccgtgacaccactctaaacggtgcagttgaggcaatgtacaatgaaatggcttctcg

SEQ ID NO: 34227 - DNA, 214 bp, Glycine max
  Clone ID: LIB3052-012-Q1-N1-C1
ccgctcgagctctccattggtccttaaacactcatcagtcatcagcatggccaaactagttttttccctttggtttctgcttttcaatggctgctgcttcgctttcagttccagagagcagcctcagcaaaacgagtgccagatccaaaaactcaatgcccctaaaccggataaccgtatagagtcagaaagagggctcattgagacatggaac

SEQ ID NO: 34228 - DNA, 402 bp, Glycine max
  Clone ID: LIB3052-012-Q1-N1-C10
atcataaaattcttccaccaagttatgggtttccttgtgttgcttcttttctccctcttaggtctctcttctagttccagcatatcaactcatcgttccatattggaccttgacctaaccaagtttaccacacagaaacaggtgtcttcactgttccaactatggaagagtgagcatggacgtgtctaccataaccacgaagaagaggcaaagagacttgagattttcaagaataacttgaactatatcagggacatgaatgcaaacagaaaatcaccccattctcatcgtttaggattgaacaagtttgctgacatcactcctcaagagttcagcaaaaagtacttccaagctcccaaggatgtgtcgcagcaaatcaaaatggccaacaagaaaatgaag

SEQ ID NO: 34229 - DNA, 397 bp, Glycine max
  Clone ID: LIB3052-012-Q1-N1-C12
caaaccttgctctatactacacagtacacacactagaagaataatggcttccatgctccactactttttagccctctctctttcttgctcttttcttttcttcttatccgactcagtcacccctacaaaaccaataaaccttgttgttctacccgttcaaaatgatggttccacagggctccattgggccaacctccaaaaaagaacccctctaatgcaagtaccagtcctggtggacctcaatggaaatcacttgtgggttaactgtgagcagcagtactcatccaaaacgtaccaagcacccttctgccactccacccaatgctctagagccaacacccaccaatgcctcagttgccccgcggcatcaaggccagggtgccacaaaaacacgtgt

SEQ ID NO: 34230 - DNA, 387 bp, Glycine max
  Clone ID: LIB3052-012-Q1-N1-C2
ctcgagccgaatcggctcgaggatcagtaacaagtacaatggtaagattcttcataacaaagagatcaacaacaacaccaacaatgaaagcaacaacacaaatgcaaccgacaaaaggtttaagaccttgcctgctgcggagacactcccgcgcaatgaggtgcttggaggatacatctttgtctgtaacaatgacacaatgcaagaagacttgaaacgtcagctatttggtttgccttcaaggtatcgagattctgttagggctataacacctgggttaccattatttctttataactatactactcatcagctgcatggtatttttgaagcagcaagttttggtggctctaacatagatccaactgcctgggaggattaaaaatg

SEQ ID NO: 34231 - DNA, 349 bp, Glycine max
  Clone ID: LIB3052-012-Q1-N1-C3
gttcaatatcctagtataccttaataaataatttaagatactatgatgagagcacggttcccattactgctgctgggacttgttttcctggcttcagtttctgtctcatttggcattgcttactgggaaaaagagaaccccaaacacaacaagtgtctccagagttgcaatagcgagagagactcgtacaggaaccaagcatgccacgctcgttgcaacctccttaaggtggagaaagaagaatgtgaagaaggtgaaattccacgaccacgaccacgaccactacacccggagagggaacctcatcaacccggtgagaaagaagaagacgcagatgagcaaccacgtt

SEQ ID NO: 34232 - DNA, 400 bp, Glycine max
  Clone ID: LIB3052-012-Q1-N1-C4
aagaatcccaggcgaggagaaagatggaggggaaggagcaggatgtgtcgttgggagcgaacaagttccccgagagacagccgattgggacggcggcgcagagccaagacgacggcaaggactaccaggagccggcgccggcgccgctggttgacccgacggagtttacgtcatggtcgttttacagagcagggatagcagagtttgtggccacttttctgtttctctacatcaccgtcttaaccgttatgggagtcgccggggctaagtctaagtgtagtaccgttgggattcaaggaatcgcttgggccttctgtggcatgatcttcgtcctcgtttactgcaccgctggcatcttatggggacacataaacccggcggtgacatttgtgctgctttt

SEQ ID NO: 34233 - DNA, 259 bp, Glycine max
  Clone ID: LIB3052-012-Q1-N1-C5
tctatgacatctcattcactcttacttaagtctcgtaactcctctcgatctccacttcccctaaattaatcccttacgtttcctagctaccttaccacctttccctatactaacatcacattatatctactctcatatcattatcatacctaactccctatgtactaattaacataccactcacaattcccactacaaccttactatcctcactcatactattccaacacctctccgcttactaattactctatctaac

SEQ ID NO: 34234 - DNA, 374 bp, Glycine max
  unsure (1)..(374): unsure at all n locations
  Clone ID: LIB3052-012-Q1-N1-C7
ggctagtactgatgcctctggggttgaaaatggcatgcctgagggtggagataagcctttgcaaaaggatactgataccaaggttcaggctccaaagaaaaaggttaagaaaacaaacattcctgtagcagagttagtttatggagcaatggtgcctgtggatgtccagaaagcactagaaaaggagtttgaaatggctttgcaagatcgtgtgatggaagaaacaaaagacaagaaaaatgcagttgaggcttatgtttatgacatgagaaacaagcttaatgacgaataccaagagtttgtcactgcttcagagagagatgattttactgctaaacttcangaagtggaagattggctttatgatgagggtg

SEQ ID NO: 34235 - DNA, 325 bp, Glycine max
  Clone ID: LIB3052-012-Q1-N1-C8
aaaaaaaacaaaaacaaaaaaaaaaaaaagaaaaaaaagaaaaaaaaaaaaaaaaaaaaaaaaaaaaaaagaaacaaatgccaacgaacaaccaaacgaaacaaaaaggcccaagaaaacaaacatggaccgtaccctactagcttaccgagcaaccgtacactgagcatgttcagaacgcactagtaaccatggtcataaattgcttcccaagatacaattgaatgccgataccaattacacacaaacattcaactccagactcataaattttacatcctaaactgcctaaaaggcgaactccctgaaattattaccgcttcac

SEQ ID NO: 34236 - DNA, 275 bp, Glycine max
  unsure (1)..(275): unsure at all n locations
  Clone ID: LIB3052-012-Q1-N1-D1
ctctcaacaccctgagctgaaatgcgccggtgtcactgtttccaaactcaccctcaaccgcaatggccttcacttgccatcttactcaccttatccccggatgatcatcatcgcccaagggaaaggagcacttggagttgcaattccaggatgtcctgagacgtttgaagagccacaagaacaatcaaacagaagaggctcaaagtcgcagaagcagcagctacaggacagtcaccagaagattcgtcacttcaatgaangagacgtactcgtga

SEQ ID NO: 34237 - DNA, 402 bp, Glycine max
  Clone ID: LIB3052-012-Q1-N1-D10
cacacaactactacaagtacttccttacaatcaaaaccaacaacaactatggcaagttatcaaaagcactacgatgatcagggtcgcaaggttgacgagtatggcaacgttgagaagcaaaccgacgaatacggcaaccctgttcatgctgctagtgtcacctatgtagccaccagaactgctgctggtggttacagtgatgacattaataagcaacatgataccaccaatgcctacggcgtagacactggtagacagcattctagtggtggctacgatggtgacactaataaacatcatggaactactggtggctataatgatgacaccaatagacatcatggaactaccggtgtctatggtatagacaccgataggcaacaacatgggactactggtggc

SEQ ID NO: 34238 - DNA, 408 bp, Glycine max
  Clone ID: LIB3052-012-Q1-N1-D11
cacacaactactacaagtacttccttacaatcgagaccagcaacaactatggcaagttatcaaaagcactacgatgatcagggtcgcaaggatgacgagtatggcaacgttgagaagcaaaccgacgaatacggcaaccctgttcatgctgctagtgtcacctatgtagccaccataactgctgctggtggttacagtgatgacattaataagcaacatgataccaccaatgcactacggcgtagacactggtagacagcattctagtggtggctacgatggtgacactaataaacatcatggaactactggtggctataatgatgacaccaatagacatcatggaactaccggtgtctatggtatacacaccgataggcaacaacatgggactactggtggctatgc

SEQ ID NO: 34239 - DNA, 405 bp, Glycine max
  Clone ID: LIB3052-012-Q1-N1-D12
ccactatctccaacggatatggtcgtttaactgaagttggtcctgacgatgatgaaaagagttggcttcaaagactcaatctcatgcttacctttaccaacatcacccagagatctatgagtactattcactacaactcacatgcaacgaagatagcactggtgatcgatggcagagggcatcttcaaatatcatgtccacacatgtcatcaaggtcgtcacactcgaagcatgataagagtagcccttcataccatagaatcagttccgatttgaagccctgaaatggtgtttgttgtccctcccggtcatcccttcgtcaccatagcttccaataaagagaatctcctcatgatttgcttcgaggttaacgctcgagacaacaagaagtttacatttgcaggg

SEQ ID NO: 34240 - DNA, 360 bp, Glycine max
  Clone ID: LIB3052-012-Q1-N1-D2
caatggcaggcgtttctctcaagtgcggtgactgcggggctctgctgagaaccgtagaagaagcgcaagagcacgctgaactcacctaccactccaacttctgcgaatccaccgaaccggttctcaacctcatctgcaccgcttgctccaaaccctgccgatccaaaaccgagagtgatttgcacacgaaaagaaccggccataccgagttcgttgacaagacttccgaggccgttaaaccgattagtttggaggctccgaaggtggatgcaactgcttcatcggaaaaccctttcgctgctgcatccactgaccaaaatgaagaaatggttgttcctgaagtggacaaaaagctgcttg

SEQ ID NO: 34241 - DNA, 284 bp, Glycine max
  Clone ID: LIB3052-012-Q1-N1-D3
tagattttctagtatataggtttaatgtatgtagccggtgccccataactgactttggtataatgggaactggttagtgtacaaagcaatatatagagaagacactgaaaatacatgtataaaaaaaaaaaaaaaaaaaaaaaaaaaaaaaaaaaaaaaaaaaaaaaaaaaaaaaaaaaaaaaaaaaaaaaaagaaaagaacatacaaaaaaaaaaaaacaagaattaaaaagacgataaaaacgattagaaaggaagctaaaaaaagaagatgcgggtgcccc

SEQ ID NO: 34242 - DNA, 341 bp, Glycine max
  Clone ID: LIB3052-012-Q1-N1-D4
caaatatatagctacgagggaacttcttcagtcattgctagctagctcactaatcactatatatacgacatgctacaagtgaagtgaccatatcttaatttcaaatcataaaattcttccaccaagttatgggtttccttgtgttgcttcttttctccctcttaggtctctcttctagttccagcatatcaactcatcgttccatattggaccttgacctaaccaagtttaccacacagaaacaggtgtcttcactgttccaactatggaagagtgagcatggacgtgtctaccataaccacgaagaagaagcaaagagacttgagattttcaagaataac

SEQ ID NO: 34243 - DNA, 349 bp, Glycine max
  Clone ID: LIB3052-012-Q1-N1-D5
tctctccattggtccttaaacactcatcagtcatcaccatggccaagctagttttttccctttgttttctgcttttcagtggctgctgcttcgctttcagttccagagagcagcctcagcaaaacgagtgccagatccaaaaactcaatgccctcaaaccggataaccgtatagagtcagaaggagggctcattgagacatggaaccctaacaacaagccattccagtgtgccggtgttgccctctctcgctgcaccctcaaccgcaacgcccttcgtagaccttcctacaccaacggtccccaggaaatctacattcaacaaggtaagggtatttttggcatgatata

SEQ ID NO: 34244 - DNA, 344 bp, Glycine max
  Clone ID: LIB3052-012-Q1-N1-D6
gatgtggggctctgaatcccaaggccgattactgtcgatcccaacaaaacctaacccagatgatgctcctgcctctgctcgttggctcgtctccctcaatttctggggagtcttgaatactatctcatctgatttgggtggagctccctttgggaatgtggtatcatatagtgatggactacctaacgaaagcactggaatcccatacttttacttgacaactctagacccgacagcaagaaatgcactgcaagatgataaagcttcattcacggtcagtgaataccctcttgggacctgtggcaggagagacccaatgaaccctacttgttccaaaatttctc

SEQ ID NO: 34245 - DNA, 389 bp, Glycine max
  Clone ID: LIB3052-012-Q1-N1-D7
ctttgaacactcatcaccatggccaagcttgttcttgccctttgtttccttcttttcagtggctgcttcgctctgagagagcaggcacagcaaaatgagtgccagatccaaaagctgaatgccctcaaaccggataaccgtatagagtcggaaggtgggttcattgagacctggaaccctaacaacaagccattccagtgtgccggtgttgccctctctcgctgcacccttaaccgcaatgcccttcgtagaccttcctacaccaacggtccccaggaaatctacatacaacaaggtaatggtatttttggcatgatattcccgggttgtcctagcacttatcaagagccgcaagaatctcagcaacgaggacgaagccagaggcccca

SEQ ID NO: 34246 - DNA, 397 bp, Glycine max
  Clone ID: LIB3052-012-Q1-N1-D9
tatacacacacacacacacactaagaataatggcttctatgctccactactttttagccctctctctttctttctctttccttttcttcttatccgactccgtccccattccccaacaccacactaaccctacaaaacctataaaccttctggttctacccgttcaaaatgatgcttccacagggctccattgggccaacctccaaaaaaggacccctctaatgcaagtaccagtcctggtggacctcaatggaaaccacttgtgggttaactgtgagcaacactactcatccaaaacataccaagcacccttctgccactccacccaatgctccagagccaacactcaccaatgcctcagttgcccagcggcatcaaggccagggtgccacaaaaa

SEQ ID NO: 34247 - DNA, 359 bp, Glycine max
  Clone ID: LIB3052-012-Q1-N1-E1
gctacctagagcttgcacctattggtatcttctacaatatcctagagtgtttttcttcttcttcatcaccatgtctttactttcagacctcatcaacctcaatctctcagaatccacagaaaagatcattgctgagtacatatgggttggtggatctggtatggacctcagaagcaaagccaggactcttcctgggccagtgagtgaccctgcaaaacttccgaagtggaactatgatgggtctagcacagatcaagctccaggggatgacagtgaagtcattctatacccacaagctattttcaaggacccctttaggagaggaaacaatattcttgtcatttgtgatgtgtacaccc

SEQ ID NO: 34248 - DNA, 394 bp, Glycine max
  Clone ID: LIB3052-012-Q1-N1-E11
agagataggagacaaaatttacatggatatagtaagtcttgcttgggctgctttaatggtagttttttcattttctctttccctcgtagtatggggaagaagtggactatagggatactcaaaattgagttaagggatcaaagtacccattttgttttctacttgggtttttcaatttcttaactttaactattgaattaaagtatttcatttatactaattaattgagttcaaatataaacaaatataaaatagatctgcatttcagggttctattatattctagtagtgtaatgtattctatgtatatgtatattatagaaattgaaaatactctttcaatcaaacaaagatttgaattatatctatattcgtattttgagaaaatcaagag

SEQ ID NO: 34249 - DNA, 400 bp, Glycine max
  Clone ID: LIB3052-012-Q1-N1-E12
agaaagtcttccatagccccccaaaaatgaagagcaccatcttctttgctctctttctcttttgtgccttcaccacctcatacctaccttcagccatcgctgatttcgtgctcgataatgaaggtaaccctcttgaaaatggtggcacatattatatcttgtcagacataacagcatttggtggaataagagcagccccaacgggaaatgaaagatgccctctcactgtggtgcaatctcgcaatgagctcgacaaagggattggaacaatcatctcgtccccatatcgaatccgttttatcgccgaaggccatcctttgagccttaagttcgattcatttgcagttataatgctgtgtgttggaattcctaccgagtggtctgttgtggaggatctacc

SEQ ID NO: 34250 - DNA, 223 bp, Glycine max
  Clone ID: LIB3052-012-Q1-N1-E2
gaaaaatctttccttacacttgccctagagatgagtcaaggctgtgctcaatctgatgcacggctacttctgagaaggctgaagtctcttaacccttcacaagttcaaagacctacgggtccaattgaattatccccgcaattacttgaatggctagcatttgctaagttggctggtacaaaagttgcgctcaaaattgtcacaccgaccaagcccataaaat

SEQ ID NO: 34251 - DNA, 414 bp, Glycine max
  Clone ID: LIB3052-012-Q1-N1-E3
gttctagttcttcttcgtcgttatcttcttcttttgttgtttgtgtgtttgttttttctctcacctgaaaatgtcttgctgcggtggtaactgtggttgctgaagcgcctgctagtgctgcaacggctgcagaggctgcaagatgtacccagacttgagctacaccgagtcaaccaccaccgagaccttggtcatgggagtggcaccagttaaagctcaattcgagagtgctgaaatgggtgttcccgctgagaacgatggctgcaaatgtggagctaactgcacctgcaacccctgcacttgcaagtgaagtgttggagagctaaagcttcaagcataaatggcccttataaataatgagtaaaactatatgtagtttcaaaacttcaaaattatgtagtatgtattatgttg

SEQ ID NO: 34252 - DNA, 309 bp, Glycine max
  Clone ID: LIB3052-012-Q1-N1-E4
acttcattgtgagtgtattttaatcttctttgtgttgattcattgtttctccctaaaccaaccctctctttgtccctcttcttccgtaaatcttaattaaacacccctcaaggcctcaaccaaaaaacaaaaagcatgaaaaagctcaatctaatacttagtaagtgcaagagcttgtcaaggcatctaggaagatcttcatcatttaatagcctaaggtccaagtttgctaaggaagagttacgggaaggaaatggcatgcaagaaggtgaacattgtgaaactgtattatttgttggcagcacaagg

SEQ ID NO: 34253 - DNA, 352 bp, Glycine max
  Clone ID: LIB3052-012-Q1-N1-E5
ttgaatcaaacagtgaaagtaaaacattgtgcaattaatcatcaactgcaagtagccagtgcataagatcaatggcgtcaagacagcaattcaaggaagacagagccgaggcagctgcaaaactcgcagcgaaagacatcggcgacatcaacagaacaaacgagcgcgacgaggggtacgacttgcacgacgaagccaacttcaagcaagcacgagctgaagcagctgcaaagctggcggccaaagatctggaagacgctaacagattaagagacaacactttcaacacatggaaagagcaacatcagcatgatgagaacaaacccggtgtgatagggtccatgtttagagc

SEQ ID NO: 34254 - DNA, 334 bp, Glycine max
  Clone ID: LIB3052-012-Q1-N1-E6
actccactccatctccatggaggaacacataaaagaagggttttttttgcccacaccagttgctaaactaatatcctttcaaacggatttgatctataatggcctggtttctctcttttcccctatccactctcttttctccgtggcttctaagtcctaccaccgtgctgaagagaccaaagacagtgttgaatcagcagtgcaacgtgctctttctcatcaaatcactcatggcagcgcactcttgctgaagaaacttggactttgctttctgagcgttgcgtatatgtgcatagttatgaatttggctcttattatcgctgctgttgtggga

SEQ ID NO: 34255 - DNA, 307 bp, Glycine max
  Clone ID: LIB3052-012-Q1-N1-E7
ctgagaaaagatcatctacaagtcacaaggtttcaaaatctagtgcaagtgctgcagacggatctcggggatcaaaggctgcggttgtacccaatgaagtagctgtggaaaaagcaattcatcaaccacctcctgctgatttgcttgacttggatgaaccaactgtcactacggctcctccttctgtggacccattcaaggaattggaaggacttcttgacccaagcactaattctgcaacaaatcataatgtagctgctgctacaaatgcccctgatattatgtcactctatgccgagactactgt

SEQ ID NO: 34256 - DNA, 332 bp, Glycine max
  Clone ID: LIB3052-012-Q1-N1-E8
gggcaccattcctcagtccatttcacagcgaactgtgtggaatcaaatggcaacagtgagaacaccattgaattttgattctagcaagcagagcttttgtcaattttctatcgaccttctcggtggaggaattttagtggacaaaactggagattggatcacacttatacaaaattctccaattagtaacttgttgagagttgctgcttggaagaaaggctgtttaatggtcaagattgtgatgtctgggaatgcagcagtcaaaaagagtgattgggcctcattggtacaagtgtttttaacaaaaaacatcagttcaaaacatttttatg

SEQ ID NO: 34257 - DNA, 369 bp, Glycine max
  Clone ID: LIB3052-012-Q1-N1-E9
tcaatatcctagtacaccgtattaaagaatttaagatatactatgatgagagcgcggttcccattactgttgctgggagttgttttcctggcatcagtttctgtctcatttggcattgcgtattgggaaaagcagaaccccagtcacaacaagtgccttcgaagttgcaatagcgagaaagactcctacaggaaccaagcatgccacgctcgttgcaacctgcttaaggtggaggaagaagaagaatgcgaagaaggtcaaattccacgaccacgaccacaacacccggagagggaacgttagcaacacggtgagaaggaggaagacgaacgtgagcagacacgtgcattcccattcccacgcccacgc

SEQ ID NO: 34258 - DNA, 345 bp, Glycine max
  Clone ID: LIB3052-012-Q1-N1-F1
ctggagtggaacgccactttggaatgctggaactggggcagtgtcaataggatccaatgcttgcctttcgccgacttcctcgactaataacagttgctgctcaggcaatggctcaccaacacttggaaaacacactagagatacagtttgcactgatgaagagaaatcagaaaagtgtgttttggttccaaagaccattagaattgatgccccaaatgagggcctcaaaagtcctataataagagctacattagctatcaagcttgataagcagcaatttgtatcaaatggtgatattttgaaaaaaattgaaccaaaagaaggcaaagatcgtgtgttgggtgc

SEQ ID NO: 34259 - DNA, 361 bp, Glycine max
  Clone ID: LIB3052-012-Q1-N1-F10
agacaaacactgccaacgcccccgaggaagccaaagcaaaagcagaagaaatggcattgacgagaccatatgcaccatgagacttcgccacaacattggccagacttcatcacctgacatctacaaccctcaagccggtagcgtcacaaccgccaccagccttgacttcccagccctctcgtggctcagactcagtgctgagtttggatctctccgcaagaatgcaatgttcgtgccacactacaacctgaacgcgaacagcataatatacgcattgaatggacgggcattgatacaagtggtgaattgcaacggtgagagagtgtttgatggagagctgcaagaaggacgggtgctgatc

SEQ ID NO: 34260 - DNA, 409 bp, Glycine max
  Clone ID: LIB3052-012-Q1-N1-F11
ctcgagccgaatcggctcgaggacttgcctcctcacatgcctaccatagtcaaaccatcatcagaaaccgaggcttcggatatgcgattggctaaagtcaaggttgatgctgatttcaatgctccttgtgacccctccatcctttatcctgctgagggcaacatgcattggttcacggcagtgacagcttgcgcagttttagatgtgcagtgccttccatcaggatcagagtatggagggcactgcacatactaccagaatttccctttctccagctattcagatggactatccataccagaggaggaaagaacagcatatgaatggcttcaagagaaggagaaacctgagaatctaaaagtagttgtaaagatgtacagcggccccaaaaattgtggagaactaatgt

SEQ ID NO: 34261 - DNA, 304 bp, Glycine max
  unsure (1)..(304): unsure at all n locations
  Clone ID: LIB3052-012-Q1-N1-F12
ctttctcagtttctctctctagaaaaaccaaacctcgctactctcttctccctttttttttgtagttctttccttatttggccttcacactccgaactgcgaaatccttttttagcaaaaaaaaaaaaaaaaaagagtgagagagcgtgagacagagagagtggtcatcagtcatcaccgttgattgattaagatgcagcaatcaaacggctctgattcgtccacgacggagcagaaagcgccgncgccgaggcaatcaccggcggtggcgaggccgcagcaatggctgccgatgcagtaccct

SEQ ID NO: 34262 - DNA, 343 bp, Glycine max
  Clone ID: LIB3052-012-Q1-N1-F2
tctcggtgaattccaattccacattttcaagaaataaggaggcataggtgttcatagatgaattggaattatttgttttcttattaggcctatcctgaagccaaaggaaatgagatcggaattcctcggggaattccaattccacattttcaagaaataaggaggcaaaaatgttcatatatgaattggaattatttgttttcttattaggcctatcctgaagccaaaggaaatgagatcggaattcctcggggaattccaattccacattttcaagaaataaggaggcaaaaatgttcatatatgaattggaattatttggtttcttattaggcctattctg

SEQ ID NO: 34263 - DNA, 337 bp, Glycine max
  Clone ID: LIB3052-012-Q1-N1-F3
agattattctagaggcctcatacgacaccaaattcggggagatagacaaggttctgtttggtagagaggaggggcagcaacaaggggaggagaggctgcaagagagtgtgattgtggaaatctcaaagaaacaaattcgggaactgagcaaacatgccaaatctagttcaaggaaaaccatttcttctgaagataaacctttcaacttgagaagccgcgaccccatctattccaacaagcttggcaagttgtttgagattaccccagagaaaaaccctcagcttcgggacttggatgtcttcctcagtgttgtggatatgaacgagggagctctttt

SEQ ID NO: 34264 - DNA, 367 bp, Glycine max
  Clone ID: LIB3052-012-Q1-N1-F4
ctcgagccggtttcagacccttattgacctttctgtgatagaaagcttgtcaaggcatgcatctgatgaggtgtaccttggggagagggacaatccaaattggacatctgatacaagagcattagaggcttttaaaaggtttggaaataaactggcacaaattgagaataaactctcagagagaaacaacgatgagaaactgagaaaccgttgtggaccagttcaaatgccttatactctgcttttgccttctagtaaggaaggattaactttcagaggaattcccaacagtatctctatctgaagaggtttgtggttccttaaaaattgtggcttttaataaaagattgaagagaaggaatctgaa

SEQ ID NO: 34265 - DNA, 134 bp, Glycine max
  Clone ID: LIB3052-012-Q1-N1-F6
cgattttggttgttatacattttcatccgttggttcgcttgtttgagaaaatattaagtggtgacatattatgtttttgtgaatcttgatactttaaaatatccagattttccattaaataatttttgatgatc

SEQ ID NO: 34266 - DNA, 369 bp, Glycine max
  Clone ID: LIB3052-012-Q1-N1-F7
gttctaagaaaccttaaaaaacaagtagtgttccgaagagatggctcagcaggaagtggtagaagggttcaagttcgaacagaggcacgggaaagagcgcgtgagagtggcgcgcgtgtggaagacgaggcaggggcagcacttcgttgtggagtggcgcgtgggcatcactctcttctcagactgcgtcaactcgtatctccgcgatgacaactctgacatcgttgctactgataccatgaaaaacacagtgtatgcaaaagcaaaggaatgctcagacatactctctgctgaggactttgctattttgcttgctaagcactttgtatcattttacaagaaggttactggtgctattgtgaatattgt

SEQ ID NO: 34267 - DNA, 271 bp, Glycine max
  Clone ID: LIB3052-012-Q1-N1-F8
agacatctccgacgtggcgaggaacgaaggcgtgagcgtgaccgaaaccaaagtgggctgccaccgcgtcatcacggagttcgtgggaagacacgtggtggggcagttcgtggagcccgacgtccccatgaacaccccaggcaccgcgctggagcgtgacgccataaccatcggcgaggctctcgaggcatcggcgatagccggagcaagcgacaagccggtggatgaaagcgacgccgtcgcgatacaagctgcggagatgagagcgaca

SEQ ID NO: 34268 - DNA, 399 bp, Glycine max
  Clone ID: LIB3052-012-Q1-N1-F9
aagaaaagccatttccatagcagcctaagaaaatgaagagcactagcttgttcgctatctttctactttgcgccttcacctcatacctaccttccgccaccgcccaggacgtgctcgacgtggatggcgatccgattcggaacggtttcatatactacgttttgccggcaataagaggaaacggtggcggaatagaacgagccgcactcgggaaagacacttgccctatcactgtagtgcaatctcccaatccaaactctaaggggttagaaattaagtttgaatctgcataccccgcctattacataaacgaaaccctaattttgcaaataaagttcagttacccacagcagtgtgaaagaaagaatccttggtgggccatttctaaggatatatctg

SEQ ID NO: 34269 - DNA, 329 bp, Glycine max
  Clone ID: LIB3052-012-Q1-N1-G1
gcagcatcataagccatagcagcttcatggctctgatgccaaactgcaatttaccagaactctctatcaaatctcaatctcagtgtccaccaccatcaccaccaccaccttcttctgttaccaacaacactcaaatggaaaacctgcagcagattcaaaacatttacatagacatggctacgtgttctaatttcaacaacatcaataatccagaagtatccatggcctctcagcatgttggagttggaccaatttacaccagtgactccatcgtgtctcttcccttggacaccaatcccaagcctgtggagaatgaggtcgagtttcgt

SEQ ID NO: 34270 - DNA, 405 bp, Glycine max
  Clone ID: LIB3052-012-Q1-N1-G10
gtaattgccgagattcgcgcaggaacatacacttttaatggaaaagaaaaagttcgaaaacatgtctattctgacttagaaggagaaatgcattggagtaccgatgtgtaccatgcatcagaatttagatatagtaatgtccatatcttaccaaaaacaagtcatttatggattttatcaggaaaatcatacaggtccggttcagtctctttttcaatccgaaaagatcaagatcaaatgaacattcattatctttctactggagaaagagatttttgtaaccttttagcaagtaaaaaaaaagtaagacataaattgtttcgtttcaatccttctgataaaaaagaaagaaggatttcagattattcaatatttaatcaaatcatatctatagatcattgtcat

SEQ ID NO: 34271 - DNA, 401 bp, Glycine max
  unsure (1)..(401): unsure at all n locations
  Clone ID: LIB3052-012-Q1-N1-G11
ttcttctcttgcggctagggttttagcgcagcttcttctagatttaaggaagatgggtaaggaaaaggttcacatcagtattgtggtcattggccatgtcgactctgggaaatccactaccactggtcacctgatttacaagcttggaggcattgacaagcgtgttattgagaggtttgagaaggaagctgctgagatgaacaagaggtctttcaagtatgcctgggtgctggacaaacttaaggctgagcgtgaaagaggaatcaccattgatattgctttgtggaagtttgaaacaacaaagtattattgcacagttattgatgcgcctggacatagggatttcattaagaatatgattactgggacatcccaagctgactgtgctgntcttatcattg

SEQ ID NO: 34272 - DNA, 332 bp, Glycine max
  Clone ID: LIB3052-012-Q1-N1-G12
tcgtgccacactacaccctgaacgcgaacagcataatatacgcattgaatgggcgggcattggtacaagtggtgaattgcaatggtgagagagtgtttgatggagagctgcaagagggaggggtgctgatcgttccacaaaactttgctgtggctgcaaaatcccagagcgataactttgagtatgtgtcattcaagaccaatgatagaccctcgatcggaaaccttgcaggggcaaactcattgttgaacgcattgccagaggaagtgattcagcacacttttaacctaaagagccagcaggccaggcaggtgaagaacaacaaccctttc

SEQ ID NO: 34273 - DNA, 309 bp, Glycine max
  Clone ID: LIB3052-012-Q1-N1-G2
gccatattttagtggttctaaattgaaaagtttcctagctagtcagaacatcaccattactgatggaattgacaaaactagtgcaactttacagtttagaaagttgtcagagtgtgattttcttaaaagaaattttaagcaaatgtccaatgttttgtgggtagctcctgaagacaaagctagtttgtggtcacaattacactatgtttcatgtaacaatttggaaatgcaagaagcttatcttgttaacctggttaatgtgttgcgtgagttgtacctgcacagtccaaaaaaagctcgtcaattgag

SEQ ID NO: 34274 - DNA, 367 bp, Glycine max
  Clone ID: LIB3052-012-Q1-N1-G3
ctctagggttcccaaaattcgtgagagatctctctcgccgcaccgctccgctggaaccatgatctctgcacaggacgactaccaccgccactaccacttccagccgcagcttcccaactctattgacacctctcggtagcagttcaccgcggatcgcttcgagctcttcttgtaaagtaggaacccgcgtccttcactcttttgccattacatgatcatgattctagtgaagcctattcatagttgcttgccattgttccttttagttggtaaagcttgcctttgttacgggaatatggccaatgcatggaagcacaaaatatagaaatgctttccgcatgctgggtgatcagttagctcttgcttc

SEQ ID NO: 34275 - DNA, 370 bp, Glycine max
  Clone ID: LIB3052-012-Q1-N1-G5
gtagaaaagaaggcattaggttaagagtgaaggcagtgagcgaaagagagcatagtaatacttactgagtgcttacagttgctgcgtcgcaaggtaccggcggcgacggagaactatcttctcaattttcgatcactgcattggttctgttgacaagggttttgttcttcctgacttgcatacttgatggcttcaaagttgcagaagttgcaggccacagcatctcaagcgtctcaatttgtatccagtcgtggaactaactactacaagcaattgctggaacagaacaagcaacacattcaggagcctcctacagtagagaaatgcaacctgttggcaaagcaattgttttacactcgccttgctagta

SEQ ID NO: 34276 - DNA, 282 bp, Glycine max
  unsure (1)..(282): unsure at all n locations
  Clone ID: LIB3052-012-Q1-N1-G6
attcaaaccttgctctatactacacagtgcacacacgggaagaataatggcttccatcctccactactttttagccctctctctttcttgctcttttcttttcttcttatccgactcagtcacccctacaaaaccaataaaccttgttgttctacccgttcaaaatgatggttccacagggctccattgggccaacctncaaaaaagaacccctctaatgcaagtaccagtcctggtggacctcaatggaaatcacttgtgggttaactgtgagcagcagta

SEQ ID NO: 34277 - DNA, 392 bp, Glycine max
  Clone ID: LIB3052-012-Q1-N1-G7
aggagcagtatttggctgtttagttgaagcacctctgagatcatccagcaagaaaaaataccagggaacaaacaatacgtttgttttcacaaatatctctggtcatcctgttatatatcgtccaacaggagtaaaccgctttttcacactttgcaacactgactacatagcaattggtggaggaggtcattttgcgctttatttggatggtgatctattgaatggttcaagttcagtctcggaaacgtatgggaatccatgccttgcaaattctcaagactttgaagtgaaggaagtagagttatggggctttgtatatgcttcaaaaaatgaggaagtacttgcaatgagcaaaacagaagcacctgggatctgccgattctgaatattta

SEQ ID NO: 34278 - DNA, 309 bp, Glycine max
  Clone ID: LIB3052-012-Q1-N1-G8
caataattccttcacttgcagaacttaggtctctgttgcatcatcatcatcttcattagtgttagccctaaacttcaccttcaaccatgaccacagtgccaccacacagtgtccaagtgcacacaacaacacaccgttacgaagccggcgtcgtcccgccggctcgttttgaggcgccgcgttacgaagccggcatcaaggcgccctctttcatttaccattccgagagaggtccgacgacctctcaagttctcgcagttgtcgccggcctttcggtcggcggcatactcctgctcctggcaggactga

SEQ ID NO: 34279 - DNA, 380 bp, Glycine max
  Clone ID: LIB3052-012-Q1-N1-G9
gagagagagagagagagagagaaaacaacaacaaacctcatgaccacacagagtagtagagagagagagagaaaaaaaaagagagtccgttagttaatttcagtttatttattttatatttttaaaaagaagagaaaaagcaatggtgacagaggaagaaatatctgaagcggttcagtctctgctgcgggaatcaaaccctagtagattcacgacgctaaaccaggtggtggaggagctccaggccaagctcggccacgacctcactcacaaaatcgatttcatcaccgcgcagatcaaccttctttttggatcccgacaaccgtaacaaccgccgcaaaacccgcataggcagttacaacagcctaaggaccattttg

SEQ ID NO: 34280 - DNA, 242 bp, Glycine max
  Clone ID: LIB3052-012-Q1-N1-H1
acttaatttccacttctaattaacaaagttaagcaagcattgacgtggtacctataagtagtaatggctgtggctttgacgattgtgttgagcttgctctcggttctctcttctgcatcttgtgcacgaatggtgggggggaagacggaggtccccgacgtgagaacaaacagggaagtgcaagagcttggaaagttcgcggtggaggagtacaaccgcggtttggaacagtggaaagaaca

SEQ ID NO: 34281 - DNA, 360 bp, Glycine max
  Clone ID: LIB3052-012-Q1-N1-H10
ctcgagccgattcggctcgagggcaccttactctcctccctcttcatcaacgcacagcttcttcttcttctcatgccttcatagcttcctctcctctccctctttttccacatcttgtttcctaccccagcttctctttctctctgtttcgtccactctcttcatctgcacctgctacattgatggaggtggtcaaagcaattgccaagcacgaacctgcagctcctgaaagtgttgctatcagagctgatcagaagagttatagttacaagcaactcatcacatcggcacagaagatatctaatctcttgtgtggcagtgatgcacagacaggaaatctcggtggagctcgaataggaa

SEQ ID NO: 34282 - DNA, 361 bp, Glycine max
  Clone ID: LIB3052-012-Q1-N1-H12
gagaaaggagtgaaccaagattgctgcatggtgtgggaggaatttggatgccaagaggacatgatattttgtgggatatttgatgggcatggaccatggggtcactttgtggccaaaagaataagagagtcaatgccaccatctttgctatgcaactggcaggagacattagcccaaacttcaattgatcatccggctattgatgtagaggaagagaaaagtaaacattacagattcaacatatggaagcattcttacttgaagacttgtgctgccattgatcaagaactagagcaatatcgcaagatagactcgttttacagtggaacaactgccctatcaattgttagacagggtgaac

SEQ ID NO: 34283 - DNA, 265 bp, Glycine max
  Clone ID: LIB3052-012-Q1-N1-H2
tagagcgaaagcgtgacaccaccaaaaaccgaactgtgcccagatctctctctctctctctctcttccaacaatccaaatccaaatccaaaaccctaccaacaccacactcaatcgatcgatggggcagaagtctctgatctacgcgttcgtgtcgcggggaactgtgattctcgcggagtacacggaattcagcggaaacttcaacttcatcgcctttcagtgccttcagaagctccctgtcaccaacaacaagttcacctaca

SEQ ID NO: 34284 - DNA, 185 bp, Glycine max
  Clone ID: LIB3052-012-Q1-N1-H3
tagggtttccagagttttccaacttatcaatccacacagcttcatgcattcagagaaagaacaaaaatgatcgagctgttcctgtcggaaccgaattggaacgacgtcgtaaacgacgacgattcaactcgttcgagaatcttcattctcaacgacttggaaaccgttatttggtctacggtggg

SEQ ID NO: 34285 - DNA, 357 bp, Glycine max
  Clone ID: LIB3052-012-Q1-N1-H5
gccacattgtggagtgctgcacattatgggactgatgtaactgtggagggaaccaaggctgcaacaaatgttgttaagggagttgctgagtatgcaggacagaaggcttctgagcttgcagctatgtcagtggatactgctaaaggtttagctgctgctgcagctggggagaatgccaaggagtacactgcaaggaagaaggtggaagctgagatggatttggaggccaaaagggaagctcaaaatcaggaatcgaaggagtggccatcagcaaaatccaccactgagagcattcaaagaggacaaggacaacaagatcagcatgagcaacgagaaaaatgggaacatggtgcacaa

SEQ ID NO: 34286 - DNA, 228 bp, Glycine max
  Clone ID: LIB3052-012-Q1-N1-H6
ctgttccaccaccacaacaaatccctgtgcctccctgtggaattgactctgtccaaccaactggctgggaataaactagtgttttttgatgctatgattttgccctgtccttcaatttagttgtctttcttagaagtaaaatatggatcagtttttttgtagcaaagcaacttggttttttttttttctagtttgttatgagtggcaaaatattatttttaacatggt

SEQ ID NO: 34287 - DNA, 409 bp, Glycine max
  Clone ID: LIB3052-012-Q1-N1-H7
gtggtgttagatctgtacccgcctagccgttgatttggaaaagtccaagcttcagagatgagtaagcttcagagtgatgctcttagagaagctatctcaggaatcatgactgattccaaggaaaagaacaggaaatttgtggagaccatcgaactgcaaattgggctgaaaaactatgatccccacatggacaagcgctttagtggctctgctaagttgcctcacattcctcgccccaagatgaagatttgtatgcttggagatgcccaacacgttgaagaggctgagaagataggattggactacatggatgttgaggccttggagaagcttaacaaagaccagaaattggtgaaaaaactagcccaaaaatatcatgcctttttggcctctgaagcactcatcaagc

SEQ ID NO: 34288 - DNA, 344 bp, Glycine max
  Clone ID: LIB3052-012-Q1-N1-H8
ggagcaggtaaagcttttccaaacaagattgtttttgatgataaacttgtgctggctaacacacaagaattctttgctggaaattttccagtggattcttggttaccaatttttgtgaattgtctttatcctgtaagtcaattaccttcagaagctgtcgttgtaaatgttacatgtggtagtggacgtggtggtttacctaccactgcttggattagttctgcagttaacaatcgctcctcagatatcaacaaaaagattcgcacagcactttggaaaaggtagaaaattgtttttcttactaaaggtgatcctttttcagtagctctactggctgttctttt

SEQ ID NO: 34289 - DNA, 408 bp, Glycine max
  Clone ID: LIB3052-012-Q1-N1-H9
ggcgggggttgatttggaagaaacccagctaaggtaattcgtcgcaacccctaactaaaccttcaaaggatcatcatgggcagtcacaatgctttggctgccactttcggaatattaggtaattaaccacctacacgtgctcatcatcgatcattgctatctttctttctttctttccctttcttgtttcttgcatcttggtttctagatagctatttattgatatgcatgcgcaccaatttactctaagttctttaattaagtagatgtccgttcgtgtgcatgtgctgccttatctcctctcctctgcatttgcaattctcctccaatccattttttccatctttgtatctcacttacaattcgggtcatgcaattttaattcattattttttgtgtgtgtgtgtg

SEQ ID NO: 34290 - DNA, 258 bp, Glycine max
  Clone ID: LIB3052-013-Q1-N1-A1
caaaagtgttccacttgagtgaaaagtagtgtgttaagaactaaacaatttttcaatggcgtccaagaaacaagaggagcgagctgaggcagctgcgaaagttgctgccaaagaactcgaacaagtcaacagagaaagaagagaccgtgatttcggtgttgttgctgaacaacaacaacaacatcatcaggaagatcaacaaaaacgtggtgtaatcgggtccatgtttaaggcggtgcaagacacctacgagaacgc

SEQ ID NO: 34291 - DNA, 328 bp, Glycine max
  Clone ID: LIB3052-013-Q1-N1-A10
ggcagtctcttttcgggcaacaactgggccaaggggcactacacggtgggcccctagctaatcgactccgtcattgacgtcgtgcgcaaggaggcccaaacctgcgactgccttcaaggtttccaggtctgccactcgctcggcggaggaaccggctcctggatggggacacttttgatttccaagatcattgaggactaccctgacagaatgatgctcaccttatccgaggttccttatcccaaggtctatgatactgtggttgagccttataacgctactgtttccgttcatcagttggcctagaatgctgatgagagtatggtgc

SEQ ID NO: 34292 - DNA, 413 bp, Glycine max
  Clone ID: LIB3052-013-Q1-N1-A11
agcaactgtggcttacaagcactggacccctttactcggaaggcctaagtcccaaaaccacggttaacccaaacaccacaatcaaccccatcaacaccttgagaccctgcctaaggaggaggtgggaactataactcaccagcaacttatgggggtggtagccctccaacaccaatcactgtgagcccaccttcaacccgatttgaccccggcacccggactataccctacacacccgcttaccttgcttacgcaactcccttcactggtacatgcaactactggaacactcacccaggaatcatttggggattgctaggctggtggggaaccttaggccatgcatttggtgtctctagtatgccaggatttggtgccagtctcagcttgccacaagcactttgcaacactag

SEQ ID NO: 34293 - DNA, 233 bp, Glycine max
  unsure (1)..(233): unsure at all n locations
  Clone ID: LIB3052-013-Q1-N1-A2
gcagaatgactcaattcacaatcctgctcatctctctactcttctgcatcgcccacacttgcagcgcctccaaatggcagcaccagcaagatagctgccgcaagcagctccagggggtgaacctaacgccctgcgagaagcacatcatggagaagatccaaggccgcggcgatgacgatgatgatgatgacgacgacaatcacattctcaggaccatgcggngaagaatcaac

SEQ ID NO: 34294 - DNA, 403 bp, Glycine max
  unsure (1)..(403): unsure at all n locations
  Clone ID: LIB3052-013-Q1-N1-A3
aatgatttcacatccaccctacactgagtatgtctccacacgatggtatcgtgctcctgaagtgctgcttcagtcttatatgtatacctgtaaagttgatatgtgggcaatgggtgctataatggctgagctttgctctcttcgtactcttttcccaggtgccagtgaagcgtatgagatttacaaagtatgtggcgtgataggcaatccaacctttgaatcatgggcggatggactcaaacttgcaagggatattaactaccagtttccacagcttgccggtgtgcatctntctgctttgattccgtctgctagagatgatgcaatcagccttattacatcactttgctcctgggatccctgcaagaggccaacagcttcagaggctcttcaacatcctttc

SEQ ID NO: 34295 - DNA, 280 bp, Glycine max
  Clone ID: LIB3052-013-Q1-N1-A4
gtcttccaccagcagagcaaacctctttgagcggacgccgagacccttgtcagtgacgagagttcaccatctgcagggctgaagagatcatcaaggccctttaaaacccttgaatcctcttgatggctgattaactgtctttaatgcgtggtgtgagactcttttgatgcaagaatatactaggaaccttttccttttcataaatgtaattggagttgtgtgctctgggaagggccatgatatggagcatattatggaaataaataagatttcttggttc

SEQ ID NO: 34296 - DNA, 242 bp, Glycine max
  Clone ID: LIB3052-013-Q1-N1-A5
attgcatttcgttactgtcatttggtgtgcaatcttacaagttccaaacttgtctattctggcattattgggtctcacttgtcacacatacagatttgagccttttatattatcatggcttctaaggtggtttcggttttggtcatagcgatgatgttggttgccatgaactgcaactgcactagtgctggccacatgctcttggccaatgaggaaggtcacgattttcacgagtctaaagc

SEQ ID NO: 34297 - DNA, 235 bp, Glycine max
  Clone ID: LIB3052-013-Q1-N1-A6
gttgcataccgagctagctagctagcaagcaagcacagagatggaagcatagcgaggccatgccctcatgtgcttggcacgtgtttcactcttactgtgcgctctaaccctatccgctgctcacggaagcaccacggttcaagacatcgcgagaaagttgaaactcggggacaacgagcttctgcgcacggagaagaagttcaaggatttcatggagaattactggaggagctac

SEQ ID NO: 34298 - DNA, 381 bp, Glycine max
  Clone ID: LIB3052-013-Q1-N1-A7
gataaaggttagcgtgaaacatttttacctaaatggattgaattgacaaataataacaaacaactaatagcagaaggacttaccacagcaaccctgctcaagatggtctgttagtgtgtttgatattctaatgtccctaagttgtgcacaagctgaaatagcacccaccattgccacctcagtgattatgatctttgcttctctcattttctcatacatgtaaatagcttcctttgctgatgtgaaccttcggctcttgatacaggttctatcctatcctatcctatcctattttttttcttcgtaatttgtctaggtttgtgtttttgtccttgttctgttatttgcgttcttgttcttgctcttgctcttgtcacgttc

SEQ ID NO: 34299 - DNA, 395 bp, Glycine max
  unsure (1)..(395): unsure at all n locations
  Clone ID: LIB3052-013-Q1-N1-A8
taaaattcttccaccaagttatgggtttccttgtgttgcttcttttctccctcttaggtctctcttctagttccagcatatcaactcatcgttccatattggaccttgacctaaccaagtttaccacacagaaacaggtgtcttcactgttccaactatggaagagtgagcatggacgtgtctaccataaccacgaagaagaggcaaagagacttgagattttcaagaataacttgaactatatcagggacatgaatgcanacagaaaatcaccccattctcatcgtttaagattgaacaagtttgctgacatcactcctcaagagttcagcanaaagtactttgcagctcccaaggatgtgtcgcagcaaatcaaaatgccaacaangaaatga

SEQ ID NO: 34300 - DNA, 391 bp, Glycine max
  unsure (1)..(391): unsure at all n locations
  Clone ID: LIB3052-013-Q1-N1-B1
cacatttcacaatcagaccggcatagtcatgtgctcctacctcccaatgttcaccagctttaatagaacaaggggtggcttgattcaattgaaccatggcaggcctcagcctctccaatatgttgtcaatgcagcctttttggctgctctttacagtgattatctcgatgctgctgatacacctggatggtattgtggacccaatttcttctcgactgatgtccttcgagactttgcanagacccagattgattacatnncttggaagaaccctcggaaaatgagctatattgtangttttggtaatcattatccaaaacatgttcaccatagaggtgcgtctataccgaagaacaaggttaagtacaactgtaaaggaagatggaaatgg

SEQ ID NO: 34301 - DNA, 355 bp, Glycine max
  Clone ID: LIB3052-013-Q1-N1-B2
attggctttgaacactcatcaccatggccaagcttgttctttccctttgttgccttcattgcagtggctgcttcgctctgagagagcatgcacagtaaaatgagtgccagatccaaaagctgaatgccctcaaaccggataaccgtataaagtccgaaggtgggttcattgagacctggaaccctaacaactagccattccagtgtgccggtgttaccctatctagctgcacccttaaccgcaatgcccttcgtagaccttcctacaccaacggtcctcaagaaatctacatacaacaaggtaaatggtattgttggcatgatattcccgggttgtcctagcacttatcaagagc

SEQ ID NO: 34302 - DNA, 211 bp, Glycine max
  unsure (1)..(211): unsure at all n locations
  Clone ID: LIB3052-013-Q1-N1-B4
aagcangggcagtttgccgatgctattaagtggctttcgtgggccgtcatccttctacagaaagctggggatagtgcggccactgtcgaggttttgtcgtgcacggcttcgcgttacaaagaattggggagtataaaaaggcagttgcagattgtacaaaggttcttgaaaatgatgaaaccaatgtatctgtcctggtacagcgtgctct

SEQ ID NO: 34303 - DNA, 283 bp, Glycine max
  Clone ID: LIB3052-013-Q1-N1-B7
cacctcgagctgctcgagcggctcgagctagcagttcagcgtctctaattatttatgcagaagacaagttgcagtcaatctgcgatctcggaattatgcatcatctaacagtaaagatgacctaatgattgaagaagatgctgagagaaatgctaggtcgctattgaaaacgatattatgtgtcactgcaagtgtagcaggataccatatgtttccttatatgggagagaatttgatgcaacagtctgaatacctagagcgtgtcaaggatcccttgttcaaa

SEQ ID NO: 34304 - DNA, 267 bp, Glycine max
  Clone ID: LIB3052-013-Q1-N1-B8
aaatggtaagagtacagcttgttaccatcagctcagatactatacataattgagcacactgacgttgcacttacctactacactggaattctcggtatgccaggagtgactgcatatgcaggtctacttgaagtaggatctctgcagaaaggagagaatgtgcttgattcgactgactgtggcgcaattagtcaacttgttgggcaatttgctaaactgaatggatgtgatgtagtcggaagtgctggatctaaagagaagggggat

SEQ ID NO: 34305 - DNA, 383 bp, Glycine max
  Clone ID: LIB3052-013-Q1-N1-C1
attctcatcctcctctgtctctctctctccaccattgccatggatccttacaagctccggccatccagcgccttcaattctcccttctggactacaaattctggtgctcctgtttggaacaacaactcctctttaaccgttggagctagaggtccaattctgcttgaggattatcatcttgtggagaagcttgcaaactttgacagggaacgtatcccagaacgtgttgtccatgccaggggagctagtgcaaagggtttctttgaggtcacacatgacatttctcacctgacatgtgcagatttccttcgagcccctggagttcagacgcctgtaattgttcgtttctcaactgtcattcatgagcgtggtagccctgaaac

SEQ ID NO: 34306 - DNA, 362 bp, Glycine max
  Clone ID: LIB3052-013-Q1-N1-C2
cttggaatattattataggatagtagcagatggaattggtgggcttgttgaggttcacaagtattttcaaaaatgaagctcttgttgttcttggtgcctatcgtactaattgctggctttgcttctgtaaagggtccaagcctttgcagatggggtttcattgctgactgttctatctcatttactcctcttgctgcttcttcaaattcctactcacaaacacttcatcaatctaatgaaactaaagttttcaatgtctgcaagcccgggttcaatttagctgctgcaaatgaatcggatgaatctcacccacgacagaatcagaatagaaaactcaatttcatacatagaaatgaagttgt

SEQ ID NO: 34307 - DNA, 288 bp, Glycine max
  Clone ID: LIB3052-013-Q1-N1-C3
ctgtaaagggtccaagcctttgcagatggggtttcattgcggactgttctatctcatttactcctcttcctgcttcttcaaattcctcctcacaaacacttcatcaatctaatgaaactaaagttttcaatgtctccaagcccgggttcaatttagctgctgcaaatgaatcggatgaatctcacccacgacagaagcagaaaagaaaactcagtttcatagatagaaatgaagttgttctagcacaagctcgagctgcaatcagagaagccaaaaatgagaatcaaa

SEQ ID NO: 34308 - DNA, 413 bp, Glycine max
  Clone ID: LIB3052-013-Q1-N1-C4
gtgagagcggcgaagaagaagaagaacaataatgaaggacgccggaaagagccacaaggcgaatgcaaagctgtcgccggagacgcggaaggatcggaaatcggcgacggggctgagtggatcgccgaagaagggaggccacggcgggaagttcacgtggatcggcaacggctacgagaacgtcgagatggagcacggtgctatggacgccaaggacccgaacttcgaggatccagcggagatcgccgccgtgtgatcgcggtggtttccggtgacgagatctgtacatactaataattgctaagagacgcggttttcgaattcaataatatgaagcaagtaggagaagaagcgctttctgtgattgattgttatagatctgatctgtctctggaatttggtagtggcatggc

SEQ ID NO: 34309 - DNA, 402 bp, Glycine max
  Clone ID: LIB3052-013-Q1-N1-C6
ctcgagccgtgcaattcatccttcgtggccccctagtaccaaggacattcaactcataggtgacatgggcaatattgtagctgccactagggaccttgaggattctttccggagtatatccttctcaaaatcaattgacaattcaactgagtttagcagctctagattctccgacatcatggggattggcaatgaagatgaggagggaaaggtaagaccactagttctcaagaacaagtctccaaggtggcatgaacagctgcaatgttggtgcctcaactttagaggaagggtcactgttgcctctgtcaagaattttcagctgattgctgcgacaccaccaccagccattgttactacaggaacaggacctacaccatctcagccaacacaaatcttctt

SEQ ID NO: 34310 - DNA, 339 bp, Glycine max
  Clone ID: LIB3052-013-Q1-N1-C9
tgagaaacaaagaaaggaaataattgatctttgaaaatgcagggaggaaagaaagctggagagtccatcaaggaaacagctgcaaacattggtgcttctgccaaggctggcatggagaaaaccaaggccactgtccaggagaaggcagaaagaatgacggcacgtgatccgatgcaaaaggagttggcaacccagaagaaagaggcaaagatgagccaggcagagctggacaagcaggcggcgcgtcagcataacacggcggcgaagcaggctgccacggcagggcacatgggacaacccatggggacccatcagacgtcagctatgcccggtcatgga

SEQ ID NO: 34311 - DNA, 411 bp, Glycine max
  Clone ID: LIB3052-013-Q1-N1-D1
atcgtcttctgcttcaaggaaggagagcttgttattctctatcaacaaggaaaatgtcaggtgaagaggttgttgttgcagctgagccagctgctgccatcccaggcgagcctatggatatcatgactgccttgcaacttgtgctcagaaaatctctggcttatggtggtcttgcacgaggccttcacgaaggggcaaaagtgattgagaagcatgctgcacaactctgtgttctagcagaagactgtgaccagcctgactatgttaaactggttaaggccctttgtgcagagcacaatgttagcctgctgacagttccgagtgcaaagacccttggagaatgggctggtttgtgcaagattgattccgaaggaaaagctagggaagttactggttgctcctgtgtgggtg

SEQ ID NO: 34312 - DNA, 352 bp, Glycine max
  Clone ID: LIB3052-013-Q1-N1-D12
caggtccttccttacaatcaaaacgaacaccaactatggcaagttatcaaaagcactacgatgatcagggtcgcaaggttgacgagtatggcaacgttgagaagcaaaccgacgaatacggcaaccctgttcatgctgctagtgtcacctatgtagccaccagaactgctgctggtggttacagtgatgacattaataagcaacatgataccaccaatgcctacggcgtatacactggtagacagcattctagtggtggctacgatggtgacactaataaacatcatggaactactggtggctataatgatgacaccaatagacatcatggaactatccgtgtctatggtat

SEQ ID NO: 34313 - DNA, 421 bp, Glycine max
  Clone ID: LIB3052-013-Q1-N1-D3
gagagagagaggagagagtattggcgcttcatcaagatgggtatttctagggattccatgcacaagaggcgtgccactggtggcaagaaaaaggcttggagaaagaagagaaagtatgagcttgggcgtcaagcagcaaacaccaagttatcaagcaacaagacaatcaggaggattcgtgttagaggtggcaatgttaaatggagggcattgaggctggatactggcaattactcatggggtagtgaagcagttactcgcaagactcgtattctagatgttgtttacaatgcctcatacaacgagcttgtgcgaactcagaccctggtcaagagtgctattgtccaggttgatgctgctcctttcaggcagtggtaccttcagcactatggtgttgaaaatggtagaaaaaagaaagtgg

SEQ ID NO: 34314 - DNA, 289 bp, Glycine max
  Clone ID: LIB3052-013-Q1-N1-D4
atttagcagttaaagtcaccttgttaatgtccttcgtggttggggctttaggatttattcttctcatggtcacaagaaacatttgggggcatatttttaccaatatacctgaagtaatccgttatgtggcatccatgacaccaattcttgcaagctctgtctttgtagattcaattcaaacagcattatcaggtattgtaagaagatgtggttggcagaagcttggtgcatttgtcaatcttggatcctattatcttgtggggctttcctttgcaattgggttggcttt

SEQ ID NO: 34315 - DNA, 395 bp, Glycine max
  unsure (1)..(395): unsure at all n locations
  Clone ID: LIB3052-013-Q1-N1-D5
ttcacattttctctatggagaatcatggcaacaagcgagtctgggaccagtcctctgactccaacactcagcgggtcgactcgcccgagtctaagattcgtcgagttgactcgtccgattcgggtattaactcgtccgagtctcaactcgaatcggtcctcgactcgtcggaggtgcagctacaagacgacatttttaacatgcttgacgacacggacaatgtgcccgagcgtgactcggtgcagggtcttgactcagtgatcaaaagcttcgaggatgagataaatgctccaggttcggattctggttccggtgacccggcccaggaacccgactccggngagctacaatctaacttgggctatcttctagaagcctgcgacgacgagctcggg

SEQ ID NO: 34316 - DNA, 404 bp, Glycine max
  Clone ID: LIB3052-013-Q1-N1-D6
acaaggcacatttcagcgcagcgccgcctcaacatctcaactttcccttcgatctcattctcaggtgttgttgaagcttcctgtgttggcttggtatccctgcaagttctgctgtagcagattccaaggtgaaggtgtcacgttaaagtttctttcatgtttgaacaggctactatccatttgggagcaactgagctgcttggagagtatttttcttcctctaggaaaaattacagaccctcaccacagagacttagttgtatgaacggttggccacctttcattatccttgaaggagattgttcaaggatacagactacctttgaggttgaaattgcggctgcatataatttgaattccagcattttctgcctctgaatatctctggaactttgtaagtcaac

SEQ ID NO: 34317 - DNA, 296 bp, Glycine max
  Clone ID: LIB3052-013-Q1-N1-D8
cggctcgagtgtacaacagtgaagacactcctgttgctgccgtatctattatagacaccaacagctaggaggaccatgtagaccagatgcctaggagattctatcttgctggtaaccatgagcaagagtttctaaaatatcagcaagagcaaggaggtcatcatagccagaatggaaagcgtcatcatgaagaagaaaacgcaagaggcaagatattgagtggcttcaccctggaattctaggaacatgcattcagcgtgcacaagcagatagcgaaaaacctacactgagagaac

SEQ ID NO: 34318 - DNA, 385 bp, Glycine max
  Clone ID: LIB3052-013-Q1-N1-E1
ttcccaggttgtgatggcagcagcaccagcagctaccttcgctattggaaccaccggttccctcggccaaagaggaagctcgcttcctcaatcaaagtcctttgggttgaaattcaactctctgaatcatttgaagagcttctgtggcctcaaggccatgtcatccgtgagatgtgagtcggaatcctgcttcttcggtaacaaaaccggtgctgctctacgggcgtcttttgcatccaaagctcaaaaggaaaacaaccacaactcgcagcctcaagcttcgtacaaagttgcggttcttggtgctgctggagggataggtcagccgctctcgcttctcatcaagatgtcgcctttagtttccaacctgcatctttatgatatt

SEQ ID NO: 34319 - DNA, 245 bp, Glycine max
  Clone ID: LIB3052-013-Q1-N1-E10
gcccgtagccgttctaaccggcaccagccttgacttcccggcggtcttgtggctcatactgagggctgaccttggatctctacgcaagaatgcaatgttcgtgccacactacaacctgaacgcgaacagcatactatacgcattgaatggacgggcattgatacaagtggcgaattgcaaccgcgagagagtgtctgacgctgagctgcaggagggacggattctgacacggccacaaaaccttc

SEQ ID NO: 34320 - DNA, 192 bp, Glycine max
  Clone ID: LIB3052-013-Q1-N1-E11
accggttttatcccaggggggttttagtgtgatttgaaaaaccttgacgggctgccctactagaaagggttttgggtcacagtccatgatttagccagttgtgatgatatggtattcacaaagatcgctgtatcctcgttacgtgtaatataaccagaattagaatcaaaagttgtaaagccagccgatttc

SEQ ID NO: 34321 - DNA, 347 bp, Glycine max
  Clone ID: LIB3052-013-Q1-N1-E2
cttcgtcgttatcttcttcttttgttgtttgtgtgtttgttttttctctcacctgaaaatgtcttgctgcggtggtaactgtggttgcggaagcgcctgcaagtgcggcaacggctgcggaggctgcaagatgtacccagacttgagctacaccgagtcaaccaccaccgagaccttggtcatgggagtggcaccagttaaggctcaattcgagagtgctgaaatgggtgttcccgctgagaacgatggctgcaaatgtggagctaactgcacctgcaacccctgcacttgcaagtgaggtgttggagagctaaagcttcaagcagaaatgggcccttagaaataat

SEQ ID NO: 34322 - DNA, 310 bp, Glycine max
  Clone ID: LIB3052-013-Q1-N1-E4
catcacacaagagcgagcgcaacattattcgagtacgtagcttaacaatattttaagcaattgctgctacaatgatagcgcggtttcctttgttgccgttgctgttgctgggaattgtttttctagcatcagtttctgtctcattacaggtgaagccgccgagtcaccacgagtgccttcagagttgcgagagtgaaacggatccatacaagcggaaagcatgcaagcttaattgcaagttcgttcctgagcacggggagcaaccacatggagaagaagaaagagaaagagaacattcacaaccaacacc

SEQ ID NO: 34323 - DNA, 339 bp, Glycine max
  Clone ID: LIB3052-013-Q1-N1-E5
gccgcgaccccatctattccaacaagcttggcaagttgtttgagattaccccagagaaaaaccctcagcttcgggacttggatgtcttcctcagtgttgtggatatgaacgagggagctctttttctgccacacttcaattcaaaggccatagtggtactagtgattaatgaaggagaagcaaacattgaacttgttggcattaaagaacaacaacagaggcagcaacaggaagagcaacctttggaagtgcggaaatatagagctgaattgtctgaacaagatatatttgtaatcccagcaggttatccagttgtggtcaacgctacctcagatctga

SEQ ID NO: 34324 - DNA, 252 bp, Glycine max
  Clone ID: LIB3052-013-Q1-N1-E6
tgctgctggtggttacagtgatgacattaataagcaacatgataccaccaatgcctacggcgtagacactggtagacagcattctagtggtggctacgatggtgacactaataaacatcatggaactactggtggctataatgatgacaccaatagacatcatggaactaccggtgtctatggtatagacaccgataggcaacaacatgggactactggtggctatgccggtgacactggtaggccacatgg

SEQ ID NO: 34325 - DNA, 163 bp, Glycine max
  Clone ID: LIB3052-013-Q1-N1-E8
gtgctctagacggttcatgttcagatggaacttgaaattctgagtgtaaccaattcatgcgagaagaatatcttgatgctcatcaaaatgcgtagcgagatttgctatggagaagctcaaacgaatgtttgcaagtgcaagtggaaggctagggtactattga

SEQ ID NO: 34326 - DNA, 407 bp, Glycine max
  Clone ID: LIB3052-013-Q1-N1-E9
gccggtagcgtcacaaccgccaccagccttgacttcccagccctctcgtggctcagactcagtgctgagtttggatctctccgcaagaatgcaatgttcgtgccacactacaacctgaacgcgaacagcataatatacgcattgaatggacgggcattgatacaagtggtgaattgcaacggtgagagagtgtttgatggagagctgcaagagggacgggtgctgatcgtgccacaaaactttgtggtggctgcaagatcacagagtgacaacttcgagtatgtgtcattcaagaccaatgatacacccatgatcggcactcttgcaggggcaaactcattgttgaacgcattaccagaggaagtgattcagcacactttcaacctaaaaagccagcatgccaggca

SEQ ID NO: 34327 - DNA, 398 bp, Glycine max
  Clone ID: LIB3052-013-Q1-N1-F1
gttttgtgggtggctcctgaagacaaggcgagtttatggtcacaacttcattatgtttcgtgtaataatctggaaatgcaagaagcttatcttgtcaatctcgtaaatgtgttacgagaactgtatttgcacagtccagaggaagctcgccaattgagaaggaaagctctctctcgtattgaatggctgcaaaaagctgatgtgcctaccatagcacagattgaagagttccattcgatgcacaggatgatgaatgctcctgattcaaatgataatatcgatctactgttgagcattgatttgttgggtttacaaggagcatgcaaagcttttccaaacaagattgattttgatgataagcttgtgttggctaacacacaagaattctttgatggaaa

SEQ ID NO: 34328 - DNA, 335 bp, Glycine max
  unsure (1)..(335): unsure at all n locations
  Clone ID: LIB3052-013-Q1-N1-F2
ctcaagagaaactttaagcagatgtctaatgaagttgtgaccataaactggaaatgcaagaagcttatcttgtcaatctcgtaaatgtgttacgagaattgtatttgcacagtccagaggaagctcgccaattgagaaggaaagctctctctcgtattgaatggctgcaaaaagctgatgtgcctaccatagcacagattgaagagttccattcgatgcanaggatgatgaatgctcctgattcaaatgataatattgatctactgttgagcattgatttgtngggtttacaaggagcangtaaagcttttccaaacaagatggtttttgatgat

SEQ ID NO: 34329 - DNA, 365 bp, Glycine max
  unsure (1)..(365): unsure at all n locations
  Clone ID: LIB3052-013-Q1-N1-F3
cactcatcaccatggccaagcttgttctttccctttgtttccttcttttcagtggctgcttcgctctgagagagcaggcacagcaaaatgagtgccagatccaaaagctgaatgccctcaaaccggataaccgtatagagtcggaaggtgggttcattgagacctggaaccctaacaacaagccattccagtgtgccggtgttgccctctctcgctgcacccttaaccgcaatgcccttcgtagaccttcctacaccaacggtccccaggaaatctacatacaacaaggtaatggtatttttggcatgatattcccgggttgtcctagcacttatcaagagccgcangaatctcagcaacgagga

SEQ ID NO: 34330 - DNA, 399 bp, Glycine max
  unsure (1)..(399): unsure at all n locations
  Clone ID: LIB3052-013-Q1-N1-F5
tcctcatgcacttttgcactcttatttatcgctaaatatcaatatcaattatcttcctctttaagtcaaaccataactattccatttctttccacccccacagtttttctgaattctgggtgttgagtttccttttcttcattttttttccctcccttggatgtgttgttattttcaatccaaaaggccatgcaaaactatttggtcttgtgataactttgtgttggtgtgaggcttgttattgttcatagaagagagtttgttttgttattggtgtaagtgtgtcggtggaaatggaggcaacaagtttggtggagaggggtagagagagagttggacatgttaacaaggttagttatgtgagaagggtcattgcanagaagaagaaacaactttatc

SEQ ID NO: 34331 - DNA, 418 bp, Glycine max
  unsure (1)..(418): unsure at all n locations
  Clone ID: LIB3052-013-Q1-N1-F7
gtcatttgtcattaaaattctcccttctctctcccctccttcatttctctgtttcaacttgcactattttctattcccccttcaacccttttgacattctctgcgcggacattgccacagccttttttcactttaccctcttaaactaaactccattgtcttcccttctcacctcacactcacaccaccaacatcattccctctcttctcatttcactataataataacaacaacttcccattcctcttnccctgtagtagccaaccanattaaacacccccaaaatgcacgagagatcgatgaaagaagctgctggcacgtgcncacaaaggagaagaaccccttcctcttctcttctcttctcgacgccatttaccggtccattgacgaatcaaaatccaccttnacgacgatcaa

SEQ ID NO: 34332 - DNA, 399 bp, Glycine max
  Clone ID: LIB3052-013-Q1-N1-F8
tcctcatctcaagccacttcagagaaaatggcggtacctctgctctcgaagaagatcgtgaagaagagggtgaagaagttcaagaggcctcagagtgacaggaaaatttccgtcaagacaaactggcgtagaccaaagggtatagattcccgtgttaggagaaagttcaagggatgcactttgatgccaaacatcggttatggttctgacaagaagacccgccactatctccctaatggttttaagaaatttgttgttcacaatgtgaaggacttggaactgctcatgatgcacaacaggacttactgtgctgagattgctcacaatatatccacaagaaagagaaaagatatagttgagagagctgcgcaacttgatgttggtgtgacaaacaaaaca

SEQ ID NO: 34333 - DNA, 389 bp, Glycine max
  Clone ID: LIB3052-013-Q1-N1-F9
ccccgcccaaaccctaactccctaccctattccgctttctctcatccatcatgaaaggaggaaagtccaagaccgaatctaagagagccgatgccaaacttgctgtgaataagaagggcgccgtcaccaagactaggaaacccgccggaaaggggaaggcagcgaaagatcctaacaagccaaagaggcctccaagtgctttcttcgttttcatggaggaattcaggaaggtgttcaacaaggaacatcccgacaacaaagcagtgtctgctgtgggcaaagctgctggagcaaaatggaagacgatgtctgatgctgaaaaagcaccttatgtggcaaagtctgagaaaaggaaagtggagtacgagaagaacatgagagcttataac

SEQ ID NO: 34334 - DNA, 393 bp, Glycine max
  Clone ID: LIB3052-013-Q1-N1-G1
gttttgtgggtggctcctgaagacaaggcgagtttatggtcacaacttcattatgtttcgtgtaataatctggaaatgcaagaagcttatcttgtcaatctcgtaaatgtgttacgagaactgtatttgcacagtccagaggaagctcgccaattgagaaggaaagctctctctcgtattgaatggctgcaaaaagctgatgtgcctaccatagcacagattgaagagttccattcgatgcacaggatgatgaatgctcctgattcaaatgataatatcgatctactgttgagcattgatttgttgggtttacaaggagcatgcaaagcttttccaaacaagattgattttgatgataagcttgtgttggctaacacacaagaattctttgat

SEQ ID NO: 34335 - DNA, 291 bp, Glycine max
  Clone ID: LIB3052-013-Q1-N1-G11
gtccaaaatcctagtttaccttaataaatattttaagatgctatgataagagcacggttcccattactgttgctgggactggttttcctggcttaaatttctgtctcatttggcattgcttactgggaaaaatagaaccccaaacacaacaagtgtctccagagttgcaatagcgagagagactcgtactggaaccaagcatgccacgctcgttgcaacctccttaaggtggagaaagaagaatgtgaagaaggcgaaattccacgaccacgaccacgaccacaacacccg

SEQ ID NO: 34336 - DNA, 390 bp, Glycine max
  unsure (1)..(390): unsure at all n locations
  Clone ID: LIB3052-011-Q1-N1-F4
tattaacactttccttagttcaatatggggaagccctgcttcactctctctctttcttccctttgcttgctactcttgtcgagtgcatgctttgctattacctccagcaagttcaacgagtgccaactcaacaacctcaacgcgttggaacccgaccaccgcgttgagtccgaaggtggtcttattgaaacatggaactctcaacaccctgagcntgccnaaatgcgccggtgtcactgtttccaaacgcaccctcaaccgcaacggcctccacttgccatcttactcaccttatccccaaatgatcattgtcgttcaagggaagggagcaattggatttgcatttccgggatgtcctgagacgtttgagaagccacaacagcaatcaag

SEQ ID NO: 34337 - DNA, 326 bp, Glycine max
  Clone ID: LIB3052-007-Q1-N1-E1
atgaagatcaacctcgcaagagccgcgaatggagatcgaaaaagacacaacccagaagacctagacaagaagaaccacgtgaaagaggatgcgagacaagaaacggggttgaggaaaatatctgcaccttgaagcttcacgagaacattgctcgcccttcacgcgctgacttctacaaccctaaagctggtcgcattagtaccctcaacagcctcaccctcccagccctccgccaattccaactcagtgcccaatatgttgtcctctacaagaatggaatttactctccacattggaatctgaatgcaaacagtgggatctatgtg

SEQ ID NO: 34338 - DNA, 415 bp, Glycine max
  unsure (1)..(415): unsure at all n locations
  Clone ID: LIB3052-007-Q1-N1-E3
ccaacaacaactatggcaagttatcaaaagcactacgatgatcagggtcgcaaggttgacgagtatggcaacgttgagaagcaaaccgacgaatacggcaaccctgttcatgctgctagtgtcacctatgtagccaccagaactgctgctggtggttacagtgatgacattaataagcaacatgataccaccaatgcctacggcgtagacactggtagacagcattctagtggtggctacgatggtgacactaataaacatcatggaactactggtggctataatgatgacaccaatagacatcatggaactaccggtgtctatggtatanacaccgataggcaacaacatgggactactggtgggcttttcctgagacactgggaggcgataattgggaaaataggaggtcttt

SEQ ID NO: 34339 - DNA, 328 bp, Glycine max
  Clone ID: LIB3052-007-Q1-N1-E6
aaaaaacattgcccttgttctttcaaagttaccaaacacgggtacacaacacaacagcaacatatggcgtctgaacaattggctcgcagagagaacaccaccaccgagaaggagattcacgttgagaaacacagggttcccaagatggccacccacttcgagcaccttgcggagcaagctaaagaatctgacatcaccgctgggaaggatactccgcagggtagcatagaagccttgcaagctggagagagggtcaaagatcatgcaggaaaagccatgggagatattggtggacgtgggatagccagagagactcacaatctggatg

SEQ ID NO: 34340 - DNA, 288 bp, Glycine max
  Clone ID: LIB3052-007-Q1-N1-E8
ggcgaccagtaccaagcttgctatagctatctctcttagcattcgggtagcctggatgtcgaacctagccttgggcaaacttaaagaaaccaatgtcgaacaatatccatacctctaaacatgcatactccagtgccaacagctgcggcaatacactgagagtgacaagcgatcatgcttgcaacactgtgacatgtatgaagcaagagcgatagatacacatctaataggaaactcgtcagaaggatgaagaacttcacgagcagcatgaggaggaggatgacctga

SEQ ID NO: 34341 - DNA, 104 bp, Glycine max
  Clone ID: LIB3052-007-Q1-N1-F3
gcttgttgctcaattatagcaatttgtaataaagatcttggacgggttctacgtatactaggacggctactactaatcctttacactcttaatctcataatcaa

SEQ ID NO: 34342 - DNA, 275 bp, Glycine max
  Clone ID: LIB3052-007-Q1-N1-F4
gtttgaagaacaacatggtggtgctaaaggtgtgtgttgggcttcttttccttgtgggggttacagctgcacgcatggaactgagcttcttcaaaagtgatcagtcatcaagttatgatgatgatgagtattcaaaaccatgctgtgatctctgcatgtgcacacgctcaatgcctcctcaatgcagctgtgaagatattaggctgaattcatgccactcaaattgtaagagctgtatgtgcacacgctcacagccagtacagtgtcgttgtctt

SEQ ID NO: 34343 - DNA, 248 bp, Glycine max
  Clone ID: LIB3052-007-Q1-N1-F5
aaatcgtcatcaatttcgcgtctttctttctcaattctcgtagattctcaattgggtcttgaaaaatgcggatgagttgcaatggatgtcgagttctgagaaaaggttgcagtgaaaattgcagcatcagaccctgtttacaatggatcaaaagcccagaatcccaagccaatgctactgtgtttctcgctaagttttatggtcgtgctggtctcatgaacctcgtttacgcatgcccctaacatctt

SEQ ID NO: 34344 - DNA, 353 bp, Glycine max
  Clone ID: LIB3052-007-Q1-N1-F7
gaacaatattcttgtgaccatccacctgcatcatgggatggggaggaaaaaaggtgtcatcacccaagtaaagtaccaagggggctgtggaagcggttgggcgttttctgccacgggagccatagaagcagcacatccaatagcaacaggagaccttgttagcctttctgaacaagaactcgtagactgtgtggaagaaagcgaaggttgttacaatggatggcactatcaatcgttcgaatgggttttagaacatggtgggattgccactgatgatgattatccttacagagctaaagagggtagatgcaaagccaattagatacaagacaaggttacaattgacggatatg

SEQ ID NO: 34345 - DNA, 110 bp, Glycine max
  Clone ID: LIB3052-007-Q1-N1-G1
taattattatcacttccttagttcaatatggggaagcccgtcacgctctctctatcgtgcggttgctaactactattgtctaatgcatgctatactattaactacatcat

SEQ ID NO: 34346 - DNA, 325 bp, Glycine max
  Clone ID: LIB3052-007-Q1-N1-G7
tcattgttcaatctgcaaggccttatgggcaaagagcggttctgaagtttgctcaggacagtgttgctcatgctatagctggaacgcacactacatatatgttgaacactcatcttcaaacttacttcaacgagcctcgactccttattcttaccgatccaagaacagatcaccaacctattaatgaagctgctcttgggaatattcccaccattgctttctgtgacaccgattcacctatgaggtacgtggacattggaattcctgccaacatctatggcaaacacaacattggttgtctcttatagctccttgcaaggatggt

SEQ ID NO: 34347 - DNA, 343 bp, Glycine max
  unsure (1)..(343): unsure at all n locations
  Clone ID: LIB3052-007-Q1-N1-G8
tgcatttgcagagcacagggaaagcaaaatatctgatcgttctgcctcccttgcactgagtaggcaatggcggaggaagcacagtactcatcgggacccgattccnggcccttaaaccccaagtccaaaaacaacccttccggatcgagcttgccaaacaacgtgctcaagaaatctcccgaaggcctcctcaacgccgctcctccttcgccactcgacgccaagcgttccaaacccgacaccggcttcgattctctcgatttgaagcctctgtattccgcatctcctcctcccgtctcctacggtcaccaaggttccagcaagaagattgatatccctaatg

SEQ ID NO: 34348 - DNA, 248 bp, Glycine max
  Clone ID: LIB3052-007-Q1-N1-H1
gcaaaatgaccaagttcacaatcctcctcatctgggttggcttctgcatcgcccagacttgcagcgcctccaaatggcagcaccagcaagatagctgccgcaagcagctccagggggtgaacctcacgccctgcgagaagcacatcatggagaagatccaaggccgcggcgatgacgatgatgatgatgacgacgacaatcacattctcaggaccatgcggggaagaatcgactacataaggaggaac

SEQ ID NO: 34349 - DNA, 385 bp, Glycine max
  Clone ID: LIB3052-007-Q1-N1-H2
gaaagagagagaagaagaaaagaagaacaaagatgcaagcctcaaaggagaagatgaaaaacatggcaagtgctgccaaggaacaagtcgacatctataaagccaaaatagacgagaaggcagagaaagcaacggcaagaacagaagaggagagggtgatagcccatgagcacgcaaaggcaaaggaagctggagcaaagatggagctgcatgaagctaaagcaaggcatgcagcagagaagctaagcgccaaccaatcacattatggtctccaccatggccacaacaaccctcccttagtaggaacaactcagactcactaccagcaagggcaccagcaccagccacttggggcagttcctatgcctggaaccacttatccatc

SEQ ID NO: 34350 - DNA, 306 bp, Glycine max
  Clone ID: LIB3052-007-Q1-N1-H4
cgaacactttcatttaaaaatccaaacaccattgaatgtgcagttttttttgaaagataatggcagacaccgaggacattcaaccactcgtctgcgataatgggacaggaatggttaaggctggttttgctggagatgatgctccaagggcagtgtttcctagcattgttggtcggccacgtcacaccggtgtgatggttgggatggggcaaaaggatgcatatgttggggatgaggctcagtccaagcgtggtatactaactcttaaataatcccattgaccttggaatggtgagtaactgggat

SEQ ID NO: 34351 - DNA, 244 bp, Glycine max
  Clone ID: LIB3052-007-Q1-N1-H5
cggctcgagaataattccttcacttgcagaacttagttcgctgttgcatcatcatcatcttcattagtgttagccctaaacttcaccttcaaccatgaccacagtgccaccacacagtgtccaagtgcacacaacaacacaccgctacgaagccggcgtcgtcccgccggctcgttatgaggcgccgcgttacgaagccggcatcaaagcgccctcttccatttaccattccgagagaggtccg

SEQ ID NO: 34352 - DNA, 191 bp, Glycine max
  unsure (1)..(191): unsure at all n locations
  Clone ID: LIB3052-007-Q1-N1-H6
tgaaggccctctgngtttggagagcgcaagagccagtaccgtgatgatattgccatcttgagtggaggtactgtaatcagagaagaggttggccttactttggacaaagctgggaaagaggttctcggatatgcctccaatgtggtgcttaccaaggatacaaccacaattgttggtgatagaagtaccca

SEQ ID NO: 34353 - DNA, 397 bp, Glycine max
  Clone ID: LIB3052-007-Q1-N1-H7
taatttcatcgattcacgcttcgttctgcttctgggtcgattcagatttccctccaatcagcaaaaggacgctttcactcgagcaaaattgaatgcaatttctgaaaggctcgcacttgaagactccaacagtgaaacgtggaccccactatctgttcttttcaagccccatcacaatgtgttgactgggaactatgatataaatgttctaattgcggctttggaagagaagggaaagagtgtactgtggcatgatcatagaaagggggcatcttccattgatgttgatgcacctgaggatgttttgatggtggttgtgatcaatgtggcattgaaaatgtttgctgggatctggagaagtagcactggattgcattgaggaagaattattgggttt

SEQ ID NO: 34354 - DNA, 306 bp, Glycine max
  Clone ID: LIB3052-008-Q1-N1-A10
cgtcagttgcatgaaaaatggtttcgctgaaactgcagaagcggcgcgccgctagcgtgctcgagtgtggcagaagaaaggtttggcttgaccccaatgaagtcaacgaaatctccatggccaattctcgccaaaacataaggaagctggttaaagatgggtttatcatcaggaagcccaccaagattcactctcgctcacgtgctcgtctaatgaatgaatccaagatgaaaggacgtcactcttgatacggtaagcgtaatggtacaatggaagcaatgctttccactaaaattctattgatga

SEQ ID NO: 34355 - DNA, 203 bp, Glycine max
  Clone ID: LIB3052-008-Q1-N1-A12
ggtgtggtgatgccatcttatatgaaataatatcaaaatatgtttggtgtaataataaaactgtggcctatgtatttaccaccctccgacccagcctatgttaatatctgagtggcgttgtacctttgaatcgccttaataaaatgtcagtcttcaaattttgtctttaaaaataatataatattatttaatattatataaat

SEQ ID NO: 34356 - DNA, 379 bp, Glycine max
  Clone ID: LIB3052-008-Q1-N1-B12
aagaaaagccatttccatagcagcctaagaaaatgaggatcgctagcttgttcgctaggttggtactttgcgccttcacctcatacctaccttccgccaccgcccaggacgtgctcgacgtggatggcgatccgattcggaacggtttcatatactacgttttgccggcaataagaggaaacggtggcggaatagaacgagccgcactcgggaaagacacttgccctatcactgtagtgcaatctcccaatcctaactctaatgggttagaaattaagtttgaatctgcattccccgcctattacataaacgaaaccctaatttttcaaattaagtttcatttcccacaacagtgtgaaataaattatcctttggtggg

SEQ ID NO: 34357 - DNA, 88 bp, Glycine max
  Clone ID: LIB3052-008-Q1-N1-B2
cttaaacactcttcagtcatcaccatggccaagctagtttgttccctttgttttctgctttgcattgtctgctgcttctctttcattt

SEQ ID NO: 34358 - DNA, 254 bp, Glycine max
  Clone ID: LIB3052-008-Q1-N1-B9
cttgatccccactctgttccatcagaagaactttccacttggtttgtatacattgtgcaacggctaaatcctggtattcacaacttggctgccccaacacttcataactcaagttttgcgggttcttgctctccgatattgcaacgaaattcttaatgggatgcacgttctttcttaaggaagtattttggctgaaattattattgcatgggttatcataattcaaaaccagatttgatgataaatcttgagtg

SEQ ID NO: 34359 - DNA, 287 bp, Glycine max
  Clone ID: LIB3052-008-Q1-N1-C2
gtcacatatgctattaagggtgagatatatagaaaagcaggtgagaatagatagaaatggagaactttccagttgttgacattgggaacccttatatttaatagatatcttctacctttgatattatcaaacattccttttataactttggtttcttatcttattttttttcttttctttttcttttcttttatctatcttatctttttattttattttttattgtttttttttttttttttttattttttttcttatttattttttttttcctttttttcttattt

SEQ ID NO: 34360 - DNA, 304 bp, Glycine max
  Clone ID: LIB3052-008-Q1-N1-C4
ctttgaacactcatcaccatggccaagcttgttctggccggttgtttccttcttttcagtggctgcttcgctctgagagagcaggcacagcaaaatgagtgccagatccaaaagctgaatgccctcaaaccggataaccgtatagagtcggaaggtgggttcattgagacctggaaccctaacaacaagccattccagtgtgccggtgttgccctctctcgctgcacccttaaccgcaatgcccttcgtaaacctttctacaccaacggtccccaagaaatctacttacaacaaggtaatggta

SEQ ID NO: 34361 - DNA, 389 bp, Glycine max
  Clone ID: LIB3052-008-Q1-N1-C5
atatgatatataaagagagagaagaagaaaagaagaacaagtatggaatcctcaaaggagaagatgaaaaacatggcaagtgctgccaaggaacaagtcgacatctataaagccaaaatagacgagaaggcagagaaagcaacggcaagaacagaagaggagagggtgatagcccatgagcacgcaaaggcaaaggaagctggagcaaagatggagctgcatgaagctaaagcaaggcatgcagcagagaagctaagcgccaaccaatcacattatggtctccaccatggccacaacaaccctcccttagtaggaacaactcagactcactaccatcaaaggcaccaccaccagccacttggggcagttcctatacccggaaacactta

SEQ ID NO: 34362 - DNA, 371 bp, Glycine max
  Clone ID: LIB3052-008-Q1-N1-C6
agccgaggcacgcctgcctgggtgtcacacatcgtttccggaaggcaaacatgtaacaatgttgctgcgcggggtgtatgctgacctcccgcgagcacccgcctcgtggttggttgaaatctgggttcatggccgacttcgccgtgataaaatggtggatgagccacgctcgagaccaatcacgtgcgagccggtcagttctggacccatcgacgaccctttgcgtgcacgcacgctcccaacgaaacctcaagtcacgcagagctacccgctgagtttaagcatatcaataatctgaggacatgaaactgacaaggattcccttagtaacggctagcgaaccgggaaaagcccaccatgaaaatcggtct

SEQ ID NO: 34363 - DNA, 216 bp, Glycine max
  Clone ID: LIB3052-008-Q1-N1-C8
agaaagaaggtttttttagtatagttaacagcatggagatgtatgcaagatgttaatgttggggcggataaattctcgaataggcaatctctgggtacaggatcttataattacaaggactacaaggatgcaccaccaacacccttgtttgatccaagggagttttagtcatggtcattttacacatcttggattttcatcattttgttactattt

SEQ ID NO: 34364 - DNA, 140 bp, Glycine max
  Clone ID: LIB3052-008-Q1-N1-D1
cattgaccaattactaccatttcaaatcttcttctgtccgtctcattccttctttttagtggctacttcactcttacaaatcatgcacatcaaattaactgccttatccaaatacttaataccctctaaccttataacca

SEQ ID NO: 34365 - DNA, 293 bp, Glycine max
  Clone ID: LIB3052-008-Q1-N1-D10
gggtgaatgatctctggggacaacctcaattcaatggcctggacgtggagtttgatcaacctgttagagagcttggcttccctggggtgcctcataaatcttcagtatttattgtacctacttctgcctgcctggttgaattaatagagacccctttccttgttgtcacgcttagtgagattgagattgttaatcttgagagagttggacttgggcagaaaaactttgatatgacagtagtatttaatgacttcaagagggatgtcctcaagattgattctttctcttctaca

SEQ ID NO: 34366 - DNA, 366 bp, Glycine max
  Clone ID: LIB3052-008-Q1-N1-E1
cttaattattaacacttccttagttcaatatggggaagcgcttcactctctctcttgcttgcctttgcttgctactcttgtcgagtgcatgctttgctattagctccagcaagctcaacgagtgccaactcaacaacctcaacgcgttggaacccgaccaccgcgttgagtccgaaggtggtttgattcaaacatggaactctcaacaccctgagctgaaatgcgccggtgtcactgtttccaaactcaccctcaaccgcaatggcctccacttgccatcttactcaccttatccccggatgatcatcatcgcccaaaggaaaggagcacttggagttgcaataccaggatgtcctgagacgtttg

SEQ ID NO: 34367 - DNA, 289 bp, Glycine max
  Clone ID: LIB3052-008-Q1-N1-E10
gatagactctacaattttgtacttcggagtattgccctgggtttagaagatatcacgagatggtatgacaatagccagtctcaatgctgagaatgaaatactgcatacccttgcctttttagctggggtgatgatttggtcacatataactgattagcccttttctctgtactcaacttttgtgattgatgcccttcatggttttaacaagcaaacaccatggttattctttacggacatgattaaaggaattttcctttctgtaataatttggtccaactatagtggc

SEQ ID NO: 34368 - DNA, 393 bp, Glycine max
  unsure (1)..(393): unsure at all n locations
  Clone ID: LIB3052-008-Q1-N1-E11
tgaagcagtaatgcttgaagcggcaatgtttggtggaattgcagaggggactgggtatcactatggttatgcaccacatgagtttatgcaaaataggggtttcaatccccggccccaatatcgtcctccttcaccatcactggcagctcaacgcttgataagggaacagcaggatgatgaatatcttgcatcgttacaagcagacagagaaaaagaattgaaggccatggaggaagctgangctgctcgtgaagaggaaagacagagagcagaagactctcgcaggaaattacaggaagaacaggaattggaaacaaaattagcagccaaagaagtctcactaccaccagaaccatcctctcatgatgataatgctgtaaacttgatggtaaa

SEQ ID NO: 34369 - DNA, 209 bp, Glycine max
  Clone ID: LIB3052-008-Q1-N1-E2
cttaattattgccacttccttaaaccattatattggagcggtcacttttcttatgttgttgggtttgctcgctactctattcaaatcgcatcctctactatgctcctggcactctcaactagcgccgactcaacaacctttacgcgttggaacccgaccaccgtgttgagtccaaatgtggaccgatacacacatggcactctcatcac

SEQ ID NO: 34370 - DNA, 315 bp, Glycine max
  Clone ID: LIB3052-008-Q1-N1-F1
ccttcacttgcagcactgttgcatcatcatcttcatggcggaaccctaaacttcaccgtcgaccatgaccacacaagtaccaccacacagtgtccaagtccacacaacaacacaccgctacgaagctggcgtcatcccccccggagcccgtttcgaaccgccgcgttatgaagccggcgtcaaagcgccctccatttaccattcctagagaggtccaacgacttcccatgtcctcgccgtcctcaccggcctcccagtctgtggcatcctgctcctcctggcatgattgaccctgtcatgaaccctaacttatac

SEQ ID NO: 34371 - DNA, 290 bp, Glycine max
  Clone ID: LIB3052-008-Q1-N1-F10
cttaattattaacacttccttagttcaatatggggaagccgttcagtctctctctttcttgcgctttgcttgctactcttgtcgagtgcatgctttgctattagctccagcaagctcaacgagtgccaactcaacaacctcaacgcgttggaacccgaccaccgcgttgagtccgaaggtggtttgattcaaacatggaactctcaacaccctgagctgaaatgcgccagtgtcactgtttccaaactcaccctcaaccgcaatggccttcacttgccatcttactcacc

SEQ ID NO: 34372 - DNA, 190 bp, Glycine max
  Clone ID: LIB3052-008-Q1-N1-F3
gaaaatattattcccttaatatcagcttctactttcgccggcactcatttcactcgcgggcgctccccactcacaatgcaagcccttcaccgtctcgcatcctccactcaccgcatggccacgtcttcgctccttcacggcagcctcctctcccgaaccacttccagaatcctctcattctctaccgatt

SEQ ID NO: 34373 - DNA, 169 bp, Glycine max
  Clone ID: LIB3052-008-Q1-N1-F4
acgctactaactcggaattctgctctactgaatcaaacatggcttcttccaccatcacctccgcctgcctcacatcacaccctggatgcctcttcaacaaatcatcatcttcatcattcccctccttccatgccacccccactctccacccccacaagccactcacctc

SEQ ID NO: 34374 - DNA, 357 bp, Glycine max
  Clone ID: LIB3052-008-Q1-N1-F7
tttaatttgatcaacaaaagcactaccctgaactcatgggcggaaaaaccacaaaaattggaacaaagattcggcgaaggctaaaggaagatgagaagaagaccaggaattggagggttgcagacgcacgccgctgcaagagatcaattccgtttgcttggtgaaaatgtcgcaaagatcagaactgatttgatgaaggagcatcttgccacctttcgctctcagctcgaagatttcgctcgcaaacacaagaatgacatccgcaagaacccttcattcagatcacagtttcatgagatgtgtgctaaagttggagtagaccccttggccttaaacaaaggtttctggtcataactt

SEQ ID NO: 34375 - DNA, 399 bp, Glycine max
  unsure (1)..(399): unsure at all n locations
  Clone ID: LIB3052-008-Q1-N1-G10
gcgatagaaaagaaaaacaacaaaccaatacccttccctggggcgggcccttcatcagtgttactgcgcatccctccgtttctcctaccgactccggggaaggaaggaaggagtgaacaacaaacccaaccaatacccattgcaataagtcttggtgttctaagtttctttgggtctgtttttggtgatctcactgaatcaatgattaaacgagatgcangagttaaagactctggcacactaatacctggtcatggtggagtactagacagagcggacagttatgtgttcacgggtgctctagcatacaactntatcaaaaccgttttaccactgtatggagtatgacctgaaacaatgttaggtggtatctgcatagtattgtcactgacagctttg

SEQ ID NO: 34376 - DNA, 327 bp, Glycine max
  Clone ID: LIB3052-008-Q1-N1-G11
ctcaagccgctcaagcacatccaccaatacccttccctaggcagtccctacatcagggtgggtgcgcatccctccgtttctcctaccgactccggggaaggaaggaaggagtgaacaacaaacccaaccaatacccattgcaataggtcttggtgttctaagtttctttgggtctgtttttggtgatctcactgaatcaatgattaaacgagatgcttgagttaaagactctggcacactaatacctggtcatggtggagtactatacagatcggacagttatgtgttcactgttgctctagcatactactttatcaaaaccgtttt

SEQ ID NO: 34377 - DNA, 290 bp, Glycine max
  Clone ID: LIB3052-008-Q1-N1-G2
ggtgcatgatagttcagtgtctacaataccaggtggtttggtcattggtgttaagttgacgaccataaacaatatgtgtgcatatgggctcaatcctggtatttcaggttctcgtcttttgggcaccattcctcagtccatttcacagcaaactgtttggaatcaaatggcaacagtgagaacaccattgaattttgattctagcaagcagagcttttgtcaattctctattgatcttcttggtggatgaattttagtggacaaaactggagattggatcacacttatac

SEQ ID NO: 34378 - DNA, 107 bp, Glycine max
  Clone ID: LIB3052-008-Q1-N1-G5
ccaccgccatgtcatactcgtttctatgatcccttttttgagttagcaaaacacccttctgaggctgggaaatggatggtcacggatgaagatgatgatggatcata

SEQ ID NO: 34379 - DNA, 349 bp, Glycine max
  Clone ID: LIB3052-008-Q1-N1-G7
cgttagtccttccaatccaacactttttggaaatgcagttgtgcgagtattggcttcactggacactcggagagcatttttgagcctccgtgctgctggtgttcctcataacgaagcttcgatggcaatactgatccaagaaatgctttcaccggatttatcatttgtactacataccgtgagcccaacaaaccaggataataattgtgtggaggctgaaattgcttctggccttggtgaaactctagcttctggaacccggggtacaccatggcgtatatcatctgggaaatttgacaggcaagtgcaaacattggcttttgcaaacttcagtgaggaattgctggta

SEQ ID NO: 34380 - DNA, 453 bp, Glycine max
  Clone ID: LIB3052-008-Q1-N1-G8
ccttaacctcgaatttcgcttcaactttaataattaacttttcctggctaacacacataaattcgttccgtcaaattttccagtgggttgcttattaccttttttcttcaattttttctattctttactttaattactttcttaaccttcttttctaattctttattttttttttttatttttttttttattctttttttcttattttttttctaattctttttattatttaagatatttctttatattctttctttatcttatataattttttttctatttttttatacttttttttcttttttttttttttctttttttttatttttttatacttttatttttttatatttattttctttttatttttattttattttattttattttattctttttcatatatttatttttctttatttttttttttatttttttttcttaatttttttt

SEQ ID NO: 34381 - DNA, 274 bp, Glycine max
  Clone ID: LIB3052-008-Q1-N1-H10
ggaaaggtgttgcgatcaattttgtcacaaaggatgacgagaaaatgctgtttgacatccagaagtggtacaacgtgcaagttgaggagctgccttcaaatgttgctgagctcctttgatcagattttgtcctccgtcgtagtacatgaaattagtttgcgtttggaaactgttatgtaatgtttcttactctaacctgtctcccccccctttcctttctttggttgtacttccgctcttaaactttgtttaatatgcttagtaatttaatttt

SEQ ID NO: 34382 - DNA, 247 bp, Glycine max
  Clone ID: LIB3052-008-Q1-N1-H11
gaacatacgataaggtcaccaaatagaatgctgaaccagatgaaatgatgtacaagtcccctgtcttcaatctatttggtgaacatatgacaaggtcatagacttcacattatctgcagcattgacccctctaccagcttgggattatagaccttccagtccttctatattgggggaggagccaattcgcactcagtgctttctggattcgaacctgccatccttgacactgcttttaatgaatcat

SEQ ID NO: 34383 - DNA, 142 bp, Glycine max
  Clone ID: LIB3052-008-Q1-N1-H12
cctctaactcgaattcctcaacaccttgctttctaccatcccctaagaatgtcttctctgatctttaccctttttctgctttctttctttatccatatccccctcaaccatacctgtgtcacctcaaatatgtcccaggctc

SEQ ID NO: 34384 - DNA, 406 bp, Glycine max
  Clone ID: LIB3052-008-Q1-N1-H5
agccaaaggaggttagaccaggtagaggcgggtttcatgagaatgcatcatcatgcatatgtgaagattctgcagcagccaaagtggacaaaaattcacaatctagaaaatatgggaaggataatacaacgaagaaaaatgtagcaaatgatgaactggatgttgacaatgtgtctgagtggccagacatggatgatgatgacgatgatcagaatgatctagcagagaagggtacattcaatgaaacaatttcggattatgatgctctgaacttcgaggatcccgagttggaggaaattatatcagattagtgaaggtgctttattcagtgctgatgtacctgttgacttattatggttctttgccaactccatttgacagctggcttataagctctaaaacaggg

SEQ ID NO: 34385 - DNA, 259 bp, Glycine max
  Clone ID: LIB3052-009-Q1-N1-B10
gaagaagggatagaatggacgaaaaggcaaaagctgagcaggagaggataggtatgaccgagacttggttgaagaagcaccgtcttctttacaatggagccactagacaccctcttattattagcattcgcgatggcaccatcaacactgcttccttcaaaacatggctcgcacaggattacttgttcgttcgggcgtttgtcccatttgtggctagtgtgcttataaaatcgttggatgaatcatattgcaattttta

SEQ ID NO: 34386 - DNA, 181 bp, Glycine max
  Clone ID: LIB3052-009-Q1-N1-B11
ctacaaactcggaattctctctaaagaaaactttttccataacaacctaataaaattagtaagactaacttgaacactaggttgctactttacaccttcacctcatacctaccttccaccacctcccataacttactctacataaatatcaatccaattcaaaactattacatatactact

SEQ ID NO: 34387 - DNA, 410 bp, Glycine max
  Clone ID: LIB3052-009-Q1-N1-B4
aaaacactattttaaaacttattcagtatatggattaaatgcaaagatataaacattagtggggtggatgctaaaatttttatttattaaattataaaaaataattttaattataaattaaatattattaattttaaataattaaatatttaaaatattacaataatatatataatttaaaattattataataaaatattattaattttaaaaatataaataatattataatatattaattatataatattaaattaatatattttatattatatatttattagttaatatttaattttatatatcatatatttaatatatataaatatatatattaataatttttattatatatttatataatataaataataaatatatataaataattatatatatataataaataa

SEQ ID NO: 34388 - DNA, 246 bp, Glycine max
  Clone ID: LIB3052-009-Q1-N1-B5
caggaacagctcaagaaacctcaaggggagcaggaccccgtaagtctgcgacgttttcaaagtgtccgacgaactcgctttcaaacccatcgcgccaagagacgcagctctcatgcaagccacggagaaccaagcattgggccaaactcaaaaaggaggtcccgcctcggtgatgcaatccgccgcaaccgaaaacctccgcgccggcgtcgtgggccgccaagacatctccgacgtggcgaggaa

SEQ ID NO: 34389 - DNA, 150 bp, Glycine max
  Clone ID: LIB3052-009-Q1-N1-C5
aaaaaaaataaaaaaaaaagaaaataaaaaaaaaagaaataaaaaaaatatataaataaaaaataaacaaaaaaaaataaaaaaataaaaaaaaaagaaaaaaaagaaaaaaaaaaaagaaaagagagaaagaaaaaaaaaatataatac

SEQ ID NO: 34390 - DNA, 266 bp, Glycine max
  Clone ID: LIB3052-009-Q1-N1-D10
ttggactcatatttggtgccatgcttccttactggggtcggctatgaccatgaagagtgtgggaagtgcaccttcgaagatggttgacgaggttcgtacgcagttcaacactattccacgacttatggacggtcatgccaagcctgattatcccacctgcgtcaaaatttctactgatgcatccatcactgatatgattcctccaggtgcccttgtcatgctcacaccactcattgtaggcatcttctctggtgtggaaacacttt

SEQ ID NO: 34391 - DNA, 290 bp, Glycine max
  unsure (1)..(290): unsure at all n locations
  Clone ID: LIB3052-009-Q1-N1-D12
aaagccttctgtggcatgatctttgtcctcgtctacgtacacgatcngcatttctggtgaccctacctcgtctactccaccacctcttttttttatttatttattacttactttttcgttttgcggcgtcaacaacataacttatgtggacacattaacactgccgtgacttttggcctgttcctggcatgcaaggtgtctctcattcgtgccatgttctacatggtagcacattgtttgggtgctatctgcggttttgggttggtgaatgccttcatgaagcactccta

SEQ ID NO: 34392 - DNA, 255 bp, Glycine max
  Clone ID: LIB3052-009-Q1-N1-D2
ctcattaatttcaataatggcacctactctcattgaattagccaggtttattctactagatgatggataccttaattaaatctcaccaaaaccatacctcatgtgtaatcacaatagtcaaggggaacaattaatgcactagcagccaccaacactaactttaagttggcctctaggcttctgggattgtattcaaagcctgataaaagtatactgattccatacaaggatatcaaagttgaatgtaccatatct

SEQ ID NO: 34393 - DNA, 342 bp, Glycine max
  Clone ID: LIB3052-009-Q1-N1-D6
aaatctcaattcaccgcaaaccaaaaaaagcttcagcatcgtcttcttcttctctgcgtcatcacaatggctgaagtacgttcacaacaacaacaaccccagcatgtgcaagtccacgcaaccacaacacacaccccacaacaccatggcggggaaggtggcagcggcattctgaacctcatcccggagatgtccctcacgggttcccaactcctagctctcctcgccggcgttccccttggtgcaatgctgctcctcctctccggcatctcgctcatcgccagcctcttggggctggcggtggcgacgccgctcttcatcttcttcagcccgctgctggtc

SEQ ID NO: 34394 - DNA, 289 bp, Glycine max
  Clone ID: LIB3052-009-Q1-N1-D9
cagcttgctcatcaagtccaagaaccaacctaccttgtgcgatctcaattcaatggcgtccgctctcattgcgaagcgcttcctctcctcttccctcctctccaggtccctccttcgccccgccgcttccgcttcccaccgctctttcaacaccaacgccatgcgccagtatgacaaccgcgccgacgaccacagcaccgacatcgatcgtcactccgaacgctctttccctagcactgcgcgccgcgacgatatcttctcagatgtgttggatccattttttccgact

SEQ ID NO: 34395 - DNA, 390 bp, Glycine max
  Clone ID: LIB3052-009-Q1-N1-E10
gaacaaagactatgaaagtatctatgaaattatgcagcaaaggaggctggaagaaggcgtcacttgaagttcttgatgaggaaagtaaaccaagttcatttcctaaagaactccagtcagacaatgctggattggtggaaaccgcatctgatggcaatgcaactgtggtcaataaaccatgtgacagtgggacagatacaattgatggccaatcaaatcaattggagattgctagccagacaagtgaggttgctgatttttcatgtgcagatgatgatgatagtgaccaaagttgggtggttaggtctttgtctgaatcaagtgtatcctgtataacttgtgacttttctatgcataatgttcttttactaattggtttactcttgctgg

SEQ ID NO: 34396 - DNA, 398 bp, Glycine max
  Clone ID: LIB3052-009-Q1-N1-E12
gatgaagactaagatgatgaagatgaacaaattcccgctcggcctcctcgccgaccaagccgtggaaagcgtgaacaagacgaggacgaggacgaagatgaagataaacctcgtcctagtcgaccaagccaaggaaagcgtgaacaagaccaggaccaggacgaggacgaagatgaagatgaagatcaacctcgcaagagccgcgaatggagatcgaaaaagacacaacccagaagacctagacaagaagaaccacgtgaaagaggatgcgagacaagaaacggggttgaggaaaatatctgcaccttgaagcttcacgagaacattgctcgcccttcacgcgctgacttctacaaccctaaaactggtcgcattagtaccctcaacagcctcaccct

SEQ ID NO: 34397 - DNA, 195 bp, Glycine max
  unsure (1)..(195): unsure at all n locations
  Clone ID: LIB3052-009-Q1-N1-E2
gcgaaaacattacaaaagtctcaaaacagaagcaaagccatgcacgaagcacactctaagtgcttgcattgcctactaagtanggtacgtacacgatcaccattcaccagtgatgatctttattaatatacaacacactcatagacatcttatattatatctagctatcataatctatcacatcatttcttacta

SEQ ID NO: 34398 - DNA, 364 bp, Glycine max
  Clone ID: LIB3052-009-Q1-N1-E3
attgtctttgaacactcatcaccatggccaagcttgttctgtccgtttgtttccttcttttgagtggctgcttcgctctgagagagcaggcacagcaaaatgagtgccagatccaaaagctgaatgccctcaaaccggataaccgtatagagtcggaaggtgggttcattgagacctggaaccctaacaacaagccattccagtgtgccggtgttgccctctctcgctgcacccttaaccgcaatgcccttcgtagaccttcctacaccaacggtccccaggaaatctacatacaacaaggtaatggtatttttggcatgatattcccgggttgtcctagcacttatcaagagccgcaagaatc

SEQ ID NO: 34399 - DNA, 154 bp, Glycine max
  Clone ID: LIB3052-009-Q1-N1-E5
attcttctctatcacacttactatttacaacacttacttacaatcaaaagcaagaacaactatatcattttgtggaaatcactactatgatcaatatctcaaggttaacaaatatatcaacatttataatcatacctactaatacagctactct

SEQ ID NO: 34400 - DNA, 277 bp, Glycine max
  Clone ID: LIB3052-009-Q1-N1-E6
cgttgacagctttttagaatggtgttgcgtcaagagtatgagaggaatatagtgtagtgtgcaaccttaaaaaaaaaaaaaaaaaaaaaaaaaaaaaaaaaaaaaaaaaaaaaaaaaaaaaaaaaaaaaaaaaaaaaaaaaaaaaaaaaaaaaaaaaaaaaaaaaaaaaaaaaaaaaggggggcccccaaaaaaaaaccttgtaaacccgaaaataaattccaaaccggaacttgaaggcttacaaatttcccattaaggaaacttaataaaacctg

SEQ ID NO: 34401 - DNA, 302 bp, Glycine max
  Clone ID: LIB3052-009-Q1-N1-F10
gaaagttacaccatggacaatgcctctcaactcctcgaaagagcttctgatattcttgactagcccaagcctcacatcgatgattcctccatggactttctcaatcgtttccctctcccagtcatcatcaatgcattacatactcacttagatgtgcctggcctagaaaatactcttgttgcatgccttgaaaggttattcaatactaagttgggtgcttctctgatcccacaatatatgccttttgttcaagttggtctgcaagcttattcttaagcagtcagatccttaacttgcaaaac

SEQ ID NO: 34402 - DNA, 314 bp, Glycine max
  Clone ID: LIB3052-009-Q1-N1-F2
caagaagtcctgagtaagcatctagaacaaagctctgaatgtgagtttgaaaactggaacgcgtagaatgaacggtacccctccctcataaataaaatctactactaaacgctcttctcttctgcaatcaatttgcaaaccaaacacaacacaaggagaagaaccagatctctctttctcaaatcaccaagaatagttgaaaatggggctgtctttcacgaaactgttcagccggctcttttccaagaaggaaatgcgtattcctatggtgggtctcgactccccccgtaagaccaccattctctacaaactca

SEQ ID NO: 34403 - DNA, 92 bp, Glycine max
  Clone ID: LIB3052-009-Q1-N1-F4
gctcactgatcgagctctcttgcgccgaagatgaacgggggtaaggtatcttcctaagctgggggagggatattgaattattgatttttttt

SEQ ID NO: 34404 - DNA, 202 bp, Glycine max
  Clone ID: LIB3052-009-Q1-N1-F5
cacgatccatctacacggtcaaaaagaaaatcgttggcctggagaaaatacggacacggagacagagagagggagagagagaaggaaatgggaagcacaaagtttctattgttggtgatggtgtttctcgcagtgtgcgtggggacatgcaggccttggggtgatgatgtagttgaagatggagaggatgccaaacattttg

SEQ ID NO: 34405 - DNA, 135 bp, Glycine max
  Clone ID: LIB3052-009-Q1-N1-G7
tgattagtcattatcatcttcataattcatttaccgtattgctttctttattttcggattagggtaactaacatcaatttttgtattttgcttcagtgattaattgtcacctctatttcaaagtctcatcttttt

SEQ ID NO: 34406 - DNA, 406 bp, Glycine max
  Clone ID: LIB3052-009-Q1-N1-H6
gcaaaatgaccaagttcacaatcctcctcatctctgttcgcttctgcatcgcccacgcttgcagcgcctccaaatggcagcaccagcaagatagctgccgcaagcagctccagggggtgaacctcacgccctgcgagaagcacatcatggagaagatccaaggccgcggcgatgacgatgatgatgatgacgacgacaatcacattctcaggaccatgcggggaagaatcaactacataaggaggaacgaaggaaaagacgaagacgaagaagaagaaggacacatgcagaagtgctgcacagaaatgagcgagctgagaagccccaaatgccagtgcaaagcgctgcagaagataatggagaaccagagcgaggaactggatgagaagcagaagaagaaaatgga

SEQ ID NO: 34407 - DNA, 277 bp, Glycine max
  Clone ID: LIB3052-011-Q1-N1-A1
cggttaaaggtgagacacaatgaatggtaataattgaggttttaaaatgcagtgaggaaaggaagcttaatagtccatcaaggaaacagtttgcaacattgatgcttctgtcaaagctggcatggagaaaaccatagccactgttcatgaaaaggctcttagaatgacgggacgtgattccctgccaaacgagttggcttcccataacaaagatgccaaaaatgattagccaggcataactggacaagcaatctgctgcattagataacacggtggc

SEQ ID NO: 34408 - DNA, 371 bp, Glycine max
  Clone ID: LIB3052-011-Q1-N1-A10
agaggttgggcaaggactccattaagcccttcgatgcttggtctctcggcctcaaatccctaattgatcctatgagctgccagaaaggccatctattttgcaaagagtgcattcttcagtgcctcttgtctcagaagaaagacattcaaaggaagcttgcagcccatgctgctcagcagaagcaagaaaaagaggaggaagaagagaagttgaagttgcaaaaggctaaagagcttgatgcatttgatcaacaaaatcatggtgctgtaccacaatacagcgacagaaattatagtcgtgataagaatggtttccatggggcaaacagtgtgaaggtcacttcctatgaggaggaagcccttcggacaatg

SEQ ID NO: 34409 - DNA, 413 bp, Glycine max
  Clone ID: LIB3052-011-Q1-N1-A11
aagggaacggtgagttttggtaagagaaggaacaagacccacaccctgtgtgtgaggtgtggccgccgcagtttccacctccagaagagtcgttgcgccgcgtgcgctttccccgctgcgcgcaccaggaaatataactggagcgtgaaggccattaggagaaagaccaccggaactggaaggatgaggtacttgcgtaacgtgccccgtagatttaagagtggcttcagagacggtaccgaagctgcacccaggaagagaggagctgctgcctctacctaagctttgaataatagcaatttttgctgggtcagtgaattatataggatttaatgtttctatgctgatgccgagctctttggaacacgtttctttctggcgtcttaatttcatttaatatgtagtggctttgt

SEQ ID NO: 34410 - DNA, 335 bp, Glycine max
  Clone ID: LIB3052-011-Q1-N1-A12
atcattccgagcgtccttgctaaacgtcgcactcactggatgaagccaagaactgccaggcccagatgggcaatgatctggccaaactcgaggcgagcgctactgacgtatactctaatcacggtgagcaccgatgatgtcgacatcttgagcaaggtctatgttcgtgaccactatctaacttgcatacccattagtgagatcgactacactgtcaaatgcgcatgcagctacatcgcatcaggggaaatttcacacccattatcgatgaacgcccaggacacggccatagcggatgtgcctgatgcggttgcatacagcatattgctcagctt

SEQ ID NO: 34411 - DNA, 373 bp, Glycine max
  unsure (1)..(373): unsure at all n locations
  Clone ID: LIB3052-011-Q1-N1-A2
gtggaatacaagagggagtggaggccagtagaaccccgttgtttattcggcatacacatcgtcgggggctagccaccgagtgcagtgcaaccatcggaaaataatggcagagacagattcgtcgtcctcttcagatggagaaccctcgcaatcgctggcgtcgattgcggagaatcttcagcgttctgccattcaatctgctcgaactgtgcaacattnaaagctcttcaactcatttccgtgcctttcagaattttttaccagaagcagtatcacagtatagaacatatgaagatgcttttgtcaataaagttaaagatggactgatgattgcaaaggagaatccagctgtaagtgctggtgtagctatttc

SEQ ID NO: 34412 - DNA, 376 bp, Glycine max
  Clone ID: LIB3052-011-Q1-N1-A3
ctttgaacactcatcaccatggccaagcttgttctttgcctttgttgccttcttttcagtggctgcttcgctctgagagagcaggcacagcaaaatgagtgccagatccaaaagctgaatgccctcaaaccggataaccgtatagagtcggaaggtgggttcattgagacctggaaccctaacaacaagccattccagtgtgccggtgttgcccttcctttttcgctgcacccttaaccgcaatgcccttcgtagaccttcctacaccaacggtccccaggaaatctacatacaacaaggtaatggtatttttggcatgatattcccgggttgtcctagcacttatcaagagccgcaagaatctcagcaacgagga

SEQ ID NO: 34413 - DNA, 358 bp, Glycine max
  Clone ID: LIB3052-011-Q1-N1-A4
agccaaaggaggttagaccacgtagaggctgctttcatgagaatggatcatcatgcatatgtgaagattctgcagcagccaaagtggacaaaaattcacaatctagaaaatatgggaaggataatacaacgaagaaaaatgtagcaaatgatgaactggatgttgacaatgtgtctgagtggccagacatggatgatgatgacgatgatcagaattgatttcctaacagagaagggtacattcaatgaaacaatttcagattatgatgctctgaacttcgaggatccctagttgcaggaaattatatcagattagtgaaagtgctttattcagtgctgatgtacctggtgacttatta

SEQ ID NO: 34414 - DNA, 382 bp, Glycine max
  Clone ID: LIB3052-011-Q1-N1-A6
tgaggttgtagctgctactggtgatggaaccaatgaggctcctgcactgcatgagtcagacattgggcttgctatgggcatatctggaactgacgttgccaaagaaaatgctgatgtcattataatggatgataacttcactactattgtcaatgtgtgccagatggggacggtccatatacataaacattcaaaaatttgtgcagtttcaaggggttaacagtcaatattgttgctctgattattaacttagattctgcatgcatcacaggatctgctcccctcacagctgttcagttgctttgggtcaacctgattatggacactctgggtgctttggccttggccactgaacctaccaatgatggacttatgctaagac

SEQ ID NO: 34415 - DNA, 386 bp, Glycine max
  unsure (1)..(386): unsure at all n locations
  Clone ID: LIB3052-011-Q1-N1-A7
gagtgtccttaacaggagtagttgtcattgtataatagtaataataaatctaattaattaaaaaaataaaagacatattaaaaaatcataatattttttatgaaatttaaaatattaattgtatttgttaatacttgtatcaaaatcttaaactatcttataaaattgaatagagagagtatactactccaaacttaaatttaattaaanaaatttaatcaatttttatgttaattaaacaaatcggtttatatcgttaattttactatttgcatttaagaaatttttttcttctaaattagtaactttcattaaaatctgatattaataataaaaaaatgacacattaaaaatagaatctcaaataatanaaaatatttttttta

SEQ ID NO: 34416 - DNA, 346 bp, Glycine max
  Clone ID: LIB3052-011-Q1-N1-A8
aaataatttaagatactatgatgagagcacggttccgggtactgttgctgggacttgttttcctggcttcagttattgtctcatttgacattgcttactgggaaaaagagaaccccatacactacaagtgtattcagagttgcaatagcgagagagactcgtacaggaaccaagcatgcctcgctcgttgcaacctacttaaggtggagaataatagatcaatgtgatgaaagtgaaactccatgaccacatatcacgaccacatacatctgtacagggaacctcagcaacccttctagaatgatgactacgattatgagctgccacgtacaatcccattctgacg

SEQ ID NO: 34417 - DNA, 402 bp, Glycine max
  Clone ID: LIB3052-011-Q1-N1-A9
ggataagccaaaactgaatctcgaggaagataactacaatgaagcaagaggaatggatgattacgacagcgttgctatcgttgctggttgtttcatattttccgacggtagattacggagtcgttcctcctcgtactctgctcaataagctgtcagacggcaaatatctcaacacttacgagctttggttcgaccaaaccctcgatcacttctatcactatgatcaccgtacaatttcggcaacgttactatgagtcactagactatttccggattcccgatggaccaattgttttggtaataggtggtgaaggtatattgaatggagtagctaatgactatctcgctgtactggcaaagaagtctcgagcagctatggttactcttgtacattgctactac

SEQ ID NO: 34418 - DNA, 361 bp, Glycine max
  Clone ID: LIB3052-011-Q1-N1-B1
cggctcgaggtgagaaacaaagaaaggaaataattgatctttgaaaatgcagggaggaaagaaagctggagagtccatcaaggaaacagctgcaaacattggtgcttctgccaaggctggcatggagaaaaccaaggccactgtccaggagaaggcagaaagaatgacggcacgtgatccgatgcaaaaggagttggcaacccagaagaaagaaggcccaaaagatgagccaggcagagctggacaagcaagcggcgcgtcagcataacacggcggcgaagcaggctgccacggcagggcacatgggacaacccatggggacccatcagacgtcagctatgcccggtcatggaaccggaca

SEQ ID NO: 34419 - DNA, 392 bp, Glycine max
  unsure (1)..(392): unsure at all n locations
  Clone ID: LIB3052-011-Q1-N1-B10
ctcgtaaatgtgttacgagaattgtatttgcacagtccagaggaagctcgccaattgagaaggaaagctctctctcgtattgaatggctgcaaaaagctgatgtgcctactatagcacagattgaagagttccattcgatgcagaggatgatgaatgctcctgattcaaatgataacatcgatctactgttgagcattgatctgttgggtttacaaggagcaggtaaagcttttccaaacaagattgtttttgatgataagcttgtgttggctaacacacaagaattctttgatggaaattttccagtggattcttggttaccaatttttgtgaattgtctttatcctgtaagtcaattaccttcagaagctgtncgtgtgaatgttacatg

SEQ ID NO: 34420 - DNA, 396 bp, Glycine max
  Clone ID: LIB3052-011-Q1-N1-B11
ctcgtaaatgtgttacgagaattgtatttgcacagtccagaggaagctcgccaattgagaaggaaagctctctctcgtattgaatggctgcaaaaagctgatgtgcctactatagcacagattgaagagttccattcgatgcagaggatgatgaatgctcctgattcaaatgataacatcgatctactgttgagcattgatctgttgggtttacaaggagcaggtaaagcttttccaaacaagattgtttttgatgataagcttgtgttggctaacacacaagaattctttgatggaaattttccagtggattcttggttaccaatttttgtgaattgtctttatcctgtaagtcaattaccttcagaagctgtcgttgtgaatgttacatgtggt

SEQ ID NO: 34421 - DNA, 380 bp, Glycine max
  Clone ID: LIB3052-011-Q1-N1-B12
catgcaagccccactcaaccaccacacctctactcgttcacgctaccgctttctgctctacttctacctttcaagttttaaaagtataaagatggcagagacattcctatttacctcagagtcggtgaacgagggacaccctgacaagctctgcgaccaaatctccgatgctgtcctcgacgcttgcctcgagcaggacccatacagcaaagttgcctgcgaaacatgcaccaaaaccaacttggtcatggtcttcggagaaatcacgaccaatgccaacgttgactactagaagatagtgcgtgacacctgcaggaacattcggcttcgtctcaaatgatgtgggactggatgccgacaactgcaaagtcctcgtcaac

SEQ ID NO: 34422 - DNA, 215 bp, Glycine max
  Clone ID: LIB3052-011-Q1-N1-B2
ctaagaactcgaatagtgcattcttaactatggctcgctgctactgcgacaggctagaagcacacgatgacagctggtactatttctacgttggcaaatcctcaagctgggtacgaatcatggaagtcgatacggtgcttaccacatcagctatcactgcctaaccctatgaatctgcctaagatggtcaaaagcctgtgacgtctgtaaatgca

SEQ ID NO: 34423 - DNA, 365 bp, Glycine max
  unsure (1)..(365): unsure at all n locations
  Clone ID: LIB3052-011-Q1-N1-B4
ctgatcctgattctggtaaaggaaagagcaagatgaagaagaacataactcatggctttcacttggtaaaggggagatcaggtcatgccatggaagactatcttgttgctcaattcaagcaagttgacgacaatgaattgggtttatttgcaatatttgatggccactcaggtcacagtgtacctgattacttgaagtctcatttgtttgataatatncccttctgaaagagcctaacttctggacagaacctgctgaggctgttaagagagcatatggtataactgattctactattttagacaaatcaggtgaattgggtagagggggttcaactgcggttactgcaatattgatcaactgtc

SEQ ID NO: 34424 - DNA, 365 bp, Glycine max
  Clone ID: LIB3052-011-Q1-N1-B5
ctcgcaaatgtgactcaagcatcgcatcgggacacgcgcgcactagctcgccaagctcgaatgctagctctctgtcgtatagaatggctgcaggcagctgacatgcctactatagctcgaatcgaagaactacatacacatgcaacaggctatgaatgctaatgattcatacgataacatacacctactgctaaccattcatatgctgcggaataatacaactagcaagcatggactttccccacatgattcattgtcatgataaacatgactaccctagcacacattaactacttgatggaaatgcttcacacctatctatgaacataccaatttgtgtcaaatgatctttatcctgtatgcca

SEQ ID NO: 34425 - DNA, 374 bp, Glycine max
  Clone ID: LIB3052-011-Q1-N1-B7
cgcttcagcacaatgggtgcctacaagtatgtttcggagctatggcgcaagaagcagtctgatgttatgagattcttgcagcgggtgaggtgctgggagtatcgccagcaaccttctattgtccgtttgacaaggtctactcgcccagataaggctcgtcgcttgggtttcaaggctaagcagggttacgtgatttaccgtgttcgcgttttaacgaaggggtggccgtaagagaccagttccaaagggtattgtttatggtaagcccaccaaccaaggtgttactcaactgaaatttcaacgcatcaagaagtctgttgccgaggagagagccggaaggaagttggatggcctcagggttctcaattcatact

SEQ ID NO: 34426 - DNA, 392 bp, Glycine max
  unsure (1)..(392): unsure at all n locations
  Clone ID: LIB3052-011-Q1-N1-B8
ggtgaagtggacttgggagggatggatttctcgaaattgggggggatgggtgctgatgcaatgggagggatggatgcaatgggaggcatgggtgggatggatttctctaaatttggtgggatgggtgatgcaatggatgacattgatgagagtgacgatgaagagcaagaagtgtcaaagcctgttgaacaagatgcacgcgaggggtcagnaaacccgagaaaaaagaggctgctccaagcacataatgttgttgcaatcaagacgctaccctagaatatgtgcatgaaaattctcgagtgaaattttctctatccttaccattaattggtagctttttaagtagagacgttcatgtgtctctcccgtgttggctagacttttagcactta

SEQ ID NO: 34427 - DNA, 298 bp, Glycine max
  Clone ID: LIB3052-011-Q1-N1-B9
tcagtttggtataaccttagccgaggtcacgaggagcactagctagtttcacaatttccaaatggctaggggattgaagaagcatctcaagaggctcaatgctcctaagcattggatgcttgacaaactgggtggtgcatttgcgcccaaaccctcatctggaccacacaaatctagggagtgccttcccctcatactcatcctacgaaaccggctaaagtatgctctgacttaccgtgaagtcatcgctattctgatgcagagacatggtctttgtgatggaaaagtcaagactgac

SEQ ID NO: 34428 - DNA, 403 bp, Glycine max
  Clone ID: LIB3052-011-Q1-N1-C10
cgcaaatcttttagataaatctctaaaggaattagaaagtggagtatactgcgatgtgtgatttgataaaaatttttattgtacagattccgaatgagaaattgtcattccatttaatttaattgggatgccctgaatctgacatgtctcttggaatgagtaacatgaaactcagaattatggatgtattgaatactccctaataaaaagggaattggtctatggtcaattcagtaacaaaaaatatgaaattataaatataaatttctaactgtacgtacctagtgaaaaaaaaaatattttttcttgtagaattagcgattccatcttttttagaaagaactgaaattatgttcaaataagcaaatatatcgtggttgcagaagtctatacatcgcatata

SEQ ID NO: 34429 - DNA, 399 bp, Glycine max
  Clone ID: LIB3052-011-Q1-N1-C11
cagttcagtgtctacaataccaggtgattttgccattggtggtaagttgacaaccataaacaatatgtgtgcatatgggctcaatcctggtatttcaggttctcgtcttttgggcaccattcctcagtccatttcacagcaaactgtttggaatcaaatggcaacagtgagaacaccattgaattttgattctagcaagcagagcttttgtcaattctctattgatcttcttggtggaggaattttagtggacataactggagattggatcacacttatacaaaattctccaattagtaacttgatgagagttgctgcttggaagaaaggctgattaatggctaagattgtgatgtctgggaatgcatcactcaaaaagagtgattgggcctcattggt

SEQ ID NO: 34430 - DNA, 392 bp, Glycine max
  Clone ID: LIB3052-011-Q1-N1-C12
ctcgtaaatgtgttacgagaattggatttgcacagtccaaaggaagctcgccaattgagaaagaaagctctctttcgtattgaatggctgcaaaaagctgatgtgcctaccatagcacagattgaagagttccattcgatgcacaagatgatgaatgctcctgattcaaatgataatattgatctactgttgagcattgatttgttgggtttacaaggagcaagtaaagcttttccaaacaagattgtttttgatgataagcttgtgttggctaacacacaagaattctttgatggaaattttccagtggattcttggttaccaatttttgtgaattgtctttatcctgtaagtcaattaccttcagaagctgtcgttgtaaatgttacatg

SEQ ID NO: 34431 - DNA, 376 bp, Glycine max
  Clone ID: LIB3052-011-Q1-N1-C2
atctcagggcactagtcttgtcatccttacataagtgggtcctgtacgacactgggaccttgaagtttcttgactcctcaaattttcagatgttgttgagacctattgtttcacaacttgttgtagatccaccagcactgttggatgacagcattaatataccaagtgtgaaggaagttgatgacctactggttgtatgcattggtcaaatggcagttggggactgctggatcagaccttttgtggaaacctttgaatcatgaggttttgatgcagacacggagtgaaaaattgcgagctaaaatattgggcctcagaattgttaaatattttgtggagaacttgaaagaagaatatctagtgttcatagctgaaa

SEQ ID NO: 34432 - DNA, 177 bp, Glycine max
  Clone ID: LIB3052-011-Q1-N1-C3
ctcaatactccatagtcttgaaatagggccttaaatgtgtcctgggggacactggcatcaatgggttcctcaaatccactaaccttcagctccttgacatgagatctgcatcacacagggatttctaaccacgcacaatgtggaactgaagcatctcaaatagcatacttattaagc

SEQ ID NO: 34433 - DNA, 389 bp, Glycine max
  unsure (1)..(389): unsure at all n locations
  Clone ID: LIB3052-011-Q1-N1-C4
catttggatgcacgccatctaacaatccgatcacctgcgagtggtaaatatgatcttgaaattgttacagatatttgtccacagaaaaacacatcattagagggactgtacaaatcatctgggaatttctgtactcaatgtgaggctgaaggctttcgtaagattacatattatcaggatcgacctgatataatggcaaaatatacagttcgcattgnagggtgcatatgaatcactgtattcagtgttattgtctaatggaaacctagctgaacaaggtgacttagaggatggcatgcactatgctgattgggaggaccacttcaagaaaccttcttatctgttagccttggttgctgggcaattgcagagcagagatgacacattta

SEQ ID NO: 34434 - DNA, 370 bp, Glycine max
  Clone ID: LIB3052-011-Q1-N1-C5
ctcgtaattgtcttacaagaattgtattggggcaatcgatatttagctcgccaatttacaatgaaagctctctttcgtattgaatggctgcaaaaagctgatgtgcctaccatagcacatattgaagagtaccattcaatgcacaggatgatgaatgctcctgattcaaatgataatattgatctactgttgagcattgatttagttgggtattcttacaagtatcatgtaaagcttttccaaacaagattgtttttcatgataagctagtgttggctaacacacactaattctttgatggaaattttccagtggattcttggttaccaatatatgcgaattgtctttatccagtaagtcaattaccttt

SEQ ID NO: 34435 - DNA, 339 bp, Glycine max
  Clone ID: LIB3052-011-Q1-N1-C6
ctagagtctcacaaaattcttgcgttttcggactatggcctcgcacgtcaacattggctatcacacttcctcttctccgtatactaactgcactaagattctctcacacctgaagctgactagtaactcctatttgcactcgccactcatgcgcgacatgactgttctggcaaccagcgcagcccattacatggacgctcacacctgtctgtccccagatatcgctcgtacgttgcagaaccacaatagtacacactttcaacaccttctactaggtgtctatccacagtgccaggttgcttgtcctccaatacatgaacagctgttatcatcacaaga

SEQ ID NO: 34436 - DNA, 330 bp, Glycine max
  Clone ID: LIB3052-011-Q1-N1-C7
ccttagtatcacttcccttagtccaatatggggaaggggttcttaactctatctctatcatcactatgcttgctactcttgtacaatgcatgctttgctattacctcacacaagtctaacgagtgacaactaatacaacctcaacacgttgcaaccctaccaccattcttgagtccgaacgtggctcttatctaaacatggaactatcaccgcaataccagatctgcattgcacctggtcactgctaacaatcccacccttaaccgcaacggactacacttgccatctcactcaccttatccgtaactgatcattctcgctcaagggaaa

SEQ ID NO: 34437 - DNA, 387 bp, Glycine max
  Clone ID: LIB3052-011-Q1-N1-C9
tagttcagtgtctacaataccaggtgattttgtcattggtgttaacttgacaaccataaacaatatgtgtgcatatgggctcaatcctggtatttcaggttctcgtcttttgggcaccattcctcagtccatttcacaggaaactgtttggaatcaaatggcaacagtgagaacaccattgaattttgattctagcaagcatagcttgtgtcaattctctattgatcttattggtggaggaattttagtggacaaaactggagattggatcacacttatacaaaattctgcaattagcaacttgttgagagttgctgcttggaagaaaagctgtttaatggttaagattgcgatgtctgggaatgcagcagtcaaaacgagtgattg

SEQ ID NO: 34438 - DNA, 384 bp, Glycine max
  unsure (1)..(384): unsure at all n locations
  Clone ID: LIB3052-011-Q1-N1-D1
gtctcaaagagaaccacgaagacataagaataagaacgcttttcagttcaactctaaaaggttccaaactctcttcaaaaaccaatatggccacgttcgcgtcctccagaggttcaacaaacgctcccaacagcttcagaatctccgagactaccgcattttggagttcaactccaaacccaacacccttcttctcccccaccatgctgacgctgnanttttacctcatcgttatccttaacgggactgccattcttaccttggtgaacaacgacgaccgagactcttacaaccttcaatctggcgatgccctaagagtccctgcaggaaccacatactatgtggttaaccctgacaacgacgagaatctcagaatgataacac

SEQ ID NO: 34439 - DNA, 301 bp, Glycine max
  Clone ID: LIB3052-011-Q1-N1-D10
cacaaaagtgtctactaaagcaagagaggaagtagatagtgtagaattctccgcagtgaacaatgagaatacatctgagcgtacagatagcgaatgaggaactggcattccatgtaacaaaattgagatgccctgacactgaaatggctggtatcatgtggcacctgagagtacaccatatggatgtgatgaaaactagctaagtcgaaggcaattggcctatgagcaaatcagtggcagaaaatatgaggtcataaatataaattgctatctacacatacataatgctacaaaaaataac

SEQ ID NO: 34440 - DNA, 198 bp, Glycine max
  Clone ID: LIB3052-011-Q1-N1-D11
cactacagtgtctcacataccccgggagtaactcattagtgtacatttgagcaccatgcccgctgagggcccttatccgctcactggccgcatttcaggtacttgcacatccgctcaccatacctgagaagctcttacaataacctggctgaagtcaaatgtcgccagacactacacgactgtattgttacgatgcct

SEQ ID NO: 34441 - DNA, 392 bp, Glycine max
  Clone ID: LIB3052-011-Q1-N1-D12
gaaagctctgtctcgtattgaatggcttcaaaaagctgatgggcctaccatagcacagattggagaggtccattcgatgcataggatgatgaatgctcctgattcaaatgataatattgatctactgatgagcattgatttgatgggtttacaaggagcaggtaaagcttttccaaacaagattgtttttgatgataaacttgtgctggctaacacacaagaattctttgctggaaattttccagtggattcttggttaccaatttttgtgaattgtctatatcctgtaagtcaattaccttcagaagctagtcgtgcaaatgatacatgtggtagtggacgtggtggtttacctaccactgcttggattaggtctgcaggtaacaatcgct

SEQ ID NO: 34442 - DNA, 385 bp, Glycine max
  unsure (1)..(385): unsure at all n locations
  Clone ID: LIB3052-011-Q1-N1-D2
ccaccaccaattccaacaacaataatccttcctcggacgactccgtctccgccttccgcgccctctcaacagaacacatctggtccctcgaagcccctctccgcgacgcccactggcgctccctctacggcctctcctaccctgtcttcaccaccgtcgtcgacaagctgaaaccccacatcgccctctccaacctttccctcccttccgactacgccngggttcgctatggtcctctcccgcctcgcccacggcctctccgccaaaaccctcgcctcccgctactccctcgacccttacctcgtctacaagatcaccaacatggtcactcgcctnctcgccaccaagctctaccctgaattcatcaagatccccgtcgggcggc

SEQ ID NO: 34443 - DNA, 387 bp, Glycine max
  Clone ID: LIB3052-011-Q1-N1-D4
atcgcccagtacaaaaatccttcagtgagagttggttcacattttgctcttacagagataaaaaggaaattgaaatgtgctatgggaaaggagaggcatggaaaccctgaattgatcccacgcaaactccccgttgaacgtcaaaataagctgccaagaggaaaatgcaaagataatgctggaatgagatctcctaataaagaccatttcttcattgaaaaaaaaaattacaagacctatgtttaatgtagtgaaaggaaacaagaccggtacaatgaaagactctgaattgaatgtggaacatgaaagtggtattcccaatcaaagtgtttctaacatatatattgaggctaggaaacatctgtgtgagatgctagataatgctta

SEQ ID NO: 34444 - DNA, 350 bp, Glycine max
  Clone ID: LIB3052-011-Q1-N1-D5
cttgtctctgaacactcatcaccatggccaagcttggggtttacctttgattccttattttcagtggctgcattgctctgagagagcatgcacagcaaaatgagtgccagatccaaaagctggatgccctcataccggataaccgtatagagtcggaaggtgggttcattgagacctggaaccctgacaacaagccattccagtgtgcccccgtgcattgacctctctcgctgcacccttaaccacaatgcccttcgtagaccttactacaccaacagtgcctaggaaatctacgtacaacaaggttatggtatttttggcatgatattcccgggttgatctagcactta

SEQ ID NO: 34445 - DNA, 361 bp, Glycine max
  Clone ID: LIB3052-011-Q1-N1-D6
gttcaatatcctagtataccttaataaataatttaagggactatgattagagcacggttcccattactgttgctgggacttgatttcctggcttcagtttctgtctcatttggcattgcttactgggaaaaagagaaccccaaacacaacaagtgtctccagagttgcaatagccagagagactcgttcaggaaccaagcatgccacgcttcggaattgcaaccttcttaaggtggagaaagacgaatgtgcacaaggtgaaattccacgaccacgaccacgtccacaacacccggagagggaacctcagcaaccccgtgagaaagatgtagaccaagatgagccaccacgtccaatccca

SEQ ID NO: 34446 - DNA, 288 bp, Glycine max
  Clone ID: LIB3052-011-Q1-N1-D7
ccattcttgaacaacatgccaacatcaggtgtgtacggtcacgcatggcaatttgtaagaaagatgtttggagagttgaatgtggaatcccttctggatttccgctcacaggtatttgtaatagcatttttaatgagatgctcattagatatagctatgaaaaattactgcgccaggagagacttgttcaggtgccaagcatgccacgccgttttgatgcatccttcttacggtggagaacagacgactgtgcataatgtgaaattactcgaccaggattgcctccac

SEQ ID NO: 34447 - DNA, 406 bp, Glycine max
  Clone ID: LIB3052-011-Q1-N1-E10
gaccggactggcattcttaccttggggaacaacggccaccgggactgttacaaccttcaatctggggattccctaaaagtccctggaggaaccacatactatgtggttaaacctggcaacgacgagaatctcagaatgataacactcgccatacccgttaacaaacccggtagatttgaaagtttcttcctatctagcactcaagctcaacagtcctacttgcaagggttcagcaagaatattctagaggccttatacgacaccaaattcgaggagataaacaaggttctgtttggtagagaggaggggcagcaacaaggggaggagaggctgcaagagagtgtgattgtggaaatctcaaagaaacaaattcgggaactgagcaaacatgccaaatctagttcaa

SEQ ID NO: 34448 - DNA, 334 bp, Glycine max
  Clone ID: LIB3052-011-Q1-N1-E11
cagctgcacaaagcaggtgaccggatggtcaagctaccatgtgtctctgtctctcttagcgcctacgagcccgaagagtatatggcccacgagaccaatgtattaacatctgactcaaaccacgaggggcaccacgacaagctctgcgaccagatctacgatgctatgctcgacgcatgctagctacagaaccatgacagcaaggttgtctgtaacacctgcactatgaccaacatggtgacagcttacgagtagatcacgaccgatgccaacgtgaaatatgagaagaatgtgctaacacatgcatgaacattgggctgtatctgatgatggt

SEQ ID NO: 34449 - DNA, 402 bp, Glycine max
  Clone ID: LIB3052-011-Q1-N1-E12
atgcaatggttcatggtaggtcagggtctacaataccaaggggccttggcattggcgtcaagttgacaaccattaacagtatgtgttcatataggctcaatactggtattataagatctagcctcttgggcaccattcctcagtccatttaacagcaaactgtttggaatcaaatggcaacagtgagaacaccattgaactttgactctatcacgcagagctattgtcagctttatattgaccttctcagtggaggaatcttagtggacaaaactggagattggatcacacttatacaaaattctacaattagtaacttgatgagagatgctgcttggaacaaaggctgtttaatggtcaagattgtgatgtctgtgcatgcaacaatcaatacgagtgatt

SEQ ID NO: 34450 - DNA, 379 bp, Glycine max
  unsure (1)..(379): unsure at all n locations
  Clone ID: LIB3052-011-Q1-N1-E2
gaaatgactaatggaggagtagatcgtgctattgaatgcacaggaagcatccaagcatcaatctcggcatttgaatgcactcatgatggttggggtactgctgtccttgttagtgtgccaaagaaggatgcagaattcaaaactcatcctatgaagttcatggaagggagaactcttaagggtaccttctatggtcactatagaccccgcactgacatttnttcctggtgttgtggagaagtacctcaacaaggagctggagctggacaaatttatcactcactctgtcccattctcagagatcaacactgcatttgatcttatgctgaaaggggagggaataaggtgcctcatctgcatggaagagtaaatcaatgat

SEQ ID NO: 34451 - DNA, 382 bp, Glycine max
  Clone ID: LIB3052-011-Q1-N1-E4
ctacaatcacgagggcgaggtttgaggaaatgaacatggatttggtcaggaagtgcatggagccggtggagaagtgtttgcgtgatgccaagatagacaagagtcatgttcatgaggttgtgcttgttggagggtccactaggatccccaaggttcagcaactcttgcaggatttcttcaatgggaaagagctttgcaagagcattaaccccgatgaaaaaaactgttgcatacggtgcttcagttcaagctgccatcttgagcggtgaaggagacgagaaggttcaggatttgttgctgctggatgttacacctctcagtctcgggctcgaaactgcgggtggtgttatgactgtactaattccgcggaacactacaattc

SEQ ID NO: 34452 - DNA, 376 bp, Glycine max
  Clone ID: LIB3052-011-Q1-N1-E5
cttctcttgcggctagggttttagcgcagcttcttctagatttaatgaagatgggtaaggaaaaggttcacatcagtattggggttattggccatgttgactctgggaagtccactaccactggccacctgatctacaagcttggaggcattgacaagcgtgttattgagagatctgagaaggaagctgctgagatgaacaagaggtctctttttcaagtatgcctgggtgcttgataagcttaaggctgagcgtgaaagacgaatcacaattgatattgccttgcggaagttcgaaaccaccaagtactattgcacagtcattgatgcccctggacacagggatttcatcaaggacatgatcactgggacattcc

SEQ ID NO: 34453 - DNA, 336 bp, Glycine max
  Clone ID: LIB3052-011-Q1-N1-E6
ctcgagccgctctcatctccttattctactgctttcggtctctgactcaatccgcctaatccacaaataatgaccttacatgacaacattgccctcgccttctctgcagtgctcacgctgctcctctttccactactgaccgtacgggagctcgtggaggagcattcactagtcctgaggtaccacaacggccacctcctgaacggccgctattttcaccgtcaatctcatctggtacagcgccttcaccccgatccaacagtccataatagcggacttgataaactcgttaagcagcacgccaaacgcgcctctcccctcgaccgacacctggtg

SEQ ID NO: 34454 - DNA, 388 bp, Glycine max
  Clone ID: LIB3052-011-Q1-N1-E7
ctcaaagaaattaagagagttttttttgttcctcactgaccaagccatggcgatgagaaccaaactttctttagctatctttttcttttttcttttagccttattttcaaacctagcctttggcaaatgtaaagaaaccgaggtagaagaagaagaccctgagctcgtaacatgcaaacaccaatgccaacagccacagcaatacacttgaagggggtgacaagcgggtatgcttgcaaagatgtgacaggtatcatcgtatgaagcaagagcgagagaaacaaatccaagaggaaactcgtgagaagaaagaggaggaaagccgtgaaagggaagaagaacaacaagagcagcatgaggaacaagatgaaaatccctacatttttga

SEQ ID NO: 34455 - DNA, 349 bp, Glycine max
  Clone ID: LIB3052-011-Q1-N1-E9
tgaagctgtaacgcttgaagctgcactgctaggcgctattgcacctgggactgcgtatcactatgagtatgcaccacatcagactatgctaaatactggtttcaatcatcggccctaatatcgaccgactagaccatcactggcagctctacgcttgataagggaacagcatgctgatgaatatgttgcctaggaacaaccagaccgagaaaacgaatagcacgccattgatgaagctcaagctgctcgtgcagtaggtaagactgagagcgcaaggctctcgcaggaaacttcaggaagaaccacaatgcggaactcagttatcagccaaagaagtctgactaccacc

SEQ ID NO: 34456 - DNA, 386 bp, Glycine max
  Clone ID: LIB3052-011-Q1-N1-F10
ggcaaaccgaactttctttcttgcaagctaacacagaaatggaagcagggccaggccataccctgatgttcctggcacgtgtttcaatcttcatacgcgctctaaccctatgcgctgctcacggaagcaccacggatcatgacattgcgagaaagttgaaactcagcgacaactagcttctgctcactgagaagaagttcaaggttttcatggagaattacaggaggtgctactccacataggaggagtatctgcgccatgaccggattctcgcccataacatggtcagagctgcggagcatcatgcgctggaccccaccgtcgagcacggcgtcacgcagtactgccatctcactgaggacgagtttgagaagctgtacactggc

SEQ ID NO: 34457 - DNA, 376 bp, Glycine max
  Clone ID: LIB3052-011-Q1-N1-F11
atctacatttaatcacaatcttcctcaatcatgtcttcagggacataagcagaaacacaaactttgaccacccactcttactcctcagatgttgacaatggtatagtgaaggatgtagtcctatggagaagaaagataatatgtataagcgttcttgttgcagcaacagcggcatgggtgttgatggaagtgttagaattcaacttgctcactctcatatcatgggtggccatactcggtcttgcttgaatattcctctatgccaatatgcttatacttttgggcaaggaaccaccgaacttgttgaggttggaagcgagtgaaacaacatcaacgagaatagcacacacagtactagcatggattgaagaacgaa

SEQ ID NO: 34458 - DNA, 375 bp, Glycine max
  Clone ID: LIB3052-011-Q1-N1-F12
cggctctaggccctgacttcttcgaccctaaagctggtcggggtaatggccctaacaggatcatggttgccagcctccggcaatttccactcagtgcccaatatgttgtactatacaagaatgggatgtactctccacattggaatctgaatgcatacagtgtgatctatgtgactcgaggactaggtaaggttagagtcgtgaactgtcaagggaatgcattgttcgacggtgagcttaagacgggacaattgctggtggtaccacagaactttcgtgtggcggtcaagctggaaacatggattcgtatacatcgtattcaagacacaccacatcgcatacactaactacactgaaggatgcgtgtagggcaat

SEQ ID NO: 34459 - DNA, 214 bp, Glycine max
  Clone ID: LIB3052-011-Q1-N1-F2
ttcttgttttgttgagaagagagaatggcgatgtctggatcatcataccttatcacgttctatgtgaaaccttgcattttcggctctcctccgagatccgcggtggttcggaattgtgcgaagtcaacggcagcgacaatatcaacgagttggagcctgtacagttggagggcgaagaaagcgcttcaacttccggagtccccagatgcgaaaa

SEQ ID NO: 34460 - DNA, 373 bp, Glycine max
  Clone ID: LIB3052-011-Q1-N1-F3
caccaattaagctttcaagagacatactgcgttgaaaggtggcatgccaggttgtggcatccgtcgcccttctgctctccatcaacattcttctcatttccatggttagctccagcagccactacgatccacagcctcaaccttctgacgtcactgctcttattacacgacctacttgtccggatctgagtatatgcctcaatatttcaggcgggttcccatctaggaaccgtggatgatcgatgtgccctcatcggtggccttggtgacattgaagccattgtgtgcctttgcatccaactcatggccttcggaatattaaaccttaaccgtaattagcagttgatattaaactcctgtggacgaagctacc

SEQ ID NO: 34461 - DNA, 144 bp, Glycine max
  Clone ID: LIB3052-003-Q1-N1-A5
gccatggatgcagtagctacggcgaaaccgcttgtgtcggtgtcgtttttgcttgtgctaccgtcttttcttccgatcgccgtcacttacataccctgctacatctttcccatgagccttatgggtcaatatcactactagcaa

SEQ ID NO: 34462 - DNA, 219 bp, Glycine max
  Clone ID: LIB3052-003-Q1-N1-B1
atatcctagtataccttaataaataatttaagatactatgatgagagcacggttcccattactgttgctgggacttgttttcctggcttcagtttctgtctcatttggcattgcttactgggaaaaagagaaccccaaacacaacaagtgtctccagagttgcaatagctagagagactcgtacaggaaccaagcatgccacgctcgttgcaacctcct

SEQ ID NO: 34463 - DNA, 203 bp, Glycine max
  Clone ID: LIB3052-003-Q1-N1-C12
cttcactgttctctctctgagcaaaaccgaggatccctcggagggttggtcaaatattggctaatgtggatggggcattcatctatgtacaagcgcactccttcgagagattattcaaacatggaggacttggaaaaaaaactcagatcttttagacatctgcctggacaaaggaacctcaaatccttcattgatgctttctt

SEQ ID NO: 34464 - DNA, 401 bp, Glycine max
  Clone ID: LIB3052-003-Q1-N1-D1
caggtgctgagtatatggctgcgacatacacatccattgataatttagaaagatccacagaatctattgctccagttctagaacccgatcccaatgatgtggtttccacaccaattttatctactctgcaaaccgatgagcctgatcctgatgatcaagagtttcagaggataaatgacaccacgactgctgtttgtaaccgtttgtctgaggctctggaaatgctaagaagtgaagttagtgcaatgcaagctacttcaatcctccaaactctcctaaaaataatcatgaatgtgattgaacaccctgaggtggaaaaatacaagagattactgaaggctaatccagtcattgagaggaatattgttaataataaagctgcctttggaaattctaatttt

SEQ ID NO: 34465 - DNA, 322 bp, Glycine max
  Clone ID: LIB3052-003-Q1-N1-D11
cttgcaacgattaacaatggcttcaaccgacaagtcaccgtacccaacgccggcgaagggtccggatccaactccggggaagccgatgagtgttggtcagcacgtgatcgacaagagtgcaatgatggtgcagtcgctggaccccattaagcagatgagtcagcacgtgtgctccttcgctatctacagccatgacatgtctcgccagatatagactcatcactactgctccagacttctccagaacttcttacaatgtgctgtctatgattccgaagaattcaaagcttgtctccttggtcttctatttttcttctctttc

SEQ ID NO: 34466 - DNA, 400 bp, Glycine max
  Clone ID: LIB3052-003-Q1-N1-D2
attcaaaccttgctctatactacacagtacacacactaggagaataatggcttccatcctgcactactttttagccctctctctttcttgctcttttcttttcttcttatccgactcagtcacccctacaaaaccaataaaccttgttgttctacccgttcaaaatgatggttccacagggctccattgggccaacctccaaaaaagaacccctctaatgcaagtaccagtcctggtggacctcaatggaaatcacttgtgggttaactgtgagcagcagtactcatccaaaacgtaccaagcacccttctgccactccacccaatgctctagagccaacacccaccaatgccttagttgccccgcggcattaaggccaaagtgccacaaaaacacgtgt

SEQ ID NO: 34467 - DNA, 201 bp, Glycine max
  Clone ID: LIB3052-003-Q1-N1-D5
tggagctggtaagactactttgatggatgttctggctggtgtgaaaaccggaggatatatggatggaagcatcaaaatttctgggtaccctaataagcaagaaacatatgctcgtatctctggctactgtgagcaaaatgatatccactcacctcatgttacagttaacgaatccttgctctactttgcatggcttctttt

SEQ ID NO: 34468 - DNA, 145 bp, Glycine max
  Clone ID: LIB3052-003-Q1-N1-D6
ctctctccttgttcaattctctatctctactattaatcggtctatgatccaattgggtgggcataaagcaaattaattactagagagcatacccatattttggttggtgaatttttgcaatacacatatgggaacaaagaggagc

SEQ ID NO: 34469 - DNA, 174 bp, Glycine max
  Clone ID: LIB3052-003-Q1-N1-D8
aaacactcatcagtcatcaccatggccaagctagtttttgccctttgttttctgcttttcagtggctgctgcttcgctttcagttccagagagcagcctcagcaaaacgagtgccagatccaaaaactcaatgccctcaaaccggataaccgtatagagtcataaggagggctc

SEQ ID NO: 34470 - DNA, 76 bp, Glycine max
  Clone ID: LIB3052-003-Q1-N1-E1
gcaagcattctattgttatgagtatactgaacgcttttctttaggaatggtaatatacggtactagatatagtatt

SEQ ID NO: 34471 - DNA, 349 bp, Glycine max
  Clone ID: LIB3052-003-Q1-N1-E10
gcaaaatgaccaagttcacaatcctcctcatctctcttcgcttctgcatcgcccacacttgcagcgcctccaaatggcagcaccagcaagatagctgccgcaagcagctccagggggtgaacctcacgccctgcgagaagcacatcatggagaagatccaaggccgcggcgatgacgatgatgatgatgacgacgaaaaacacaaaaacaccataacatgggagagaaaaaagaagcggcgaagaatgaagcagataagaagcctgaatcaggagcaaagcaaaacgacgaaccagtacctgtcgttttgaaactcgacatgcattgcgaggggatgtgtcaagaagat

SEQ ID NO: 34472 - DNA, 85 bp, Glycine max
  Clone ID: LIB3052-003-Q1-N1-E11
gttcactcttcttctcttgcggctagggttttagcgcaagttcttgtatatttaatgaaggtaggtaatgaaaatgatcacatca

SEQ ID NO: 34473 - DNA, 189 bp, Glycine max
  Clone ID: LIB3052-003-Q1-N1-F10
aagaatgctattctcatgaatatgccaaatgctgttcttgcaatgtggagatattttgttggagatctcgtctttgaagtttctaagatgacttctccctacattaaatgtacagtctctttcttcatagcatttggaaatttcgctgatgacaccatcaattttgaggcttttacccacttgctggtg

SEQ ID NO: 34474 - DNA, 315 bp, Glycine max
  Clone ID: LIB3052-003-Q1-N1-F11
attgtgttgagacacactctctttctttcttgttattctgtttctctttcatcatttggcgtaaaacacacacacaaaaggtggccaaaatgagcagtgtctgtgccaagcagcacaagttttacccctctcaccaactcctttctccaaagaaaaccctcagagaaattgacatccctccaaggaagctcctcactcgccgtgccgccgcatgcgtctgctgcaccgacgtgtactcctccgaggagaccatgctgcaaaagttcctcccttccaacgattctgacgaggacgacccttactcctcagaccact

SEQ ID NO: 34475 - DNA, 287 bp, Glycine max
  Clone ID: LIB3052-003-Q1-N1-F12
gaagaaagcaagtggctctgatgaagaccgcacttcaccgactcacagtcaaattgatgagaaagaggaggctccagatgaagatgatggtgatgatgacgtgcaatggctgacagatacatcacttgatgctgctcgtcaacgtatccaagaacagttaagtgctgtgacagctgatatggttatgctttctacagatgaaccagagaagaagaaaaaagctacaagtaacggaaatggcggttctcagaatgggaactcaatgcactatgggaccctggttgggg

SEQ ID NO: 34476 - DNA, 148 bp, Glycine max
  Clone ID: LIB3052-003-Q1-N1-F3
cttatagagtaaaaaaaaatggctgatacaggtggaggaggtgcagtgagaccagtggtaagatgtaataacaagtgtggctgcacacttgcatgcactggttgttccactttcatgtgtactagtttttattatatttcatataaat

SEQ ID NO: 34477 - DNA, 111 bp, Glycine max
  Clone ID: LIB3052-003-Q1-N1-F4
aaacagtctttgtggtggtgatgaaaaattgatgcctggggagaggcacctgctgttggcttgttgttcatggatggcaatttgtaagaaagatgtttggagagttgaatg

SEQ ID NO: 34478 - DNA, 153 bp, Glycine max
  Clone ID: LIB3052-003-Q1-N1-F7
ggttccatgtgaactgcacttgcacatgggttagtcgaggctaggggactggggaagcccgtctgatagcgctctgtgcgcgtactccgaaagggaatcgggttaaaattcctgaaccgggacgtgtctgctgactgcaactttatggagtcc

SEQ ID NO: 34479 - DNA, 226 bp, Glycine max
  Clone ID: LIB3052-003-Q1-N1-F9
ctccttttcttctctccacacaatttctctctcctctctgtctcgacaaatccttctttcggtcttctcttcgctgctcactgtagccatggctttcagagtaggatgagcgggagggggaaatgcctctactggcatgggtgttgctgagcataatgttaacaccttcctggaattgctaatgaataatgttcatcgctattttattattaaataatgatgatat

SEQ ID NO: 34480 - DNA, 122 bp, Glycine max
  Clone ID: LIB3052-003-Q1-N1-G1
ttcttctcttgcggctagggttttagcgcatcttcttctgtatttaaggaagatgggtagggaaaaggttcacatcagtattgtggtcattgtccatgtctactctgggaaatccactacca

SEQ ID NO: 34481 - DNA, 420 bp, Glycine max
  Clone ID: LIB3052-003-Q1-N1-G11
ctgtgctgtgctctgaggggccatagtttgggaccctttgaaccctaatctccacccaaacccattttcccgggaaattgccttggaaaagaaagagcgaagaggaaaatgcagaatcacaggctgaagcagcagcagcagcagcaacaacaagctcttatgcagcaagctcttctccaacaacagtctctctaccaccctggcctccttgctcctcctcagattgaaccatatccaagtggaaatttgcctcctggttttgatccaagtacttgccgcagtgtgtatgttgggaacatccatacacaggtaactgagccgcttttgcaagaaattttctcgggtactggcccaattgaaggttgtaagcctatcagaaaggataagtcatcctatggattcattcattactttgatcgc

SEQ ID NO: 34482 - DNA, 120 bp, Glycine max
  Clone ID: LIB3052-003-Q1-N1-G12
gagaaacatatccaataggaaactcgtgagaagaaataggaggaaagccgtgaaagggaataataacaactttagcatcatgaagaacaagatgaatattccctacatttttgaggaata

SEQ ID NO: 34483 - DNA, 158 bp, Glycine max
  Clone ID: LIB3052-003-Q1-N1-G2
agattgtggaatttgtgatcacacaacataagcatatatggagagagatgtcaggggcacaatgagcacaaccaaaggagtcaaaaacatctacaacatatgagtcagtataatgaggatagaaccgaacaatgactgacttgctttcaagggatgat

SEQ ID NO: 34484 - DNA, 309 bp, Glycine max
  Clone ID: LIB3052-003-Q1-N1-G5
aaatatgccaaatgctgttctttcaatgtggagatattttgttggagatctcgtctttgaagtgtgtaagatgacttctccctacattaaatgtacaatctctttcttcatagcatttggaaatttggctgatgacaccatcaattttgaggcttttccccacaagctggtgcagtttggagagattcaggaaaaagttgtattgaaattttcacaagaggaatttcttacatcttggtcaactcaggggcgtcctgcaacaactctgttggctgaagggtgtccatatttgtatgctatggtgcatga

SEQ ID NO: 34485 - DNA, 333 bp, Glycine max
  Clone ID: LIB3052-003-Q1-N1-G6
cttagagagaaaaaaaaatggctgatacaggtggaggagatgcagtgagaccagtggtaatatgtgataacaagtgtggctgcacacttccatgcactggtggttccacttgcaggtgcacaagtgctggcactgccacaggagggggtgatcacgtgacatgctcgtgcggagagcactgtggttgcaatccatgctcatgtcccaagattgcggctgctggaagtggttgcagatgtggcacatattgtgcatgtgccttctgcctcactttatgtatcacaccttaaggctttaaccttcacgttttatttgatgtctgcaaagtttttg

SEQ ID NO: 34486 - DNA, 352 bp, Glycine max
  Clone ID: LIB3052-003-Q1-N1-G8
ccatgtctagttttgcaatggctcttttcactcttgaagttgctgctgctagtgtagtagggagtgtgttagtgaacattgtggacaaggtcactagtgtaggaggggaggagagctggttagcaaccaacattaacagggcacatctgaattactattatgcactgctcacttgcataggttaaattaactacctctactttcttgcaataagtcgtgcctatggtcctcctgcaaggcaaacacttggagcttctacaagcatagaagaagagaaatttgattacagggagttacatactttctagataatttctttaatatacaacatggtctggaaacgcttgataaa

SEQ ID NO: 34487 - DNA, 383 bp, Glycine max
  Clone ID: LIB3052-003-Q1-N1-G9
cgttaaaacctaaaatgactggtaacgagacccattcaggttcaaaagcagccacatttgtgattaaggatctgaaattcacataccccggcgtcgacggctagccaccgccgggctccactccgctcattgaggatttcaatctcactctatgttccggccaccgctgcctcctcgccggttccaacggcgccggtactctctgaatcttaagcatttggctattcgcatatccatttataactttatctgtttttgtgattattatgaaagaccactatcctcaagatattaggagggaagcacttggtggagcctgacatggttcgcgtgctcggaagaccagcttttcacgacaccactctaatatcttctggtcatct

SEQ ID NO: 34488 - DNA, 169 bp, Glycine max
  Clone ID: LIB3052-003-Q1-N1-H1
gcgatgcggatgaggcgccactcgatgtttccatgttgccggcatgcctttggtattgtggggtgtggttcgtttagtggtgtcaagtcttgcgaacgtgatggtgcatgagtggtaatcgggatgtttttgttgctcagatacatgcttattcatgcaacgtgtgaca

SEQ ID NO: 34489 - DNA, 345 bp, Glycine max
  Clone ID: LIB3052-003-Q1-N1-H12
cgccaattgagaaggaaagctctctctcgtattgaatgggtgcaaaaagctgatgtgcctaccatagcacagattgaagagtttcattcgatgcagaggatgatgaatgctcctgattcaaatgataatattgatctactgttgagcattgatttgttgggtttacaaggagcaggtaaagcttttccaaacaagattgtttttgatgataagcttgggttggctaacacacaagaattctttgatggaaatattccagtggattcttggttaccaatttttgtgaatcgtctatatcctgtaagtcaattacctccatatgctgtcgttgtaaatgttacatgt

SEQ ID NO: 34490 - DNA, 190 bp, Glycine max
  Clone ID: LIB3052-003-Q1-N1-H3
cttctgtctatacgcagccgcgccgccagggtctgctccgtggccaaggagttgcagttcgacaaagacggcaccgcaattaggaagctccagagcggtgtgaacaagctcgcggatctggttggggtcacgcttggtccgaagggaatgaatgttgttcttataagcaaatactgctgtacttatatct

SEQ ID NO: 34491 - DNA, 332 bp, Glycine max
  Clone ID: LIB3052-003-Q1-N1-H4
ctaaaaagcgcaagaaaacaaaatccccaaaatatctctggctctgaaaccgccatggatttgcagcagagcgagttcgatcgcctcctgttcttcgagcacgctcgtaaggccgcagaagccgaatacgagaagaaccctctcgacgctgataacttaacaagatggggtggagctttattagagttgtctcagtttcagagttttcctgaatcgaagaaaatgacccaagaggctgtttcaaagctagaggaggcgcttgcggtgaatcccaagaagcatgacactctttggtgcctgggaaatgctcacacttcacaagcatttttaat

SEQ ID NO: 34492 - DNA, 360 bp, Glycine max
  Clone ID: LIB3052-003-Q1-N1-H5
gcataagctgaagacatggcattgactagaccatatgcgggatgggacttcgccacaacattggccagacttcatcacctgacatctacaaccctcaagccggtagcgtcacaaccgccaccagccttgacttcccagccctctcgtggctcagactcagtgctgagtttggatctctccgcaagaatgcaatgttcgtgccacactacaacctgaacgcgaacagcataatatacgcattgaatggacaggcattgatacaagtggtgaattgcaacggtgagagagtgtttgatggatagctgcaagagggactggtgctgatcgtgccacaaaactttgtggtggctgcaagatcac

SEQ ID NO: 34493 - DNA, 104 bp, Glycine max
  Clone ID: LIB3052-003-Q1-N1-H6
attgtcttttaacactcatcaccatggccaagcgtgttgtttccctttgtttcctgaattcttgaaagaagcgttctgcttgaacatgcagatagtgagaaacc

SEQ ID NO: 34494 - DNA, 418 bp, Glycine max
  unsure (1)..(418): unsure at all n locations
  Clone ID: LIB3052-003-Q1-N1-H7
ctcaatccaaaccccactctcttctttttcacttaggttgggctccactctctccgaccacttccactgcctcaaccctcgtcgactccctcaacaactctaagggcctccgatccttcctcacgtgcccctctccacacactccctctcacgcgtcgtcgtcgaaatcgggtacgaaatccaagcctggatcgaccgcgaaactctccaccgcctctctgcctcgctacgaaatcctaacattaataacaatgatttggtcgcgctgctgactcagtttcatgaccgagtctcgcagggcttcaatcgtgagttgcaagacctggttctcaaattaaagctcttctccttgctggaatcagttcttnttgactcaaaatgtccgaaccgggttcgcgaatatgctggtctggtaatg

SEQ ID NO: 34495 - DNA, 212 bp, Glycine max
  Clone ID: LIB3052-003-Q1-N1-H8
aaataaattttaaaaataaaaaaaaataataaatgaaaggtaataataaaaaaaattgtaggaaaaaaataaataaaaaaataaatatataaaaataaaaataaattaaatattaataatataaaaaaaagggccgtccccttatttataactattttaccccggatataatttccgtacctttttctttatggcttaacaatttttcctta

SEQ ID NO: 34496 - DNA, 152 bp, Glycine max
  Clone ID: LIB3052-003-Q1-N1-H9
cgttaaaacctaaaatgactggtaacgagacccattcaggttcaaaagcagccacatttgtgattaaggatctgaaattcacataccccggcgtctactgctagccaccgtctggcttcactccgctcattgatgatatcaatctcactcta

SEQ ID NO: 34497 - DNA, 87 bp, Glycine max
  Clone ID: LIB3052-004-Q1-N1-A1
attcaattcaatctgcctcgatcatggagaggaaaacattggtgtttttgttcttgctcctgcttgtcttatcttctgatgttacgg

SEQ ID NO: 34498 - DNA, 154 bp, Glycine max
  Clone ID: LIB3052-004-Q1-N1-A2
ctcagcaacgaggacgaagccagaagccccaagaccgtcggcaaaaggtacatcgcttcagagaaggtgatttgatcgcaatgcctactggtgttgcatggtggatgtacaacaatgaagacactcctggtggtgcccgttctattattgacac

SEQ ID NO: 34499 - DNA, 128 bp, Glycine max
  Clone ID: LIB3052-004-Q1-N1-A5
aaaactcaaaataactagttgtttattatgatgtgctccggagtaattttttgatcattaaccaaccgtcaagttattattaattactaattaagaaagtgtgatagaatgaattgttgaaagatatc

SEQ ID NO: 34500 - DNA, 109 bp, Glycine max
  Clone ID: LIB3052-004-Q1-N1-A7
ccatgtctagttttgcaatggctcttttcactcttgaactggctgctgctagtgtagtagggagtgtgttagtgaacattgtggacaaggtcactagtgtatgatggga

SEQ ID NO: 34501 - DNA, 67 bp, Glycine max
  Clone ID: LIB3052-004-Q1-N1-C8
ctctagccgaatcggctcgagcaggctctgcctgttgcttggatgattcatgataactggggggatc

SEQ ID NO: 34502 - DNA, 144 bp, Glycine max
  Clone ID: LIB3052-004-Q1-N1-D2
gaaacttgcatctaccattattattctatcacatccatgggcacagttgtgaagctacatgttgtcccagaatgtttgaaccaacagaaaacgaggtcgctcaggaggggatttggctcatgcccttcccctggggtgcttggt

SEQ ID NO: 34503 - DNA, 237 bp, Glycine max
  Clone ID: LIB3052-004-Q1-N1-D4
gagcaccctatggaaccacctatgagaccaacagcagcatgggacaacggtccttcacgccaaaccgtgaagttcataactgctgcaactattggcatcacactcttactcctgtctgggttgaccctcacaggcactgtcataggtttgatcattgcaacccctcttcttgttatcttcatccccatccttgtccctgctgcgtatgtgctgtttctggtttgcttattgctgttt

SEQ ID NO: 34504 - DNA, 206 bp, Glycine max
  Clone ID: LIB3052-004-Q1-N1-E2
cccattcacttttccacaagccttagttcttctcatttattctctttggcaaaatactttcactctctctaaccttccagttctcactaaacctcgtgaagctcgtgatggacaccaagataggttcactagacgcgcccaagcccaacagcaactacgtcatatcatgcaacctcaccagcaacgccgccatccagccctgcttg

SEQ ID NO: 34505 - DNA, 152 bp, Glycine max
  Clone ID: LIB3052-004-Q1-N1-E3
gagagaaaagtagtgtattaagactacaaattttcaatttgtcaatggcgtcgaggcaacaaaaagaggatcgagctgaggcagctgcgaaagttgctgcgaaagaactcgaacaactcaaccgagaaaaagaccgtgatttcagtgttggt

SEQ ID NO: 34506 - DNA, 414 bp, Glycine max
  Clone ID: LIB3052-004-Q1-N1-E5
ggaaaaacagtaaagatgggtttgaagaacaacatggtggtgctaaaggtgtgtttcttggttcttttccttgtgggggttactaatgcacgcatggaactgaacctcttcaaaagtgatcactcatcaagtgatgatgagtcttcaaaaccatgctgtgatctctgcatgtgcacagcctcaatgccacctcaatgccattgtgcagatattaggttgaattcatttcactcagcttgtgatcgctgtgcgtgcacacgctcgatgccaggccagtgtcgttgccttgacaccaccgacttctgctacaaaccttgcaagtccagtgatgaagatgatgactaggaattaatcaacaaaagctctctcaaatgaacaaagccctttaggctttctttgtcttttatgtaaggg

SEQ ID NO: 34507 - DNA, 220 bp, Glycine max
  Clone ID: LIB3052-004-Q1-N1-E6
gctgctggtggttacagtgatgacattaataagcaacatgggaccaccaatgcctacggcgtagacactggtagacagcattctagtggtggctacgatggtgacactaataaacatcatggaactactggtggctataatgatgacaccaatagacatcatggaactaccggtgtatattgtatatacactgataggcaacaacatgggactactggtg

SEQ ID NO: 34508 - DNA, 186 bp, Glycine max
  Clone ID: LIB3052-004-Q1-N1-F2
aaactggttactctattctagtacaacgaccatcttgacaggatagggtcatggcaatggaaacatgtgatgaccttctgtttcgatggggacagggttttagagcaaccttaacgtaacgagtgccatatgcaaaaactcaaagccgtcaaactggattaccgtatagagtctgaaggaaggctt

SEQ ID NO: 34509 - DNA, 284 bp, Glycine max
  Clone ID: LIB3052-004-Q1-N1-F7
gcacatagtgcagtggtatcaaaagggactgaagggcgatggcaagaactctaagattttgaagaatgctcaacctttcattgattggcttcagagtgcagaatcagaaaccgaggaagaataatttttcctacattctccgttacttatgtttacttgattgtgtcatgttctttatttccaataaaggttattgtatgccccatgtgttgttgaactactatactgtgcgaatggtgcatgcttgctggaccattatgtatgctttagtgccgtatgtgatg

SEQ ID NO: 34510 - DNA, 87 bp, Glycine max
  Clone ID: LIB3052-004-Q1-N1-F8
atccttttgtgttaaataggtggatggacaaacggactatggcccaatgcactggccgaagtgtataactaatgcctctatctatag

SEQ ID NO: 34511 - DNA, 391 bp, Glycine max
  Clone ID: LIB3052-004-Q1-N1-G3
tctctccattggtccttaaacactcatcagtcatcaccatggccaagctagttttttccctttgttttctgcttttcagtggctgctgcttcgctttcagttccagagagcagcctcagcaaaacgagtgccagatccaaaaactcaatgccctcaaaccggataaccgtatagagtcagaaggagggctcattgagacatggaaccctaacaacaagccattccagtgtgccggtgttgccctctctcgctgcaccctcaaccgcaacgcccttcgtagacctttctacaccaactgtccccaagaaatctacatccaacaaagtaaagggtattttggcatgatatacccgggttgtcctagcacatttgaagaacctcaacaaccttc

SEQ ID NO: 34512 - DNA, 385 bp, Glycine max
  Clone ID: LIB3052-004-Q1-N1-G4
ctcttcgacctcgcatcgcaccttcaacttaacctattccagttgtaatcgtaaacgctttgctagaagaagagacaaagtgtgtctgtgtgtgtgagagagagagcaatggctggctcgtgggcacgccgttctctgattgttctagccatcatttccttcggatgtctatttgcgatttccattgctaaggaggaagccaccaagttagggacggtcatcggcattgatcttggaacaacctattcatgtgtcggtgtttacaagaatggccatgttgaaatcatagccaacgaccaaggtaaccgtatcaccccatcgtgggttgctttcaccgacagtgagagactcattggggaggctgccaagaatcatgcagctgtca

SEQ ID NO: 34513 - DNA, 351 bp, Glycine max
  Clone ID: LIB3052-004-Q1-N1-G5
gccattctttccttggtgaacaacgacgacagagactcctgcagacttcaatctggtgatgccctgagagtcccctcaggaaccacatactatgtggtcaaccctgacaacaacgaaaatctcagattaataacactcgccatacccgttaacaagcctggtagatttgagagtttcttcctatctagcactgaagctcaacaatcctacttgcaaggattcagcaggaacattttagaggcctcctacgataccaaattcgaggagataaacaaggttctgtttagtagagaggaagggcagcagcaaggggagcagaagctgcaagagagcgtgaatggggaaatctcg

SEQ ID NO: 34514 - DNA, 95 bp, Glycine max
  Clone ID: LIB3052-004-Q1-N1-G6
ctgatgatcatatccactctggggcggtcccagacgatgtgatccattcaacaggggcctgcaaatacagtgccctacacacacagactggggtt

SEQ ID NO: 34515 - DNA, 160 bp, Glycine max
  Clone ID: LIB3052-004-Q1-N1-H1
gttcaatatcctagtacaccgtattaaagaatttaagatatgctatgatgagagcgcggttcccattactgttgctgggagttggtttcctggcctcagtttctgtctcatttggcttttcgtattgggaaagcctaacccccttctcatctttgtgccc

SEQ ID NO: 34516 - DNA, 106 bp, Glycine max
  Clone ID: LIB3052-004-Q1-N1-H2
taccaattgaacttgcgttgctgaagaataacatagtgaagtgtacacgctgcattaactcctcattcttcctctctaccttttcattaataatgaatcttgactt

SEQ ID NO: 34517 - DNA, 148 bp, Glycine max
  Clone ID: LIB3052-004-Q1-N1-H3
gcaatggcaatagcaatagatcagcaatgctgctacagaggctgagatgaaactgaaaattcttgtgtgtgagaatcatgagcgaagaagagaacaagggttgtgcttttctgggaaccaactccacctactcaagttttcttcttga

SEQ ID NO: 34518 - DNA, 146 bp, Glycine max
  Clone ID: LIB3052-004-Q1-N1-H5
caacaatgaatacactcctgttgttgccgtttcggttatgggcaccaacagcttggataaccagctcgaccagatgcctatgagattctatcttgctgggaaccaagatctatattatctaaaatatcattcatcagcatcaagga

SEQ ID NO: 34519 - DNA, 379 bp, Glycine max
  Clone ID: LIB3052-004-Q1-N1-H8
gtcttccatatccccccaaaaatgaagagcaccgagtctctgtgctctctttctcttttgtgcgcttcaccacctcatacctaccttcagccatcgctgatttcgtgctcgataatgaaggtaaccctcttgaaaatggtggcacatattatatcttgtcagacataacaacatttggtggaataagagcagccccaactggaaatgaaagatgccctctcactgtggtgcaatctcgcaatgagctcgacaaatggattggaacaatcatctcgtccccatatcgaatccgttctatcgcctaatgccatcctttgagccttaagttcgaatcatttgcagatataatgctatgtgttgaaattcctactaatggtct

SEQ ID NO: 34520 - DNA, 64 bp, Glycine max
  unsure (1)..(64): unsure at all n locations
  Clone ID: LIB3052-007-Q1-B1-A1
agaatgtgaagaaggtgaaattccacgaccacgaccacgaacacancacccggagagggaactc

SEQ ID NO: 34521 - DNA, 207 bp, Glycine max
  Clone ID: LIB3052-007-Q1-B1-A10
gaaaatctatgcttagaattagaaactccgattagaagatatgaaataactgatcgttgaaaattcatggaggatagagagcgggagagtccattaaagacacagctacacataatggtgcgtctgccgatgctggcatggagaatacaattgcacagtccaagacaatgcataacgattgatatcatgtcatactgttccaaacga

SEQ ID NO: 34522 - DNA, 248 bp, Glycine max
  Clone ID: LIB3052-007-Q1-B1-A11
acccggttcatgccactagtgtcacttatgtagccaccaaaagtgttggtggctacaatgatgacgctaataagcaacatgatattactggtgtctatcccgagaaagacaccggtagacatcattttggtcgtggttacgacggtgacactaacaagcaacatgatgctactggtgtttatcccggaatagacattggtagagatcatgggactaccggtgtttaaggcctaaacaccgacagacat

SEQ ID NO: 34523 - DNA, 317 bp, Glycine max
  Clone ID: LIB3052-007-Q1-B1-A12
ggagaagcatcaactccaattcccatctaaggaaacaaaggcacattctgattacttagtaaaagaatgcagcacttaagggcctccaattcaggatattccctatgttaaatacacagatttggaagattataagcttcaaggttatggttgatgtcgtcattctgaaccacagacatgtccttgatctcgagccactaacgcactcaatctcatctggtgctgcattttcatgcgattcaaatatctctgccaataactgccattatcattgatagagtcgcttaattaatcacacttacgatactacatctttc

SEQ ID NO: 34524 - DNA, 276 bp, Glycine max
  Clone ID: LIB3052-007-Q1-B1-A4
ggaagatagattaaatctcgcagtgtacgtgctctgtagtacattggagaggcagcatctgacacatgatctgtttgagactcgcagaattcgcagtttcgaccaaatgagatcatcatatatcaggatgtctcagtagactatatcatcatcacgtcgtccttggagtgacagatttacctagtacaatagttgcgcaaaatgtcacgttgagtcagtctaatcggcagttgcagttgacctagcacacttcatagatattgatcatacagagca

SEQ ID NO: 34525 - DNA, 373 bp, Glycine max
  Clone ID: LIB3052-007-Q1-B1-A5
cagaacatggtcagagcggcggagcatcaggcgctggaccccaccgccgtccacggcgtcacgcagttctccgatctcaccgaggacgagtttgagaagctctacactggcgtcaatggcggcttcccgtcatcgaataatgccgccggcggtattgcgccgccgttggaggtggacgggctgccggagaattttgattggagagagaaaggagctgtcaccgaagttaagttacagggtagatgtggatcatgctgggctttcagcaccacaggatctatagaaggagccaattttcttgccaccggaaagctcgtcagtcttagtgaacaacagctccttgactgtgacaacaagtgtgacataccagaaa

SEQ ID NO: 34526 - DNA, 360 bp, Glycine max
  Clone ID: LIB3052-007-Q1-B1-A8
aagaaatgaagagtactatcttctttgctctctttctagtttgtgccttcaccatctcatacctgccttcagccaccgctcagttcgtgctcgacactgatgatgatcctcttcaaaacggtggcacatactatatgttgccagttatgagaggaaagggcggtggaatagaagtagattcaactggaaaagaaatatgccctctcactgttgtgcaatcacccaatgagctcgataaggggattggactagtctttacatctccattacatgccctttttatcgccgaaggctatcctttgagcattaagtttggttcatttgcagttataacgctgtgtgccggcatgcctactgaat

SEQ ID NO: 34527 - DNA, 393 bp, Glycine max
  Clone ID: LIB3052-007-Q1-B1-A9
agatgttcctacaattcagattgcattccagtactcagttgtagttcctcctcaggaactttctgattctaattcaggaggggtttctacaaatagaaccaagcactcccttcagcgtcggctaaggatccgaacattgcaatttggtgttgctcagaacattcatgaactttatgatagctgtgatcccgaagttgttctatctttgcttgttcacaaggttatattagcctctttggaggaaggagttagggagggtagaattttgcttcaagaatggctagtgatcctgacagctcagtacaatgatgcatataagcttattcagtatgataatggaagtccataagatctcagattgatgttgcattctctcaatgtcctcaattgcag

SEQ ID NO: 34528 - DNA, 212 bp, Glycine max
  Clone ID: LIB3052-007-Q1-B1-B10
agtccatccagtggagctgctaatacggctgcagttactggagtagcttatgaagcattaggccttgaatctgctgcgacaacttcaggcgattttttcgcggatctgatttcttcacagcgggatgacattcgcaaggtccgtgacatttcagggtcattccgttgggtcacatttctcgctctggacagatcacatttcatatctgacgc

SEQ ID NO: 34529 - DNA, 393 bp, Glycine max
  unsure (1)..(393): unsure at all n locations
  Clone ID: LIB3052-007-Q1-B1-B11
gatgccactaagggttctgaccatttgagagatgtgtttggcanagctatggggcttacggacaaaaatacctttccccaaccgggggtcacactaatggagctgcacacaaagaacgttctggatttgaaggtccctggacctctaatcctcttaatttcgacaactcatacttcacggagttgttgaatggtgagaaagaaagtctccttcaactaccttctgacaaggctcctttgtctgaccctgtattccgccctctcgttgataaatatgcagcggacgaagatgccttctttgctgattacgctgaggctcaccaaaagctttccgagcttgggtttgctgatacctaagcaacgtttaagggattgttgaaaaagcatggtgccc

SEQ ID NO: 34530 - DNA, 399 bp, Glycine max
  Clone ID: LIB3052-007-Q1-B1-B12
gaaatggctgaagcacaactacgagaccagcatggcaaccctgtcccactcaccgatcaatacggtaatccggttatcttaactgacgagcgcggtaatcccgtccaactcactggtgtcgctaccaccgctaccggcacagcaggttctgggtttgggtcctatggtaccggtgcttacggtggtggtgcaagtgcaaccaccgttgcagatcttttggcaacccaaccaaggagtggcagggaggctagagagcttcgtcgttcctccagttcaagctctagctcgttttggataaatgttttatagtctgaggatgatgggcaaggtgggaggaggaagaagggagtgaaggataaaataatagagaaactaccacgggtaggatgaaggaataat

SEQ ID NO: 34531 - DNA, 404 bp, Glycine max
  Clone ID: LIB3052-007-Q1-B1-B2
accctctcgaattgaaaaaaaaaatggtgtatggaggagcaatgtgcgctcacgcgcacaaattcctactctcgccccgtgccctcaacctttgccgtcaaaacaccactcgccttcaacaatttcaaactctcactccgctccactctcaatcccttcctttcaacttcaaaaactccgccacccccttcaaacccaccctcatccgcctctccgccctctccaacgatggctccggcggaaacggcccacatggcggcgccggcggaggcggaggctctgacggtcccaattctggcggcgccggcgatggaggaggcaagtggtccttcttgtcatggtacttggctcttcttggaaaataccctgttgccgtgaaagctctaacatcttcaattttgaat

SEQ ID NO: 34532 - DNA, 228 bp, Glycine max
  Clone ID: LIB3052-007-Q1-B1-B3
gtttcgtggaaatcccgaaatttaaccatgcttctccgaaacgctgcctccgccgcttctgcttcgtccctctccctcttcagccctacctccgaatctctccgttcggttcccgctcgtggattggtggttcgcgccgcgacaggatccacgaattaccgcgcccttaccggcgtgatctttgaaccgttcgaagacgtgatgaaggagctcgatctcgttcccacc

SEQ ID NO: 34533 - DNA, 247 bp, Glycine max
  unsure (1)..(247): unsure at all n locations
  Clone ID: LIB3052-007-Q1-B1-B4
gtttgcaatactagcgatagctgataagagagatacgancatgatcagacaaaaggaagagttgagattccctttgaagaaaaaatggcatccaaaaggcaaactatgaaaccgggtaaaattaagggcgaactgaagaaaagaagaaccaaaccattgggaataattgaaaaaaaggtcaagctgcaaaggagaagacccaagaaatggcccaagctgcaaaggagaagaccccagaaaaaaccca

SEQ ID NO: 34534 - DNA, 282 bp, Glycine max
  Clone ID: LIB3052-007-Q1-B1-B5
acataacaatgtcgttgattccaagtttcttcggcaccgggcgaagaaccaacgtcttcgaccccttctccctcgacgtgtgggacccattccatggcttccccggcaccaccgccctctccgctccgcgctccgagacggcggccttcgccatccgcgcatcgactggaaggagacggcggaggcgcacgtgttcaaggcagacctgccggggctgaagaaggaagaggtgaaggtggagatcgaggaggagggaagggtgctgcagataagcggacagag

SEQ ID NO: 34535 - DNA, 434 bp, Glycine max
  Clone ID: LIB3052-007-Q1-B1-B6
gggatattaactaccagtttccacagcttgccggtgtgcatctttctgctttgattccgtctgctagtgatgatgcaatcagccttattacatcactttgctcctgggatccctgcaagaggccaacagcttcagaggctcttcaacatcctttcttccagagttgcttttacattcctccatcccttcgcaacagagcagtagcaagaactcctccacctgctggaaccagaggagcactggatcagcaagaggtcaagagatattccggtgctttacctacttcaaagctctccaataatttttcttccatgaaattacatcctcctttagcttcaggtgtgcaacggaagcttgatatggtaaatcaggatggaattaagaacgaaaagccagtgaggactactaaaccaaaatatcgacagccaggaaag

SEQ ID NO: 34536 - DNA, 132 bp, Glycine max
  Clone ID: LIB3052-007-Q1-B1-B7
gttgagagggatccatcttgccaacctatgacgatattggactttgagcttgcatcacgactactctcacacgaggaatctcgagagctgactttccgttgcacgtgagattcctaccctcggctattcgct

SEQ ID NO: 34537 - DNA, 296 bp, Glycine max
  Clone ID: LIB3052-007-Q1-B1-B8
cggcaacggatatctcggctcttgcatcgatgaagaacgtagcgaaatgcgatacttggtgtgaactgcagaatcccgtgaagcatcgagtctgtgaacgcaagttgcgctcgaagccatggggccgagggcacgcctgcctgggtgtcacatagcgtttctccaacgcatagatgtaacaatgttgcagcacagggtgtatgctgaccacgcgccagcagacgcctcgtggcttgtagcccacctgccaaggagatgacttgcgagtcttcccatgcggcatatgagaagaccca

SEQ ID NO: 34538 - DNA, 376 bp, Glycine max
  Clone ID: LIB3052-007-Q1-B1-B9
ggggccccgagtggttctttccatttgtgatatgtgtttggccttcctctggggcttactgtgcattatatccttgctctatcagggggtcagactattgcacctgcgctcacggagcgttgtggatttgatggtcactgcatctctagtcctcctactttcgacacctcatacttcacggagttgttgactggtgagaatgaaggtctccttcagctaccttctgacaaggctcttttgtctgaccctgtattccgccctctccttgataactatgcatcggactaagatcccttctttgctgactacgctgaggctcaccatacactttccgagcttgggtttgctgatgcctaagcaacgtttaagggattgt

SEQ ID NO: 34539 - DNA, 289 bp, Glycine max
  Clone ID: LIB3052-007-Q1-B1-C1
gcgcgctttttcgcttttcaaagtctctcccttatgccccttcactctcccttaaaccctccatggtcaccttctcctctactcccaattcaggcttttgcagtggagaaatgcagcagaaggaggaagaagagacggaagaaccaattggacgtatgattctgccgaggcaagacgcgaggcagatgaaatgtctgagagtgccaaagaaacgatgaatgaaggctatgacagggccaaggatcaagcgcgggaagccaaagacagaacaaaggatttcgcacacgac

SEQ ID NO: 34540 - DNA, 389 bp, Glycine max
  Clone ID: LIB3052-007-Q1-B1-C10
gaaagtcttccatagccccccaaaaatgaagagcaccatcttctttgctctctttctcttttgtgccttcaccacctcatacctaccttcagccatcgctgatttcgtgctcgataatgaaggtaaccctcttgaaaatggtggcacatattatatcttgtcagacataacagcatttggtggaataagagcagccccaacgggaaatgaaagatgccctctcactgtggtgcaatctcgcaatgagctcgacaaagggattggaacaatcatctcgtccccatatcgaatccgttttatcgccgaaggccatcctttgagccttaagttcgattcatttgcagttataatgctgtgtgttggaattcctaccgagtggtctgttgtgg

SEQ ID NO: 34541 - DNA, 393 bp, Glycine max
  Clone ID: LIB3052-007-Q1-B1-C11
gaaagtcttccatagccccccataaatgaagagcaacatcttctttgctctctttctcttttgtgccttcaccatctcatatctaccttcagccatcgctgatttcgtgctcgatcatgaaggtgaccctcttgaaaatggtggcacatattatatcttgtcagacataacagcatttggtggaataagagcagccccaacgggaaatgaaagatgccctctcactgtggtgcaatctcgcaatgagctcgacatagggattggaataatcatctcgtccccatatcgaatccgttttatcgccgaaggccatcctttgagccttaagttcgattcatttgcagttataatgctgtgtgttggaattcctaccgagtggtctgttgtggagga

SEQ ID NO: 34542 - DNA, 402 bp, Glycine max
  Clone ID: LIB3052-007-Q1-B1-C12
cggctcgagcgagaatctcgacgccatggacaacgaggtcgcacacaagctggcttcttacaccgccccctaagtcgcttctcaagtacatgccctccgcccccgactctgacaacgacatcggcttccgcaagccgcagcgcatcatcgatcgcgacgacgactatcgccgccgtcgcctcaaccagatcatctcgccggcgagaagaccccggacccttcggtgaggacctacgcggatatcatgcgcgaggaggctctcaagagggagaaggaggagactctgaaggccatcgctatgaagaagaaggaggaggaggaggccgccaagggcgcgccgcctcaacagcagcagaaaaggaggaaccgctgggaccaatctcaggatgacggtggtggcgc

SEQ ID NO: 34543 - DNA, 281 bp, Glycine max
  unsure (1)..(281): unsure at all n locations
  Clone ID: LIB3052-007-Q1-B1-C3
tatggcttcaactctgcttcncctggcaaccttcttcttagttctctccgcttcttatctccagattgctggggcgaaagcacaaccgttgactagtctcaagcttaactctccgatccttcaggagtctattgctaaagagatcaatgaaaatcctgaggcatgatgggaggctgctataaatcctcatttctccaattatacagttgaacaatttaagcgccttcttggagtcaaaccaacgcctaagaaggaactgagaagtacacctgctatatctc

SEQ ID NO: 34544 - DNA, 338 bp, Glycine max
  Clone ID: LIB3052-007-Q1-B1-C4
ggaagccgtatctatgcttaccctggcaatcttgatctcacttgtctctgccgattaccacgtcatagctgaggcgaaaccggtacagttgaggagtcacgatctaacgtcgccgatactgcaagagtctagagctgcagagatgaatgaaaatcctgatgcagtgataggacgctgctacaaatcgtcagttcgctaattatacacttgagcaattgaagcgccttcttggagtcagaccaacgcctaagaacgaactgagaagtacacctgctatatctcagccaaagtcattgacattgccacagaattttgatgcacggacagcttggtctcag

SEQ ID NO: 34545 - DNA, 221 bp, Glycine max
  Clone ID: LIB3052-007-Q1-B1-C5
ctcacatatgagagatcaagctacgaatcactctctatcatgttcgcctaatcgcatccacaaagcttatgataagaggaatgcattgcagtctccatgatcgatgtgcatgtgtgactcttatgtatattttggactgtattagtccgaccttctgtcagtcgtgtatgctctctaaaagcacgcatagccgtcgtattcgtattaggagttatggtagt

SEQ ID NO: 34546 - DNA, 408 bp, Glycine max
  Clone ID: LIB3052-007-Q1-B1-C6
atccgagacagaaaaaggggttagggtttgttcttgtgatcgaagctaagcgaagcaaaatgggtggatcagtgagggacgtgaagtcgaagggcgaggtcgacgaggtggtggcgagtggctctccggttatcctccacttctgggcgtcgtggtgcgaagcttccaagcacatggaccaactcttctctcacctttccactgatttccccaacgcccgcttcttaagggtcgaggccgaagagcaacccgagatttctgaggcttactccgtctccgctgttcctttctttgccttctgcaaggatgggaagacctttgatacattggagggagctgatccgtcaagcttagccaataaggttgctaaagtagcaggctcaattaaccctggagaatctgcatctc

SEQ ID NO: 34547 - DNA, 299 bp, Glycine max
  Clone ID: LIB3052-007-Q1-B1-C7
gtggtgttagatctgtacccgcctagccattgatttggaaaagtccaagcttcagagatgagtaagcttcagagtgatgctcttagagaagctatctcaggaatcatgactgattccaaggaaaagaacaggaaatttgtggagaccattgaactccaaattgggctgaaaaactatgatccccagaaggacaagcgttttagtggctctgttaagttgcctcacattcgtcgccccaagatgaagatttgtatgcttggagatgcccaacacgttgaagaggctgagaagataggatt

SEQ ID NO: 34548 - DNA, 360 bp, Glycine max
  Clone ID: LIB3052-007-Q1-B1-C8
gtagtgttaaataagtatacgtctgaccattgagatagagacttttatactgcaaaaatatgtaagcttcatactgatgctcttacacaagggatcgcatgaattatgactgattccatggaggttaagatgaaatttgtggagaccattgaactccaaattgggctgaaaaaatatgatacccataatgacaagcgttttactaggtctgttaagttgcctcacattcctcggtacaagatgaagatttgtatgtttggcaatcttaagcacattaaagaggctgataagatgtgattggcctagatggatgttaaggacctaaacaagcttaacattaataagaaagttgcagaaaat

SEQ ID NO: 34549 - DNA, 318 bp, Glycine max
  Clone ID: LIB3052-007-Q1-B1-C9
ctcgagccgattcggcacgagagatcatacatagtagtgttggtgggttccacagatacctgggggtctcacagagatgcgccaacagaagcgatggcaagaattatgactgcttccaagggggtgcgcaggacatttgtgtatactattcaactccaaattgtgctgcagaactatgatcgctagcacgacaacccttttattggctctgtaaagttccctcacattccactccccaagatgaggatctgtatgcttgtagatcccaaacactttgaagaggccgatacgataggattggcctacatggctgtaccg

SEQ ID NO: 34550 - DNA, 271 bp, Glycine max
  unsure (1)..(271): unsure at all n locations
  Clone ID: LIB3052-007-Q1-B1-D1
tagtactagtggagaagtctttcattattcacttggatttagcaccaccaagatgaaggttcaagaaacgaagtcgcatgttcatgcacttggggaagaagagaaggtgatgacaaggaagcagaaggctgagtccaaggcacatgaagtggaacattctccanagaaggccaaggtggaaaaagaagatggccacatcaacgggaaatctgaaactggcgttgcagaagaatatgatgagttctgcaaagccacaaacgagcaccttcct

SEQ ID NO: 34551 - DNA, 403 bp, Glycine max
  unsure (1)..(403): unsure at all n locations
  Clone ID: LIB3052-007-Q1-B1-D12
tgctatcgaatactcggataaggagggtaagggcggtgaagtgcagtacttcaatccccttttctctcttctccttttatttcatcactctcttcgttcctttcttcttctccaaagttttcaattttcacacttttcgaaacatcttttcaatggcgtcccaaattacccgtgagtggtctggaatcaatacattcgcacctgctacccagactaagttgcttgaactcttgggaaaacttaaacaagagaatgtgaactccttaactatacttgtgatgggaaaaggtggtgttggaaaatcttcaactgtgaactccatcattggggatagagtggtttcgattaatcctttccagtcggaagggccaagacncgtgattgtgtcgcgattcaaggctgg

SEQ ID NO: 34552 - DNA, 386 bp, Glycine max
  Clone ID: LIB3052-007-Q1-B1-D2
gggtggagatcgatggagtgaacctgttggaggagcacgtccagcgtgttatggtgaagaacgccacacccgattggcttcccatcctctccggttcctccttctgggtcccacctcctccttccccctttcttcacaagttctccatctcctctcatcccttcttccttcaagatgacgaatctgggaattctattgccacccctcgacggacataggttactgtgcaactcaaggttatgacacccgctgaacacgtgtctctctctgaagatgaggatggatgatcatcatgggttgcaaactaagatccatcagacggaactaatctatttgaagatcaagacgacagtgcatcaaaatgggaattcctgcacaggtgaact

SEQ ID NO: 34553 - DNA, 242 bp, Glycine max
  Clone ID: LIB3052-007-Q1-B1-D5
cacacacaactactacaagtacttccttacaatcaaaaccaacaacaactatggcaagttatcaaaagcactacgatgatcagggtcgcaaggttgacgagtatggcaacgttgagaagcaaaccgacgatcacggcaaccctgttcatgcagctactgtcacctaggtagccaccagaactgctgctggtggtcacagtgatgacagtaataagcatcacgatacaaccaatgcctacggc

SEQ ID NO: 34554 - DNA, 227 bp, Glycine max
  Clone ID: LIB3052-007-Q1-B1-D6
gcaaaatgaccaagttcacaatcctcctcatctctcttctcttctgcatcgcccacacttgcagcgcctccaaatggcagcaccagcaagatagctgccgcaagcagctccagggggtgaacctcacgccctgcgagaagcacatcatggagaagatccaaggccgcggcgatgacgatgatgatgatgacgacgatgaacacatagagacgatagcatgggagaga

SEQ ID NO: 34555 - DNA, 368 bp, Glycine max
  Clone ID: LIB3052-007-Q1-B1-D9
ttctctccattgtctttgaacactcatcaccatggccaagcttgttctttccctttgtttccttcttttcagtggctgcttcgctctgagagagcaggcacagcaaaatgagtgccagatccaaaagctgaatgccctcaaaccggataaccgtatagagtcggaaggtgggttcattgagacctggaaccctaagaacaagccattccagtgtgccggtgttgccctctctcgctgcacctttaagcgcaatgccgttcgtagaccttcctacaccaacggtccccaggaaatctagatacaacacggtaatggtagttttggcatgagaatcccgggttgtcctagcacttattaagagccgcaag

SEQ ID NO: 34556 - DNA, 384 bp, Glycine max
  Clone ID: LIB3052-007-Q1-B1-E10
gggggggttagttccaatgccaacagcaccgtcaccggtttggatcagaaagggaagaagaagggaatgcctgctaagaatttgatggccgaacgacgccgccggaagaagctcaatgacagactctacatgctgaggtccgttgttcccaagattagcaaaatggacagggcttcaattcttggggatgcaattgagtatctgaaggagcttctgcaaaggatcaatgatctgcataacgaattggagtcgacgccggtgggttcttcgctcactccagtctcaagtttccatcctttgacgcctactcctcctacgctgccgtgccgaatcaaggaagaactgtgccccagctcattgccaagccccaatggccaacctgct

SEQ ID NO: 34557 - DNA, 385 bp, Glycine max
  Clone ID: LIB3052-007-Q1-B1-E11
cttccaccacatcgagttctggtgcaccgatgccaccaacgcctctcgccgattctcttggggacttggaatgcctattgtggcaaaatctgatctctccaccggaaaccaaatccacgcctcctacctcctccgctccggcgacctctccttcctcttctccgctccttactctccctctctctccgccggctcctccgctgcctcctccgcctccattcccagtttcgacgccgccacctgccttgccttcgctgccaaacacggcttcggcgtccgcgccatcgccttggaagtcgccgacgcggaagccgctttcagcgccagcgtcgcgaaaggagccgagccggcgtcgccgccggttctcgtcgacgatcgcaccggc

SEQ ID NO: 34558 - DNA, 401 bp, Glycine max
  Clone ID: LIB3052-007-Q1-B1-E12
ggtatttttggcatgatattcccgggttgtcctagcacttatcaagagccgcaagaatctcagcaacgaggacgaagccagaggccccaagaccgtcaccaaaaggtacatcgcttcagagagggtgatttgatcgcagtgcctactggtgttgcatggtggatgtacaacaatgaagacactcctgttgttgccgtttctattattgacaccaacagcttggagaaccagctcgaccagatgcctaggagattctatcttgctgggaaccaagagcaagagtttctaaaatatcagcagcagcagcaaggaggttcccaaagccagaaaggaaagcaacaagaagaagaaaacgaaggaagcaacatattgagtggcttcgcccctgaattcttgaaaga

SEQ ID NO: 34559 - DNA, 409 bp, Glycine max
  unsure (1)..(409): unsure at all n locations
  Clone ID: LIB3052-007-Q1-B1-E2
aaaaaacattgcccttgttctttcanagttacaanacacaagtacacagaacaacagcaacatatggcgtctgaacaattggctcgcagagagaacaccactaccgagaaggagattcacgttgagaaacacagggttcccaagatggccacccacttcgagcaccttgcggagcaagctaaagaatctgacatcaccgctgggaaggatactccgcagggtagcatagaagccttgcaagctggagagagggtcaaagatcatgcaggaaaagccatgggagatattggtggacgtgggaaagccagagagactcacgagctgggtgcacactttgaaaccctggctgacaaagtaactgaccatgcagcagccaatgtacttggaaacaaagagagtctaagagaaa

SEQ ID NO: 34560 - DNA, 383 bp, Glycine max
  Clone ID: LIB3052-007-Q1-B1-E4
ggcgaccagagccaagctttctttagctatcttccttttctttcttttagccttgatttcaaacctagccttgggcaaacttaaagaaaccgaggtcgaagaagatcccgagctcgtaacatgcaaacaccagtgccaacagcaacggcaatacactgagagtgacaagcgaacatgcttgcaacaatgtgacagtatgaagcaagagcgagagaaacaagtcgaagaggaaactcgcgagaaggaagaagaacatcaagagcagcatgaggaggaggaagaccaaaatccctacgtttttgaagaagataaggatttttcgaccagagtcgaaacagaaggtggcagcattcgggttctcaagaagttcactgagaaatcca

SEQ ID NO: 34561 - DNA, 195 bp, Glycine max
  Clone ID: LIB3052-007-Q1-B1-E5
gggaaattagacataagaaatgcgattatagagagcgaatagaatattgttcttcagaactctgtacgcggatctcctttagtcctttgtctccgttccgtcgtcaaccctacctttggatctgcgtttggccttcacgtcttgaagtccgaacgacgaagacgatgagattcctgacagcgtaatcatgtctgg

SEQ ID NO: 34562 - DNA, 346 bp, Glycine max
  Clone ID: LIB3052-007-Q1-B1-E7
aacaaatatttcactagctactactcttcttagtttctctgttgtatcatttttattgctatatcctaatcaaacttcactctcaaaatgagtgatcccacactagcacaacagcatctagtcaaagtccacacaacaacacacgaaacagttgcttacacacacaatcataaccaaacaccctcaataaatgcctcaggtgaaaagaagaagattgtgggggtgttctacacagggaatgaatatgccaaattgaatccaaattttgttggatgtgttgaacgtgcattgggaatacctgagtggctggaatcacaggggtcatcagttcattgtcactgatgac

SEQ ID NO: 34563 - DNA, 353 bp, Glycine max
  Clone ID: LIB3052-007-Q1-B1-E8
gtggacaggttgaagtgggggaatgatttcttgaagaagaggttggagcctggttcacactcccaggttagtcctcaggcactggagagcatcaaaagggttaagaagttgaccaagatgtctgagaaggttgccactggtgtcctctctggggttgtcaaggtgtctggattcttcacaagttctgtagtcaactccaaagctggaaagaagttctttagccttcttccaggggaaattgtccttgctaccatggatggattcaataaggttttggatgctgcagaagtagctggaaggaatgtcatgtccacttcatcagttgtgaccaccggcctagtttcgcataaata

SEQ ID NO: 34564 - DNA, 351 bp, Glycine max
  Clone ID: LIB3052-007-Q1-B1-E9
gtggccaggttgaactgggggaatgatttcttgaataacaggttggagcctggttcacactcgtaggttagtcctcaggcactggagagcagcaagatggttaagaagttgaccaaaatgtctgagaaggttgccactggtgtcgtctctggggttgttaaggtgtctggattcttcacaagttctgtattgaactccaactctggaaataagttctttacccttcttccaggggaaattgtccttgctactatggatcgattcaatgatgttttggatgctgcagaactatctggaaggaatgtcatgtccacttcatcacttgttaccaccggcctaatttcacattta

SEQ ID NO: 34565 - DNA, 235 bp, Glycine max
  Clone ID: LIB3052-007-Q1-B1-F1
acgcgtacgtaaaaccagatattcagctcgaggtcagattcattcagaatacttaacaaggatacaacacgtgatgatttgttcagcaaacattttccaaaaattcatgatctgaattttcggatataaacttggaaccaaaattggttcacggatccgaatagaggcttggcgataaacaagttactttccgcggagatgagttcgagttgaatttttccaatacggagagtcc

SEQ ID NO: 34566 - DNA, 391 bp, Glycine max
  Clone ID: LIB3052-007-Q1-B1-F10
atggatgcaaagtctttgttgtgaacagagactttgaccacaagcgagtggtgagttccatggtggagcaagtagataacgttgacgattcacgactgaagttggtctcagtccctgatggtttaggacctgatgatgatagaaccgatttgcgcaagttatgtgattcgttgctgagcaacatgcctgctatgcatgggaagcgcagagatgatattcacttacaacgttccaatagaggcagccttattgttgcggatgtgtgcctgggatgggcgttggatgttgggagtacattgggaatctaatgagccctgtattgcccctcagcagcagcttttatgtgctctgctgttcatcgtcgtgaggcctattgatgatgggatcatgg
